United States Patent Application Publication US 2007/0161031 A1 - sequence listing, part 27

SEQ ID NO: 33992 - DNA, 2300 bp, Homo sapien
gaaatggaggtaacaaatgttcatgcatgcagatgacattttcattgtaaaaggaagaaagggaccattcagaaaaacacaagaatagtaaaatgaaaattagtatgaaaccaacaaaagatatgaaaccataatctgaagacatctaaacaggagataataaagataagaaaacacagcagtgaatttgtgtaccatgtctgcttttaaagcaacatctctagacaaacacacaaatatacacatgctgtccccttcaagaaaatcattttggaaacccatcctcttacacttatgcgtaaacatttttgaaatttcttcttctttttctttttttttttttttttttttgagactcaagctcactgcaacctctgcctttttggctcaagtgatcctcctgcctcagcctcctgagtagctgggaccacagggacacaccaccacgcccaactaattcttgtatttttggtagagagagggtttcaccatgttgctcaggctggtcttgaactcctgagctcaagcaatttacctaacctcagcctcccaaagtgctgggattataggcatgagccactgcgcctggcctaagtttctttagtttataagaaaccaagtatacaaccatacacataattcaatatcaccactttagtcaccactttttacccaaaataatacaacccagcctaaatgcaaactttatttccagtaatttaataaacttcccaaatattaatacagttcactcatgtaactgtcagctattgctgcataacagacaacccccaaaatcacagtggcacacaacaataagtagttatgtctcactcaagagtcttcatgtctgctgggttgctctgcttcaggctgtgagtcctccggctggctgagatgcctctgcaatacgtgaattcagtctggtacccagatgctaataggcagctacttgacctcatggcagaggtcagatgttcctgagaacagaaacacggtgcttctaaaggcaagactggtggtacactgctatctctccacattccattcttaagcaagccacatggccaagtccaaggtcaataaatgactctcacagagttattggtagatggagtgaatatatgataatctatcaattcctaaattatgatttctcaatacagaagtcattaaaaaggcattttccaaggaggagtgccaaaagcgatgtaataacgttatcattgaaataagtgtatagctacataatgggaccatcttggatgcacaagtttttgtttgcttttaaaagttattttaatgccttttatataagtcagacttcatgcttgcctcagtgaaaacatgcaattcctatttatgattggattgtcctgaaacctatacacagaggctcctaaaagctatcaagtcaacatttccttatttcttcactttcattttaaaaaaaatcttttaaaaaggaaagaaaaataccagaatctccattctgatgtcgccatgctgaggcttggcaagccaaaaatataaggatgaaaaggcaccaccaattcgtgagagtcggctaggcttcttcgtgctattccggacagtcaggagccctgggttccagccaggtgatcgggtcgcttatcggctcctatcacctcagctgcttgctccacttctccgggtttccagttctccatcgtaaatgtgctccctggagcagcctcccctgacagtcagacatccaccaatccattagatgctggaggttttctggagacactgtttccctaatgaggactgctttgtacagtcactgatagcagctctagaaagtgtaacagcttttttatctcaaaagctgttcctcgcgctccggctctcggggagccgccttccagacctgtctacccgggagccccctccccgcgcacttcccagacttctcctgagacccgagagcgctggttttcccccactcgcgatagtcctgggatgacagtgcgggccccctcactcgcagctcccaccacctggcggccaggggttcgcggcccgggcgggcggcgccagtgccctctggagctgggcggggagggcggggcgggcggagcgggcatggtggggtgtcgggggccgcaggcgtagcgctctcgccctggccatggagcggccggcgcccggcgaggtggtcatgagccaagccatccagccggcgcacgccactgcgcgcggcgagctgagcgcggggcagctgctcaagtggatcgacaccaccgcctgcctggcgggtaggcgggcgccggggc

SEQ ID NO: 33993 - DNA, 2300 bp, Homo sapien
gtatttacctactgtattttcaagttctaaaaagatttgcctgttgtttatgtgcaagagagttactgaactatgcatttgcaaaagttaataactaatgtgaattttttttccttcaagtaaccagaagtattttgctgttttgccctggaaacaggcgctttagaagacgtgaaatacagattgcaaaggtatatgtttcaaaaaactttcacattcatttgactatctttctggtttatttggcattattgattctcatcaagttcactatgacttgagcaagccttacatcaggcctcaaaacatgaggttctgttcaccccacttgtaaattaaagcagcactggaaatatgtgaacttatccaattgaagaggagctttggagcagacaagtgattaaatcagaaatcatttccatttgaattgcaaaaatagatgtccttactcctaatgagtagaaattgacatttaccaagattaataattaatcactgaactgccacataaatttccagttcagaagttaaatgcatgcagtaaattcctaacctactttgggggatttcttcctgctgaaggtaaaaatgtatgctgcaggcttaataatatagatccctttgtgatcatcttgattctgcttgccaaaaataagctacatgattccaaccattttcagatacaaatgacaactaaaacacttcaaatctatttctggcagaaaaacctgtacacaaaaggtataagagttgagaaagtagggacttcaccaaaagagttgcaaagaaaaaaaatcctcagttattttggccttggagagagagtatatatgtgcactgatttattaatctgtttcaattttcaaactcttgagtaaatattttcttattttgcaaattgaatttatattttctcatttgtttaaatgataattaaatattcagaatgtgcttagagttcaagacattcattagttacttggctacagatttttattttcagtgattgtattaaaagcatatttaaaatgttcagacttaattgtaagacagatgagagatgtaaaagaactggtttctgaggatgtttgtatgtagagctgtttcaactggaaagcaatctgcacaattctggaatgcgagcccagaattgtaaaattgcattcctattaggatatctttattctcctgagacatttagccagggcactgagatacaaaagtggctgtgtgaagcttcctctgacctttaaattcagaaagaatgaggccagaagaggaatcttgctgcaaaggaccatttgtttgcagggctggctcctctgtcttcctttgcaagaattctatttgcttacctgtgagcacaacactccttttcctgcagcttgacaacctgcatcacaacaaggactcatttctcaagccatgtttaaggcaaaagagcttcaattaacatgggaagacaggatggaaacttcaaaaaagggacagaaaaaaaggcccattttcgtttcacagtgaaaagagtacatggaaaatacgcttaaaagtcagtgaagaaattagccaatcatgcattatcttgattaagtgaaacctaacttgctcattaagaaattcccataatttttgtgagtgcaattcattctctctcccttccccccacctcctcctcctcctcctccctctctctctttttttctatctctctctgatatggttcagttgtgtctccacccaaatcccatcttgaattgtaatccccataatccccacgtgtcatgggagggacctggtgggaggtgattggatcatgggagcagtttcccccatgctgctctcgtgatagtgagtgagttctcacgagatctgatggttttataagcgtctgtcatttcccctgctaatgctcattctcctgccaccctgtgaagaggagccttccaccatgattgtaagtttcctgaggcctctccagccatgaggaactgtgagtcaattaagcttcttttctttatcaattacccaatcttgggtatttccttagagcaatgttagaacagactaattcattttctctctctctcatagttatgctactatatagaattattgaagaattaattcaccttcgtaagcagctactagcttaaaaagaattaatgtggctctcgaaacacctactttattcgttaaggagtaacttaggcactggttaagaacagagtccaattgtctttggaaccttattaagacaaaaagactccaggaaaacgtaggtaactaaaagccaagtcaat

SEQ ID NO: 33994 - DNA, 2300 bp, Homo sapien
ctgagcagcacctttatagggagtattctataagagatggagccttgatatactaaaaattttctgggttaaggccaatggaagtagataattgaacaaaaaaattacataatgctaaccttgaagttgagtctgtaaactgtggcaaccttatacacatttgagcattttgagcaaaagttcattaagagaggctgactggctcagcttcgcttcaatcacccaatcattgcaggtcattagaaacaaaaagaagaatatgaatgccatatcctaaccacccaataactgtaggtcattagaaactgacagaagaattcttaagtcagaaatggcaaattacatctcttggaaattaatctacttaagccagtgtatttttttcccccacttttcccccctcatttcctttattggcttaatttttgtccttttaataaaagtgctttttttcttatatcttttttttaacgataatgtctgtcctctattacttttaatcttttgctatcacactctatggcttcttcatttaatcctgtatcttctagtcttctcatctttttatacctcactttcctcatgtttttttccttgtcattaacaccagtatagaaagtccttcctcttcattttcccgtctttatgtctggttgccaaccgcgtttttgattctcgacctctcacttttgctaactgcccttccttaatcatctgttgatgttttattcctatcacttctgtcaatgctcacacccatttctttcctttccatctatctgtatatctccatatgcattttatgatcctcctactaaatgcttaaagctgtgtgtgtgtggaatagaacggtaccttcctccacgcgaatccgatttccctctcctcccatagctacttcttgtctattcatcctttccagatgtcgccctgtcccaccccatctgtccccttcttccccgtgtgaagcccatcttctttctaaccccatttgcacccgtctgattttacagtcaaggacttcaataagataaatgatgcagagttctactgggaaccagattgtgtgtgtttctgaaacttttgcgcgtttactgaaatgggattagggatttggatacagaaacattctcgggcagcctttcagccctggcacagctttgtacaccttggagcgcgctggggcctattctaacgggcaaggacagggaagtctttcaagaccttttctggccttttccactccaggggtcaggatgaataggcatcactgacccaaactgttaaaccaggccgggtggggaagcctggggccctcttctgcggcagatctggcggggtgtccagggcgccgcggggctccgtgcaagaaggggttggggcaggggccgctgcggccgcaggagtcaccgggcctcctcgggaggtccgctcacctcttacagaggaggccgaccccaggccgggtgctcccctggggcgcagggcgcggccccgggcgccgccaccgcagcggcgccgagggccggaggtgcagcctttccccaggagagaaggcgagtcgctgtcggtcgctcagccagaaggtcgagggaaccgcgcgggtgtccctcgccagccggccctctgggaacagggcgggggcgacaccccagggagtagggctgaggaccgcaaaaatcaatcgtgggtaccggcgcggggtcacgcataggagaggagcgggagaggggctggtgggggccccagggcggctgaggccgtggctctgtcgtggactcggcgggcgccccgaagtctggggccgccacggctccagctccgccggctccggccggagactccaggccgcagtttctcctcctcccggcgccttctctccagtgaggagctgagcgcgggcggcgcggggggaggggtggcggcggagagaacagccagttgtttaaaatccttctagagcagtttctaattccccccttgcgcccgggttcggaggggggagggggaaggagagcgggtggagggaggagagcggagagggaaggcgggagggagggagtcggggagggagggaaggagggaggagactgccgctgaggcttagccgccaccgcgcgcttcggaaggccagagggagggggaggcctgtcagtctcgcgcgttgcctgggcgaagggggcggagctttggcgtggggcggccaatagtgggggtggctgcgtgggtcgccatggggacggggctgttcccggggaggctgtgatgggttgacaggtgcgtgacagtgggagctgctc

SEQ ID NO: 33995 - DNA, 2300 bp, Homo sapien
tccccaaagccagtcataaatcctggaaatattactttaattttctcccgcctttctttgtaaaaactggccataaagaaattatctgatctaccttttttgactgtaggtcctaagaccctcattgcagagagggtcccgccctacacccagaaggaaggaatgcatgcccagagagtccaagaagaatctagacagacaggccttgctgggtttccccactcaggctattagcattagagcatacccttttgtccaatcatatttctacatggctgtccatactttgttggatgtacaaatgaacattacaatttcccctgtatctttgggtcttcattctgaaggttctcatgtatatatgctaaataaacttgcatgcatttcctccaattactctgtcctttgtgagtagatttttcggtgaacctcagcgatcagagaggagagctacaggagccctgcttgaaccttgaaatgctatgatgacagaccgtagccttaaagcagtttatagtgttgtagggtaaacacataaacaggccaatatcattctttgccatgagggatatgatgagaggaagtacatggaggttaactgagttatttcttttagtttctttgtttttggcatgtgaattatgaaactttaaaacacctccagtgcaaaaaaaattttttttaaattaacatggtggttggtgcactgtgtttctaaaatatggagtacaatgtaaagcaatgcattctttttttaaaaatttattgttattttgaaaaatttttgtagagatgaggtctcactgccttgcccatagctggtcttgaactcctgggctaaagcgatcctcctacctcgggctcccaaagtgctgggattacaggcgtgagccactgcgcccagccgcattcttgttttcatctgtgaaatacgtttttaaggtaaatacttaaagttgatggagacacctggtctacttaagctctcattcagaacacactgccttgtgcttttaaaaaaattaaatggataatctaaattggcagctaccaattaatttatatccatagttgctaaaaaatgttagtgtaagttcatttttattagtcgcatcattttgagttttaaactatttcacatgcagtaaaatttatacctcttatgggttttgtcaaacagtggtttagtcaccaacacaatcacggtatagaagctctcaagctccttttcagtcacccccttcctccagccctttgccctggtcgccactgatcagtattctctccttttaaaaacacttattatttggaaataattatagacacaggaaattgcaaaaatactacagcacctagagtcccgtgtacctatcacctagtttcctccaatggtgacatcttacacaactgtagtacaagatcaaaaaactatgtcatgtagtttgaaggcaggttttcctttcacttcttcgcctgcattttctcctttcatttccaacaaatttaactctgttgttagaaggagcagatgctagttttctttcagatgtctgctatttcagttcgattacccctgttactcctacattttttctagtctttatccccatcgtttcgccccaatttaattttgctgctagttttttttttttctcctctgggatatgtgccacagatggtactattgtcaatattcgaattcctaacttctccctccatccgtaagttttcaaggggtagccgtgcttgtgcttaattgtggtgtttacaggactttttgtagcgtaagcatgctggcatggttccccaacctcttagggggatgctagtaacccgctcccccgtcaacgagccgcctttgtgctccgcggagggcaccgcctgcgttgggttggaggtgggggttggcgggggagagctgcccgccaggcgaggggcggggccttggcgggggtggtcgcgggcggcggggaggtctcgcttccctcctctccacccgctcccagtcccggcctgggtctcagccccgccctgcccagagcgcgcggccgatcacgtcaccggcctgcgctaggcggcccccacggcgcgggaaggcgcagtgcgcacgctccgactcggccgtggcggacctgactgaaggaggccgcggacctgactgaaggaggccacggccacttctggttggcctcggggcgcgctggctcggctcttcctccgccctcgaggcccccgcagtcccatcattcagttccgtagggtcaccggcgcggcagtggcctcgcagggcgctgggtccc

SEQ ID NO: 33996 - DNA, 2300 bp, Homo sapien
ctaggtttaggccaggaaggcccagggctgattttaggcctggtgccgggctgcctgtctttgatttcacttccttgttttttctcttataacaaatactgagtataaaacaatataaaacagtatgagagggtctctctcttccctcatttcccccctttgagactctcactttttattagtgggagttctcactcttatttttgctacttatgtcttttcgtgcaatagattgatagtgatttttatagtacacttgtgctgaagcattttggtgaactaaggtagtgatgaagctttttatcatttgaagaagtacaggtagcaaacaagggagcagtaagtaggtttctattactattgtaactcctattgtaagagttttaaatcctcttagtgctgggaactaccttctaaacatggctttagggttgaatctgtgctacacttgtatggacatatgtgccagttttgtcatatttctaactatgccttttaactacttgcctttgattatctatgtgtagacagtaattagtaaggttaaatttcttatagaccattatttcagctgctagcaagtagtcaagagctaatttattttgatagatagcatttcttatctgagttttttgctgggccagaatagtcaaggcttgaccagttttattagtgatgatttttaaaacagcttgcaaccgtatgatttggttgagcatgtaaatgggggtccagtatccccatgatctgtcttgtgtctaagtggcaggcctatagtattgtataattttttttagggggccatttatcatctttttaattacctatggctatgcttcgttttccacgggaagcacagacagggaagcctaggagttctcctgtttttatgggcagtaggaagaaagatggtttaatggtgccaattacacaactacctgtccactgattaggcagcttagcatgggctctatgtctacatatccagtattacctggtgggggcagtccagtcccggtggaattctgggtaggcctagacagtctgcaaccttggaaatttactgaacggatctctttctgtgtggtttgaactccaccgtgtaactgtttttgtggtactattatacagtttttgtcctaggcaactaagtcatcctacagaatgagtgaattttttcctttttctagctatgcaatattgtccaataattaagacttttagaacctagaaatgatcagggtgattcttttgggctgggaattcatcaggaactgggtctgtaggcactaattcttgggctttttatggccattgatctctcattacagtttttctacaaaaataacatgaagtgacatctagagactgggctacctgctcggctaattgcaaaaacaaatttttagtttttcctggaatcccaggtactggcacatttagttcatcatagaaaatctgaaagactggttctgaagagcgttcttgaacctctccttttattaggatgcttacactaggatctagtccttttccatcaatgcctaatgttacatattttcctttattccactttgggtctgaggggtttgtaattatcaattctaaaaggttgcagctcccactcgtgcaggaggggctgacttttcctttttggagctaaacaggatctttcttatcttctttctaagtagcctaaatgacacaagaccagtattgacatatctcacataaatatgattcttgacagatgtacttattttatgctgtgtaacttttttcctaatctagagaactgcatcctatcctatgctgtttactattaatagcggcacaggcatcaaattttaaggttacatttttggggacctttctttcttctgttctagctattattttacttgtgtcccttagagaacgaccagttcttagtcttacttcaaagactgtgatcatgggaagttcaaaggggtcatagcacacattgggctggtcacttcctggattacatactttgtactgggtgttattatacaaataggttccttttggagttcctaggcattcataataactataaaataataggactgtagcaatcttttgtcctacctcagtgacttgatgtaaatactgggaacagccttcagtctgagaaaggtcagttgaagtccttactgtacaactctaaattttaaggaaaatgagtcccgcgatgcatttcctcatgcttcggccgtgtgtggaccagtcagcttccgggtgtgactggggcagggcttgtcgtcttcttcagagtc

SEQ ID NO: 33997 - DNA, 2300 bp, Homo sapien
gatcctttagtaaaatgaatgtttcctgtagcacctatttttattagtttttagaccaaagaaagctaaacaccattttatatttaataatgcttcttgtatgatttttataccacataagttaaattttacctttatattagtgttaatgttaaacttaattttaataaaaccttgtagacatatttatccaattttttatgtttgaccatgtaagattttatagactctttttaactttttataatttttgttaaagaacaggttgatcctttaagaaaaacctgttgcatttttaatgtctagttcacagaaaaactggatgacacctttttaactttagctaatatgtttacacacagaattttctttacaattaatgttttaaaacttgcttaaacttttaaaacaatttttttaactttttaatgtaggtaaaaatccacatttttatgcccttttataatcttttttaccaaaggtatattttacttttcttatacaccttgcacataaactgtttttttaaaatagtactcaggaggccttattacttttaaattatacaacttttttgcataaatactttttataactttttctttcacgacttttgcagacaatttttcaacatgtcttaactttctgacttattacattttttttttaaacaaccagttaatttatttcaggacaagaatttaccatgtaacactctttttacataaattctgcctctccccgtttttttccttttttttttttctttttgaagataaccattccttttttttttttttaaagcgaactttctttatgtctttgaactagattgtctaaggccacaagattagaagttaccataatacatgttacactgttaacttttagcaaacttcacttttgttgaaaaccttgtcagtttgggatttcaattatcctttgctattaataagactttgtttagtctaaattaacttagaattggtatagatggtctctttttctctctgctggtctttccttgcctctgccagctgcttatgctgctgttctcttaactactgtggtggggaagggggtctaaaaccagctgtaactgtctatgtatggaaactggtctgggtgccttggcttaccagttaccttgtgtcatacctttgaaacaagagacctgtccaggcttccttctgatggccaacctacttctaatgctggccagtctatttcacacaaagttctaagttttcctggtgtcatagtaacactgtaatctcccttaaatcctttcttgaaatttttcaagatagttcctagtggggtgggcttactttgcacctgacctatgtttgtttgttttttttcctgagacaaaataccacgctcacaccacacacacacaccagaagacaaagaacgggtaaagagggcacacacacactgttaccgtttataccaaaccaaaatcacgaaattcaaaatccgagtaccaaaaaattcaagccaagtcaaaaccaaaaccacagtatccagcaattcaagtcaagtcaaaaccagaacaaaagtgccaatgcaggcacaccgtgggtgatcaggccacgcttccactcagatggagtggggcaagttccaaagactagttttaccaagtcaagccaagtcaaaaccagaacaaaagtgccaatacaggcacaccatgggtgatcaggccacgcttccactcagatggagtggggcaagttccaaaaactagtcttaccaagtttcagatgtctggactccaagtgccagttccttcccggttcccggtgttcagccactgtgttaatcctccgcaggggcctgctatgtgctgctctggcgaggcgttccaccggggcaactgcctacccaggagcactctttggatggcatcactcaggctggccggagtcccccgcagggacgctccacggggcaggcctaagttgcctaaggggctgtctcagccgtccgtcagtcacctcgtttcctggtcagggaaccaagaaatgtagcaggacgagccgcagacaaaacctctcagagttgtagaaggaagggctttattcagctgggagcatcggcaagctacagccttaaaatctgagctcctcaagtgcacaatttctgtcccttttaagggctcacaacactaaagatttcacatgaaagggtcgtgattgattgagcaatctaggggatatgtgacaggggtttcatgcactggtacagaacacaacagggagtttcacaatttttttatacaatgcttggaatct

SEQ ID NO: 33998 - DNA, 2300 bp, Homo sapien
tttatcaagtcgataaagttcaatagctgacacgtgccatttacttataacaactcccacagtaaaggtgtttgtgtcctttacttcatcattgctagtatcttctccaattccttccaggccaacgttaaattaaaaccttaactacctaattcccaaaaactaattttaccaacttttaaatagaacaaacgctttgcaattttaccccacaatgcccaaatgaatactactacacaaaaacctgcaattactttcaaaacaagaattcgtaagttcatgtctcgaattcctataataaactaaaacttgacgggagcaatggacttacactttttccagcacgattccttttgcatgagaagcacctccaaaagggttggcctttagggctgtgcccaaatgagctttcttatactgtttatcatgccacttctggtctcgtcggtgactacggagcttcctagcagtacgaagtccacgacacttgcctaaaaattaaatattttagttcttccgtaaaaacacgccatctacgtgtttcccatcttctaagacactcgcctcacctggaataaacccttaagccgattggctctcgtactatttattggcctgtgggccaaacatttggccttcaagttgccctgaaccgactaataaacgttcgaagagggctccggagaatgtgttctcccgaaggacgaggccccgctcgaatgcccgggaggaagcgctggcctccctgcgtccctcggtaccccgacctcggcggcctccacgcctcatgggccccttccgcgccggaccacgtgcctcctggagcggcgcttccccggccctcccccatggagcctctccatggcatcccccgccctactctattcgcatccgcccgcccgtccccaagaccccaagtcccgcttgcagcgcccttaaaccggccacaacagctcacccatcctgtcggcgccacgggcctgagcgaaagagagaagcaccgcaggaaggagccacaagccaccgcgagcaagccccgcccagccaaggaccccgcgccgctgtctgcgccgcgcctgacccgaggctggggtctctcctttgaaaacgacgcgtttgcatcactttcctgagccagaatctgcgtcttatttaatttgcaagaaattcagagatatctaatttgcatggttttttttccccctttttcttttgaatgctggagaccggaggaacatggactaccaatcccagaatgcgttttatgggacccgctcaccgcgcaggcgctcttgcccaagccactgagagcgggacgcggggctaggtcagagtaggaaggagtcgctgagctgaatctttgtggagtggagtggggcgagagtcctccgagtagtctggaaaattagacttctgagccttaattcatacttataagcagctagtaaattgtaaaatatagtgaagcaatgtagtgtagtaactaaaaccccaagctttggagccagattgggcctttaaccctaaagttgccgtttattttgactggcgagtcatttacttatagatttatttatttttatttttatttttttctgagacagggtctcactctgtcttctaggctgttgtgcagtggtgcgatcttggctcactacaacctccgcctcccgggttcaagcgattgtcccacctcagcctcctgagtagctgggattacaggcttccaccatcacgcctggctgatgtttgtattttcagtagagagggggtttcaccatgttggccaggctggtgtcgatctcctgacctcgagtgatccgcccgcctcggcctcccaatgtgctgggattacaggcgtgagccaccgcgcctggccatttaattaactctttaatactgtttctcctgtaagatgaactagctgtgagaggtttctgggatattggttcactcagcaaggatgtttaaaaatgccttctatgtgccagacgctgttgtaggtaccgggaatatggcggttaaattaagagggtgaaggtttctgctctgatacagtttatattctaaatgtgagaggacagaccagttagatagatgtaaattaaataattaaatagatgatttttacatactgtagagctatagagaaaatatagctggatgggtgatagtgacttggggatgggggtggctactctggatagggtagtttaaggtgacatctctgtgcagatgtagaatgggctagtgctttctaagaactgaaagatcagtgaagaaggggagcatagtgactg

SEQ ID NO: 33999 - DNA, 2300 bp, Homo sapien
attgtctatagttgctgtctagacttccttccctcccatattctcttcactccgatcccatcgcctttcactttcagtactccatggagtccccatttgacaaagtgaccagtaatctccacattttcaagtccaaaaggcaattctcagtcctcatcttatctcttttcacactttctcactcccttcttcacttggctttgaacagagtgtaacattggccactctttcttcatctgttttgcttcacctgccttctcttctgtaccactaaactttggtgtgctcaggactctaatctctgttctacctacagtcatcacctaagctatctcaactagagccacagttttaatactatttattcattgattactcctcagcttcttatcatatatccaactgtccacttcacatccctggatgtttgacagttcaaacttaacacatccaaaccagaactcttcatttcctcctttgaaatttgctcctctcctcgtatttcccactttggaactcacccaactcacaactcacaactctacaactcacccaagtgctgaggtcaaaaatcatagtgctgtaattaactcctctctcacatcctacagtcctgagcaaattctgttcattctaccaccaaacagtgtatctgacccaaccactttttactgtctccactgagggtccaagctatcaccatctctcatctgaactattgcaataccttcccaagtggcctcccagattcatgtctttttctcctctcaacagccagagtaaccccataaaaatataaatcttattttgctacctactcccaagctcaaaactttacaatggctttaaatcaccagaagagtagaaaaaggctttaccatggcctacaggctccacatgttcctgtgtaactctcagaccccatctaatgccacactactcctcagtcactatgctccccttcttcactgatctttcagttcttagaaagcactagcccattctacatctgcacagagatgtcaccttaaactaccctatccagagtagccacccccatccccaagtcactatcacccatccagctatattttctctatagctctacagtatgtaaaaatcatctatttaattatttaatttacatctatctaactggtctgtcctctcacatttagaatataaactgtatcagagcagaaaccttcaccctcttaatttaaccgccatattcccggtacctacaacagcgtctggcacatagaaggcatttttaaacatccttgctgagtgaaccaatatcccagaaacctctcacagctagttcatcttacaggagaaacagtattaaagagttaattaaatggccaggcgcggtggctcacgcctgtaatcccagcacattgggaggccgaggcgggcggatcactcgaggtcaggagatcgacaccagcctggccaacatggtgaaaccccctctctactgaaaatacaaacatcagccaggcgtgatggtggaagcctgtaatcccagctactcaggaggctgaggtgggacaatcgcttgaacccgggaggcggaggttgtagtgagccaagatcgcaccactgcacaacagcctagaagacagagtgagaccctgtctcagaaaaaaataaaaataaaaataaataaatctataagtaaatgactcgccagtcaaaataaacggcaactttagggttaaaggcccaatctggctccaaagcttggggttttagttactacactacattgcttcactatattttacaatttactagctgcttataagtatgaattaaggctcagaagtctaattttccagactactcggaggactctcgccccactccactccacaaagattcagctcagcgactccttcctactctgacctagccccgcgtcccgctctcagtggcttgggcaagagcgcctgcgcggtgagcgggtcccataaaacgcattctgggattggtagtccatgttcctccggtctccagcattcaaaagaaaaagggggaaaaaaaaccatgcaaattagatatctctgaatttcttgcaaattaaataagacgcagattctggctcaggaaagtgatgcaaacgcgtcgttttcaaaggagagaccccagcctcgggtcaggcgcggcgcagacagcggcgcggggtccttggctgggcggggcttgctcgcggtggcttgtggctccttcctgcggtgcttctctctttcgctcaggcccgtggcgccgacaggatgggtgagctgttgtgg

SEQ ID NO: 34000 - DNA, 2300 bp, Homo sapien
cttttttgaggaacatatgttactttctctctctgttaaatgcagagacagcaggggagagacatattactgtttaaatgggaaattcactgttaagaaatgaacagttttggcaggctgtttctgctcctctattctgagatgtaataaagtgaaatatacttcttaaaatttcgtgtaacatctaaattatggatatttattcagcatcttttaatttttttttttttctaatttcagttctccaacatcttcaaataaagaagtggttatgaggaatggtaagactccagttgcccacatgattccttgtggggtggagaagggctttttctgtgatagaattccctgaccagtggtgtctgtaccaggagtcactcatgtgaaatcttttatactagtgcatcataaattatgagccaaaaggggctcaagcttgatatatgtgacagtgcttagcattgctcccaattacattaataaatgacatttagcatttggtaaccacatcatcatttatttgacagatcagaataatggagatatgaaaccattccagaatttcacaacaataccaatcacacaggtatggctatgtcaggaaaccagattgtaatctagctctaaaaaacttaaaaacacatttcaatcatgtctgtgctctgtgaaaatataaataataattgtattaataagtaacatatttttgcttcaaatttgggtggggaaacatattgtggaatctcttctttttaaaagtcaacttttattttggatacagagggtccatgtgcagatttgttacgtgagaatagtgcataatgctggagtttgcggtatgaatcccatcaccctgatagtgagtatagtatcccataggtggttttttaacccactccactccctccatcctccagtcatccacagttttgatggtttgcatatttatgtccatgtgtactcagtgcttagctcccacttataagtgagaacatgtggtatttggttttctgtttattatggaatcttatagttgggaaaaacctaaaatacttaattttacttgctctcttatattttcattacaatattcagcttcacttttgttgctataataataataatctttagttactgataagcttaagttgctgctctctattaactaatttttcttttatctgtatttacactagagtaattggtgcaaatttctttctttgtattgtacattttgtgggttttaataaatgtgtaatggcatgtatttatcgttacaggatgtgaattagctctttcatttctaggaagccttttgtaacatagacacaaattcatctcttatgttctttttatttggttaattaggctctcaactacaatctgagcaaagaagggcatttagaaaaagaaccttggaatgcattcagccatcatggcccagttaatgtctccatcaatggaattccttgcattctcttctgggccaaaagaataatgattaaatttaagaatcaaacctggctggaccttacagacgagccatttggtcagaaggtaactgtggaccctgacaactcaaattgcagtgaagaaagtgctaggtaagttgatctctcagtttgaggaagcccctagggctattgcgttctgttaactctgcattcaactttttttgtcatttcagaaaaaaaaagtaggctcctttgtataggaccctgacacacatctttgaggaagtatttactgtctaaaataaaggaacaagtcagaagttaacttcaaaaattgttggctgggcatggtggctcacgcctgtaatcccagcacttcgggaggccaagggagtggatcacctgaggtcaggagttggagacaagcctggccaacatggtgaaacctcgtctctactaaaatacaaaaattagccgggcgtggtggcaggtgcctgtaatcccagctactcaggaggctgagacaggagaattgcttgaacctgggaggtggaggttgtggtgagctgagatcgcgccattgctctccagcttgggtgacagagtgagtgagactccatctcaaaaaaaaaaaattgttatattttcccggcagttttcttctgaacctttttgctaattgtcggaataacttgtagaaaatgagactttggaaagcaagggttctcaaactcgttttgaaaacagcaaaggattccaggcttggtctcaactccaaatggtaggtgtcaaactacttttattctatcagggaagagatcacatatcccagcagggtcatacaca

SEQ ID NO: 34001 - DNA, 2300 bp, Homo sapien
aggtgatctgcccacctcgttctctcaaagtgctgggattacaggcttgagctgccatgcccgggcacctacaggtttttcttttttttttgctgggttttagagatcttgtggttactgggaacctagagacggaaagaatgaaaacttggcttctaggcccagttctgccagtgagctttgtgattttacaggcaggacctgtaggatcatcatctgtcaaatggagatgatggcatctattcattatagctatgaggccttgagcatttactgtgggccaggcacggtgtgaggtcttcataggcacatgtctgttattcctcacagtaactcttagagtcacaggcagttatcacagaggttagaaaacttgctaaagtcatggagcatgtatgttcatagagctggggttgaaaacatctttaaaaatgaccatttatcttcttcctcttggccctatctgacaaggttgtgaaaaacacatgaggaaatatatgcataagcactttgagatcttgtcaagtgctgttcaaagtattaatagtagtagcattattttccttcctgacatcccaatgataactagagtgaaatagtgtctaatttcttcagtaagcttcgggtctcacaggacacaaatgaaagattgggcagaacctgactgtctttttggtcactgcttagaattctattcaggtgtgagccctgagtgtgcagtgtccacctgctggagtcctgcacacagagtgtgcaggcatcctggacagcctgcccaaagaggagcaacaggaggcttccaggaagggaggtgtcaagaaccagctgctgagacctagtggctgattcctgtgaattgcatggatgagccagatgcccttgtggtgctggcaaggaaatcttaagatcttaagaaggagaatgggagttgctgaaataacaaaccgaaacaaagacataaccatgtaaggtcaaaagcacagattaaaaaaaggtgaccacgttttagctcttggaaacaaaatgtttagagagaggcaaattgttggcagacagatttgctacggaagtctttttaaatagtgaaagccctgcaaatacagcataatcccagcatctgtgtgtatttggaatttaggcaattatagcctcaagaattcagaatccattttacatgtgtgagagtagaacacttgaaagagtaaaaagagctcctttttgagcagctcttgttccaggttgtatttctcctttgtgttcccaattgatgtcacagtgcctgatacttaaagatcctcatggctgagcacagtggctcacacctgtaatcccagtactttgggaggccaagatgggcagatcaccagaggtcaggagttagggaccagcctggccaacatgatgaaaccctgtctttactaaaaatacaaaaattagccaggtgtggtggtgcatgcctgtagtcccagctacacaggaggctgaggtgggaggattgcttgagcccgggaggtggaagttgcagtgagtggagattatgccactgcccctgagcctgtgtgacagaacaagaccctgtctcaaaaaaaaaaaaaaaaaaaaaaaaaaaaggcaacaaatattttcatcatgccccaaagttactgtgtgtttctttgtaatgcgtctttccaaccactgtcacatctccagataaccactgatctgctatcattatcaattagtttccatgttctagaattttatataatcacatgtgtgtactcttttttagtgtagccactgtcacttagcttaatgattttgataatcttccatgttactgcatctgttaatggtatttcccttttcattgctgagtagtagtccatattatagatgtaccacaacttatttatctattcacctgttgatagaaatttgttttttccctcactttttgcataactttccaagtacagtcactatgaacattcatgtacaagtctttgtggcagcaggtatcttcatttctcttaactgtcattccaactaggagtagaatgcctggatcatatggtatgtgtatgtttacctttttagaaaacagccaaactgttttttaaagtggccgcatcatttttccttttctcaagcattgtatgagagttccagttgcttcacattctcactaacacttcgtatggtcagagtgagactagagaaagcatttttatatttctgcatgtttaggaatttctgaacaaatttttactgggaactgggttaaaagataagtgttagagttagtgagagattta

SEQ ID NO: 34002 - DNA, 2300 bp, Homo sapien
aaaagatagaggtttattggacttacagtttcacatggctagggagacttcacaatcatgatggagggtgaaaagcatgtctcacatggcagcagacaaaaaaggagagtttttacggggaaattccccttttcaaaactatcaaatcttgtgagacttattcattatcatgagaacagcacaggaaagacctgccccagtgattaaattacctcccactgggtccctcccataacgcacaggaattcaagatgagatttgggtgacgacacagccaaaccatatcaggggtctttcagaaatgcaagtaaattatttgagttacttttaaagttatttttgttttctggactttcttttcctgaatgtaatattactctaaagttggactacatagatcccttggcttttattgcttatacacatactgattaaaatttggtgctagacctgtgaagagtttgaagtaagttattactgttactcatttgtttgcaaatgttctcattcatctggtaagcctatgttgtttgctatcatgactatttactccttggaaaagggtatgtgatctttattggcatatcagtttggatgtctctatggagttctgcacagcagaccattggcaagattctgatttatcataagctttatttatcacacaagaaatgcacaactctgtggacatattggatacatgtgctatctgagtttcttttaaaatcaatgctgtgtgacagtttttcccaaaaatgattaaccaacttgaatcaagaattccccaattatatttaatttcaaatattcaaaatatcaaatattacctttcggtatatttttcaatttgaaagttaccttgtactgatgaagaactggttaacattgcctacaaatggatttctgctacactaagtgtgaataacagctgactctgagttgggctaattgtgaactaattcaaattgctgtgtcactgtgggtgatgaggggaggtgaaacttgtctttttccttctcagcaaattatttttataagaatagtgatactttggatatgatgtttatttcccatgaagaacccacattacttgataagtagatttgttttttccatcaaacagtctctgtttcaaattaaaacagcttctttattcttttatagttatttagtaaaatgatggagtgtaaataaattttcgtgagtcagttggatctaataatcaaagtagtaggttttggactcataaagacctgggttccttcccaaatctactcctttgatatgacatatttttggtaaatttacttcatctctctgtgctcagtttcttcctctgcaaaatgtggttaataatagtaactaatgctaggtgtggtggctcacacctgtaatcccagctctttgggtggcctaggcaggaggatcgctttagcccaggagttagagaccagatggacaacctagtgagaccttatctctacaaaaattttaaaaaacttagctgggcatggcagtatgtgcctgtagtcctagctgctccagaggttgaggagtgggtattgtttgagcgcaggggttcaaggctgtagtgagctatgattgtaccactgcactttagcctgggccacagagtgagactaaaagaaaaaaaaattaactattcagcaaggtttgttgtgtggactaagcgaggttattgcaaattgcttagcataatgttttgctcacagtaaataataaatattagctattaatattatttgtaacagtgttattagtgtaatggataatgaatgggtatgtgaacatgagagacaaacatataaatcatttggggtaaaattggcctggggttttaaatattcctttttctttgtaagaaaaagaagaattttttttgaaaaatcaacactgagaaatgccaattgtactttgttaactgaccattctatgtcaaataatttttttggtagtacaaaattttaacttttttcttttttaatctttgttgaagttatctggaaactctatctgggacttttgaacatatgggaattgcaaaaactctttgtgcttattcatggtttatctattcacttttattctgcactcatccctattattgaaatcagtggtcctcagccctgaatgtcctttattttaatgtttttattttattgtaaattgacaatttataattgaatatggatgtactgtagaatcacctgagaagcttttgaaaattctgatgcctgagccccttttctgaatattctcatttatttggttttatgttg

SEQ ID NO: 34003 - DNA, 2300 bp, Homo sapien
tttggaggtgtgccagttaagtattttataggctgttctgcaattgtgatttgtttaattttttttttcataattagcatacaattatgggtgtttgggagaaagagcacagagttaaagtgccactcttatcacatcaagagtacatactatctattatgacttatgactgctgatattaaccttgaccacctggctggggcagtgtttgtcagggttctatactctaaagtgactctaatttacctttccttattttactctttggaaagaagttattatacacagggcaaacttaaggagtagggagttatgcttcacctccttgagggcagacttgttcttttgcatgaaaaaattgtctagtctcgcctacttattcttttattcaatcattttttacgtcatttggagtcataaatatttattttatactgtgggttataatctaatactacttgcttttgttgctcaaatgtttcagctttggctattaggagctctttcagttggcttctgtgtctttttgacagatccccatcactgtggtctttgggttctgtttgttttattgttttgttgttgagaactgccttgccttctgacactgtaaggtgctccaggcttgtcttgtatatttcctgccctagtcctagaatcagatgtttctccaaggaaccctggttctttttaatgtagaatggttaaacaacaacaaaaccaagatctgggtgctaggtgtttaacttacttacagagcattgtctgtaatttataatcaagttactctggaaaaaaaaaaagcaacatatactatactgaacactttccaagtggcaggcatacggtaaaatttgaagaacatctggaatctctaggaatattactaaggcattcctgtcagtggcaatgcagatgtaagattaaaaaaaatgtaagataaaaaaagggcaaactaagacttttcacaaccttttcttgatgagtcaaatatgaaagatggcaagagattaaaatattacatactaccttaaaaaaaaaaaccacctcagtggaatctaaaagaaaatgtgttggcccaagggaagattactactatcaaactgaaaaagaattaaaattatgcagttgtgtttgtgtgtgtgctgaataggttgtaagggctttaaaaattactttttaaaaacttgttccaagcacaacgcctggtatatagcatacaagtgtttcttaaacaaataaactggattataattataatttctaaatgtttctgcctaactttattataagcatttagtttaatattattcaaataataaaaaaaaatttaagaggatatttttctgttcttacaagaacagaagctcacactgaataatattttactctggtctattcagttgccaaatcctttatactgttcctttcttgccccacctgccccagtatcacaaaatcattaaacaaaattttcaaagaagtcatggaatgatcattttttaaggcaaagttaaactaagccaagtgagcatttcactaaaacattccactggagctggtcttggagtcatgaagggaggcatttagtccaactatggaaaaagcaaagcaaaccagttctggtatttggtttaattcttctgcttctaattgagtagggcagtgacctcatgctagccctgccctatgctggtttgatatccactcccttcaactggccaccccagctttttctgcaggctgctgctctccacactcgcatccttctttctatgcctgtgtgatgtcttcagtcctcacatgcatcttgcttccacttgcccttaaaccatcagatattctcattaacacttcagtttggggcctatttcatctttagaagagtcagcacccctggtgtaatccagaaaccatgatctagacctatactacttcagacttcttgaacttttgaaataaaaccttaaaaacgttgaattgttcaactacatgtgattaaggtcctatattaaaagtctatttgggagttatcttaacaaaggttttaagaaaacagtagcctgtgttctcaattgttctctctccctagataatatatttaaattaatgtgtatttctcttctctctctctcacatacacacacacagccatttaatccaagctttcattcaaaccaaggatctttccacaaaatccctgagagtcaacttttactgtttactaaaactgtcttcactgtgtggagcttacttctttgtgaagcttggtgtttcatttggacaggccaatttatgga

SEQ ID NO: 34004 - DNA, 2300 bp, Homo sapien
ctgacagttgtaaattattactgctgataaacattttatccttgaaatgctttttaaaaagattcttggctggggacggtggctcacgcctgtaatcccagcactttgggaggctgaggtgggaggatcacgaggtcaagagatcgagaccatcttggccaacatggtgaaacctcgtctctactaaaaatacaaaaattagccaggcgtggttgtgcacgcctgtagtcccagctactcgggaggctgaggcaggagaattgcttgaacccaggaagcagaggttgcagtgagctgagattatgccactgcactccagcctgggcaacagagggagactccatctcaaaaaaaaaaaaaatcattaaaatacagtaattcaggtttattaagtcattaccattgggttacctcacaaataaactaagtttagatgcgaactcaaagatactgagacactaatccatttcttaagctgctaagttagccttcttgaaacctcacttcgtagctctgcaaacaatgtacttttgacatcccaagctcacaggaataaaaaaccacctgccagttgtttccgttttccacctatgtctaatttatgtacttatatttataagaaacaaatcactaagtcttatttcatccttagttatgttgtgtttctatcgataacagcatgaagatttcggggacctggacattaaaataagtttgagtactggctttacaatctactaggtgtgatccgaggcaagtcagtctcttcatgtttcacttctttcacttgtaaacatctattcagaagttgctgtgaacttgatatttccatgcttataaactgattttttgaaaagagcctggtacataggacgtgataataaatgaaagcatttgctacttttggaaaaacaagcatgacaagatagtttatatactgttgatcttaagcacagtatatgcatcttatttttagctagtctgacagtgagataataaaaagagttatctttgacttgcactacgagtagaagaattcaacttcagtttctagaaagatgtataagaattaagagtggcagtcttcctagtctcaactgccatcttcccaccaggtggtaaattcgtccagagaagaaaatgaattattgctatatgggattctgcagcaacttctgtgaacataggctcataatttttcaccatggagactcaagctttttggagtcatagttgtttttgggtctatttgcaggcatgcatcctttgtccagaaatatacataacatttggcacatggacctggaggtaaaagaggaggaaggcctgaggctagacaccactccaataagtacattaagctcctagaagggcaatccacctttgcagagaactcttaactattaaaacctatagcttgtaaagcagcattttcaaagttaagagaagaaggtggaagggtcttgagaggctactgactaaacagatgaaaatgaaggtatggagtttggtgccaaaagaaactccccccaaaaatcaaacaataacaccagagtaaagcccctagggcgagataaggagttgcaacaaaacaagcggaaactcgagaagcgctaatgcttcaaagggtcaatgaccacacataatctacgtagccaacgtgttaaaacacaccaacgcatttttttttcctaaacaaagtaggaaagcggactttgcatgaggggcgggctgccgacccagcagtcttcctcggacagtccgtcctgattctctctggttggccgtggagggaccacatggctccaaggcctctcagctccgggcccacacaccccgggctgccgcacaaactccagccctagtctagatccacaaccccttctcgaagatcaaccgcgacctgggagccccacttcttaccatagcgaggccggcgatgccgcagccacatcacccttccggggctcaggcggaagaggctgcatgtcccgtctgcccttctcgccctctccagccgtccggttgggcttgtcacggcaccgcctaccaagacgggcggttaagacactaggataggctcctctccaccggaaaaggcgggatttagatcacgtcccgcaggccggcggaagtagctgatactctcattggttgcaaaaccttgatctgtgaaagcgggcgttttggaagataccggaagtagagtcacggagaggtaggatccggaagtggggctgcctctttaaataacaaaaatctgaggttctgttctttttatctttttgctttctttttaa

SEQ ID NO: 34005 - DNA, 2300 bp, Homo sapien
gaataacacagacagattttatttctagtaaggaaaggatccaagatggttttaaatgaggattcactgcaaagctgccagaaagattttagaaattgtgatataatctgaaaaccaaaaagtagggggtttatgtaagacaatggagctaaactaccacctcccaaaaaaaactcaccacgtcagattaactttgatgttttacataaatgcaataaacattatacatatttgttcagcctcatttattggcatatgtgtttctctatagataacttaaaaactggcaatgccgttctttactgttttgaagctcaggtacataagaagtcatagcctaaaattaattaaaatatatagatatagcaaatcaattgtgatctctaacaagttaagctttctgatgcttttcacaggtagcctgaagcagagcttcatacagaagtattacctttatatgtaacaaagatcaagacaatcttcacatgaaaccaagggcagttatgtctacagacacatttactgccctaaaagccaagctcgataaattgcacaacataatttccataactaaaccaggtttgtttaatttgaatggcaagacctaaaaggtataatataaaggaattacaagacagaacattaaaagactttttttatccttaggtggagagtactgtatcttttaaatacctttcttattcccctctcccccaaccttattaaattccttaaaggaacagaccatctttgttcctatgctgcaatctgaagatccatgaataaagcaggcacccagtaaatacttgctaatttgtgtatttgaccaactcttgacaattcaatataacagactcaaatatcaagttagttatagtttaaaacaaaacctttgtgtgccctagtgaacaatgtaaacacaaatagcagaatcccaaatcttctaatcattgtgttgccctaaatacaaaagggtctcataggccgaatacagttcataaaccaaaatctcacgtgagttaccttctctctttctctctatccaccttctaagtccataaaaaattgaaaacattctgaaaagaactctctcctgcctgagaaaaaatacaccacacatttagaaccaaaagcttgccataagggggcaaagagtgaaaaactctcatttctaatactttattagaattccaagaactacgcaaattcaaacatgtcaaagcgcctgtttctccatcgataaaatgcagaaagaaaaacgtgtgtgtgtagtagaacctcacctaatgggataattaaaatcagaaaaagctaaatactactactgattaaaagttgccttgtcatttgtcttgccagttgatctctttaaagtacctaatcaatcgctgcagtccgcaaacggcagttccttcccattggttaccacagaaagttctttcctgacctcaaattgcctagtacgtttcagcctcgatgcctggttggaacccacagtttaccaatatctggggattgaaaggacaggccagtgctggggaaatgctcaaacagcctactcaacactaccctctggattcaaccgtcctcccaatcccacaaccaacacagagcatttcaaaagtgcttcgcattcccaagaatccctcagatgcaaacggagaaactgaaaagggggtgaacaggtcgcaccctgaggataatgccgagaaccctagcatccccaaaagcccacaagaggaagtcgcgggagctcacaaattgagggggattctcgcattgtggagttctaggggtaagtagcagggaacttttttaaaaagaaagcaaaaagataaaaagaacagaacctcagatttttgttatttaaagaggcagccccacttccggatcctacctctccgtgactctacttccggtatcttccaaaacgcccgctttcacagatcaaggttttgcaaccaatgagagtatcagctacttccgccggcctgcgggacgtgatctaaatcccgccttttccggtggagaggagcctatcctagtgtcttaaccgcccgtcttggtaggcggtgccgtgacaagcccaaccggacggctggagagggcgagaagggcagacgggacatgcagcctcttccgcctgagccccggaagggtgatgtggctgcggcatcgccggcctcgctatggtaagaagtggggctcccaggtcgcggttgatcttcgagaaggggttgtggatctagactagggctggagtttgtgcggcagcccggggtgtgtgggcccggagctga

SEQ ID NO: 34006 - DNA, 2300 bp, Homo sapien
ctaagtgacaaatggctgatacggctttcgacgattataacttttttacgcattagcaaatacaagttagggtctgttgctttgaatcttagtagaagtacagaattaccagtgacgtagtataaaaaaatttgatatcagctagtcctagcacaggtactggtcttgcagtcatacctattagtttatagctttggacaagtcactttatcttcataataaaggtaaagatacccatcttagggttttgcagagatcaaatgaaatgcgaactgttctgagattagtaaaatgttaaatactctgtgactcacagagataatttgttagaaaaagtattttgatggaagaatagtacctgataagaaactgatttaatattaattataataagtactaaattcagattaaaattaggtaaaagagaaacttgttcttaagagagttaatatataggttttaagatgctttcatctaaatcatatatattttcaatatgtttgtctaattagaatctttttctaggaatattttctataattgcttactgataaatctgctgcctagcagggggtgagccagttatttataattctacctttctctgtttctagggaaactgcaatctgttctgaaatgactgctgaccgagatccagtctatgatgagagtactgatgaggaaagtgaaaaccaaactgatctctctgggttggcttcaggtaagagatacatacatttatctcctctgttgaatatcttatttgggcttcttattctaatgacaagaaaccataatggaaaaatgttgtgaaagaccttattctatgaaaattctttagcatttttattttaaaaactcaaatttttaatgttaaaacttaatattatttgtaaaatgcagcaactcattagcacagcagtgtgagcaagcattcatacacatatactccaaggtatactattcctggttaaatataaccaggaaaagcataagcaatgaggaagaaacacctttatgctaaatatcatcagcttaaagctggttgcctttaacatttgagatcttatttagctaaagccatgaataggccactggagcagagtaatcaagaatgctctaaattatactgaagttgaggccttctttcactcttcagaaaaaagattgcaacaagtgagatgtaatagaggaaaagagaaggggaaaaatggcagtttagtacaaagtacctatgacttactcagtcctttggatcaagttcccagcaagtgtttaaacccatgagttattttttaaaatgttttatagatttcctagtgacggtggaaacaggagcctctgaactcattttatacttagatggttttgacctaaaaccaatactattaaaataaatgcttgatttatttatttagaaaatatttttgagttcctattatgtactagaaactttgctatgcattagacagcaaaacacaaaaatctgtgccattgtggagtttaaattgtagtcagggaaacatataagatgaataaatataaaatatgttaggttgataagtgctaaagagaaaaataaaccagagaaggcgttagaaaggtcagggtgagaataaggatgagggttatgattttagccagactatcagaaaaggcctcagtgagaaggtgaaggtgacatgctgtcttggggaagaccatgccaaacagaaaacaaaaacaaaaacaaaaacaaaaaaacactaagtacaaagttcctgacgcgtttaagcaatactatagagtgtaatctggataaagtagaaagatgaagactgggagaattaggaaatgagatgagagagatgatgggacctcatcacgtgtagggcgatataggctaccattagaacttctcctgttactttgaattaacttggaaactactgaaggattttaaacagtcaggtgacataatctgactcaaatttcaagaggattagtctgtgtattgtgttaagaatagactataggatgacaaatgcagaagaagatataacagatgggaagctagtacaacaattcggtgaaggatgaggctggcttagaccagagtgatggagaggcgatgagcaaggagcagattctaggtgtgcttagaggcagcaggatttgctgatgaaggggttatgactgagcaaataagactgagaaggagcagccaggaggtaagaggcaaaaatataaatgtggtatcctgctgattgatggatttagcaatacaaacgttattaaggatcttaatagaacatattcac

SEQ ID NO: 34007 - DNA, 2300 bp, Homo sapien
agggacaaaagggtaaaagataataagcttttcagactggcagatctgtcacttacaaaatggccttgggcaggttacttgaactctttgaaactcaactagatttactcaaatttaagaatgagaatacaaatccacatcttgaagtgtttcacagaaaggtctatcttaatgtctggagtatatatttcaatgaacattcattttattttatttctctccattcctgaatcaagcaatcttgaatctaaagttgctatgattagcactgaaaagaccactggactattaattgtgtgactttgggacagtaactttctgcaccttagtttgtttacatgttatacatgaaggttgaagtctgattctgctctgtgactatcattctaaacatctgatgaaatcaaatttcagtgtttggaatggtagtacaataaatttactaagaataaataattcactgcaaaaacacattgatttccaaatgatgtaactgacagttatattactgcagagggctgataaataacaaaagaaatgaaagatgcacatggtgagaactgaaattatcctgacaagtcttctacctgtttatcacttaaaatcaatgaccatgctgaatgcctacaaattacaaaatataaaagaaatcttataaatgcgcatgtacaggagtctaagttactaaaagttttaaagcataagtttaaaccaaactaatcaaagaagttgagaggaaaaattggctttcatctttaatcactactgttttgaggtcctatgtttaatataattttctaagtagaggcttcagagagaagagttgtgaggatactttcatatttgtgtagaaggaaaagtttgccatccattctagtatccctagtgttatactgatgtgcaccttggatttattttgttcctattgtataaactcatacttgacttcaaagaaaaggaaaatccaaagtccctcttttctaaggggacagaaatcctttgtgtcaactgtttgacccttttctctgtaaggtcctattggaaatcttttgtaacacaatgcaggggactcttccatgtgttgatgctgtttacacagtggggtgggcctgactgaagaaaaaaaatcgcatatacgcatgaaagattatggtcttatttccggaaagcatgaaaggtgattgatacttccaagaagtccctgttactcaggaaaattatcaaatattctactcagagatacttggaaagactgaaggaaaggaagaacgaagaaagcagaatctagacttatgtggggagagatttgtggcagaggaaaagtattctctttgaatccgacaagggatttgcctgggggaatttcctgtccagccttttattaccagggtcttttgaagccgggctccccattgggcagttccctgggagtgcagtggggaattcttacactttccctctaggtccccgaaggatctcgttttctcagtgtctctttcaggttggcaggagccttgagcctgacacttccctttgatgggacaggcaagctctgtgggcgcgtaaacacgctgtaaccaagttctttgctgattttacagttttgtgtgctcccgagaagaagtgatcgtactcaattgtctattgctggcctgccccctaagagcctgggggctcctttcccctaacccagaactagctgcacggggggcggggaaatgggggtggggaaggagtgggagggcagtggtttccgcgagcagagcgatgttactgagtgagtccctgaatggggagcgctgctgtccccaagccgattggtacttcttgtcaggaagaaacgccaagaggtgggagtgcctggggagggaggcaggcggtccctaccgcaggcgcggggagctgcctttccgcccctccgcctgctttccaagcctggactcttaggagtggctgaagctgcggagcgcttttggagcctgtgaatgaaccctcctcctctccctcctccttcttctcgctgagtctcctcctcggctctgacggtacagtgatataatgatgatgggtgtcacaacccgcatttgaacttgcaggcgagctgccccgagcctttctggggaagaactccaggcgtgcggacgcaacagccgagaacattaggtgttgtggacaggagctgggaccaagatcttcggccagccccgcatcctcccgcatcttccagcaccgtcccgcaccctccgcatccttccccgggccaccacgcttcctatgtgacccgcctgggcaacgccgaa

SEQ ID NO: 34008 - DNA, 2300 bp, Homo sapien
acgtttacaattttaaattaggttgttggatagtcagtactttaacacattggaatgaacccttagtagtataattttaaatactatggtatggaactaaaggagatacatagatagatgtgtcatatatttttaagacgaatgaaattcaagatggttgcagtggtaggataaacaactctaacctagtgtgtgtatcatatacagctccctataaattacactatacatgaccacactaacgtgaacattaatttagcaaactctccacctttgctcatcttgactcctcatctagaatgtctcctgtgtttgattgttaaattatacaccttctttatactctctcctccacagcgccccttctctgattcctgtaaacaagcagagagcacatcacaactctggtactgtttgtctgttgtttcatatttgtgtttacagttatctcaattatattccaaattccaaaaggccacctttatatttgttcacccaaagcacaatcctgggctgaaaataggtaatattttaaactgtaattttgtggacaaaagttagtgactacaaacaaccaacaacaacaacaaaaataagcatttcaaaaaagttcttagaggaacaaggaagtgaacttctgaaaataagactagtaaatcaggtagaattttgaagctaacattcttggtttccttgacaaataaatttcacaatttgtttgcttatctaccatcttctttatgtgatataatgaagaaaaagaaaagatttaaagcaaacgtgaaagactaaagccatcagcatcacagtagtgcaaatcttcacaggggaaaatacagagacatgtttcagtctcagaagagacttggggaccttctgtgaataagtgaattaggttctggagtagaggctctcctacaaggacctccaggaacagactcagagctctttaataagtatcccagggagtcaggctttcttggaaaaaacaaattagtgtgagaagccagtactgtgcaatttcagttttaaaaatagccggtattgtcaaggctgctgtgtgcatgagagaaatagaaggtccttgttaattttcgtgtcagcttccacattaaaaccaagaagctccactgaaatccttgcctggcaaatactgcaaaggttataaggttcgtatcacttagaatcacttttggttcttccaatgacaaacttttgggagggaagaggttatgtccccttttatcacattggtctttcaataaaggacaggcaagtgatggctctgcctttttcacttaggaccagatctgtgcctccctgtctgtttcagcttttcatttgcctaattgccctgggaggctggcagggacgttccctgcagccgtggatccgctgactgcagagaccctacctggcactctaagttggtgcgtcagcattttaggttgaaatgaatgaaaaatcaatcaggatgactgcagtggtagcgtgcacaactctaacctagtttgttcataattttcaactattcaccgtagacccaagcagtatgtaagatggtaagtgaatctgtaacaaatgtgctgcttctgcttaatcgggcacttttttttggtcctcttttctatttggaacaagcaagtctaaccttcttaggaagccacatgtaaaatgaatgacgatgtcaagtttcatgcaaatattatttgccctggctttagattcactttctaattagaccaagtgatactcatatacagacataacacattgctgttttattaacttatgttgcaaattcagaggcttacatttttttaagagtgtgtatgtttttgccacatctctttgttacttgctgtaattctctatccaaactacagtgttttaaatttctagatttacaattctgcaaagatagagttaaacactatttggactctggctacatgatggtagcaggaattgttcaaagctgccgtcttcggctcttaaaggcagctacagtaactttctgaacagattgggttaaatatttttacagacccattctatgatgataaggcggtaataagttgtgcagtgcaacactccaaagggttccaaatctcacaagcctctttgtatgtgatgctctcgcagtgaagaagattctttgggctataaagatgaagagtctacttcttctggtgctgatttcaatctgctgggctgatcatctttcagacaactatactctggatcatgacagagctattcacatccaaggtaaggaaacacagcttctcttatcaaag

SEQ ID NO: 34009 - DNA, 2300 bp, Homo sapien
gccggaataagtgtatagagcagaccacaaaataggggaacaagtgccagccatgagccagctgatttgatttacgctccaggcaatcgccagaaattaggttgttaagctgagggaacaagatcggtatttaaactgtctttatatgatatcatagccacacaccaccagccttaccacctttatggtgctttaatataaaaattggatatttgtttataagtctaattcgtttatgttctttaaaatacacaccaccctgaacgtttacaagaaatatgaatagcataaaaaccctttgcatagttgaaaagccgagatgtatcttatttttattggcagttaatgtagaggcctatataacagctgcctcaatagccactagattagggacataaaactgcaaaacctgttccctgtgcgggaggggaaacagaaaaataagagaagcgccctcacccaggttttggaattccaagaaaggtgttgaacgcctgatgaagaattcattttgaatataactgtcttcatttagggagggtgtgtgagtgttccgtttgtctttgaaatgaaacctttccaagaggcacgtgttgatttaccaaagacagaatggcaagggggagcccagaggcaagaactggtgaaatctctcagaagacgcgggaagaagccttttttcccctgcaatctctcccgcctctctccagagtccaggaggaggcagtccccgtggcttaggctttatctttaagacaatagcgccgctcgccgccacccgcgcgactcggatcgggcatcccggcggccgcaccccgcgcgctggctcatctgcacaccggccacctgcattgtcggccagagcccccgtcccggcggcttccccagcagcttggctgcccctcaggtcctcccatcccaccttgcacctccaggacgccctggacccgcccatcctcctgccccactagctcatcgacttacgactccctcagtccctacggcccacggaaccctctccccaacccgcgccacagcccgagcggcggcggcggccttaagaagcccgcagtcccgcccgcgccgccccgccggggccggaggttggagccgggagcacggccgcgaatccccgcacgtccccagcgctccgcgacaccgggccctgctcgctgcaactcggggacggcctgcgtctcgcctccaccctggccgcgggcccctcgagcttgtttgcttgtcctcagtcccagggccagccccgctccctcctcccggctgctccaacagccgtttgcttcctgcggtgtgtttcttttttccccttcctagactccatcaaaggtggctctgttattgaaatatgaagccatttcctctccaaaacccttggttactcaaggcgggaatcaatggacctatatactctcccagaagttataaataaacgtctatttgttcaggaggcgttttcccgcgtgtcccagcatcttccccactggttatttcaggggtgtgtgtgtctgtgtgtgtgtgtgtgtgtgtgtgtgtgtgtgtgtgtgcgcgcgcgcgccctgtgcccatctggttctaatcctggttatggatccacaacccaaccccacccatcccgtctccccctcgcattcctcgttctataaataaatccaggttctttgagctctgtcatccaaggatacaatagcagttgtttgttaagagaaatttaaactcaacaccaatactgagtccagtaaaccagaaaatatgcttctggtgatttgggtggaaggccatctccagtttaagaagctttatgtgccactatcatcattgtctgttatccttgatctcctttggtgaggggaaggcgggaaagagaggacctctccgacccttggatttttcttttaagcagaggctaataaaacaaagcgcaaactgactgtcctgaggagtctgctcacaccgctgccccgcagatcattccacagaccccttgtcccatcccttctggacagacccaggactgatgagggttcgggttcgggaggtgtggtgtggtgggggcttgtgtggctgtagcggccggctttcctaaaccccagagcgggatactcgggatctgagcagaggggaaagtcatctaagaggctgctgctttacaaggtctgggcacagagctgcccctcccttcctccctgaagtttgcatgaagtgcacattaggctgtaattaggggatttgggaggagaactttcctggtgacgctttgcttttcttctgctcttggtgagaaa

SEQ ID NO: 34010 - DNA, 2300 bp, Homo sapien
ttgtctatcaggtaatacagaatgtcatttactgtctccgcaccaagtatttgggcatagaatgtgcattgtaatgtacttttatgcccactagtttttaaaaacccttctttaaattaaaagaaagatacatgtttagaaacacacactgttggcaaaaataatttaacttcttaatatgctcattaaggtcaaatactatcaaaaaagtggaaataaacagggaataacatacaaaactacacaaaattcttaacccactcttttttttcccttaaatatcacatcccagagagactggtttccaactttacatttttaggatttagtactatcctttagaaataaaacctaaaactaatattagacatctcatttcaaaagttaaagtgtattttaggatgaacatgccacagggtgactgaaaacatagtttcacaaggaagtaatgatgatgcaccagaaaattagaatttgattgcttgaaacatctttgctacaactctggacaatactgtcttattctaacatctgtgactttaggcatataaatagacagtaaataaatgaatctctctcattctcttagcaaggtgattttttaaaaaatgtgttttaaccctcccaccaatcgtgagatatgaacaaaccctttctgaaaggtgttcttttttttctttctttctttcttttttccgttgtttgcttgtcagttatacaataccttaaaccctccctagcagtattcagcattacggttccattcacctcgcattcttcatttcacttaaaatttgaaaaggaaggtagaaatttaagtttaaaggactcatctcacctttaaaggactcatcctttaaaggaggcagatggagatgtagttccatggctaattgcactctgttattcttttcttagtagattcacctttcaactctttgccttcgagaatgtttctctttcaatttctctagctctgtgtttgtctctctccctacctccctctctagaagacaaaaaaaaaaaaaaaagaaaagaaaaaaggaaaagaaaaaaaaaagaaaaaaaagaaaaaagaagccctgtttcattttggtacctgtaactgctggaattggatccatgtacaataagcaatcattctaaccgaaaaacagagaagaaagcacaattgtaagccatgagctgtatttttggttcaatcacttccactgcaaaaaccagtccatttattttggcggatagaaagaaaatttgatccaccttagtgatgcttcaagggtctgtctttgcctttatgttcttgcacagttcccaaacttgccccacttcttctctgaaacagatgtcctgcttaacgagatgcatgtctcctactcacttccacccttttgcccccgtgaacagatgagcccacaaccctctctccccagccctggagctaactaaattgtagacagagcagcagagcagccctgtcttagctgattagggtctggttgctgactacgttgcagttcctgagaaatacggggcaattcactttgcagggttctgtctctcatgcagttttgtgccccaagagtcacttttcaaaatctcttaacttctgttcctggttatactgagaaaggaagttcaggggaatccttaacgtggttaattataaagtcagtgctggaatccaagggactctcaggcagcaagggtgcagctcttaaccccacagtctccagcatgtgcggagaaggtacaggcaatgcaggaacttcagaggtggtggcaggtgctaggtgctagggtgtggctgcagttgtctcccttttctcttatagcagaaggagctgaaagaggaggggaggagggaggaaggagagagagagcaaaagagagacagagagagagagcaaaagagagagagaggagggggagacccggggagtgaataacagggcgggcggagggcgggcgggcgccgggggagtggggagcgcgcctgccaggctcagactcacacgcacgccgcctctgtttgtacacagtgcgctcccggcggcccgctcgctcccctccagctcacgcttcattgttctccaagtcagaagccccgcagccgccgcgcggagaacagcgacagccgagcgcccggtccgcctgtctgccggtgggtctgcctgcccgcgcagcagacccggggcggccgcgggagcccgcgccccgcccgccgcgcctctgccgggacccacccgcagcggagggctgagcccgccggcggctccccggagctcacccacctccgc

SEQ ID NO: 34011 - DNA, 2300 bp, Homo sapien
tggatcaatcccagtggaaagcgtgcctctcagcagcctgcaccatcctccacctacactgtgtaatgacagtgctttgagatgtagcaaaggctataaatttatctattctctgttgtctcagagacctgacattctgtgtcagaatgaaaagttataacaaggcaaaagtcttaatgagaatcattggtactcaatagaatagtgaattaaatacagccaagggaagacccaagtctcatatttctcttgtatattccaaagtttcagtgaaattccaggtaatagaggttatttcccacactgttaaagcaaggttgcagacacttctgaatttcggtcccagtgctgaaggagggcacacctctgtcctggaaaatgacacaggaatgaatgctcttcccatgactcattctggtcattcttccagcatcacagaaaccaaaaaatagaaatatagccaaatacatgatttgctatccctcttcttcaggtttcttacctgtttcttatggataataacattgccttaaggattatgatgaaaatatgatatccaagtatgtgtacagttttgaacaaaatgcctagtatgaattggtcaataaataattatgtgactatttactgaattacatggattctataaataattactgaataattattgtgattccttttattggcagtgctcaaaatgcatccctgtgtgacctcaagtaaaccagtaactttgtgaacctacagttttatcatttttaaaatgaagaaactagacagattttcattctgacacagaatatcaggtctctgagacaccagagaatagataaatttatagcctttactacttctcaaagcactgtcattatacagtgttggtggaggatggtgcgggatgctgagaggtgcactttccactgggattgatccagtcctcctccttcacttccacatgaatgctgcgtagcccgtggtcacactcatcacaccctcaactcaggcaagtccagcagccacacttaggagacctgggctacaggacaatctcccaagtcctagcctcacaaaacctagttgaagatggaagctgcgaaagtgaggaggtggtttgagggagcacgctcccctactcatccctctcatctcaaactcaccttctactgcacaggaacactgaggatcaccaaccacccctgaccatgagcttgatcttgccaggttttgttagtggaatgcaaccacacatcaacagtgttagagcaactcaatatatatatatctccaacaatattccctgagaagcgttcaatgccctgttcttttcaatatacgggaaaactaaaaacaacaaaataccatcaggtttacaagatttcccaagatacatggtcacacatgttttcaggggatatatacaaatgattttgatcacttgataccttgaaaagagctattttgggaccagaatgatattcgtaagtgacaagtatgaaatgagtgttcagtgacattaaaaaagcaaaccaacccacacatagaggaagagctttggacgtagggatgtgaaactggtcttaagtgtaatgaaaagccaagatgctgccccagtaagagaaaagaaatcaacataacaatgggatgcagcaagaatactgagacagggtagaaaatattttttaaaagtgaattattccttcattttcagtcgatacagaaaaaactgcagaagacccagagggatatcatagcagactaaaagttttctatctttcacttgtggaaaagcattaagatcattttaccttaaaaagaaggtgaggtgacttcatgactaccactaagaaaatataaccttctggaaaactatccctaccttgatgattttatacacacaagagatgaacaatgaggaatatgcttatatgtattgagaaagaggtgggcctgtagcattgtcacaagggtgcacaaatactgagagtgactgctgaagaaatggtccccatcagtgaccctcaggtgagaccagggggcctagtgtttcagcacagcctgggcaattggaatgcaaggatcctaagattccatgacacccccaccttctaattctgttattgcaactgcagaccgttacctggcatgctggctgctacctcgctcactcttgtcagagtcggagctacagtcagtgccttcagctctgagctcaggcataccggtccctgtttttgcagttaaggactctaaagtgttgtgacgtgttcatcaagtttttctcaaccataagttaacaattc

SEQ ID NO: 34012 - DNA, 2300 bp, Homo sapien
gcagtgactgtggtcactcagcaatattcagctgagggcggggctgggctgaagtgtccaagatagcttcactcacatgcccggcacttgagtgtaaccaccaccctcccccatatttacataggtataaactttttttttttttttttttgagatggagtctcgctctgtcgcccaggctggagtgcagtggtgtgatctcggctcactgcacgctctgcctcccgggttcacaccattctcctgcccccgcctcccaagtagctgggactacaggcgcccgacaccacgcccggctaattttttgtatttttagtagagacggggtttcaccgtgttagccaggatggtctcaatctcctgacctcgtgatccgcctgccttggcctcccaaagtgctgggattacaggcgtgagccaccgcgcccggccaaacatattttttttttttgtatttaacttaccacaaagcccatgagaaggcagacagttctgaaaccatattctggaatctctgccctgcaggtccctaaagagttaactcaaagccagatacccaatggaggctcaattaatgtgaattagaagcaacaatgaaccaaatccacagataacattactcacactagattgaaaagtgtaatctagaaatattaagtgtgaaaaagtttctcaattatagttaaatcagaattctttaatatgtaaaggcagtgaacggaatgttaaaaaaaaatggaatgtcacataacttctataaattaggtggtagaggacaccagttatgatgcatttcatgaacccctactcaaaaagaagctacttgttgaaacaaaatatgaatttaagtgttttttttaagtgtttttttgggggggaggggcatggttgttctcttccaaaaactgaaaaaaaaaaaaaaaaaaaagacgaaaagagcatatatgttatgcccttttcaaagcaaaccttaggtcttattggaattgtttcctaatgctatataaatgagacacgtgaggcaatatacactcccccacagatgaataacataacatttaggttaccagggcctttcacaatctaacctaacaccactttcccaggttcatttatcactggtttcttctcaataccttctggtcaaagaccaccagaagcacacatgtaattgacaaacggggtttattattcattgcagtaagggttctctgtaaaatattagaaaatgcttattggatttgggatttttttctcctaatattggctaccttaccaaatcttaggaggaagaaaggctagatcaaggctaagattgtaattggtaaagaagcagaagtcatcaaattaaaccagatagggtgatgtccggtcattttcgtggcttggacaatgttttatctgtgttcagatgtgattacacagtgatcatattcttttcttaatgaacactgtcagagtggtcttgttggatgctaatgcttgctgaaattgtgtacgttcatcaggcggacaccagttcctagtccaggctagctccaggtgtcagaggccacttttcccttctactcctcacacatgctgtactcataccagacttgagttttccctgccctttgttcttccttcttttttattcgattcccattatctttagtgatcattcccttagcatttcagttttctctctgaagtcctttgtgctgcacgttgtttgattacttgtgtttatgctttgtttcttcagctaggatcattagcacatatctctcagcattggcaaaagtcctcgaaatcattgacacctagcatatactttatttttaaaaaagaaagaaagaagagaaaagggatgggtttattgtccttttcaacagactagagtatacggggtgaaactgcttcacttgattcaataaaatcgtttccggtaacaggccccaggaatcctagacctaagcctggcgcgaaactacatttcccacaatccttcgggggctgataaggctccgcaatggtctgaactacaattcccacaatccagggcgatttccgctttgtcgcgtttcctcaaggctccgccccatttcccatctttcttttcagtccttgcgcaccggggaacaaggtcgtgaaaaaaaaggtcttggtgaggtgccgccatttcatctgtcctcattctctgcgcctttcgcagagcttccagcagcggtatgttgggccagagcatccggaggttcacaacctctgtggtccgtaggagccactatgaggagggccctgggaaggttagtgtgtaa

SEQ ID NO: 34013 - DNA, 2300 bp, Homo sapien
ttgtttgtgtctcaaacctagcccaagatgttgcagccatttagagtatttattaattaggatgaggttttcaaatatcttcagcaatccatctttcagagttgttatctccttgaaagagtgtcagggtaaattatgttattggtactgaaagatgtccagtctaataatatcatttgcaaaaggcaatgcagcacttcaaaggaaatatacttaagtttcaaaataatacatgtttttaaaaatacaagcctgcattttgaaattacttttgtctgtttcaaaactcctgttcaacaacatttatggaactttgattttctatacagacttactggggttagaaaagaaaattcagaggtctaagtcattaaggagtttaatattaggtaggatatagaatatagagctaatttttattacattttgaaatcaatttgatcaatgtatagaatgggcaatatgcacatgcatgacatttaaaaagtatatattatctcccagtcatcaaatttcatgagataccaccagccacccggcctattctatctttccagggaggcagataagcaaatatgcatgaataaatgctcataaaatgttgacatctagtatgaaatgaatttgaactttaaactggctgaatacaaaaaaggcaaaaaaaatatggcaatgacaagttttacaaattagagattcttggattctgctggtggtgctaattagagaagtctggttgtcaagcctggatcaagttaaggttgaagaaagagaatgattgagacagactttatatattaagtatatataatactttggccatattctaatacccagagcaatttgcacctgaataatggccataattcctatttctcactactcttatcaatgtggtatttattaaatctaagaaaccgtattttataaaactgcatgcaacagagtatctactaatgttccacaagggagtggtattcaaattgaacgtgcatcagaatcaccctgacagcttgttaaagatgcattttctcaagctgcacccactagagattttgatccagagtattcaaggtaaagtctggagtctgcattttcaataagcaacccaggtaattatacttcagtaagtccaccacacaattgggggaagtccaacatagacagttacaattctttgatgagttgtccaggcccagtgtcaggtacacacaaaatgaatgtcaatattttaattcaccttcaggcccctttctggttatttttttccatgtttgaaaccactggagagcagctccaagaccaatgttcaaacaacttccattcaaactctaaaattgcaaccataaatttaatgtgcattgttccttgctgaatccttcatttttccctcacacaacatgtagtccagtttacatgtataaatgaggagatttctatcagcaattttagaaccttattggtaaaaattaacctcatgtatcttacattttaatacaggggaaattttactcattcttactaatcagaattcttttttattcctttttattatagaaggagctgtgatctgcctttgcaataggacttttttattttatatcacaatgtaattttctttgaaatgtgacattcattgcaacttaatctaagaaaatcacctcagttggaattggccttggcataagcatttcaaaattttatgctgaaattaattgtgcgtatataatatcatgcagagagtaattttcttggaaagtagcctttcttttgatgggttactaggaattaagcattttagcattctttattaatttttcaaagtcactaggaccaaggataacaattcatcatgtgcatacaaggccattctgtgtttcctactcttgccttgggctcatcattattaatctggaattccatttgttcttcactttttgaatatgtctgtttagttgactgtagtgccactggcaggaccatgtgcccaggaaatccaagactcatatttggacgaaagctatgtccacttttcaactagtacccctacccaaattaccatagcaaccaaaaaattgcagatgcctacattctagaatcatgttctaaagggatgtcatcatttacaaaatgtctttgttgagtctgaatggttcaaacaatagcaaaaaaggattatttctctcttggacatttcaaagtactatgacacaaaatatccaagacttgttatggtgaggagccaagtggaatggaaaggacagctcatcccggcggctgggagtgcatgcacacacatg

SEQ ID NO: 34014 - DNA, 2300 bp, Homo sapien
ggaaaaaactactttaaagttcatatggaaccaaaaaagagcccacatcaccaagtcaaccctaagccaaaagaacaaagctggaggcatcacgctacctgacttcaaactatactacaaggctacagtaaccaaaacagcatggtactggtaccaaaacagagatatagatcaagggaacagaacagagccctcagaaataatgccgcatatctgcaactatctgatctttgacaaacctgagaaaaacaagcaacggggaaaggattccctatttaataaatggtgctgggaaaactggctagccatatgtagaaagctgaaactggatcccttccttataccttatacaaaaattaattcaagatggattaaagacttaaacgttagacctgaaaccataaaaaccctagaagaaaacctaggcattaccattcaggacataggcatgggcaaggacttcatgtctaaaacaccaaaagcaatggcaacaaaagccaaaattgacaaatgggatctaattaaattaaagaaaatcatattttttaagttgagaatgacctgcctgattgtggagatgagttagttgaccattcattcattcattcattcagggaatgttttttgagtgactgttagtaacaatacactgggggttctcattatctataagatgctatcaatatgtatacagaaaagggactagttctttcagcatttgttaaacaaattaccttagaaggcaacccaatttaggagacagggtgtaggctttagaggcagactgatctgagtttgaatctaggttctgctacatactagctgtgttatttttgacaagttaattggtgttccaattttcagtattaaatgagatatttatagcattaaaacaatgtacctaaaacaatgtctgatacaagtaggcatttaacaaatagtcaacatcatggccatgcaaataggcacaatcaacttaagtatcagctcagtttgctcctgttctaataatgataggtctcagcccacctggttatttccaagactattttggaaacattatagaatcttgattgataaacaatacaatagaatgatgatggttcataagtattcatatttaaacagtttgaataaatgttcataattattttgcagtttaaaatggcagtttttctgggtacaaggaaagaagactgctttttgacattatggaaggaagctgtgaatagtattaaatcccatttacatttgtatgctttaaaaatttcttgtatataagccagttctaataatttttttttttttttttgagatggagtcttgttcttttcacccaggctggactgcagtagtgtgatcttggctcactgcaacccccgcctccacctccacctccgcctccgtggttcaagcgattctcctgcctcaggctcctgagtagctgggattacaggtgcctgccacctcacctggctaatttttgttcttttagtagagacggggtttcactatgttggccaggttgtgaactcctgacctcaggtgatccgcctgcctcggcctcccaaattgctgggattacaggcgtgagccaccgcgcccagcccagttctaataattctttatttcccagtcgtttaatgtaagaagtaaagaaatacaagtaagtataatagatttttaaactttctttcctgtttcccgaactttaaaacccatcactcaatttgaagacaatgcatttttatatgtgttaggaattcacttcttcatacttttcagatgctcagagattgtggacattatgcctttcatcctttacctttggaaccaacttgtatgggagaacaacttatcaagtataattgtactatggtcacacatgtcctttactctccatgttgaaaatagaactatgacaaggaagcaattactagaccaatgtttttttggcccaaaggaggctagtgcagaatcagacgaggttttgaagtgatctaaagatcttggatcacctgggtcctggtcatttcaaggctatagaatcttaatgtaaattggagagatataattattgaaaataaatctgggtctactctaatattgacttagactcatttcaaagtcctaacatgatcttcagccttcctttcagagaaactaattctctaaatatgtattcctagacccactatcattgtctttgtactgaatgattattgacagttttttggatttctagagacctctcctgacagagaaatatcctggtccctaggaagcattctctgtgattt

SEQ ID NO: 34015 - DNA, 2300 bp, Homo sapien
tcacccactaacttagagttatgttggtctgttcatgtgtaagaaaaacaaacttttattgtgtttgagacattgtacattttggttcttttcaccctcttcagcttcccaaagtgctgggattacaggcaagagcctgtagaagagtcatttgcctacttcattacattacctaggattagttagattcacttccctgctggggaaagcacttcatccaaaaacatttctgtgattttcttctcttttattgatagttgctaagtctgtctctgtagcacacatctcccatcaatatttctatttagttcgtttcaaactcaagtaccctgaaatattttaagtttaacatcccactcctatctttaattgtaccatatttcaagttgtcattaagaacccccaaattcatcttttttcacggtatttaataagatttatcaacatgttcaccaagtattattttttacagacattgctttttgcattctgcatacttcagcagttattttaaagagggtctgcaagtggtacattctgtcttattctgagaaatgtttatttcacaatacatcttgaatgatagttttgctctttgaaaataactcttttctagtatcaaacttgtaaaactgaaaatggattaaattcacctgaaaaatacagagattcccagattggattaaaaaaactaagtttaggctatatgcttttttaaagaatcacacccaaaatataataatctcaagaggctgggcgcagtggctcttgcctgtagtcgcagcagtttgggaggctgaagcgggtgaatagcttgagctcaatagttcgagatcagcctggctaacatggtaagaccccatctctactaaaaatacaaaaattggccaagcatggtggcacacacctgtaatcccagctactctggaggctgaggcatgagaatcacttgaacccagagatgaaagttgcggtgagccgaggttgcaccactacattctacccagggctacaaagtgagattttgtctcataatagtaataatctcaaaagactgaaattatatcaggtgctcagataatgttactttgttataatgttgatgggaaaaaaaattaattcatggttgaggctaatgtctttgtgaaatttgcaccttttccccatgtctgtgtggattttctccaggtactccagtttcttcccacatcctgaagatgtgtatttcaggtgggtgggcatgtgtcagcgatctcagtcaaggtgagtgtgggtatatgtatgagtgtgccctgtgttgggatggtgtcatggccagggttgcttcccaccttgtatcctgaactgctgaatgggctttggcctcctgtaacctgaactggagtaagtgggttggaaaatgaaagaataaatgaatacaaattattataagataaaatataaagtatttgataatcatacaaatgcaaaataataagaaatgttgtatgaaagtgcttagagagtctgccttattgaatattgtttgtttttgaactgtgtgttggtaggaggtactcctgacaattttcactttacaaacatttatttcttgatttaacctaccaccaggatgacggctgtcactcactgattcaccaaaaattggacaaattgcttacttatttttgttgatttttcttaaatgtatgtatagcttacatttatatcaatattcaacattagaagtgtttcaagtcttcacttagaaatttgttgatgtttttgtgatacaaatatgccataggaactaattcttgtttatattaattagcctatagtaaaactggttttgttacatggcatctcacttgaagttgaagtttccaagaccctatcaacaacgttgagaacttactgtcataggttgaaaaactgtacaccaggaaccggaccaaaatagatctgacagtaatattgatattagaaaacaactttaagtctaataatgatttttctctaaagaggttgattacttcatgatagaaggatcatgtcaccatgatgacacagactgttagtgcacatcaatatccattttgtcctcttcttttttggcatacaaccaaaacttacataggctttttatcattttactgggcctatgtaactgagttttagccagtggaatatgtccaagtgacatttgccacttctaggtctggcacattaacacttgatgtattacatttcagaccctcttatcattctgcagtgtgtttggcgatctgttgtttaagatctatatgcactggttactg

SEQ ID NO: 34016 - DNA, 2300 bp, Homo sapien
tgataggtgttagactgcattaaatattgacctttacaagtgctaaagaattgtcaaaaaggaggaggtaattctgcagtaagagtagtgagcctcacctggactcccaggcaacatacagagggtgtgtgaacatttagaaatcagtgataaccaagagccggtgataacctgccagttcaatgtcctgcattcaagggctgacagtggtgactgggacaggaatgttggaggattgggatgctaacacactggaggttttcaagcacaggctatattaagatttgttgggattgttgcacttggtgttcacacagcagacagtaagtagagtaggtattttgatagtcttgtctaactgagggtctaagtttaaaagaaaactgttctcagggaggccaccataagtagtacttcattattaagtattatggaactacttcattctcatttctagaacagcacagagcttggcaactcaaaacccgcctattttacctacccacctaatgaatgacatttattatttctttcagaaccgtttttaggtattgcatacctccttcttgattagtatactatacattaatatagtggttctcaaacttaagtgtgcaaacaatcacttggagggtttgttaaaatggatcgctgcatattttctgattcagaaggtctgaggtggcatttctgaattcctaggatgttgcggcctgaattcactttgagaactctagctcctgtgactggtccatcttccttctcccaggtagcacactgctaagagatatgcgtaatggaggccccaggactactcctaatcaagttggattgttgtcattgactaggtaaataggcctgtgcaaacttacaaaggcaatgcattgcctgtatcttgtcacgtcttttagtggtcttttctctttttcctgggtttctatcacagccacttgccatcctgagtgttagtttgatcatccttagcacagaaaatattgatctcaaagatcaatatccaatggtatttaatgtgggatcactcctgggagaatttaacaatattgttaatttcaaaccatgggaagctccctctacatgaatgcatagtttgtatacattttagtgtaaaagacaaaataacacccttctccttaattgtattaaaaatgagttttcagtttattgctacttttgaaacgatatataattataactagcattctgggacattcttgacatttgacttgttgaaggtgcttgcattgtggatcacgtcctgcagtcttttgcacacaaaccaggacaaaagtgcattgattagtgttttctgtggcacctcctcctcttcatcagtatccaacagacttataatggcataggtaagtatatgagacagttgataaagaaaaacgtatgcaaatactggtagaaatcttacttcataaccactatttctactcaaattcttcacccttctcatatggtgccctttatttcgttttggagtttcagaatctattttaactgtgtgtgtgtgagatagtcatagtgatttatagcatgcaacgaaaaagaaaacattaatagtactgccccgatcttcaaagctacctgacccctgcccggtttctgcgctgctggttaaggctgttttttccactggtcaggaagtacggaactagtttctgggcattttcctttccctttccccctccttcctctccaccgcctcctggtccccctctggtctctccggctttaacagcgccaagcacccgcgtgctcaggtacccttccctcttctcccgcccatcaaacaaagccccgggagacaggcgcgcgccgccggccacgccaacaggagatgcggccgcgccgccacacgcttggaaccggaggaggacagcaagcgcgaccacgcaccgcgcgtccccgccgcttccttccctctggactcttccttttcctcccggcccggccccccgcccccgctccgggaacgcgcctgcgcacaagctgccctctcccttctccgcccttccttccctccgtccctcctcccctgccccgccttcctttctctctctcccgtttcactcactgagagctccaggtagtgagcagttcagtcgatttcctcgttaccccgcccccctttctcttgcccccccacccctctcatctgcctggtggaggatgaagcggctgcagtggccccagcctcagcagcggcaccggcggtggctgcggtgtgggtggccggaactggggtggtgaagaagcggtggtggcggctgaag

SEQ ID NO: 34017 - DNA, 2300 bp, Homo sapien
ggagaatttaacaatattgttaatttcaaaccatgggaagctccctctacatgaatgcatagtttgtatacattttagtgtaaaagacaaaataacacccttctccttaattgtattaaaaatgagttttcagtttattgctacttttgaaacgatatataattataactagcattctgggacattcttgacatttgacttgttgaaggtgcttgcattgtggatcacgtcctgcagtcttttgcacacaaaccaggacaaaagtgcattgattagtgttttctgtggcacctcctcctcttcatcagtatccaacagacttataatggcataggtaagtatatgagacagttgataaagaaaaacgtatgcaaatactggtagaaatcttacttcataaccactatttctactcaaattcttcacccttctcatatggtgccctttatttcgttttggagtttcagaatctattttaactgtgtgtgtgtgagatagtcatagtgatttatagcatgcaacgaaaaagaaaacattaatagtactgccccgatcttcaaagctacctgacccctgcccggtttctgcgctgctggttaaggctgttttttccactggtcaggaagtacggaactagtttctgggcattttcctttccctttccccctccttcctctccaccgcctcctggtccccctctggtctctccggctttaacagcgccaagcacccgcgtgctcaggtacccttccctcttctcccgcccatcaaacaaagccccgggagacaggcgcgcgccgccggccacgccaacaggagatgcggccgcgccgccacacgcttggaaccggaggaggacagcaagcgcgaccacgcaccgcgcgtccccgccgcttccttccctctggactcttccttttcctcccggcccggccccccgcccccgctccgggaacgcgcctgcgcacaagctgccctctcccttctccgcccttccttccctccgtccctcctcccctgccccgccttcctttctctctctcccgtttcactcactgagagctccaggtagtgagcagttcagtcgatttcctcgttaccccgcccccctttctcttgcccccccacccctctcatctgcctggtggaggatgaagcggctgcagtggccccagcctcagcagcggcaccggcggtggctgcggtgtgggtggccggaactggggtggtgaagaagcggtggtggcggctgaaggagcggtagcagcctcagcctctttccctgtgcttcctttcctctttagtgcagcgaggaagttttcgcttctgtacatgtgtttgtgtgcgtgagtgtgggtgtgtgcggtgaggtttgggtggcgtttgtgcaggcgttgggttttttgcccacttggcttcccgtaacccaggcagctggggagcctgggctgtggccctaggagggggcgcggcggcgggctctctccttttgttgttgtttcctcagcctggggagctgaaggggagacgcgtctgggtggggctgctcggagcccgggcctggtggcccctggggctcccgggcgggcagggtagggcagagtagagcgggcttcaacatgatggcggccgaggccggcagtgaggagggcggcccggtaacagccggagctggaggaggcggcgcggcagcgggctccagtgcctatcccgcagtgtgtcgggtgaagatacccgcggccctgcctgtggcagccgccccctatcctgggctggtggagaccggagtggctggaactctgggtggcggagccgctttggggtcagagttcctaggagccgggtctgtggcaggggcactggggggagctggactgacagggggaggtactgctgctggcgtagctggtgctgctgctggcgtggccggtgctgctgttgctggacctagtggagacatggctctcaccaaactgcccacttcgttgcttgctgagactctcgggccaggcggcggttttccccctctgccccctcccccttacctgccccctttgggggcgggcctcgggacagtggacgaaggtgactctctggatggaccagaatacgaggaggaagaggtggccataccgttgaccgctcctccaactaaccagtaagttaagactgctgttcaggaatttgggaagctggctccagaaaagaagtggaaatgaaggggtaaatcatactttgtccttttcatctgtggtttgttaggaaaagtttttgaagtttcaggtttcttgggtaggaat

SEQ ID NO: 34018 - DNA, 2300 bp, Homo sapien
atagagttccttttataaaaagaaaactaaattgaagttaccagcagattacttttactttccacttggtttttccttttggttatattactgacaggcaccaaagtagctacagagaaacatacatgcagaaatccaattgccaagaaatcttttgcatctgaatcacttgggactctgtgtgcctgatcatactacaaacttctgaagttattctacaagcctcaaaatgctaatcagactttgttacacacgcttgtgtcttctaaaactaaattggtgatttcaagttggtatgcatttgctaaaacataaaaatcttcttaagctcccatatttatttgtaacaaatatattcttactgtctgtgatatggtttggctgtgtctccacccaaatctcatcttgaattgtagtttccataatccccacatgttgtgggtgggacccgacccggtgggaagtaactgaattatgggggcagttacccccatgctgctgttattgtgatagtgagttctcacgagatctaatggttttataaggggcttttcccccttttgctcagtacttctccttgatgacaccatgtgaagaaggacatgtttgcttccccttccgccatgattgtaagtttcctgaggcctccccagccctgcggaactatgagtcaattaagcctctttcctttataagtgaccccatctcgggtttgtctttgttagcatcatgagaatgaactaatacagtctgctaaaggttaaaaaaaaataaaaaaattaaaaaagcaactgatttcttaaagtgaagaggaaagtaaagaaaatttatctcatactaagtgactttacttggccttttttttcaaatcactatgatagagactaaaattgggtcactggtaaattcacttgaacaaccactaggctaagcaaaacagctgtagtaccccttagaccaactacacatcacttaaacttgaggaaggggagaagagggcgtgtttatattaggtattcttgggtatatttgtatataaccagataactagagtgcatatgtatgtgtgtgtgcacatgcgtgcatgtgtgtatgtatttatctcagatcaagttagttcaaagtaagggcagaaatgctgtttcctttttcaacaggtaacatatttacagaatccaagaggttttagtttcgagagagcatttctaaagaaacagcactatcatacactctgtccacccaaaattcactaaaagactaacatacaaaaggttgagaatacaaagtttacactgaaatgcactcaaccatgattgtgaagtttttactacctttaactcccatcaccctagtaaacagataacgaagggaagaaaaaaaaccacacctctccaagaaatgttatgcactgatcaaatgttgaaagagaggaggaaaagggagggaaggctagcacaatacctactagcaggaggctagtattagtacctacagcacattttcaatctcttgtatctgtgttctttaaatcctcaaaacagtatcaattcttatagttgggtttttcttagaacttcaacaattatagtatcataccattcagcacatgaagataagaaatcactacgtctgaaggttaaaagtaaactttagtctaacattgtctcttatttagttcatctccaacaaactatgtgccaagcattgtgctacatggtagaatataacagtaaatacgacagaacaccatgacaggaaagtttaggttctagtggagaagacagacaaattaagcaactgtaatctggtatagtaagtaggaggatacacagggatacaaaaaaatacctgtctcagtcttagaattttagcatacatttcctgaaagaactgatggctaaactgagacctaaaagatgaatggcaactgacttggaaaaagtgagggactgagaaggaaagtgagaaaaatataacaggcagtgggaaaaagcacaggcaaaaaaaaaaagaattgacttatcaaaagatatatagccataacaataccctaaacattctttacaatatactttacaaatctaattcccaccaaataaaatggaaagaatataagcttatatgcagacatgttaccttacttgctgaatacagacatactaccttacttatggaatttctttcagttcctcaaactgaaatatgcctcaaagaacattttaaaagttcaaaatattctcagatctgtcctttcatctggtatcagcaataaccctatgagcacagggcaggggaacagg

SEQ ID NO: 34019 - DNA, 2300 bp, Homo sapien
tgaagaaaaaatcctttaatgaacttctttatggaatttatttttaaataacatgtttatcattggtgaataattttttgttttacataatgacaaaactaaacttttaaaatacttaaaaggaaatattcttttttctatcataaaatagataagtggttatttcattggttccagccaaatgatataatggttaaaagtacaggcaggtcttacttgaattcattcctgttccttattagctgtgtgacctagataagtcagttaacctcattgatactcagtttccttctctgtagagatagtaatacttcaccaagctgttgtaaggattaaaacatgatgatagtttcgtgtttagcacagagtctggcacatggtatacattcaataaatggtagtgctgcttctgccattcagttggcagcagtgatcacaaatcatggaatggatacatggttatatcacaaatatggagtggctttagagagaaggcttattgccttgcccatgtttttttgtcagtatttttataagattggttaatctgtgaacgtttgtatttttcttcctgaatttatctaattcagaacatttttgatagtctgatttctaatacacacacacacacacacacacacacacacacacgtatttttaaatccagtgaccataggaaggattagccagagtaggctggggatagacaagcaaaggatgggaaagaatcttttggctatggcatttctgtagtaattcatcacaatttgttttgattaaagaagaattaatgagtattagtatttttctgggtaatctctacaaagaaacctttccataaataagttctgtttcacaaaatttaacatttaacatttgtgactagatcctgatgatatattttttttaacccttagggtacggcttgtatgtatttcaaacgtttttatcttaataactcagtaatggaatatcaccccaggataataatgtgagtatgtctgtctaatatattgttttcatttaagaagacctttataatcttttgagtattttttgggaggagagaattgtgagagagagagagagagaactgacttcctaatacagggtaatttagacttgaattctatttttttttttttattcagaacttgagatctctgtttacctgtacttcagtaattctgatggtatgtgaacttcagcttgtccagattcaaattttgtttttctcaaattagctacttctctaacatctcttcctattagacacctttgttcttccagttgttcagactgagaatcatttatagtggcccctcccacatccagtcagtttacggatcctatagcttcatactcatttcagttgaacaaaggtctgttgttgctgctctctgctgagcgctgtgtctatcattaaaaatgaaattagtatgaaactcatcaaagagtttgctctcaatgacattgtacctgttttctcttttttgattcccatttccaccagtcaagattaggcccttgatctcactgccaactgttttttacagtagctttcttactgttttctcatactgaacagcatgaagtggccaggtgaatttcacaagtttgtcccttaaataatagtcccttattcagatgcccttagagacttctgccgatggccttccacaatgttcctttaacctacttttcttcccatacttacatggtacatatgtgggtactgctttatttttaactcttccatctacattatacaaagtactcttattcctcagttaatttgtttttccagatatttaggttgtactgcataacactgtcattgagtcagtgatgtttgaatgccatggcaatattggtttgacctaattttatagttgtcttacgtctcctaatgaagtgtgaacaggaagtgtcttttaaaaaacaattcttgcaatgtctagcagtcgcttttgaatattaggcaattatagaatatacttttagaaataaattatttagatacttctcaaagtatatgcatgttcttccaccccacccaccccctgcctcctgcctccttattttttcctctaggctcacttgtgcatttttggcctgcaaagtagatgaattcaatgtatctagtcctcagtttgttggaaacctccgggagagtcctcttggacaggagaaggcacttgaacagatactggaatatgaactacttcttatacagcaacttaatttccaccttattgtccacaatccttacagaccatttgagggcttcctcatcgact

SEQ ID NO: 34020 - DNA, 2300 bp, Homo sapien
catggtggcatgagcctgtagtcccagctactcaggaggctgaggctggagaatggctttaacccaggaggcggaggttgcagtgagcgaagattgtgccactgcactccagtctgggtgacagagcaagactttgtctcaaaaaagaagaagaagaagaagaaaaaaacctaatggaggtgtgggtggagggtagaagggaactggccatgtattgataatttttgaaatatgtttctctgtattctttatatttgaaattctccataaataaataagtaaaaataatagaagtgaagagaaacacttgctactttttagttgaaactagaaatggaaataggtaaaggcacaagttctgcattccagtgtgcctcctgtggtagcaatagcaaagaaacactgtcgcacaacaggctgagtaggagactgtcacagcatccagtctgcttaccttagtaagaaaaaccatacatgagccttaatgttagggcatcagcaacaattgtattcctcagacagttaatttagacagagcccaattcctactacatctgaaaaataagatcaatgtcaattttcatggactaaaatttgttcaaggtttaaaaaaaattacaccagcaatgccaggtttttcatatatttttcctaaatgacattcagaaattttactcatatctctgtggaaatcacagtctgccaactcttttaaatgcctatttttattatcctttacataaaactaaggagttgtcaaatatctttcagaaaaacaaaatgaaaagaatttatatgatatatataacagtcatgaggctaagactttatatagacatttaattatctagatcacttattttcctatcttttgtaccattatgtttttctcttttaaattattctttccccaacatgcaacattttaggttgttcacaattcattgtaatcaatttgccatgccctttgatcttctctttttctctcttttcttagccaatttatgagaccaggttagccacatatgttgagtgtgtggctctccaaaattatataccacaaatggcataagtttgaggaattcagataactgtggcaaactctaacctcagctgtacccaacaaaaatgaaaaagaaaaggctttccctttcttaagcccctaaaaacattttaatagaaagcagagttaaagtcatcctgccacttcttctttttacctgtgtgggcttttcaagacctaaattctctaggtctcatcatctttctctttctttttatttatttatttattttttagaaaagctatttgccatagggaaatccatttttcggattggatatataataaatacatgagagaataaggtatgcctaaatgggacaaaccagaatccatgtaaattttgaacctcacctgcaattttgaaagtcctattaatttaaaaaatagtaaataccttaattttcatgatagcttactgtaaggctccctagaggcaatgaaaatgggaatctcaataaaacgaatactaccatacatcctggcttcagagatgaaaacagagggagaggattggctagttatcaacagaagggtaaggaaaaaaagcacagagaaagaacagacaaggcaacaaaagtggcagaactgtaagggccaatacgcatccactgcttcaagtttttcagccatgttccattctccgagatttctggtagtgcttcaagaatactggtctccaaactcttcctgaaaagggctaggaatgcttctgcctgaagatcttacctattctttctgggccccgtgatctccctacatgattgatcaacctactatttcaactctttcaagccttttcacaaatgtcaacttcagtgaggcctctatttaaaaatgagcaccctacgaaatcctttcctcatttctgattatcccctgtgaatttacatctgcctactccgtaccctcagtttatgccccttgaacactcttgccgggcgcttctcctttaaatcttgcctggaaggggcggagctatgtcccagactcaccgagaggagcgttctctaggctccgcccacttacgtctcagtgggcgccctaacgaacccgggatacggtctgttcctagtccgctccggaaatgcaactgcgtacgggctggccgcgtaatcgtgacgacagcgcgccagcgccggctagccggacgccctaggcttccgcgagatcttcggtgggggtacgggtgttttacgccaggacgctgatgcgtttgggttctcgtctgcagacc

SEQ ID NO: 34021 - DNA, 2300 bp, Homo sapien
catctaacaaaagggctaagtttgaaaaggtggaaaatatcttcaacctcattcttgttggtaaaataagaaacaaaagatggaaaataacaagcattggcaagaatgtgaagaactttcacaacgtaaatgaggatttaaattgctgtacattctaagcaattgctatatattgctatgtatcctaattgctatacatgttaaactgaaatacttagtcattttcttctaaggctgatcgtgtttccttgtgacaatttcactggtaagtatttaccccccaaattccatacatgttattaaatgacatgtactacaccatagataatagcactttagtcccaaatggggaaatattaaaatgtccttcaacattagaatgaatagataaattgtggtacattcacaatgagtgacatcaaaatagataaatcctggtagagtcacaatgaaatacacaatatccatcaaaatggataaattgtggtagagtcacaatgaaatagtagatgtagtgtatagcaatgggaagaaatagtctatatgcaacaatgtagatgaatctcacaaacattgatactaagacaacatgcaacaaaagacactgcaattccatttatgcaaagtactaaaacacaaacatgctgttggaaatctgggtggtgtaatgattgcaaagtagcttgaagggggcttctgaggtgctgaaactatcttgcttctgaatctaggtgctagctacagagttgtgttccatttgtgaaaattcaagctgtggagttataatatgtgcagtttcctatatgactgtgatgcttctgagaaacagctaaaattagtgatgctactgataagtatatgataggctgttaaaatagtggagctccccccacccagcaaacatcatgaaatcatacataaaaatatatttattttaaaatcttaattttactcctgcccactcctgaaaaaaaaaaaaagctaatctgatatcctatttgctgaatatgaaagtctaaaatggctacaataaaactttttataattttagtaatagtattttagtatttaaaatcttaatcatactgattgggattaccaaatagatattgaagaatggacttgtaaatgtacaaactgatgtttcaatcagcatttttaagaattgttttcaacattgttaatcagtttaaactttgaaaattatcttgcttgctcttgaatgtggtgataactcttatatgtttgataactttggttttaagtgatgccaactaaataatacagcaactgtaagatcaaaggtcaataattattttaactttcagttgggtggttgctcacattatttctctaaataccacacaacctggttcttcttagctcctgcatatcatgaaccaaaaggaacatcatgtaatcctttaaagcatagcacccaatccttgattgattacttgataactggggagtgtgtatgctatttttaataataaagaagacaaatagattctaagcagctattattaggttcctatttataccaatgtctaattataggatttgttattatttggcatttgacattcatttttggatcagacttttaatagttttaaatagtatgtaaatataaataatatatgtataacagttaaatattcagacttattatgttgctcttggacaaattaagaattttcagttcttatatgtatctagacagtgtaaaagctgtctgttactctgggtcagagtcctactgccttaacatataagcttttctagaggagtcaggagttgggaaagagtagtagtctaaggctgcctctgttaatgtactatgatgttattacatgtaatgattcatttattcactgaatcatatatttataaataaaatacatatatgtgtatatataatatagcaatgagccatcactacattaccaattggaatggctaatattcaaaaacccaacaataccaattgctggcagggatgtgaaaaaagaactctcatttgttcctggtggaaacgtaaaatggtacaatcactttggaagacaatttagcagtgtcttataaagaaaagtttttcacatatgaaaaaaagctcaacatcactgactgttaggaaatgcaagtcaaaaccacaatgagataccatctcaaaccagtcagaatggctattattaaaaagtcaaaaaacaacagatgctggtgaggttgtggagaaaaaggaaggcttctacactgttgatgggagtgtaaattagttcaaccattgtggaagacaa

SEQ ID NO: 34022 - DNA, 2300 bp, Homo sapien
ggatggtctcgatctcctgacctcgtgatccacctgcctcggcctcccaaagtgctgggattacaggcgtgggccaccgcgcctggccggctatgtatttctaaatctgataactgatttctctgtgttatgagaaaaacatacagctatgtttgattttaggaatggttacagatcatgttggagggcattcatttattgttatttgaaaatgacttcacaaagagtgttttctctggaataatttggtttgtacccatttggttatttttcagtaaatacatgttgagtgcctgtaatgtgccataggctgttccacacaccctagctacagcaatgaacaaaacagcaaaatctcttccctccaagagcttagcatctagtggagagaatgcagacaataaattaagatgaagagtctaatataggatatctggatgtgtattgttgttgagctggtgtccctgttgggggaaggagggtctaggacttcctcttctgctatcttgctgacatcattttccgtttggaattacatctttaatatgttaaaagaaaatagctactaatgtaggattccatggcttttaatagaaagactttaaaaagaaaaactaaggagatttgtggtcaggatgaagggcaataatcatagatgaagacatggaaatggacaaggaagacattataaatatttaagcaaatggacaaaaaacaattattgaatgcctgtgttattttaaaattcagcatatttaaagttcacaataacaatggaaaaggaaaggataaatgaggttaaaacaatatgtttttagcagtatcatgaaagtgtgaatgtaatttgtattgtaataaaagaataatgtacactgtaatctctaagataatccataaaagaatctataacaagtaaataaaagaaggaaatggaataatattaatttaaaagatgaaaacaaaccagatgggactgaaatcaaaagtagtggaaatgaatgcaactatatcagaaattagattaaacataaacagaaaagacatagaatatcaacaagaaatcttgcagttagaagcagtatggaaactccacaaggtggcagttatgcattgcaaaggacaccagcgagcttccaccttggtgggtttggggaattcccgcactgactcagagtctccaaaagcagcatctgcccctttgcgggcatcagtcacagcccctctgctccctcaagcacctgatcttgtacctacttattctaaagaagaaaaggactttctccaggtagagggaggacaagtgatggaggaaggatgcattcggttactagatgggagagtagctgtgccacagctgctaggagctgcaattgtactggctgtgcatgaaaccacccatctaggtcaggagtcacttggaaagttgttaggccagtatttctacatctcgcatttgtcagcctttgccaaaactgacacagcggtgtgttacctgccgacagcataatgcaaggcaaggtccagccgttccacccggcatgcaagcttatggagcagccccctttgaagatctccagctagacttcacagagatgccaaagtgtggaggtaacaagtatttactagttcttgtgtgtaccttctctgggtgggtggaggcttatccaacacgaactgagaaagcttgtgaaataacccatgtgcttctttgagatcttattcctagatttggactgcccttacggatcggctcagataatgggctggcgtttgtggctgacttggtacagaagacggcaaaggtactggggatcacatggaaactgcatgctgcctactggcctcagagttccggaaaggtggagcggatgaatcagactatcaaaaatagtttagggaaagtatgtcaggaaaaaggattaaaatggatacaggctctccctatggtattatttaaaattagatgtaccccttctaaaagagcaggatattccccttataaaatactatatcataggccccctcccatattgtggggacttccaggcactccccaagagttaggtgaaattgagttacagcgacagctacaggctttaggaaaaattacacaatctcagcctgggtaaatgagagatgccctgttagcttattctccccagttcaccctttctccccaggtgattgagtgtggatcaaggactggaacgtagcctctttgtgcccacagtggaaaggaccccagattgtcgtcctgaccactcccaccgctgtgaaggtagagggaatcccagcctgga

SEQ ID NO: 34023 - DNA, 2300 bp, Homo sapien
ccaagataattagctcagaaatataagcacttccagaaggaaaagagccaactagttagttccaaaatgacattcagaaaaacagcataagattacattagttccaaacattaaccatctcttttgaaccgacaggataagcaggattctacttctagtattccaaaacactgagaacaagttcatgttcagcttttctgtgactatgatgaacttaagtattttaattatactttaccttcaacttttcagaccaaaaagtcaaaaattaatcttaaatttaaaaaatgaaaatatgagttttagtccagactgccaaactactgttactttagaaaaatcactgtcaatttctagaccccagattctttcttctgtaaaaatggggatggaagagtgattactaggctttggtttctcccagttctgttttccctatccttgtctaatttcactgatacaaaagaaaaacaactttcttaatacaaaccatattattcactgaggcttaaaaaaaaaaactttaaagagataggttatctggtaaagtgcaccaggaactacattattttgaaggtctttgttctacattcagctaagtttctaaaagtcattcaaaagccaatcaccacacacattaactgaatgttggcaatatttggccctgaaaatataagacaaactgaagctaaattccaggacagaagcctctgcaagtgagggtttgaaatcttgtatacggtgaagaaactgacaataatgaacttcaccagagccccgtgatcttgaaaaacagcaaaggttaagaaaccccttgcccccgtttgtgttctgagaaattggcttactgcaaagaatcatctttcctgtagaacttagataagactaagggttgatccatacccccctaccccttgtttacctataacaaggccataactagacccttctaattcccatcctttgcttcgtaaatgacttgctgaagtacctgtcccacagatcaatcggaacaaaatacttattaaccaaactttaagattctcttctctcgggtacctgaattttgtccttccctcagtctgaaacaacatatacaaacctctcctaacagctcctcctcagaatacatgggctcagggtaaaacattatctggttactgccggatcatacccatattttcatcccaattcctgacatcttatttacccctaccaacaaaagacaaaccctttctgcctaacctttaaggtgcatgcaaatcttacggtcattctccctactgcaacagttccttcaaccttcctccacacccctgcaatattcctttcgaataaagtctgtccttactaaactcgggttttttatttgacacccttttcaattatgaaatggctaagtgtaaagaataaggggactaccgtttctttaaatgacaggtgttgatcttatacaaggagacccgttgtgtccacctggagaggctaaaagcatttctaagatctgaagttcttggccactgttccgcggatggagaagggggcgcagaagaggtgactgacccggcaaggtcaactctgggatcacctggcgccacaggccatacacagtaaatgggccatgaacaggcaggctacccagtccatactccctgacagatacgcccctgcctccggcccgctagtctcccagacaggtaggcgtaatgctgcttcctcaggggctcagacaccctgagataggtggtgggtcctacccagcagctcatcccaacgtctcaactccattctgagcagagcacctgatggctcttttcacagtactgacctccccgcccttttcgccccaccgttgtcactcctgccctcacagaagaactcaccatggcgcctaggataggtcgtggaccagacaccctggagttgccggggcagtcccaaacctcttacctcccggtccttgagccgagagactctcaaacagcgaaagagagggtcttccggctctgccggaagttgtgcgcgcgcgggacaggaagttcctcccttctccagagcgccgtcgaccccacgccacgcagaggtgaagatacgcaggacgtcctctaaagcaacttccgtgggtgccaggttgtgggctgggggcggtgctgaccttgagagagcggaggaggcgcaggcgcagcacaggtacgtgggcgggcggatcgtggtggctgcgcttgcgaggaccctgaggtagattgggtggtttcaacaggaacgcatccactgtctgagaggtgacggaggcacacgtt

SEQ ID NO: 34024 - DNA, 2300 bp, Homo sapien
atactttgcgaacctcaatgactgccaggtttaggacagatattaagaaccacagtgtcagaaatgaaagagtacaacttcacagaatgtgttgtctctgacaggttgatagccacttaccttctccatcttttcttcctcaaggatagcagctgcttcccacagatacaccaacaggcaattccagcccctctctaccacacttaccatttgcaggtgcctgtggcttgtctatttacaaccttgtccctacacagcagaagcggaacccttcaggaagttctggattcatcctcagcaggatctgtttcacaaactattctccagtcccaccttccctccaggtattctgtcagtacttacgattcccagatcttcttttaattgtcacgctgttcgtcccctcacaaaatcaagtttaaactaaaaaaaaaaaacaaaaaaaaaaaccctcatacactcagtctgtgtcccctttcctgacataaaataactggccctgtgcatgcttcttttggatggctgagaaccccgattcctttgggccatttacagcttggataccatacgctccaggtactttgataagcagggtgaaatttaatatctataacaacgcctgcctactcaaccttcttaacttctcccaaaacttcctagtttcccttcccaattccaacttcataacaaaacatcacactatggcacaaagtgaattcatggatgaaattactaacagctacaacttaagtaaggaccccaagtcgtgagacaaatttctgggttgaaagtgctctgtatatccatttcaagcctgcctccagtacgatgtctcattataatcaaataaaaaggcagaaaaagttgaatggaatagagtttggaaaaaacacaaaattaaaagttgtatgagagtttcacttatttgcatctgatataaatatctatacatctatagaaaaaaaaaaccctcatacactcagtctgtgtcccttttcctgacataaagcaactggccctgtgcaagcttctttgggatggctgagaaccccgatatatcgatatatttatagatagacgtctacatatctatccaaatatctatatctatccatatatctacctatctatctatctatatatatatctatatctatcgatcgatatctatctatatctatctatctagacttccctggtgagggagtgaaccgctgcctgacgggggccaagactggcagagcagagacgcggtttgtacatgaggggaggtggtggccagagcaaaagtgaaccgcaggctaggcaaagaccacagcacacagccatacaggtgtccaggaccgtcagatcccagagcatctatctatatagataggtatctatatggaaaacgtccatattggaacgtattaaagaggcagaattttcttcctgggttctctgctcttggtagatgttcttccggcttcaattgccacctgtgaatagtgaagaaacttctcactatgagattccattgcccggaaggagggtagagctacggtacccactaaggcagggaacagaagcaacagacggacaggtctgtggaaatgaggatatgctaataagggaccgagtcaggaaaactagagggtaacaagagggcgtcagttaagctgagacaaaatgacggccaaaggtggtctttactctctctaaatcacctgggtctggagtcgactcccatcgcgcaccctcactcccacccctggccccctcccgccccccacccgcccccctccctctcccctcccgctccccacaccaacgtgtgcctccgtcacctctcagacagtggatgcgttcctgttgaaaccacccaatctacctcagggtcctcgcaagcgcagccaccacgatccgcccgcccacgtacctgtgctgcgcctgcgcctcctccgctctctcaaggtcagcaccgcccccagcccacaacctggcacccacggaagttgctttagaggacgtcctgcgtatcttcacctctgcgtggcgtggggtcgacggcgctctggagaagggaggaacttcctgtcccgcgcgcgcacaacttccggcagagccggaagaccctctctttcgctgtttgagagtctctcggctcaaggaccgggaggtaagaggtttgggactgccccggcaactccagggtgtctggtccacgacctatcctaggcgccatggtgagttcttctgtgagggcaggagtgacaacggtggggcgaaaagggcggggaggtcagtactgtgaaaag

SEQ ID NO: 34025 - DNA, 2300 bp, Homo sapien
actagtggaattatataattttatagttttagcacatcactaccacaattagtattaaatgagtcaaacaaaaggaaaacttagccaaaatgaaatgaagccactttgagatgaataatggctttccatttccaattaacctaaggcactgcaaaataaccagataatattatcagcacatagctagttcacctgctgttctagagtctagattaagcaaatcaaaaaagtctctgggctcttaggtcagattgctttagatttaacaacaaagaggagtttcaaatttcaagatgctaaagaaagtgtttgatataataaatggctgattatgagattggggaaaagaaaaggcttgctctgatgagtaactatttccaccctttgtatttaatttgtatcataaatgttggtattttataatcttttatttatttatatttatttatttattttactttttcaagctaggagtaggacttcagtattttataatcttttacctaaagttttgttccaaagttgtgataaaagaccaaaaaaggtaaagtcagttaagtatgtaaaaaaagggaaaaaagagggtgacaaaagataaaaatacagtcaatttgaaaggcagtatttcatccatatgttaataatggtatgagttcaggacttaggaagcaagataactaaatggtgaggttctactccaaatgctccagaatatacagacacagttacaatgaagtgcagaactgagatttggatacagagagttctcaatctttttctcagcatagtattaagtgactaccggcttggggatgccctccccttcaccactcacgtagacacacacaaaggaatacttggaaacagagcagggcttccagtatctcataaatacaacgacagattacccaagaattatactctggattagaggaaaccaaggatggaaaatgttcttaaaaagaaaatccataaagagatatctgaccctaacctcagctaccagagctacagagaagagaaacaaagactttgttataaagaagacattaaaacaaacacatgtacaacattgataagcattttactcaaagggagaaaagaacaggaagggctgaaagtctccacacaaaccaatctttttgatgaaaacatatttccttttttcttctggtctcctctataagacagtgcacaaagtgctcatttatgttttctttgttttcatcccaaagctagaagatcaaagagttaataaaacctcctagctatagaaggtcattacaaaactaaatgcagcaattcaaagcggaaaatagaatgaatgccaaggagatgtttaacgaagtaacagtctagatgtattctttgaagaacatttgcagactcgtttgattgctttagagcgcacagggaacaatgcggctgcatggagctaacattgactgatggttgcattctgccggaccaaagccaggccgcttagaatcacaagtatatttgatatagaactacctaatatagtggaaatattcatgtgtattttgcatagcaaaatagtattaaaaacttctacctttttcccccttgggcctaattaaatgcccaaacataagacacgagtctattcattggaaaaataatttgaagcactatttttccaaaatctgacaaagttgggtggcaagataagggattagcttaatgcttcccattagctattgagatcctccttctttttcttttttcttctttttttgttctttagtgctgacatccttataatggtagcaaatacagaatacaaaagggaggctttggaaatcatcaatattgccacattgatttattcaaaagagacaggctggtacactggtcttgcattacaatgtgacatgctagagtttgccattcactgtatgctgtcatctaaatgtttgtgttccctcaaaattcttatgttgaaacctaatcctcaatgcaatagtattgagagatagggcctttaagaggtgattaggtcataagggcagagacctcatgaatgagattagcactctcataaaagaggccaaaagaagtttgtttgccccttcctccgtgtgaggacccacctagaagtcaccatctatgaagcaggaagcaggccctcagcagacatgaaatctcctggtgctttgatttggacttcccagcctctagaactgtgagaaataaatttctactgtttattaattgcccagttgaaggtatttttttatagcagctcaaatggactaaaacactgcagccctgggatc

SEQ ID NO: 34026 - DNA, 2300 bp, Homo sapien
tttacctgtgcactcattatgcgcctcggcttcattaacggcaggatcatgagcgcgcgttttaatgtgatgggagtgctgtgttgtgtgtgtgtgtgtatgtatgtatgtgtgttgggaggtgcttgcgctagtgagcaccgaggcaggcgctctgagcagagagagatcagtctttccatggccacgtctgggactcatctgcggagccatctaggccagggctcctagattggggttcgacttcaccccatgtaaaaagagaggccagcaaaggcttcccctgaacagccaggtccttcccatcggattgtttgaggaaggaggcttgaagtgtgagccattctgtagccgccgccttgccggatttggcctggtgttttgcacttgaaactcagcggcctcagcgcggaggtagtgcctctccgagacgcggccgaggccttgtcattcccctccttccgcccgcggcagccctgcgcgccggcgtgtgcgtgcccgcgcaccggaccgctggcacctccctgtgcacatccgccccctcctctgctcgccccctcctctggggcagctaagaaatggtcctcggcctcttctgggccggagggcagatctacgagcaggcaagaaaggggcgccggtggctgtggtggcgacttctccgctctgccctcggccgccaagtgtgccgtttcatcgttccacctcgcagccccagctttgttttcctgacatgttcgtggccattgggccccacgcctgcgaggggagtgtgtgcgtgtgcgcgggggtcgggcgcgcgcggcgggtgggggctctcccgccaaggacacgcatggctgtctgtcctccggctgcacttggcgggaaagctaggggccgccggcggggctgagcgccagcggctgtcattaccgcctccctgctccccgcgggctgcatttacatacgggccactcgtctgaatttttacggcactcttccccctcccgtacccggtcgcacgcgcgcaggctcggaactaccaccccggcacgcagacacccgcgcccagaatgcggccagccccaggcgcgcaaacaggcccacaggggccgacggcactcggcgggacggattcctgcaccgcctccccgcacccccgtgcccacacccctgacagcctctccgcttgtgttgcaggaagcccaccttcccctcgaagcccccacccttctctgtctgcatacttccacccccaccctcccacatctctccgtctctctttccgtggaaggcagacgcgcgcgcgcgcgcgcacacacacacacacacacacacacacacacacccgctttttcttcctcctcaaatagatgacccctatggcgcgtccctggtacatttagaatacctctagagtttagagaataaaattctttagaatgcattgcttgtctttagctaaacacatttaacaaccacgacacaaacggggaggagtgaagaagggggacttgaaccaaaagacctttaaaaaaaaaaaagtctgcgagtcaaaaggtcattctccaagtttgtaaataaaattgcaaagggagtccttaagaaaggagaggaaagaaggggaagaaggttaggaagactcacaagttacataaaacagtgcattggaaaaacgacagggagattctgtaataaaaaaaaaagaagaatcttaagaaaccaagagagagaaaaaaaaactggaggaaaaaagaaaaagagaagaaaaggattttaaaaaaaagaaaaaagcaaaagaagtttccaaagaaatgtgtgctttgcatcctacaataggaaaatgtagccattgccttccttcagacgagacatttctaatttgttccgtctgtcaggaggggactatgagaggtttgggtgcaaattcattatctctggcaacgcagaacgtagtgtggggactgaaaaagaccgtggcaatggatgaacaatagggcttcagttcatcagtaacaaaagcagtggggaaattggttgagtttcagagcacgtcctcctcggcagagggggctggactagaccttggacagcccccccaaaaacttgccaagcctcgcacacaccacttcactctccactccgaggctcagggagcaagtgcctggcatggggggtaaaagttggctttttttttactccttggtcttttgcgcccttctccctctccccagaagggaagacccatttaaactattttagacgcaatcaaccaagaatcaccatgtggaattgagcggcagttttaaatgtgttga

SEQ ID NO: 34027 - DNA, 2300 bp, Homo sapien
tcttccccaacacccacctagccagcgagtcaccgagccaccggccctcggggtaagccacagcgcgcacacggcagcgacggtgacggttcacacgctttgggttactaccatgcgccaataagggagattagaaacagaaaaggagattacagagagatcagagataagaggtgtacctctctgtgttccttgtcacatagcgcgcgcgcgcacatacacacgcatctgtacacacatgcatgctcagccgtacacgcacgcgttccttgctactgccatctaaatatatgcaccgacactctatgccctgcaacgtggccggtgtgtttgtcctgatcctacataaagtaggcaggtatgtgggagagtccaggcaggaacaaacagccacgcgcaatttaactgcagccaaactcaaagagaccttgagcctgccgaattgtttcactcagccaggtgccccccagaaaccggctattctgcaatcagttgtggaatcctgcaattattcataaaatgtgctgaaaatgtattttaggaaacgtaatcttgctatatatggcaaggtaaaggcgaacctgaaggatgaatgtgtttctgctttttaatgtcatacgtgtagccatctgaccactttttattgggtgacatatcatatgagcactttggtgtaggcttggaaaaactacagccagaggtaaggctggaaattccataagagttaagggtgctgaaaatggatgctggatagtccagcatgaaagatggcataccgctttaggtttgaaatagggggaaatacatgtgaatatttatacatgaaggccattggggagggctgagtcttggcctgagtatctgtgcaggtaagtcattcataagaaaactaattacctgtgcatgtacttggacttgtttaattgaataagctgcatgtgtgcatacttgctgttctttcagggtttgcaattatagattgagtcttttttaaatgatagcttgggggaattaaaaggtggaaaaaagccatcgtgctgcatagctatattgccaagaaagagaatccgatcctataaacaagattaccattgcttgaaatctaactcaaggcctgtatattttaagccacatcaactggtttaatatagccaattgttttatttgtgtatttgctttcatttcaaagtcaggaatcaaggatgcttttcagtcaagataatgtgccttgtttccagccatattaagataaaaatgaaactcagtaaattttgaatgcagccaataaggtacaacatacaacatggttgaaaatgtcttccttgcagaaggctgtccattgctgtgtctacccattttaaaatatatatatttttttcaataagaaatgctagaaagcaatagggcggggaatgccgcacctctcaggcaatcagcacaaaaattatttagaaatctttggaatcacttcacttatacatacattatctcgaaagcactggccccgaactgtgtttctgctaatatgaagttaattagacaatcaaactttgagccttgagcgatgggcactacagcccatcaaggtatgtcaagaaagaaaaaaaaatgtgtattttcctttatgaccaaaccaggaggttatacagctggcattgcatacatgacagatgtgcatatttgtaaccttaaataaacagaagcagggaggtaactgtgtatattatctagcaagagacagcagcagacactcgccaaaaaagacagaaagggacaagagagacacatagacataataaaataacaacaataaaaatcctccaaaaaaaaaaagagggaaagggaaccaataaaatgacaaaatctgaaattctcgcaaattaaaaaatgcaaatatacctttacatatgcatcagtattaaaaataatacacgctggaaccaacaggagcgagagcaagaagaggaggaggaggtggaggagaaggaggaggaggaggagaggtggaagaggaggaggaggaggaggaggaggaggaggaggaggaggaggaggaggaggaggaggaggaggaggaaagaatggaggcgccgcggagccctgattatgcatgggctggagctgcctcctctaacctgttcttctccgagccgggcagccggcggtcctcagccgcccacagaacaggagccgaaacaaccgttctcgaaggctacagcgtttatttttctcttttggggggttttggcggttgtttcaggggctcgccaactggcccctttaattaaaagcttcaataa

SEQ ID NO: 34028 - DNA, 2300 bp, Homo sapien
ccatgccatcgtactatagcctgaatgttgaccttacacaaatatccatttttcaacgtgtagcgatccaccgagaacgaactcttggcctcagaaactgagtctcaaacagggcgaattcatgggggtgggggtcccgatgtgtttagagtgtgtgctccagacactgggaacacgggtgcgggctgggcgggggtctgcgtgctctttgcttcctctcttatcactgttgcctgaaagaatttttaaaacaccacctgggttggtaaaatatgatcctcatttaatacagtgcgtaaccggctcgttccgctgagaggatttttttttcctacaactaacataattttcaaggagcaacttctttttgttccattttccttcaaaactatgctgggcacaaactaacaacattttatcattcttattctgaaataagatttggcaggtaagtgagtcctacaacatgccaaatgtcccgcaatctaccgttcagagattccttatgccacctttgtaactgtgtagcaacagtaatcccttaattaagtatacaaatgtacagttcaccaacccatctagtggtttcactggagtgggagaagggagatggttaccgtgacatcattgttattatttaaactgctaagggagaatataattgttaataaaaggcttcttctccacgcccctcaaggttccctcccccctggcattttatgacgtgccatccacaatgaatgtaagtagaattatgtcgatcctgggagcctactctctaaatataatgtcgcacaggtcagcaaggaaatggagaagaaaattactgtatttaggggtagttgtttgagaaaatatgtatttacaagtgtggggtatcggtattaaaactttgtctctttatgaatgtgtgtgtgtgtgtgtgtgtgtgtacagagggagttctataaacgggttgtgtgcatccgttttagaatcctcgtgtttgtacattaaaaggctgccatgtaatcattccatggggctggtttagtgcatttaacggagaactaatgggtagtctatgttgaaaagcatggtcctattttttaatcccatcacgtactgaaacggttttgtgagagtctgcggctttcacctttatccatcgtggatgctcttgttcgagaaatccattccaaacacttttagttcctgatcactgctaaaatgctgtcccttctttctatgcaactgttctttatttttggcctatttttgtcagtcttagcaataatgataaacaatccttgctgcattgaaactcagttgaaatgatccggtgaacccctgccttggtccttgctgcaaactgtaatctcaaatactgaatatggtcggacttggtagtgggatccaagctgcaggagaccgaagctactttttcgttaccttctttctagcctagagcgcgcgcgctatgtacacacacacacacacacacacacacacacacacacacacacacacctcggtaaaagcaagctgagatgaggtgagggggtgttccaatgtgaacagagacgcagggttcgggctgagggagcctgggcagtggggaaaccgacggcgtgagcagtgccgggaccaggggctatgactaaggtgggcgccccgcgtccaggaagaggacgcgaggaagctgcacgagcctccggcgcttgtctgagatgcagaagtggatgaccgggctcccgggcataaaatcaaagttccgtggagcttggagctcttagacagcgacgcttgtccgagctgagagccctccgtggttcgagctcgcgcgtggagcggcctccagcgctcggtctgctagggtagaagcccatgaagggggtcccgcggcgctagcttttgtacggccccgccttggccagccgtgagctgacgcaccggctcccctgggacgctgggggcgtcgcaccgcagctgggtggggagcaatttattcctcgccgtcccatcccagcccatctttggttactccaccctacccctcccatccctcctcctcctcctcctcttcctcctccttctctaacaacgcccgcactaccttctgattctccacctcctcttcatcctccatcccccttttacttctctctcccccgtctctcctccctcccgcctcctttctccctctccccctccctctctcctctgaataagcaagcttttgcctctaaaagtcacaagtaatcctcgtgtgtgacagagagagagagagagagagagagagagagagagagagaaacgag

SEQ ID NO: 34029 - DNA, 2300 bp, Homo sapien
ctataaaataaaccttcccctttcaagtgaagccttgggacagttgcctaaatgttgaggccactcttctgagagaagctactcacatcaaatacctcctacattgaagcaggaggctttttgaaccatactgtcctcatatattaaaatagtcatctggaggcatattgctgaacttaacaggaaatacaactagtcattgggttaaacgtagtgctaaaaggaattttctaaagtgaggaaatctttagttagctagatatttcaatatactattgtctaatctcatatattccatgttctattaattttcccttcttgctttcacaatattttttaaaaaatagtttggtttaaacattttatgtaatctataattctactggcatgcaatcttgtcttttcatgattctatactagttgatgtattttatctttggctttattgggcatggtatatattaacagttggttagggcgggaggtgcccaatctctagtagcctaaatattaaagccttttttttttttttttgtaaggaaaagtgtttatcatgctttaaccttaacataagtatcctcccttatcagtctctatttctgcttcctgtgcagctgaaactcttcaggataagtgaagtcatcagctatcggctagggtagcctaatgcatttgggaagttggtttggtttacatgttaatgacctggatgaagtccagtaaggtgtggaaaagatagagtggggggagggggggaactccgaggaagctgcttcctcggtaaatatttccaaactgattagaaagttcatggccccgcgatgaagtcgagatctcaaatactggtaattattttattatttcgtacattactaacattagagaaacctttcggctcgctttctagcgctccaacctctcagggtgaaaaccgcgacttctgggcgtgcaggaaaagcacgctggaatcgagtgctgcagacatcctggaccgtggtttttacgcgtgagtaacggaggagcgcaccgaccggtggaagagagaagtggctaacgcgtgtccaaaagggggaaaagtcacaagagcaactattagggtcgcgctcctattggtcagaggaaagatcccgactttagaaggactttcctgctggctggctcgcagcgtccccggagagcaagcgagcgcgccgcagcgggagactaggttctctccgagcgtcctccgcagaggcgccgcgagaggagcagggagccgcagctcgccgtgttgtcttcatttcgtgcaataaagaattgtcattaggtttgcgtatggcatgtgctattaccccaccgtaaaactaaaattagcaaaatgtcaggaatggaaagattgattcaccaagatgcaattatcatttaaaagtgcttgattgaggtactgatgttcagtgatttattctgcataccatatacataattaaagtagtgtagtggagtaatttatcaatctagttgagactggaggggtgaggagggagctgctgtatgtttgttttattaaaatgctccgaggtctagtcccgccccccttttgcaagagtgaaactgatgatttctccagctcgcgaggaaagagtcaacggtttgggattgtgggggagagagagacggagagaaaaaggcagcgcgaagcaaaggcaaggacaaaattaaataaagggggaaaaaaggaggcaaaagacatttcatcggacgtgctgcttagaaccccaaccattcgtgctccgtcttccctaccacccccgcctcccctcccagtatccttcaatcccccccgcccccaccacccccagtcttttttacgcgatgtttcaaacgctgtgagctgttctccttttcccattcgtcttctgtcacttccttcctggacgcagttttctggacgagtctggttacttttaatccgaccggccgctgagagccactttctcctcctcctcctcctcctccttctcttcctcctccttcttcctcctcctcctcctcttccgagcggcctcggcgcgcgcgaatgcgcggccccgcgccccccccctcgcgcgcgctcccctcgcgcgcgcgcacacacgcacacatcgtctccagctctctgctcgctctgctcgcagtcacagacacttgagcacacgcgtacacccagacatcttcgggctgctattggattgactttgaaggttctgtgtgggtcgccgtggctgcatgtttgaatcaggtggagaagcacttcaacgctggacgaagtaaagattattgtt

SEQ ID NO: 34030 - DNA, 2300 bp, Homo sapien
attatagtattgatgatacacaggacttcccatgaaatagattaattttataagatacagtacttgcaaaagtaggccctgaaagatgacatgatctttaagcaaaatgatatgtcattgcttataatataaagtgtatggtggtcatttaactctttattattgttatacacgtctattctgtaaatacctaaggccaaggagtttggcagttttacctttatggtaactctgtggtaaatgataaaaacaaatgtgagcactcaccacatacacttctttactgccacaatcatttgccttccgttctttacttcatctcttcatagaagttacttcacagtttgcaactcttctttggcaccttcaaatgtggaagtgcaaaacagtatatagtattttgttaatgctgatatgaaaatactttcaaatagatttatttctaaaacttctaatctgaagtaacaatattctgattttaaaccaaagtgttttgaatataagacaactgaaattgtcatgcattgtgataataatctttaacataaatagtgccaaatatctaaatttcaaaaattcactaggtgcagcattaacccaagaagaatatacagcatgtggaatgtctgtgattgagaatttgcaatatacaaaggatttgttatttcaagacaaggtttacacatatctaaggattctatgtttatctgtatttctgtaccttcagttttatatctgatagagaattacagaagaatgtcaaatccattatatccgaagctaacacaatttgtcaaatcgggaaatgtttgcaatgcagttgaggttactgaaagggcttattttatgcattgcctaaaggccaatttaaaatactttgggattagtgatgtgtattcagtacggtttataaattctattaccaataataccttatttttccaagcagtgtttaactatactgagcacagacaaatgctcctgtgttctgatttctgttttagtctggctttccatgactttgtgcacacaaatgaacctttccttggcttcagactgaggctagtcccagaaagagaaccagccttgagacacatcagaccaggatggtcaatatctcttttcccatttgtaatagcaggaggactttgcatagtgaagaatcatttataaagcctctatatttgggttgacatctctgaggtttatttttaagttgcttcagagtcaaagagaaatgaaaaattttggccagttttactttatgggtgttagttgagtttaggtttttaggcttaggcccacagtgagtgagtccaaacttggtcttgtagtcactaccaagtgatttggtgagttctctttcttccagttgtgcttcattttacagtctattaagtgagaatcataatacacatctcccagggcctattcaccttatagaaatgcaatcttcatgaaataacatctgaaaggtatggtaaggttttttttttttttttaaacgacactacaaattatgatacatttctttcttttcctgtaatcagtatgtccaaataaggcttgatcagtaatttgcttgcaagtgtgtggctgattcaaaaataaccacatgcatgaataaatttaatgcgactttacctttacttacaaaattgttaaatgttgttcatcagaacattgattctatcccatttcttgaaatatcacagaaaccttcaattcaaggaatggattttcacacttccccttttaactgtttcttctagataccttactatgtgtgtgctttttcattttaaaaaatctttacccggggttgtggtggaagtggggattaaaaatctcgtcctgcgttttggtgcccacttctttgtttggaaagcagagcgctgggactcaatccggacggccctcaaagacccagacgagggacgcctctagtttgagcaactcactccgctgagttattgattgcaggcagcaacaatccctccggttgatttgtgtgaaaagtgaatccgctctggctgggcgttcagcagaggcgcaacagctgcaacgccatccaattattgccgatcctcccctccaacactgctctcatcacctatatactcttctctctgcccgtctctgcttccccccccttccccccccccttttctcccggccgacggagctgaaggggcgggggttccttccttggagtgtttctagagctcggaggctgctggtagggggtgagtgcgccacgtgcgtgcgccacgggcgagcaggaggcaggctctgggccc

SEQ ID NO: 34031 - DNA, 2300 bp, Homo sapien
aaaacgaggtctataattacatgagtatatagaaaatgttaagtgttttcgtgaaaacgtatataaacaataatgaataatcatttcacattgaaaataatttaattttaaaaggagatagtacaaataacaaaaaaaaagtcgaagtacggaaatagtagaaatttcaaatattttaggaatgtctttctccagagtagcatgttgtttagaaactaaatttccacagtagatttcatagctcctgaacatgaattaaaactttgatattagctgcagaaatgtacattagtttgtggggaggggataaagaaaatgatgtgccaacctcccaacaatttccccaaacagatttttgcatcttggtcattacacttactttcaagattcttttcttggtttaaacatgtaatcttgtctctttgctcacctgctcactcttcaagcaagcctacagccaaataaattgccatacatgtttaccaataaaccattattttccaaggaattttttcttaatttttaaaatttaacaagtttaactacaattaagaaagtactcccggcacaaggactctgaaacattgtttgggtcttggaaaagtttgaaacttccaattcattaggattttgagtagctgttttgtacctaagaatgagaattgatggagagagtggtactaagcacataattttatgaaatatggtgaaaacatgagagttttgttatgacgcacataacaataaagaacctgtttctttttagcaggctcctaaaaagtacctcccttataattattaaataaaaacactcacttattcagtactcagctaggttttaagatctgaataacagaagtacacagtgagagaggtacttacatggtttccttggatactggatgatgccattcaggtctatgtttttatctgaaagtggtgccctgtggagaaacgaggcttggtgagtggctgtttatacatagtaagtaaataggaactttgtttattttacaaagcattttttattttgacccagctttccttttctcatcacacccaactcctgtaaacagcaataatatggtagaacaggtactctgtacaactctttttaacaacacttaagaaatcataattattaaggcagaagctcagaatgctttggctaaggatgttactccttgggctgctttatatatcttgactattttatttatgtcagacatattaatgaatattgcctgcctctctattttcctcaaaaggaatattgctcaaaccactaataaagaaattagtctaaaacattcacataaatgataaacgtccttaccttaaccaaaagataagagaactcaagctttagccagtttctaaacatgaagggtttccatagaccttagctgccattttacatgttccagtggcatcctagattcccaatagttttagtgctatgagcatacaattttgacattcagtccctcagaactacacacattctaattttggtagtatgaataatctctcctatgtgataagttatttaaccttctaatatttcttagaatcgaaaagaacaaatgagctgcaacaaagaatggcaaataacttttatgcttaacacaatttaataacctgaaatgaagtaagtatgtgctatgtttccattaaaaagtttccagccacaattaattgaacgaaaacttgtcttgttccaagattattcttggaaatgtaattttaaaatctgcttgaaatgaggaaacttacttttttataccatatgaaagcaatttcattttttaggaatgatttttggatagacttccgattggatattttccattggaactagcagcatagggggtcgggaggggggaggggagggaagcaattctgtgttcttttgccagcactgacaaaggtctggttgtcagtgatacctttacagctaaatttactccagagtgacagaaacaggtgcacctcggcctgccagacacttgtgcagagagatcacgcatctcacggcttgacgatcaagggggcaaagcctcggtcttcatagaaaaggagaggaggcaaacgcagcccaaactggggggtttctcttcaaagccagctggtctggctttattctgcaggaatttttttacctgtcagggtttggacaacaaagccctcagcaggtgctgacgggtacaacttcctggagaagcagaaaggcactggtgagtttcaattgccaaaatatattttttaatctctaaaagttaattttgttgtcttgaaag

SEQ ID NO: 34032 - DNA, 2300 bp, Homo sapien
atgttcctttaagacagtatcaaactgactttgctaacatctaggaattttgcacttaagttcacaaatgaacatcaaacatgagtcaggcactggggatacaatggtgagaaacatgcatagccttcatcatcactgagcttacactgagtgactttaaatgttcttttaggatgtgaaagattatggcagcttcaaaaattaagctaagaagctctccatcattttctatgacttgagtttaaagcacaagatttagctcttatgatttttaatcataaatctgagtgggctggaggctttttatttgtgagtacagaactttggcatctttgttccagtcctgtctgtagttattgacttaattcagttttccaccttttttgagttatgttttccttgaaaagtgactatttcattttctattaatatttattggcggtataaaattgtataaaatattttaataatttttaaacctcccttttattaaattaccaaccttactagtggcactattccttttcttgttacacttcctataagtctttgaatttcactggtattgccaaaaaccagctttatactagattatgagtactttatcaattttaccaatttccttttaaaacactgttctcaaactttatctttactaatttcctcttcctaatttcaattatacaatttgttcttcgtttctaacatcttcaaataaatgcttggcctatttttattctttcttatttaaaataatgttctcctataacttggtctgtatcttaaaattttaacatatagtttttttcaatatcattatgttctagtaactacaatttctctttccttttagactcaaaggtgatttataaaggtactttaaaatttaaaatacgaacaaaataaaagttccacttttgttttttaggggtgctatcccttagctaatttttagcttattctatcatactatctttccttgtgcaaatttagcccatccttctaggtctaacgtttatgtcacctcctttaagaagcatatcttgtgttctctcccttctctaaaattttatatacatcccttaaacatataatgtttatatattctccgccttcaactcccatcctcaggctattttattcacgtttatgagatttgctgtttagctcagtattttgtggattttcaaaagattccactcaatttaccgagcacctacgcaccagacattttattaggtacaaggaaaagcgttaaatagatataatcacggcctccaagaaattgaacctagtaagagacacgaataagcagacattcaagtgagctttaggagacttggtttggtagtgaagacagtctcatgtgtgttaacagcttacagcactgaaaaataagagacagaagggaacaaatccgtttcaaacagttcaaaggaggaaagagagggaaaggtggtttagatacagctaaatcataaatagcctgataatctaaccctgtgataatccaagtacagccacagcacctgcctcagaatcacttggaaggcttgtgaggagtaaaaacgcagattcatacctactgaaattagaatggagaaacggacatttaagtctgcattttaaacacattccccaggtactgaggccattccaagttttagaacagagcacagccaattttcgcagaccttgttcctcaagtactccctccttctagccggagggtggcctgcagcatgtcccttcccttcccaccgccgaagctgtccatccagtttctgaatggcggcccacagaccgcacggctttacgagagaggaacacagcgcccacccgccaaacagccacacagggatcggaggccggacccgcaaaggattcggggaaaaacgcatcgagccaatccgaagggcgagagcggccctagattgggggggcgggggggcgttaggaggtgggcggggcacagaaaaaaaatttttttttccttgattgacgtaaaacctacccaatgaaaatagaactggtaaagcttccgccccctaataggcagaaccatagcgacatttcaaccaatccagctcaaaagtgtctatgttgtgggaggtccctgaggccgctgaggtcgttcgtgtctgttgaacggctgtgggcgtcttgctgccttgggtagggggttaaaatcgttcttgagaggaacgtctctgtgcgaagagataatgagtttagctctgaggtcggtaataaggaggcggcagtgctctccacaccccggagcggggcccagggagggt

SEQ ID NO: 34033 - DNA, 2300 bp, Homo sapien
tgatctattgtgcctagattcatatcctagcttttatcatgatctggctcaggcaagccatttaactggggggtcagtggcctcactttaaatgtgttgtgaagataaaatgaaatcaaaagtattttaaaaagaaaatagaaaactaatataccaaatattgctgatgtggcgaattagctcaattatttaagtccctacgtagggagaatgggctgaggccctatttattttcattccatgaatttctctctgaattccatacttgtctttcacagagccaaagaggaccatggctacctatgcattagtccacataatttacctctaccgaaaattacttccttattgatctttctcaggctttgctttcaaccggaccaaatatctgtcataaagtaagactcagacatattctacgtttatgattactattaagcttttgcaatcgtgaggcaacatcaagaacagaaacctatctgaaaggtttccaatcgcattagcggattggaatcactggtctgatgactctctaaggctacaggtgggaactgcccatacccggtggggaccaagctgatgaagtctgcaattctcaaaagcacagatcatgacatgcactctccgtgaggggtcattccttaaaagtctgctcactacgaaagctcctggaaatgtcgggcaggtgcttagggaaagaatgagaaatccctagtcagtcacaagtctttgtagtgttactgctacagccgatgcaggaaagtggctagggagggggtggtgccggctttcaaaggagtactcagaatctctacacgatgccagagctggtctctggcagggaaggctgtgatggccttgactctggtcaagtgggtttttactcagggaagggtgaaacagaagtggctctgcgaggtgccaaaataatcccctttatggccacgcaagtctgcaacatgcggcactcggacagtctcttcccaataccctcccttaacgagagcgcgcgcccgcgggggcccattaccatcctgcaggatgagggtgggctgcaccgcctgtacccggaactgtctggccctccagccggggctgggcgtccgcaccacctcgctatcggaaagccaggtcacggtctcaaagttgtccccgcgagccagcgcctcggcctcggcgtggtgcactgccacgcggtcgaactggtagaggccgccggagtggtcgaagtgcacgtgggtggccacggcaagcagtggccggcgcgccgcgtcctctttggcctctcggtcctgcaagaggccggaggagtacaggtactccgggaggctgcgcagccccaggcctgtatcgatcaccacgtcctgctcggagccgcgcaccagccagatgttggcacggttgcccgactcgtagaaacgttcttgaatccagaagataccatcgcctagagacttgtgggcgtaccactcgagcgccgacatgctgggcaggggtgcagccaggcggggtgagtgtgggcgtgcgagtctcccacaggctgtccacacacagggcactgcggctgtgtgaagcggtctgcctgcagccagggaggaggcgtagagcgaggcgggggcgtgggatgcgggggtcggaataggaggaggaaggacgcagaccgacgctgcccgtagcgtgcgctcccgcacccttccgccaggtcggcagcaagcagaggctgcgccaccagcacgggggcgcaggagctaccgcagcctcggcagccgcaccacgagagagctttaacgcaggggccactgcagcagaatggagactcaggtggcgaccgtttcgccaccccgggcgtgtgacagcagaggcccgcagtgagggtgggaagagctagaaccgcccacccactggctctgcagggcgcgcactcccagctggcgcagaaagtgtggggcctcgcgggttgtacggcgactacggcgcctgccaagggcaaaaaaacctctttgccgagggggtggggccttcctagggagtgggcggggctagttggtagggctcactccgcggtcctggtgccgcgtgcaggtcggtgcgcgcttctcccgaggtggaacgggcggcagtcaagcgccggcgttctctgccgtcaccctttccttgccggccggcacttcggctgcagagttttgcccacgcttcgagacttagggagcaggtaaccgaggaagcaatcgaagacttgggaggggtggtgagggtagaggggaattaaaggggcacgtggaaaaggtgaggggaagtca

SEQ ID NO: 34034 - DNA, 2300 bp, Homo sapien
ggatgctattgtggaaagggtggctgaagaagtcctctcttacttggtgatacctgagcataagcctgacaaaagtaaggcaaagagccatgtagagaattaaaaaaggatatccagtgagatgtgggatgcaggcagggggacctggaagtgtgaaggtctccttggaaacttattctcctttttatgtccccattactaacgaaagcctagcaaaaggccaatgattattggataaattattgctgagctcatggcctggtagagatatcactccatttcaccactagtggcttgcttctgcctagagaaaaagtacccagactactgagggccctatattactctgctgagaatgccctaaaagtagtcttttaaggccagctcaaaagccactcctcacgaatcccttccacctgtattcttactgaatctagcttttacttcctctgtggtacataccccgtaatgctttattttgcaagtaattgtgtacagacattatcttccctcaaactcctgagaatccagattatgacctttttacacaactctgttcatgaattacccagctcagcgacttgtgcataaggaaagcccccagctgagtaaccgaataatctctgtgaagattagcaaagtatttagaaaagctgcatgcccaccaaagactttaggagggtaggaaaggagcgtacacctctccttccatgaaggcttattagtagttgtcacagtaaaggttatcataattcttttgtaatgctgtctcatgagtctctttatcatttttcctgactaacttaagaggttagttaagttctcaagggaatttctgaagcctaaatagatgcttctggccgggtgtagtggctcacgcctgtaatcccagcactttgggaggccgaggcaggcggatcatttgaggtcaggagttcaagaccagcctggccaacatggtgaaaccccgtttctattaaaaatacaaaattagccgggtgcagtggcaggcgcctgtaacctcagctcctcgggaggctgaagcaggagaatcgctagaacccaggaggcggaggatgcagtgagacgagatcgcgccaccgcactccagactgggcaacagagactctgtctcaaaaaacaaacaaacaaacaaaaaccctaaatagatatttcaatagctgggaagcggggagtggagacagtgacctgatgttaacagagcggatgatttatgtggctggcggggccacacccagtcattattcacttttcccgtcctcaccaggtgctccttttctttatttgagcctttctaccaactcgctttactctcttccaagggcagacaaaccaaaataaataaataaataaataaataataataaaattaaaaaaagggtggatatagaattttattttttataagaaaagacaaaccatattaacaactcccttccctacgatataaagtgccaacagttacgaaaacagatactgaatagtcggtcctcagctgcaatctgcggcaatgactagtgcctaaaaaatcataaagccatggattttgaaaataacctactatcagtaagagcataaatacccttctaactcactgcaaacagtcctaggagtagagactaggtaagatctggaaattggacttaaaaaattctgaagggagcaggacaaggaggggaggtaccaagctatctccaaacgcccctcaaaccagaggcgctttaatgaatctctacccctgacttcccctcaccttttccacgtgcccctttaattcccctctaccctcaccacccctcccaagtcttcgattgcttcctcggttacctgctccctaagtctcgaagcgtgggcaaaactctgcagccgaagtgccggccggcaaggaaagggtgacggcagagaacgccggcgcttgactgccgcccgttccacctcgggagaagcgcgcaccgacctgcacgcggcaccaggaccgcggagtgagccctaccaactagccccgcccactccctaggaaggccccaccccctcggcaaagaggtttttttgcccttggcaggcgccgtagtcgccgtacaacccgcgaggccccacactttctgcgccagctgggagtgcgcgccctgcagagccagtgggtgggcggttctagctcttcccaccctcactgcgggcctctgctgtcacacgcccggggtggcgaaacggtcgccacctgagtctccattctgctgcagtggcccctgcgttaaagctctctcgtggtgcggctgccg

SEQ ID NO: 34035 - DNA, 2300 bp, Homo sapien
ttttcagattttggctattactgtgcaaacattcctgaacatatctgttaaatcttgcacatatgtgtctgtaagtaaatctaaggtaattacttagcaatgtaatagttcagtcagttgcatttaaaattttgatagatattgcctaacaggttgcatcaatttacactctcacttcagtacaacttctactctagggcaactcacaaaaactaaacgttagtgactaaaacacatattcctagaaatgacatattctttcatctatagcgttttaacagaaactgtgtcaggtgaaatcttgaaacactaaaaatcctttggctctgctgagcactggggacatcctttttctcaaagacaaaatgcttgttcctactggccggctttttggaacttggccaaaattcacgctaactgcttcttttgtatattctaataataaaatataatcctattcttccatttttataaaaagtttaatatttgcatccttgttaaatacaaataactattcaagagcatgcagatatctttgagaaagttatttatatgaaggatacaggtatcggtcctatagaagtgcttgaaatctatcactttggctctcacattaattccgctgtctattgacattaaaataagaaaagtaacctatagacagaaagaaggttgtattcccattaacattcatgagggctaagcagccgaagtcctacatatcaagcagggaatatatcctttgtctgctgatgagagaacgtctcagtgataaatggttacagacaggggtgtcatgagggcaacaacacacagaacaattcagacaaactttttaaaaaagtcttctcctgcagtttttttttgtggcgctgggaagcacagtgcctatccctgctaataaaagaaaactattgcaatgcaaaactcctaacctttgcagaggcacttaccagaaaaccaaaaacatactctttgaaaaacaatttaaaaccaagcttcaaaggctttctaatgtataaatattcagacattctgaaaagcactgctctgcaccctgcaccccagctatttgtgcctaaaatggatattgtcgtaacagttagcatggttgtcaaagtgcaacgtctctaatatcaacactgagagacatcagactcattaaaatgctttacattcattaattaggttggtgcaaaagtagttgcggcttttgccaaagtcatacataaattcaaacacattatgatactcatttaacacatttgtgataaaaatcatgtatgaagtcatgagtttatttaataagctaatattccatagagtccaatggtgactaccaatgactcagttaattttcaaaccaaaataagttagattacaatttgttgactcccttgactcctcgagccagggaaaacatttcctggggcctgactctaggtggctcacttccctcacctaaaaacaggaagggtgagacaaccccctccaaccctcgtcctcggtcccccaaggatttctctccagaattctgcctcttctgcagcagtctggagtcttcagcatgaaaagggtaacaaacatggcgcaattttctgaaaccgtgatgtcaacagtgtttttgaggtgtcctttcccaccctaaagaaaattcgagatgcacagcaagaaaaaaatgcaagacagctccccgacacatcctgagccacgcctcgtcctcagggtgcacccgacagtctctgccagcgcagtgtggacgctggacaaagacgcagccagtaggtcgctggtggtcgcgggttggatccgctgacttggccaccaaatcttttcctcggggagtgaagcggcacggaaggagcggagtcaagggcggggctggggattggacccgcccccgggcccggggattggacccgcccccgggccccggaggagtccctgcgcctgcgtgccgggcgtggacctgtggttggactcccccgttttgggctgccctccgcgtcctcccccgccccttcccacctccgcccacttgacgcgatgacgcatctcaggtttgcggacgtggcggcggcgtacggcccggaaggcggagacgttggcggcagaggcggaggcggacggggtcagcccaaagcagaggctcggccatgaacttacccgggacagcggcggcggcggaccttttggccatcttctcgcagagtgctccctgctaacggggacaggtaaagatggtggcaggaggtgagggtagcccggtccaggagggcggggttgagccccagctgcgt

SEQ ID NO: 34036 - DNA, 2300 bp, Homo sapien
aataatttcagcatttgagagtatctacactactttgtcaagtatttgtaccacaattaccaactatgttgtttcttgtggttttattcttcaaagcaaagctttttggagaagccttcagcaatccatacactctcttcttcctagagatttctagcacttgagtggcttgttttttgcatggcatattctgcttttcggttgattaactttcaccccagaaagagtgcaaattaataaacttagggtggttttagagatcactgtttttcccacagtgccttacagagtcttctgcttcctaaacacttagtaataattgttaattacctagttccctgaggtagattgggtgagggtgtaaattttcatttactcatcacagtgcctagggtaatgtcatacacaaagtaaatatgcaagctgaggaagtccagttgtggggaatgtgtttaatcatgggacttggtgaaacaaaaattaagatggaatatttggttggtagacgttgactttgccagggtatttagccacaaataaagcctttacaaacgctaataaaacaacactgtgggttgaatatacattttagtaagacgttttaaataatcaggaagaaaacatttttctgttattgttttctgttttacatgtgactacatggataattgattcacagttttcactttaagttgctttgaagttaccgttcatatatggcaggatttagtaagcatgtctgtctgtgtctactccgttgatatgctcgtggatttaaagcctccagacccaggtccgacctttgttgttgagcctcacaggaaagctgttcaatctcctggatcacctaggttgctattctccccaccttttgcagcgccttgatgtgtcatttgcattcccacacggtttctgtataagaatcatttagtctcaacaaacttgccgtttgatacccagctgtttgttgagtattgcagctttcagaggaggtgctcagcaacagctcataataacgctaaatgagtgcccctggacggcagtatgtaacacaaagtatctagttattcctattccaattaagaagagtacttgtgtgagctgcatttaaaatgaggaggctgagaacccattttttttttctataaaaagcggtgagttgctgtgggagtgctaatctttctctttgctcccagtttgaaacttccgtgattctaataatgctgcatttgctttaaaaatctctggtgcaggcggggatgtgcacattgctgatggtatggtctgacattgagcctttacctttgtgtactgggaaagataagcaacatttgctgagggtttaccacgtgccaggtgtactgtaaagagttgcacttcacacagtctcattcatctactcctaacagccttatgagtaattaataatcctattttataaatgaggagacagacaatttatcccagatgttgacctaaatccctgctttgtaagttcagttgagggtagatccttcctttctaatatttcatcaatttatgctcaaattcttatggggtaaacttagggagagcttcggtaaacgtgaaacgaaacattctcttaggaacgaaaaaagactcagtaaatgggttttttttccctgaaagaaaactaggaattgcttacagtggagtacccagggcagtgtgcaccactgtccatggtgagttccttgtgccgaagggggcaactagaaagtttagccaaaggagacgattagaaagcactgaccgcgcacttacattgggacgcccaggcagaggcaagactcgcgcgctcctaagccgaggcaggtcagcctaggcgcctggctgctggaagagtccattagggatggccaaggcagggtgttcccgacgccagagcgcggacctggctgcccgctgcggagagcagagtgcgcagcccggggcggccacccccgctccgctggtcaggtgagcgctgccccgggagccatgggtcctattggagcagagcgaggatgcagagggaggaggcaagggagggggagaaaggggaggaggatggagccctcctcctgatcctgtagtggtagtaagaatcagcagcgcgggcaaggagtacggacgggagtcagaggcagagcgagggtgtgtggagggccggcggggaccgccgggagcgcgcggatgtcggtgttcctggggccaggtaggctatggctgaggggtggtgctgcgagcatcgctgagccccaggggagcgcctcagcatcagcacctgttgctgcagg

SEQ ID NO: 34037 - DNA, 2300 bp, Homo sapien
aatagcaaaggcttggcaccaacccaaatgtccatcagtgatagactagataaagaaaatgtgacacatacaccatggaatgctatacagccataaaaatggatgagttcatgtcctttgcagggtcatggatgaagctggaaactgtcattctcagcaaactaacacaagaacagaaaaccaggcaccacgtgttctcactcataagtggtagttgaacaatgagaactcatggacacagggaggggaacatcacacacttggggcctgtcggggtgggcactaggggaggggtagcattaggagaaatacctaatataggtgacgggttgatgggtgcagcaaaccaccatggcatatgtatacctatgtaacaaaactgcatattctgcacatgcaccctagaacttaaaatataataataataaaaataaagaacgaatgataggcagtatagaaaatggtattggtgatgcagtcttggattacggaaatggaagagcgtattgagaacatgatcaactcctaaaaactttcaaattcatttttaaattaatctaacctcttttcttctgtaggtgaaccagcttttcctcaaatctgctctaactcatgttccattttagcatttaattaccgctccctggggatctgccacatcatacaaatctgtgtgtaccggatgggcctgtgagcagaggagctaggcgggaaggcacaagtgacctggtgctttaagctgacacctggctattcactcttaggaaaataaagataaagaaaaatcattagctgcccagccagtgactttcatggggggaggggtacactcttacaggagaggtgcgatatacatgattaaaatttttctgtgatttatttgttttttttttttagcacttgacccatgattcatgttcagtgaatgtcattttgaatgaataaaacacctgttaccctcatgttgcccaatatttgaaaccatcatggtatatattttgcaaatttgaggatgtgttgtctaaattcattatatttaaaagaagaagagactttacagaaatggttgatttttacattcaatcaagatatgcaaagtttttgggaatattccaggttgtgagataacttgggggttattaccaagaccaacgtttctatgggaaaatgtgctgtaagtttcaaaaataactttttgcataacatcaatacataaattccagattccccctattttgttggattctaaaattttgaaaatatgtaacacataggattaatttttatttatccaacataaatcagtacactgaaattattcattttgagtaaatatgatgaattattagtattcaatgaggaggaggaaattattcaatgaggaggaggaaagtgagttttgccaagtttataggagctgacactttgccagagtgccccttccgttttcttgatacttgatcctatcatgaacactgcctgtgtggctactgtcattggtgaagccatttgggcacatgtgaaaaatttgaaaatttgtgttttttttgtttagttttgtttgttcttttttgggggagaaggggagacggagtcttgcactgttgccaggctggagtgcagtggcacaatctcagctcactgcaacctctgcctcctgggttcaaatgattctcctgcctcagcctcccaagtagctgggaccacaggtttgcaccaccaagcccagctaatttttatttttattttttattttttattagtagagacagggtttcaccatgttggccacgctggtcttgaactcttggcctcaagtgatccacccgcctgggcctcccaaagtgctgggattacaggtgtgggccactgtgcccagccaatttgtagttttttatactctacatcttccactccttatctcacaccctacatactggtggtttgttttgtgatggggaaaagtgcatgtattgatgaaactgtttgctactaaagcaacctcaggcattatgctaatggctcaagtcaaagaacagcatttttctctgaaaattatttctaaatcactgacactgtttgtttataggtcttcctatcactgggctctaatttcactttgcaactggtgactgtgatgcttgtcggtggacgtttctatggaatgccaacaattcttcaggaagcaaaatctgctgtccttccagtctctgagaaagctgccaattctcaggtaattggccctgtgtgtggttctctcagcagaacactagagggcagcttttacaggaaggacggag

SEQ ID NO: 34038 - DNA, 2300 bp, Homo sapien
agctagcacaaagtttagcacattgaatatatacttacatataaatataaatattatgtaaagttttagttttatagatttagttcaaataaaaataaactgttgacagaaaggcaggataatgattcatagttaatatttaaatgattcaacattgaattcaacaggtctagattttttacccttacctgctgcttgttaattttgtccttgtttcaccagctataaaatttgaataatatagtgttaattatttagaagagtaatgtgtggatgtagatatatgtgtgtaatacacatatattgtagaattaaatttattatataaggggtccttgaagtactgcaagcattagcacagtgcttagcactcaacaaatacgaatatcattgataatcatattttctcctttttgtgcccccaaggtactctttggacaaagtactcttggacattttgtattctactattgtaatatcattcaggactaaatcaactctaaaataagtttttacatctatttggaaacctagatcttcctttttgagggctatcgttttgcctaggaggccttctttggcttgggttagctatgattaagagggcaagaaaatgtttcccttctgccgtgcctttagagtatgtgtgggtgggaacaatgtgctcatgtaacctaacagcataggagagggaattgcagatttggtgaacttgccaaaccccataacagtagcagatggatgaggtttagagggtgttgtgccctgtcaccagaccctgctgactttagcctggcttttccaaatttcagagtctttgcctttatccagttccctccaggcccaggaggatcttaaaagtaagatagaggttttctaatgaacaagattgcttgatgtgtcccctaagaagcactcttcttttggctaggcatgtgtagtattactttggaaagtgtttgtttcattcccatggcacatttatatgtattaatccctgaaggcactatgaagtgtaatatgaattgcaagttcattttcttctgtcatgtttgactatttggtgctgatgatcttttgcaaagagaaaataatggataacactttctgttcagaaccagaacatgagtctcgaatgaccttaatttttatgcttgggccaaaaagtagaggatcctggcaatttcagtcaccattgtttggtcttcagtgctcataccatttccttaggtggttatcatattttagtttagctcctacattttaaatagatagtagagattcatttttaatgcttgataagcagccaagtttcaggcttaattcacttagtcagtcttgagtcattgctctatcctcactttcatagcaaatatcatcattgggattacaccacaatgttttccttctgaatgaacagtttcacagcttaatataggttagtattttcaacatgcttgattttcaagcatgcttgaataagtttacatgctagaaactggctgggtgcggggactcacacctgtaatcccagcaatttgggaggccaaggagggaggatcacttgatgccagcagtttgagaccaagcctatgaaacatagtgagaccctgtctctacaaaagatttaaaaaattagccaggtgtggtggtgcacacctgtaatcccatctattcaggaggctgaagccggaggatctcgtgtgttcaggggctcgaggctgcagtgagccatgatcacaccactacactccagcctgggaaatagagtgagaccctgtctctaaaaaaataaaataaaataaaataaatgctagaaactggttgaaagtaactgaacaggaggaactgaggatgtggcactcattcttggaaatcagttctggttaaagattaaaacagactctgctgctgtctttcttatgtaaatataaagtccaagggccacacatgacatagaaaaaatatcacttagcttctgtaaaactttttaaaaattccttctttaaatgtttcatgattatacattgtttgcaaagtaaatgaaacaggttaacttcctggatgcttacttttagcagaaatatatcagatagcaaacttgctgacagatgaatcacagctttgcccacctgtaatgaggatacactgctggatcccaggttggtcccagactttcagggtggtatttctggcctccagtccacttagggaactgatcattctgcatacctctctgggattatgttctccacctcatctggcccttgataggtaaacatcccctacctggccaaaag

SEQ ID NO: 34039 - DNA, 2300 bp, Homo sapien
tcgggcatagcacagagcagctagtccaaatcacaaatttaagttttctgttcctataggtatagtttttgagtctcgtatctaagctatccttgaatccctacttgaaagttgaccaacatttgtcaaacaaaaaaatctagagaatactgctctttaatgaccaacatgaaagtactgtgctactaaattttatatttatttatttatttacttatattgagacagggtctctttctgtcacccaggctggagtgcagtggtatgatcatggctcaccacagcctccatctcctgggcttaggtcatcttccagcctcagcctcccatgtagctgggaacacaggtgcatgccaccatatccagctaattttttgatatttttgtaaggacaggggtgtcactcttgcctgagctggtcttaaactcctgagctcaagagatcctcccacctcggcctcccaaagtgctaggattataggtgtgagccaccatacccagcctactaaattttaataatggtaacttctgcaattttcaggaaatagctactaggtaggatttcctcctaggccacttttctcttttctttttttcccccttccctttccccttcttctccttcccctttttcctcttccccttccccttcttctcctttcagaaggagtctcgctccatcacccaggctagagtgcagtggggtgatctgggctctctgcaacctccatctcccaggttcaagcgattctactgcctcagcctccgagtagctgggattataggagtgcaccaacacatctggattttttggattttttgtagagacagggtttcaccatgttaggtcagactggtctccaactcctgatctcaagtgatctgcatgctccggcctcccaaagtaccgggattataggagtgagccaccacacctggcctctaggccacgttcttaaagctttgtcctgtcaccatttatctgccagggacaaaaacaaagaaacaaacagaagtaagccgatatcaagtagaaaaaaaagcaaaacaagttaagattctattatgctaggaaggtaggtatagataagttcctataggaccctaatggtcaggatattgaatttcgactttatcctgaagacaatagggagtctttgatatggagacagactagaaatgtaaaatcagtctctacatttcagaaacaaggctgagtgccgtggctcatgcctagaatcccagcactttggaaggccgaggcgagcggatcacttgaggtcagcagtttgagatcagcctggccaacatggcgaaacttcgtttctactaaaaatacaaatagccaggtgtggtggcaggcgtctgtaatccccggtactcaggaagctgaagcaagagaattgcttgaacccaggaggcagaggttgcactgagccaagatcacaccattgcactccagcctgggcaacagagtgagactcagtctcagtaacaaaatctaggctgggcgtggtagctcacgcctgtaatcccagcactttgggaggctgaggtgggcggatcacctaaggtcaggagttccggagcagcctgggcaacatggtgaaaccccgtctctactaaaaatgcaaaaattagctgggtgtggtggcatgcgcctgtagtcccagctaccaggggaggctgaggcaggagcatcacttgaacccgggaggtggaggttgcggtgagccaagatcacaccactgtactccagcctggctacagagtgagactccatctcaaaaaagaaaaaaaaaaaagaaaatctattgacaagattgacaagagttcattttaaagatgattctctacacttggagcatgggatcttgcctgtcagcaattttcagccgtctccagattagtaactgtgacttgccaccctggttgatgggctggcaggaaggagtgtgtcatatcagagattgccacagacacccagggcaatgtgatttgtcacttaaagaggacggcagatcaagagcatctcatcctccggctgctgagtcatcctgctctggcagttatttaaacagaaggctccaggagacatacaatcaacactccactcagacaatgcccagacctccagaaaccatgtgtcaagctcggattgccttagacaggtgcaatttaagaacagctttcatcctcttttctctcatattgtcacactatgtgttctgacttctggctcctttcctcacaagaagctcacccagctggaactcttatgggaccttggcaccagagac

SEQ ID NO: 34040 - DNA, 2300 bp, Homo sapien
tgtttgtaattctcatcaaggatacaatctgactatgtttaaatatctgctccaccccttactagctctgtgaccttgggcagattttgtaatctctctgtgcctcagtttctttatctagaaagtacagacgataacagttcttatcttagaaggttgatatgaggtgatatgatataatattaaatgaggtaatcattgtaaaacatttagaactttgtctggctaacaaataagcatgatacaagtatatgtgcatcttcacagtcattgtcaacagagcaagcagatcaagtgtttcccctgtgctagacaaggaggaacatggaacacatatatgtctatgtggtggtgataagtgatatgaagaaaaatgaaactgggggccaggcgtggtggctcacgcctgtaatcccagcactttgggaggctgaggtgggcggatcacgaggtcaggagatcgagaccatcctggctaacacggtgaagccccatctctactaaaaataaaataaaaataaaaataaaaagattagccaggcgtggtggcaggcacctgtagtcccagctactcgggaggctgaggcaggagaatcgcttgaaccagggaggcggaggttgaagtgagctgagatcacaccactgtattccagcctgggcgaaagagtgagactccgccctaaaaaaaaaaaaaagaaagaaagaaagaaaagaaaaaagaaattggggaagggaaatagacaaagacagagatgggttcattttctgtaggtggacgggaaaatcctctctgtgaaggtaaacctgacagaagcgagggaccagatcatgtggctatgtagaggaagagccatccaggcagacggaacagcatgtgcaaaggacaggggagagagtatgcctggtgtgaccaaacaacagcatgaaggccaacactaccagaaagggagtgggagcgaggccggagatgcggacagaaggcgcagggatcataccaggaagagctttgtaggctatgagaagtactttttattttattttattattttctttgtttctttacttatttttgagacagggtctggctctgtcgcccaggctggagtgcagtggtgggatctccgctaactgcaaacttccagctcccgggttcaagcgattctcgtggctcagcctcctgagtagctgggaccaaagggtagcgccaccacgcccggccagaactttgtattttaatgagcacattgctctgaataaagttgaaggcagccaaggcgcggtggctcacgcctgtaatcccagcactttgggaaggctgaggcggacggatcgcttgagctaaggagtttgagaccagcctgggcaacatggtgaaaccccgtcactaccagaaacacaaaaaattagccaggcttggtggcgggcgcctgttgtcacagtttctctggcagctgaggcacgaggatcgcttgaacctgggaggcggaggttgcagtaagccgagatcgcgtcattgcactccgtcctggcgacagagcgagactccatctcaaaaataaatgagaaaaaagttgaaggtctcataagagatcccgcaataaattgtgtccttgttctccacgtaggttttaaataagtagtacaacaaagcaagagatttttgtctgtttttctttttctcccctagcagcagaacagtatctggcacaaagcaggctctcaaaaaagcacttggtgagtgagtgaatgaagttccttttcaaagtaaagatgaaaaccagcagatcaactttattacagataaaggtccagttgctagatgctgctttaggctgttaagtaaggggacttcctaatcctacacccccaatattagacagaaagaacctgaggaaggcttacctgacaacagagcaaaacagaatgtttgctttctgctagctgactccttcccaggggggtcaagagccaggcctggtgttccattccacatgtatcaatcagtaagtcagtcatctttctggaagcggagtctttctgcagacagaaagaacaggaggtgcttaggaataatctctctttaagaaaaccaggccgggagcggtggctcacgcctgtaatcccagcactttgggaggccgaggcgggcggatcacctgagggcgggagttcgagaccagactgaccaacatggagagaaaccctgtctctactaaaaatacaaaaattagccgggcgtggtggcacatgcctgtagtcccagctactcggggggctgaggcaggaggatcgcttgaacc

SEQ ID NO: 34041 - DNA, 2300 bp, Homo sapien
ttatttttattttcgaaacttactgctattggttagtattagcagaaaaagtagaatatagaattttttataaattgaagctactaagacttgatagggtctatcttttctcataatgataattgataataaactaagtataaagtggttattattcgactagcaacttccaattcactcatgttaaaggaaaccctattcctattttaaaaacctcataaactttaggaaagaatactgaaaattgagtatgctttctataattttgccacgctagattaaaaaatagcttcttatgtttaatatattgttttcctctagcaagtttcagtaatgaaaagggtttttttttcaactaaaaatgtttaaatttagaatacttaattttaaaataatgctctgatcataagtatctataaaaatgcctattatttataatacttacgtctgtggaagctcgaagctgaatgcatattcatgccttcctgaatgaatagtgtggaagccttcttcggaattatcatcatctaaaacaaacataaaaagaaaacaaagaatttattattcaacatttacatactccgcagggtggcataactttaaagatgcttacataacaattaagaccacaaaacaagctttggagtctgagagatctgagttctaattctaacttcatcatttcctctggacaaaataaaaatcctgtcgtcagctgccttatctgtaaaatggggataatgaatactcacaccccacaggctttttattttttctaatggaaaatgacccaaactgcaaagcatctgtttataaaatagtatatatactcaaaaggctcgggtctcacatcatggtaagacaatgctatcctttgtctccaacggtttgcttaaatttatcacattaagactataatgtatcaaagaaaaactgttcatgcaaccctcttaaaatatgtcagtttatagggaataataataccagatgtgaatagaatagatactccaaaaccactagaaaaccttgtcaaatagacggagtaaaaaaaaaaaaaaaaaaagccacacattgattttaatgtcagatttataactaaaaataattatttattgaactaaaaataattatttattgatctaaaatgatcacaacactcagttggtcctagcaacgactaaaacttgcataaactataccttagataattacaaagaaccgcatttaggtggtgtcggcttataaggaaacaatattttccaacatccttgaaaaaaatgaagtctaactattaatagtttccagtttctataaaaaagggatgacctttcattttacaaccaatttttttggtgaaattattttttttcaagtggcatgaaaataaatataatcgaaaatatgggagggggttctagatcattaaagtgcctatttagcgttttaaataattacagaaatatcttttaaagttttcttggtgtagaaacctttacgattagcccccagagtagaaaaaactggcacattatttaactttccttcagcaaagtattggatatacacaaaaaacgtgatgcctccctgatattaaacgagaaaaagggggaaaaaagcatgtatacgtcgatactttcatttaaaaatcatggtgattcgcttatgtctccatacaattttcctcgtcccctgtgcaaattcccctgaacggatttcagaaccaaaaactagctgatgagctgggggccatttaaattcgctcccctcgaaggcgcccgaagttcgccttcctttccctttcttccctcttcgctccctttttgtgccagctcagcagtctcattgaagcgagcggcggcggccgcgccgtggtaaacaagtgccgggctgtcaatcaagaactagaccggagcaggagaggaccggcctaaaccggcgcgagcagatcccagccggcctgcccgcgcgccgccgccgccgccgctgccgcccgcgcgccccgctatacatacggcatacgtcgcgcggcgctcgcgcccgtgcccgcgcaacctagcctgctggccggggggcggggcgagcgagccgcggcgcttccgctttacacgccccagccggcgaccggttccatctggctcgggccactctgacacctttagtttcggcaagggatattggggtggcgaaggggaggcgggggcccgaaggcttcggaaaacgatgggggagggggcagaggatacccgtcgaagcccccccctcccccaacatttcgatattggaatcactttccttcttcc

SEQ ID NO: 34042 - DNA, 2300 bp, Homo sapien
acaaataaatttcttagacttcttttttattaaatgcaattctggtgtatttatatagctaattcttattttttctgaaatgagttatattctaattaaataaattttactaaaaaaatccgaattcagctgttcactaacccttaataatttttaacataaatgtagacacaaatgtgcaatgaatttatgtattcattatggactacacttttaaatccattccttgctcagtggttttcgaatgcttattaaatatcattgaccttatgctgaggaaaagctgtcattctaggaaattcaccacttctaccactaggtggagaaaaaacacaagtagtatctgtaatcaaagctagtacaaggccccaggtactttacctagaatttccaccaggtgtcaaccaagaggtagggaaaagataagactgtttttcccacttaaatatgcaaatttataattttatgcatagcgatctaaactctgaaataaatggcctgctcattaattgtctagtttgcatatttatactctttatatattgctgttgagtccaagatattgccttgtcaactaaaatccaacccccaaaagcttagtttcttttgaaataaaacagcaagaccaataagtttagtttattgtgactcataggctcaacctatccatatacactacgcaaaagaatctaaaacgtttagacacggacagccaaaaatcttccaaggtatttttggtcatacatatatatatagagagagcaccagattcatattttttctttctacatttctcttgtaaggcagttctgttgattgccagtaatctagatgagtttatgctgttatgctctgaatcccagtgtgatgtgacgaaagcactgctattttttaccaaacattcacaataaaaagagaaatgtacctatatttaagatgtatcatgagaattactacgttaaatggtccaaggctctcggccgaaaattaaagcttcacacagttaaatccctatttatataccaaatcatgctttttaaaaacaattttatgcgcttcactaatttctaacaaagattttccgattctgttgcaaacaatatgtcagctaaaccactatgtcatatgccttttataaggtagtacttttttaggccgaactctattcttattcctctggacacaggagttgtaatcatgtcttactctgcaaatctagccgtaggtggtgtcttaaaaggactttttcttccttcgaggaagtgatcaagcttcccccagcccccacccgtgtcatcctggaaacaacttggttgtttttcggtgctaattaagcaatgtaggagaaagaagttgaggagacagcaaagcctattgattacattgtacttgcttctctacctcgctcttcaaaggattaaggttcctttgacctcgactgagttcatttccaacctgcctacaaagtactggtttaaaaaaaaaaaatccaagcaaagtatgctcttgtctatgaacaatatttcttgtccggttttattacgttttctttggaaattcgttagattatgctcaacaatcggccgcttgcccaaccggtttctcccttcccccatctctcttcacacatcactttttcctcctcccatccaggcagttggtaaaacgctgcagtgccggtaacgcacgcttcgggctggtcgctgcagtttatcctaacttggctttgcaaactccccacccagcccttgtaccctcgcaccccactctgccattatctttctagtagagtgcgctcggtaacgggctccagatagcacgtcgagggtatacggtagcctgcctaccaataggagcccacaatgaagagaagtcaggttcagccggccagcagctccagtatctccttcccctagctctacacctactgtacccgggagcgagcgggcaagggagcgagcgcggcgcggcgcggcgcgggagggggcgcgcagggagggcggacagcagccgcggcctgcgcctgcgcactggggttgtttttcacaaagctgctcttaaagtgagctggcagcttttagccgcccgtctttgtaaggagaccactgagacgagcgggagcgcggagcagcagcctctgctgccctgactttttaagaaatctcaatgaactatttgtagagaatcactgatccggcctgcaagcattttgcacggcaaaaatatcgatcagtgttaagtgaagatcacattttatatgcgatcttgacttttttgtcttacattatatttttatagat

SEQ ID NO: 34043 - DNA, 2300 bp, Homo sapien
tgtcttttaattggagcatttagtccatttacatttaaagttaatattgttatgtgtgaatttgatcctgtcattatgatgttagctggttattttgctcgttagttgatgcagtttcttcctagtctcgatggtctttacattttggcatgattttgcagcggctggtaccggttgttcctttccatgtttagtgcttccttcaggagctcttgtaaggcaggccttgtggtgacaaaatctctcagcatttgcttgtctgtaaagtattttatttctccttcacttatgaagcttagtttggctggatatgaaattctgggttgaaaattcttttctttaagaatgttgaatattggcccccactctcttctggcttgtagggtttctgccaagagatccgctgttagtctgatgggcttccctttgagggtaacccgacctttctctctggctgcccttaacattttttccttcatttcaactttggtgaatctgacaattatgtgtcttggagttgctcttctcgaggagtatctttgtggcgttctctgtatttcctgaatctgaacgttggcctgccttgctagattggggaagttctcctggataatatcctgcagagtgttttccaacttggttccattctccccatcactttcaggtacaccaatcagacgtagatttggtcttttcacatagtcccgtatttcttggaggctttgctcatttctttttattcttttttctctaaacttcccttctcgcttcatttcattcatttcatcttccattgctgataccctttcttccagttgattgcatcagctcctgaggcttctgcattcttcacgtagttctcgagccttggttttcagctcatcagctcctttaagcacttctctgtattggttattctagttatacattcttctaaattttttttaaagttttcaactttttgcctttggtttgaatgtcctcccatagctcagagtaatttgatcgtctgaagccttcttctctcagctcgtcaaagtcattctccatccagctttgttcccttgctggtgaggagctgcgttcctttggaggaggagaggcgctctgctttttagagtttccagtttttctgttctgttttttccccatctttgtggttttatctacttttggtctttgatgatggtgatgtacagatgggtttttggtgtggatgtcctttctgtttgttagttttccttctaacagagaggaccctcagctgcaggtctgttggagtaccctgccctgtgaggtgtcagtgtgcccctgctggggggtgcctcccagttaggctacttgggggtcaggggtcagggacccacttgaggaggcagtctgcccgttctcagatctccagctgcatgctgggagaaccactgctctcttcaaagctgtctgacagggacatttaagtctgcagaggttactgctgtctttttgtttgtctgtgccctgcccccagaggtggagcctacagaggcaggcaggcctccttgagctgtgttgggctccacccagttcgagcttcctggctgctttgtttacctaatcaagcctgggcaatggcgggcgcccctcccccagcctcgctgccgccttgcagtttgatctcagactgctgtgctagcaatcagcgagactccgtgggcgtaggaccctccgagccaggtgcgggacgtaatctcgtggtgcgccgtgttttaagcccgtcggaaaagcgcagtattcaggtgggagtgacccgattttccaggtgccttccgtcacccctttctttgactcagaaagggaactccctgaccccttgtgcttcccaagtgaggcaatgcctcgccctgcttcggctcgtgcatggtgcgcgcacccactgacctgcgcccactgtctggcactccctagtgagatgaactcggtacctcagagggaaatgcagaaatcaccggtcttctgcgtcgctcacgctgggagctgtagacgggtgctgttcctatggggccatcttggctcctcctcctgttatgtgctttttaacattgtttatggctatttttaaacagaagtgttcaatagtaatcaaccctgcagtctttttctttctggttttaggtttttgttcttgcctaggaagaccttcttcaccacaaatggtaaaataaattccctatattttcttgccattcaagagtattttaaataattggttctgaaattcatgtaagatacagtattatgcattttgtgatataaggatctaa

SEQ ID NO: 34044 - DNA, 2300 bp, Homo sapien
ggaagcggaggatccggccccgccggccgcgcctctcagcgggagataacaacatctgcctgaaacgggatacctacttttgcagctcatttgagctcttaatagcagccctctgaggtgtggttaattgatggggataaaggcgtaatgacttgacagggagacgccaatgatcctttaatatacttttaaaagaacaacaaccacccccaaacaccggcctgtctttgctcggtggggggaaaaggcagggatctggagtctggaataacggcgctggtggtgtttgtacctggaagcgtcagtgtggggtgagccctggctcgcagggctggggcaccagaaagaggccaaggcgcccagctcgggctgacagcgcgttgttgcgtggctgcggggagcgaggagggacggggagccagccgagagagcaccggctgacaggtgacccggccgataggcgaagaggagcacggagccgggggcatgtcgcttctccctgggctctgcccctctatgagcccttcccctacgtggggctggatacccacaagccgggcgcctctgtctgcccgccctccttgactagagagaccccgtatctagtttgagcgacatcatcaagtggccggcgggaacaggggggttccgctgcttggacaacctcaggccccagcgccaggacagaggcacgcgcccgtgtgagtgtgtgtacgtgcgcgtgcgcgcaaaccgctccgaaacgcacagctggagcacagcagccccgagcacgtggctgtatttagaccaagtctgtccagaaccccagtgccaggcgtattgggatttacctgcgcggcagctgggtcccgccgcccggtcagaggaacccctgcgcactatcccaccccagacctccgcttaccgttttctcctcagtaccttccctttcttttgcccgatttccctttgctcagtcagttctagctgagtctctagagggtcaaataagtgtttttactcgtcgcaggtaccgaacttaggttcacacaaatcctaaaatgaaaaaaaaaatcatattgccttttccgtttgcaaaggggaaccccctccagatgtgagctgtggtgtccctagcaggttttgcaagtctcttgttttacctttggaaaaagataaccttgatgcttcaggtttgagctccctctggaagcaaaaagagaaacgactccaatcaccgtctatatcttattgcattgagagatagcaggtgtttaggctgcagctattgtctgccttcctccctgagctcacataacaaggatgaaagagtctaaggaacttagtttccccaaacgctcttgcataggagggcggggaaacttcggaatcaaggacttaaagaaatgcaattgagtcccaactcgcaaagtgtgtcagtctccatgtggttccgtccttccgccgtcactgtctagtctcatctagtgtcgttcttctgctttctgtagatctctaggaactcaggattccctgccgcttagccgtcgagctcccgacccctccgcatccctagccgggaaggactgagagctgagctccaaggtcgtggtctggtcctcagggatgaggtcccgggtccagactctttccttggtcagcaactcctgcttagaagctccccgccccgaatggaatcgtgacctggcgctaggtcccccgctgggagtgcccgaggctttcctgaaggccccaggccttcaggccgccagggtcctaaggtgcctgtggcggcccctcgtccgcctgagccctgagatcagcgcggccctcggtgctgcagggccccagggcggccaggaaacacctgcccgaagtccaggcccggccccactgcagtccaggaccctaattctcgagtgtctcttcacgaccctgaccccggaagggcgctcccttgcgaacgaatttttaattctgcggactgggatcccttgtaggggcccctccgagggcccctcccacccctttccctggactagcgaactccgaccctaagcgcggccccgcagggagcggatcccggaagctaggcccatatccggccgcggagccttgcgcgcggggttggctgccgggaggtcgacgctagtgcggtcccccgcgcggcggaggggcccgggccgcggtatctgcgcactgagacgtcggcggaaggctagaggccgtgctctcgcccccgcagaaggccaccactccttgagaaggccggagggacaaagcaccgggcctgcgccgggggcattcaagaaggaagc

SEQ ID NO: 34045 - DNA, 2300 bp, Homo sapien
ttctatggagatcgctgccttatatggagctcgtgtcaaggagccaagagaagggctgctggcaactgataatcaaaggcgactgactggtcagagccctgaatcggggggagagaaaatgggaggctaaggttagccaagcctcctgcacgccattggttggagagcccctcccccctcctcttttgctttctttctcccccccccgcttagctacctacagactgggatggtgtggggaggaggagagaaagtgagggaggggggtgtgtttctgacaagcgcaatttacattgagatcgccctgcgctgctatttactctgagacctgattagtatgggtcgtctatggtcacacacacacacacatacacacacacacacttacgctcacaccccagagggggaagggatgacgagggggagaacgcctagcgatgggcaaaaggagaattagagggaaattattttgatttcttctgaaaagtttttaaaattagattttatgagcgtgaagagagtgtcattgaaaatgtttggaaaaatttttaatgggaatgaaacccccaccattttaatgatttgtgaaatatactggatttggattgttttcttctctcacatataagcacaatccaagtctggattctgctcattttatatcctttttagaaacaagtagaaacagggtaggatctccctattttttaatccaaagtataccttggtttaaaaggtttaatgatgacaaagcacactcctggaatttgcagctattgccacaaattcgatcggaatcaagggttcctatttatcccaaagatgattttaaaaataaactttccaatcaatccaatttttccttcttctttttttttttttttatcacctggctgttccaaactccaacaatgcttcaatcattattaataaaacagtagtaagtccccatattgttgcagggtggggggagattagtgtggccaagtcagtcccgggaaaagagcaaacaaacgagaagatggagagggggggaggcggagagggagagagaaaagggggaggaggagagagagagacagagagagaggagaggaaaggaaagagaggagagaggagagcgcgcgagatattgagagagagagagagagaagagaggagaggggagagagagagagaggagagagagagagacccagagagagaggagagagagagagacccagagagagagagagagagagagacccagagagagagagagagaccgagagagagaggagagaggagagagagagagaggagagagagagagagaggagagagagagagagagagacgagagggagagggagagggagagggagagggagagggagagggagagggagagaggagagggagagggagagggagagggggagagagagagagagagagagagagagagagagagagagagagagagagagagagagagagagagaccgagaccccgattcctgaatcctgaaggtgattggtcgcgggaggaggggcaggcgggaggagcgggtcccgcggcggggcttgcaggaatcgctggctccggctgccacctagcggacgggagccgctcccgggcggcacacagccgagtccctcctcccctccccgcaggcagcctgtgccttttctccaaacgaagacagcactttgaaaattctttcaatggatttttttttccttgaaagatcgtactgggggaaaatgatacttctattagttacatattctccaatcgcatactcgcacccccctcgttttgagatcgctcccctaggcaggctcaggcgggcgcggagccgcgcggagtgacaaagccgccgctgccgccgccgggggtgggagccgcgctcgcccgcccgcccctcgactcgcgagggcgtaaaagtttgtctcagctcgagcattcctagcgccaacacgccctcaggtaaaggtggaagtaaatggccacgctgtattgacagaggtagggtttgttttttaatactcgttctcactttaagtctcaccagggaggggtttgggaagcactgcgtgtttgggggacgttttgcgcttcctggtctctccagcctacaagtcgggagtcggcgaccgcttagtgacgagcgatgattttaaagagcagaataaaaggttttcccgtgcctgccccacagcccctccagctcgaataatggagaactgtcaatgcactccgcgagcggtggcccattgtacgcagctgatggcgaggaggcgactgggggtag

SEQ ID NO: 34046 - DNA, 2300 bp, Homo sapien
gagaggttcagagaagagaggagagagagaggagaggagggagagaggggggagaaagaggagagagagagaggagagagagagagagagagaagagaagaagagagagagagagagagagagagacccaaaaattgaatgcgtttaaacgggaggactcgcagagcaatgtttccgaaagggggatctgcgcgaatgtctgtatatagtgaactttgacactactattgaaactgacacgtttctatggagatcgctgccttatatggagctcgtgtcaaggagccaagagaagggctgctggcaactgataatcaaaggcgactgactggtcagagccctgaatcggggggagagaaaatgggaggctaaggttagccaagcctcctgcacgccattggttggagagcccctcccccctcctcttttgctttctttctcccccccccgcttagctacctacagactgggatggtgtggggaggaggagagaaagtgagggaggggggtgtgtttctgacaagcgcaatttacattgagatcgccctgcgctgctatttactctgagacctgattagtatgggtcgtctatggtcacacacacacacacatacacacacacacacttacgctcacaccccagagggggaagggatgacgagggggagaacgcctagcgatgggcaaaaggagaattagagggaaattattttgatttcttctgaaaagtttttaaaattagattttatgagcgtgaagagagtgtcattgaaaatgtttggaaaaatttttaatgggaatgaaacccccaccattttaatgatttgtgaaatatactggatttggattgttttcttctctcacatataagcacaatccaagtctggattctgctcattttatatcctttttagaaacaagtagaaacagggtaggatctccctattttttaatccaaagtataccttggtttaaaaggtttaatgatgacaaagcacactcctggaatttgcagctattgccacaaattcgatcggaatcaagggttcctatttatcccaaagatgattttaaaaataaactttccaatcaatccaatttttccttcttctttttttttttttttatcacctggctgttccaaactccaacaatgcttcaatcattattaataaaacagtagtaagtccccatattgttgcagggtggggggagattagtgtggccaagtcagtcccgggaaaagagcaaacaaacgagaagatggagagggggggaggcggagagggagagagaaaagggggaggaggagagagagagacagagagagaggagaggaaaggaaagagaggagagaggagagcgcgcgagatattgagagagagagagagagaagagaggagaggggagagagagagagaggagagagagagagacccagagagagaggagagagagagagacccagagagagagagagagagagagacccagagagagagagagagaccgagagagagaggagagaggagagagagagagaggagagagagagagagaggagagagagagagagagagacgagagggagagggagagggagagggagagggagagggagagggagagggagagaggagagggagagggagagggagagggggagagagagagagagagagagagagagagagagagagagagagagagagagagagagagagagagaccgagaccccgattcctgaatcctgaaggtgattggtcgcgggaggaggggcaggcgggaggagcgggtcccgcggcggggcttgcaggaatcgctggctccggctgccacctagcggacgggagccgctcccgggcggcacacagccgagtccctcctcccctccccgcaggcagcctgtgccttttctccaaacgaagacagcactttgaaaattctttcaatggatttttttttccttgaaagatcgtactgggggaaaatgatacttctattagttacatattctccaatcgcatactcgcacccccctcgttttgagatcgctcccctaggcaggctcaggcgggcgcggagccgcgcggagtgacaaagccgccgctgccgccgccgggggtgggagccgcgctcgcccgcccgcccctcgactcgcgagggcgtaaaagtttgtctcagctcgagcattcctagcgccaacacgccctcaggtaaaggtggaagtaaatggccacgctgtattgacagaggtagggtttgttttttaatactcgttctcactttaagtctcacc

SEQ ID NO: 34047 - DNA, 2300 bp, Homo sapien
cgagtcgaggggcgggcgggcgagcgcggctcccacccccggcggcggcagcggcggctttgtcactccgcgcggctccgcgcccgcctgagcctgcctaggggagcgatctcaaaacgaggggggtgcgagtatgcgattggagaatatgtaactaatagaagtatcattttcccccagtacgatctttcaaggaaaaaaaaatccattgaaagaattttcaaagtgctgtcttcgtttggagaaaaggcacaggctgcctgcggggaggggaggagggactcggctgtgtgccgcccgggagcggctcccgtccgctaggtggcagccggagccagcgattcctgcaagccccgccgcgggacccgctcctcccgcctgcccctcctcccgcgaccaatcaccttcaggattcaggaatcggggtctcggtctctctctctctctctctctctctctctctctctctctctctctctctctctctctctctctctccccctctccctctccctctccctctcctctctccctctccctctccctctccctctccctctccctctccctctccctctcgtctctctctctctctctctcctctctctctctctctcctctctctctctctcctctctcctctctctctcggtctctctctctctctctgggtctctctctctctctctctctctgggtctctctctctctcctctctctctgggtctctctctctctcctctctctctctctcccctctcctctcttctctctctctctctctcaatatctcgcgcgctctcctctctcctctctttcctttcctctcctctctctctgtctctctctctcctcctcccccttttctctctccctctccgcctccccccctctccatcttctcgtttgtttgctcttttcccgggactgacttggccacactaatctccccccaccctgcaacaatatggggacttactactgttttattaataatgattgaagcattgttggagtttggaacagccaggtgataaaaaaaaaaaaaaagaagaaggaaaaattggattgattggaaagtttatttttaaaatcatctttgggataaataggaacccttgattccgatcgaatttgtggcaatagctgcaaattccaggagtgtgctttgtcatcattaaaccttttaaaccaaggtatactttggattaaaaaatagggagatcctaccctgtttctacttgtttctaaaaaggatataaaatgagcagaatccagacttggattgtgcttatatgtgagagaagaaaacaatccaaatccagtatatttcacaaatcattaaaatggtgggggtttcattcccattaaaaatttttccaaacattttcaatgacactctcttcacgctcataaaatctaattttaaaaacttttcagaagaaatcaaaataatttccctctaattctccttttgcccatcgctaggcgttctccccctcgtcatcccttccccctctggggtgtgagcgtaagtgtgtgtgtgtgtatgtgtgtgtgtgtgtgaccatagacgacccatactaatcaggtctcagagtaaatagcagcgcagggcgatctcaatgtaaattgcgcttgtcagaaacacacccccctccctcactttctctcctcctccccacaccatcccagtctgtaggtagctaagcgggggggggagaaagaaagcaaaagaggaggggggaggggctctccaaccaatggcgtgcaggaggcttggctaaccttagcctcccattttctctccccccgattcagggctctgaccagtcagtcgcctttgattatcagttgccagcagcccttctcttggctccttgacacgagctccatataaggcagcgatctccatagaaacgtgtcagtttcaatagtagtgtcaaagttcactatatacagacattcgcgcagatccccctttcggaaacattgctctgcgagtcctcccgtttaaacgcattcaatttttgggtctctctctctctctctctctctcttcttctcttctctctctctctctctctcctctctctctctcctctttctcccccctctctccctcctctcctctctctctcctctcttctctgaacctctcttctctttctcttttcttacatattctactagttgttttccccttcttcttctcctttctctcctttttctccctcctccttgtctcttttactccattcctgcagaagagagagggctaaacttaaagaaaaaaaaaa

SEQ ID NO: 34048 - DNA, 2300 bp, Homo sapien
gtaaatagcagcgcagggcgatctcaatgtaaattgcgcttgtcagaaacacacccccctccctcactttctctcctcctccccacaccatcccagtctgtaggtagctaagcgggggggggagaaagaaagcaaaagaggaggggggaggggctctccaaccaatggcgtgcaggaggcttggctaaccttagcctcccattttctctccccccgattcagggctctgaccagtcagtcgcctttgattatcagttgccagcagcccttctcttggctccttgacacgagctccatataaggcagcgatctccatagaaacgtgtcagtttcaatagtagtgtcaaagttcactatatacagacattcgcgcagatccccctttcggaaacattgctctgcgagtcctcccgtttaaacgcattcaatttttgggtctctctctctctctctctctctcttcttctcttctctctctctctctctctcctctctctctctcctctttctcccccctctctccctcctctcctctctctctcctctcttctctgaacctctcttctctttctcttttcttacatattctactagttgttttccccttcttcttctcctttctctcctttttctccctcctccttgtctcttttactccattcctgcagaagagagagggctaaacttaaagaaaaaaaaaaggaggaggaggaggaggaggcacccccttcgtattcttcttatcgttattttatacatatatgattttttttggagggagggtgttggttgccggctgaagagcacttatttaaaatactaaaaaaagaacatttttgggcgatctccagggtttttttaactagctctgtgtgttatagcagaagaagcagaagaaggagcaagaaagaggaaaagaagaggattatttattcgacctactttggatgtctctctcgcttttcctttttcctttttttggcaattattttcttctgatttttattttttctatttcgctgtgatttcgtcgccggcgtgaattatcccgtatttttctcccccttccgtcacctcccgaaagaagaaggcagcgagagcccggcgccaccggcacaacaaaaagagcaaagtgtgtgatcttcctcgccggctgcctcccgctctccagcgctgccttcctgaatggctggctgcgtccggccctggacctggccccccgacacccgcgcgccctgatcgccggcggcagcctcgcccagcgccctgctcggctcaccgcgctccccgcactcccgagcccggcgagggctcccgccgggacagcggcggcgccgcgggcggccccggcctccgctcgcgctccggctgcggccccgactcctgctcggactccggcccgggtcccggctcctccagcggcgctcgccgcagcagctccggcggcagctccagcggcgcctgcagccgcgacctcctcctcctccgccgccgccgccgcctccgccctcgccggcttcctctatgtcggctcagcccgcgcgctgcgcgtagcccgagcggccggcgggcgggcgcccggcgcgggtgagcgactgtgtgtgcgagtgtgtgtgtgcgcgggggtgcgggcgaggcggagggcgagtgtgtgcgcgcgccgtggcccatgcccgccgcccccggcgctgcgccccgcgccgctcccggctgccgcctgtgccatttctgattttgcaacttggggaagaagaaaaaagcgagagaagggagcttgctcgccggggggtggggaggggggaaggagagcgcggcccccccaggaacggagcgcggggggagcgggcgaggggagcaggggtgttggggggggagcctgagagcctgggggggctgcaaaaagagagaaagaaaacagcaggaaccacaacaaaacgccagcagggcgggcgggcgcgcagcagcagcggggcggccgaggcagtagcggcggcagcggcggcggcggcggaggcagcggccggtgtccggctcgggctcggctcctgcgaccccggggcgcccggcgggccccccgccccctccccctccccccttccccttccccttcccctcccagcgcgcccgcgcgccccgcggccctcggcgagcagctcggctccccccagcgctccccgggcccaaagatatggcaatggtagttagcagctggcgagatccgcaggacgacgtggccgggggcaaccccggcggccccaaccccgcagcgcaggcggcccgcggcggcggcggcggcgccg

SEQ ID NO: 34049 - DNA, 2300 bp, Homo sapien
aaaagctaaaactaaaaagcttttgtagtgattttatcaccagggaaatctgttcatccttcagaaggattgttacccgtaaagaagaaataaaggagttaaaattgcttcagaccgttgactccttaggtccctctagattcatagattgaattggtttcaaggggtgggaggaattatgaggggaattccctgagaaagcttacaaattgatcatagccttagtaacactagtaggtgtaagtgtgatcactatggaggaaatgccaaatgtggctgtaagcttgggaaatggttacgaaaagagacaattaacacctttttttttttttttggcttattgtatttgggggtgggtgttgccacgtagtatgcatctgagaatggtctttcaaaatgaattacaattgattttaaaatgtcctaccattataagtgcaactgtgtagttattactgaagtgaaactagggttgcaaacactatagaatagagacacacatttgataaccctatccagaaactggtcctcctagatctacccgcaaatatcatttaaagcaggtatgtctgagcatatgtagaactgctcagttaggtttggaaaatataaatgcctccaaattcaaaagaatcctttaagattgtcatttgaataaatcagtaaaaatataataatatctagatgttatgtattataacacctattgatgcaagcaggcatatatatataattttcccccaagaattctatgaagaattgtcaaaatccacctagcactttaggatttaacaagataaacctacactcatccctccttcctattgagtaacaatgaattttgcccaaaatgagtaagcaaataaaatgacctcatttttagtctgagttgggggatatgactttaatactgggtcttagtttcaaattcaagttcatgaggccagtctgcagaggaaaggaggatagagagaatccttgggagggcactgataaagagagaggggttctctagtagggccagctcccacagctaagtcaggcacagactgtagctttctgctctctggccgacagcagccatagcatccttattgttgtaactcctagattgtgatactgtcacaaaactgttgctaggcaacaaatgtggttaccaggtctcagcgaatagctgaaggggaaagcaaagtgttgcaccattgtagagtaaccatagcaatgacctactattacagactaaagaattatcattaacaatgttaaagtatcagactgaggccctgaatccggagacttccaagcggtatctctctgcataattgagtgatctaggaagagatttcaactgtttaaaagctattcactcattatttctgtggaagtctgtaattattttaatttttaattttaaaaagtgctcatttatgaagccactggtaaaatgctacataagccatcacagggagtcaaaaatagctaaatgtatttcctcatctgttcttatgcttgcatccgtgttatccgctgcctgtgttaaactgaaggtcgatttgatttgaaaacatgctgtacattagtattacatcgaaaccacagagagaagccgtagtaaaataaagtaaccccataaattgacaactaacctgcattttctaagttgaattcctcctgataaaatgggaggcctagatgctcttttagtagtcacggctttgaaaccttttttttagctgttctaaatttgccccttaaaatctgtaaaaatgtcgcccgccaggacacttcaaggcgtaatcccttttgaatgcggtccttcattaagcgtcccgtatgatttggtctcagtgacctagctgaggtaattgtgtctaacagcacagcttccgggagacgcaagaaaaatcattcccccttcccctccacaccacccccttgggaagcaaggaaacaggcgctgtgcgatcccgcacgcaggggaaaccaatccccgcgcgcgccgagtctcgggagtgggtggtttcccggagggagagggagtggcccttcccgcccagcgcttccattggcccggagaggcggaggcctcgggcggccagccgcgcctcggacgaccccgggacagatccgggccgcgtccccgcgttgggagagggatggggactgaggccggagacgcctagacgccgcggatagcgaagtctgagttcctctgagccagggggcaagtgaccccgcagccctagttgtgccctgggagtcggctggcccgcgcccgcgagggggcgggggtcctggct

SEQ ID NO: 34050 - DNA, 2300 bp, Homo sapien
cagagcgagactccgtctcaaaaaaaaaaaaaaaaaagaaaatggctgttttcagtatgtggaccttagcatatatattgctttctcttctttatccctctttgtgatccagctttcattccgtttggcagatactgattgcttcgtgattttgaaaaaaatagcatgtaagtatacctcaagagaatagataccagcaaagttattcttaaatgaacttctgtatattgcaagctgttttttatagactgtcatcttaaaatctaattgaaggcaaatatggaagtctttttaccattaatgctacagagattcacttatttaacattaaataaatattgcttgacttccttccatgttccaggtatagttccacgtgctgaggatctagcagtgaacaagacagacagtgaccctgctcatagccggcacacattctagcaagggttgcagtagagatacagatgacacataactaagtacacagcctgtagcgatggcagccaattttctgattctttttcctttaccattgcttcaaggccatatctgcaacccaacctgtagtgttgggttgaatttagtctcaaggtgctgccttcatctaggaagaggtatttaagggcccaggaagatgaggctaggaaggagatggtagacttcagatgttttaggagtcccagtacataagatttgacaccctgtggagaacagaaaaagtcaagaacagctcctaggtttaagcttggatgactgagttattgataactagttcaaaagtcccgggatgagaggtaggtttagaagtgtggataatgaatttgacttggggcagtgaaaaatacaaaactggaaatcagaagagaagtcagaactgaaatacagatttggctgttatcaccatttcatgtaaattttaaaaggagaaggagcaagaagagttgtcactatagccagatacagcaggatgaggattttttaaaaggccattggatttgacagctgaaaaatcactgatgacttcaagaagaccagtttcaatagatgtgggtggggacagagccacatcatggttggtttaaagaatgaagggctatgattgtctagccaaggtcattgtgctcttcctcctaggaaacattgaaactgaggtcagagcctctctttctccctccctccttagctttctgcacacagggcccacaactggatgcctgagctaggggcatgatggagggacaaattaagattgttgggtttctggtgggataagggcctaaggataaaggagcctgatgttggtgagtcatatattgcagggagcatcctcagtgggggacagtgggtcaggccagttcagagacctgtctctagagtgggaaagagaagacacacacctagatctctgttggttgaggaaactctggaccaagaagctgggttagaatgggaaacaaaaggaccttcaaggctaggggaagaaacatggaattagttacaaagttctgccccagggagggagtggaatctggcagtttgggggtggggtcgggggtagaatctgaggtagtaaactgatgttaactagaaactcaagcagggttgcctaggtttcttagggcacagggactggggatgtgcaaagaggaactgttggcagtacttgtgaccataaagatagtagtgagggggcagtttatgaattgaggggtcgtcccagcaatatctggcatatagatatttaataattatttgtgaagacaagaggttaggtagctcctggggatcagggtccagagtttctgaacaggcataagaaaatacctgggttctattcaggcaggggatggaggcagtgagtaagggactccagacagcttggagatgcaaatcccacaagggagctttgtacctctatgggagttggaagcaaaggtcagggtagggggctcactcccttaaccctaggacccaggagttcctatggatctaccagatttccccgcctacgcacaggcacccttggcttgtaacgccttctccgcccactggggggcggggcttgagggggccggtggctgttctgaagcctcgagggccatcagttcctaccagagccgctgcgggtgccattccacccatggccggacacaggccctcaaaccacttctgcccccttccaggcagtggtgggggcggccccagagggccgatgcccctgcgggttgacactctgacctggttgagcacccaggcggcccctggcagggtgatggtctggccggcagtcaggccaggga

SEQ ID NO: 34051 - DNA, 2300 bp, Homo sapien
gacaatttggggccaatgaaaaataatctaatagtttatatttggaagaaatactgagttagtgaagggaagtctcctggaggtagttaacttagttgtagaatatttagcaaagggtgctgtgtggaattcctcattaagaacatttctctttaatttctgctacaagatgatgtgtaataaaaagttgctggtgaaatttgtgcactatcatgtgggacttcactaattcctgaatggaaatatatatcccttgcagatatttgtttgttttgacattattgtaattatcagtctaggtctgatgtattttctttgtggctgcttggcagtttgatttggcagctacaaagtaagccataggagggcagtgaccatatttgttttactcaccatagtacccccagagtcttgtacattgcctaccttatatactaggatgtatttcttgaagggatatagacacattttattcatgtagaaattatagagttttgagttacctatacaaagaagaaaaataagagtcacttatgctaagtgaaagggctttcccagtgaaaagtagctacattctaggtattccttttagaatatctcacaccattgagtaacagtaagatggctagttatagaaatgattggctatatataccttctgtactatttaatgttgaagcgacatttcgtaaatgaagaaaccaaagaatttggatatgactggccacggagatgttattaagtgatgaagccgtgatttgtttacagcaattaaaaaaaataagctaacatggatgttgtgcacataattatggatcagacattatatgaaatgttttacatttaacctcactgtaacactatgagggaaacatgattatcatttccattttacagatgtggaaaatgaggcccagagaagttaaataatttgtcaagggctcatcggtagttcttagtggagccagagtgccctttctcttatagcacatcacctacagttagacttgacacaagggcagcattgattatggccatttggaacattcatagttttaaattatttattttcagtattagttttttaaaaagtattttctgttacattctgctgattatggaaatagatctgtttttaaagataattataaaatgtactgctgaacggaaactgaaatttaccttatggatagcaagtcaaatttgattcctcagaggaatattcaatcttgttatattgtcatgaatgtagtttttatataatttcattaacagttttggattaatggattaaatgtagtttaaattttcacattgtaggagatacactttttttccttttaaactttaggaaaaatagttgctttactgttcatggggaccctgggaaaagccattcccattaaaaagggaagttttaatgccttccctttggccaaagtagagcagaattcgattttaataaatcctgattttatagtatggttgtttactggagtgccatttagagaggatggcttccagacactgatgacatcgtttcatttaaaaagggctaatttttccctgaaagttgtatttttaattacactataggaaatttgtagatactttatatatttacgtatttgcatcctcctatctgcttgttccagaaggaagacattctgaccttgtaaatggcccatgcttacaatttattttaaaagaaattttaggtttttggaactacccaaagatattttttaaaaacattaggtgataggtaactaaaactaaatggtaagtttggctaaattcagcaaacattaggtaactgtaatgtataaggtattgtgtttggtggacatgagagaaagatgacaaaaacttgatgtctgtattcctgtggcttgtatgccattagctgactcagataaattcataaataagtataatgcaaagcagacaataataagtactatggcataggcatcaacaaagtgggaaattagcatagagagattaatcctgactgggaggatcaaggaagttctcgtggaatagataggttttgagtagaacttaatttattgctttcattcattctagactgtcttctgaagattgatgtctatttccttgagctctttaattttgttgccaatttggataaacatggcacaaatccagcagggaggtccagatgaaaaagaaaagactaccgcactgaaaggtacatacttaatttgctttttcaggaaattttcattgtgcctaataaaggtgtaggaatatttaggtgaccttccattcatttc

SEQ ID NO: 34052 - DNA, 2300 bp, Homo sapien
attttgacatcttaggcaggattggacttgaaaggatatttactctttggctgttgtcatacagctattagtttcttttgctgaaaaacaaatcactccaaaatttactggcttaaagtaacaagaatcattttcattatctctaattgtttctgtgggtcaggaattcagaactgggcacagtggggatggctcgtctctgctttatgaaattttggaccccagctgactcaatgacaggaacaatctgaaggctcattcattcccatgtaagtccagctggaattgcaggctgaagcacccatatgtttgttcaatagtttactactgaacaaagtacattcccctaacccttgagtgggcctctatcctggaaatattgaaaggtcatgtcactcatcttttgaccaatctccatattttatgtaaacattggtatattctcttaatggaatgttacttttttattcaattttcactagttttctcacttacgttctatttctatttcaggatccaacattaaagttggtctctttaggctcctcttggctcagacagtttctcagactttccttgtttttcatgactttaactgtttggagtagtactggtcaggtattttgtctgatgtttttctcatggttaaactgggattatacatttttgggagccttatctttttaatataatctgtcactgttgcaaaagtccaccaaaataaaaatgtttccctcctctgttcaacaatccttcagcttccccaattgtctgcagcagaaaatcaaattactcagcatgacatagaaagcttttcagaatctggctgttgccttcctcttcagtataaagtgtcactctacaaaccatttgagttctttccggaaatgaagccctaacagtcttgcaatgcccgagattcattcaggtactcagttctggctaactccagtggattctctcaccttttactgctccttatctcccgccacttacttacaccactttcttcttgtcctatacacttttctagatttccccaatctattatttaccactgtgatcattcagtcattcaataagtatttattgtctactttgtggacaggcactgttgtatggttgaggatacattaaaaagacaagattatgtcactaccatcagtgagtttacattttagggggcagggtacatttgcaaagtacaaacagtgtggaagtgaagtataccttagagagtctgagatctcctctctgaagaacataactgttggtttacttgtcagccaccagactttccttctctttagctgcctcagaggagagggtatctaactcagctttgttaccccagcgtctagtttagcctaattcattaaattaacagttttggactaaataaatgctctgagagtactatctaaaaattaaaaatcagttgcttccatccctttccccagatttatccttgaaatacctttcaaacctgtttctggaaaaaacattaatatccgtaagattcccatttgagtcaagtatgataacgagaaaacttttgtcattaggatgctaatattaacttcctattttacatgtcctaattcaaaggtaaatttaatcttccgaatctagacctcccggtttttctggagttgaatggacagggtaaagtctgacacactctgagtagcggagtggggaactggctgtaaggacatccttagaatagttaaaattccgctgggaaaacgaggctttagagtggcctcgtcctctacggctacccaggcagccttcacaaggaagggcgaccagagtccgccagtgcataagagaactacacttaattcacgcgggcctctttctccagtccacctaataccacaggaacctacccagggcccgcgccccgcccgtttccgggttgtcgccgccgctgccgtcaagtgcgtaatgacgtatcaatctcctgaagaccccggaagtgcaactcgaacttggtcggggcgcggatcccgagagggaaagtcataacaaccgcacgagggagttcgactggcgaactggaaggccacgcctcctcccgcctgccccctcagccctgtggctgggggcagagctcaggtaggactgccgtttgcggggatgtgagctccgggggcaggcccgggtcgaaatcaggagggggctggcctgggtcggtctcaggcggtggtcgctggccctggggaccgaggctgtctggaaccacgctgcattccctgcggacacctctgacttgtgtctgggcctccgctgat

SEQ ID NO: 34053 - DNA, 2300 bp, Homo sapien
caggctgaggctagactgtggagtgttttgacagcaaggctcaagagactgatcttataacagtggcaagtagctaaaattatcacagcagagaaattggataataaagttcatggggatgaattcagttttacagtacaggagaagagctggacatagcctggagaagggagatgagttagaagaatagttccgtagtcaaggtaccatttgtgaagaagggcttgaagtaggtcagtaaccttcagttggccccagcaatgagaaactggatgtcagagataaaggggtagaactatatatcaatgctgatcacggattaggtatgaaggaacatttaacaggaagaacgggagggaggagggaaggaaggaggggagggagggagagaggaaggaaagaaggaagaaaggaggaaaggatgggagggagagagaagggccaagctagtttggaagacaatggttttagttatattgagttgatggtgatgaggacacagaagtggaatgcttaacagaaagctggagttataggactacagctctggagaaaggccaagacttaagattctggaatcatatagaatagtggttctcaaccagacacagttttggtcccaggggacatttggcaatgcctgaagacatttttggttgtcaccactgaggggaatgctactgacatctagtgggtggaggccagagatgtggctaaacaccctacagaacatagaagagctcctcacaacaaaggatcatccaacccaaagttgagaaaccctgatacagagaagaagaattaatacatttttcttggaaaatatgtctaatctagtgactcctctgcaatccatgacaacttgagaatcatttaaaaattaattggaacagtctttataagtttgtaaaaactaggtccaacacatatttgaataatcttctaaggctgttgcattaaataagatcataaatgtgaaatagcaccaaacaaggaagaacatgtggaatcatcagccaaaaggctaaggacttcttagcaaaaacctacatctaagcgatgttaatagaaagtggaaatagcataggacacaaagaagcaaagaggagagatggaggtaagcaagaaccaatttactgactcattcatccaaccaatatttattgacaactattatataagaggtaataagtgctagggatacgggaatgccttctcagagcttatagtttagaagagggtgacagtgtgcaggaaaaggacataattattagatgatggggagtgctataataaaggcaacaaaatggggatccccaaaagagagggtcttggggctgtgatggaagggtataaatggactgagatgagatgatgagatgagataagatggtgaggcaaggctctctgaggaggtcacatttgggttgagaactgaaaggagagaaaccagtcctgaggagagctgaaatgattctgtcatggattccaagggaggaggagaagggcttaagggggagtcagaagtaccaaagcctacaaagctgcccagctgggcacctttgcatttgttaatgaggaggccacctgggtcctggacagctgcagtcttgaaagataagaatataaattatgagtctaaattttctaatcatttatgagagaaaaaaaaaaacagattttgatttgggggaattttaggtagtactgcgagagaccccggttagagttctgttggaatatgtcaggcacttgatcttcttgccaattttctccacaaaaattagacatccttatacaacacaaaaccatgcagtgattgaacgcaaatgctaatattaatcataccttttcttttcttccccaggcttcacaaggcttactgctcaggcagtatctattgtaatcagcaagttacctacggtgattgcatgtttgcctcccccagttaaatacttcttttttctgtctgagagaaaaatgtcaaaaaaatttgttgaattgaagaaagctggcctgcttgtctggaacttgattgtaattatatgtcggatatttgaggacggaaacactgtggaacttttaacaggtgcctctcttgacagatggagtaaagaaaaattgggtttaatttgtatgtgtttgaaaagcatcatgggagaccagacaagtatccataatcaaatgatccaaaaggtcatacagagcattgagcagcagaagcccaactggattgaacgtcaattgttgaaagcaaggaaactgagcactgaatggtaaagtgatgtttttctcttatt

SEQ ID NO: 34054 - DNA, 2300 bp, Homo sapien
agtgggtaccagggtggggttatggggaggagggatgtgtaagtggtgcaaagtgaatttttaaagcatggacactattctgtgtgacagagtaatggggggtacatgacattatacatttggcaaaacccatagaattgcacaacacaaagagtgaaccctaatgtaaactgtagacttagttaataataatatttttatatttgtttaccagctgtaacaaatataccatatattgcaagatgttaacagtagaggaaactaagggcagggaggaagtatatgtgaactttctgtactttctgctcaatttttttgtaaactggaaactttgctaaaaaataaactattaattttcagaaagtggacattttgagaaagattggcaagtcagcttctcatatctactttgacagttgatggtatttttgttgtgcagacttactttatggtttctgcatttcatgtcctgaaaagtcttctctatgtggatcttttaaaaaaatttccatattttcttttaatgagcttatagttgcatttttctttatttaaaaatctttgactaatctggattttatttcaattagaagtgatccttatttgtaacactatcttcttgaaaatacatcataaaatacaagccataaaaaatcattttaagttaaatggtctaacactgtttgagtctaaaaccctctctgtgttgtgatgtgtcttgagaaatggaataggattcttaaactgcagtccattggattagttaatgagatttacaagagggcctggaaatccccaatttgtgtgtgtgtgtgtgtgtgtgtgtgtgtgtgatgcacatgtgcctgccatacagtcatgttatgcatttttgtttgcagtgttctgtcactttaatcatgttcttagagtgttcacaaatccaaagatgattaagaaatactagagttgatgaaaacttttcctcagaatatgtaaactctgataaaatttcccaaaatagtgatgttattgccaaccaaatggaatttttacctttaacgcactttatgcacaagatggttgaaattaacatcagaacaaaacacttctatttcatcaactgtattccttagaaatcattcacaattaagttcatagagccagatttaggaaaagaaaacacgcatctactggatgactctattggtcagaatccctactgataaagacagttagattttgaaatttgctttgcccaggcataaagaaattgattcttggtaaatcatggggaaaaaagaaaagttagatcataacatagaattcatcatcatacaccatgtctaagccaaaaaaagtaaaccttaaattattcatactgaatcaaattatcattaatctaatcttaatggaaaagtagaaagatttattttggagtagttatttattacatttttatagatcaaattttttttcccatggaaaagagtttcttaattgtaaaaaacaaaagttgtggaaatatttccattttcggaactagggattattttatgcctgtctcagagtttgtgttttttaaatgaatcgttgatatgcttaagggtataatttttctcgttatgctgatgtttatgtatttttcttctttgtttgaagttaacatgctaggaaataccaccatttttaaaatatagtactttagaattaactttttaaatgaacaaggaaataatatttattttgtcctcttacattatcaacctgaaaataaactaatgacaaaaatctttattttgaagattatacgtttatgtacatcaaaaatgaatgtaattgggatgtagatttcatcaagttttatgtgaaaaaggactctatctatcttgattctgtcattattgtaatggtgacatcagcctccatctttttgactatattctctatatattgttatttgtggatgtgtatatgtatgtatgtactgtggatagaacttttctacgtagttaatatttacctgaatttataaatcacatctagtatgctttttaaacaatatatattagtgtgtttgttttcttttctattgcttaggaattttggagaaatccgatagagaggttgtaatggaaaaacctagagcaaacgaaaccaatattccttccgagcaatcactaccaggaaaagaggtaagtgaaggaaaaagaagtgttttataattcacatataatatcatcatatgcctgtgaatccattatgaatcaagatgtcttgagttttaccctttgctacaaaaaaataatttttcaattttg

SEQ ID NO: 34055 - DNA, 2300 bp, Homo sapien
atagtgtcatactcagacccaaacattaatcaatttttcaaatatctacttattttcctaatcaccatactaattctagtcaccgccaacaacctatttcaactcttcatcggctgagagggcgtaggaatcatgtctttcctactcatcggttgatggtatgctcgaacagatgccaacacagcagccatcccagcaatcctatacaaccgtattggcgacattggcttcatcctagccctagcatgattcctcctacactccaactcatgagaaccacaagaaatactcctcctaaacactaaccctgactttattccactactaggtttcctcttagcagcagcaggaaaatcagctcaattaggtcttcatccctgactcccctcagccatagaaggccctacccccatctcagccctacttcactcaagccccatagttgtagctggggtctttctactcaaccgcttccaccccttagcagaaaataacccaccaatccaaactctcacactatgcctaggcgccaccaccaccctgttcgcagcagtctgtgctcttacacaaaatgacatcaaaaaaatcgtagccttctctacttcaagccaattaggactcatggtagtcacaatcggcatcaaccaaccatacctagcattcctacacatctgtacccatgctttcttcaaagccatattatttatatgctccggatccattattcataacctcaacaatgaacaagacattcgaaaaataggaggactactcaaaattatacccctcacttcaacctccctcaccattggcagcctggcacttgcaggaatgcccttcctcacgggcttctattccatagacctcatcatcaaaaccgcaaatatatcatacaccaacgcctgagccctatctattactctcatcgccacttccctaacaagcgccaatagcactcgaataattctcctcaccctaacaggccaacctcgtttcccaaccctaaccaacatcaacgaaaacaaccctaccctgctaagccccatcaaacgcctaacaatcggaagcctattcgcaggatttctcatcaccagcaacattttccccacatccatcccccaaatgacaatcccacttcacttaaaactcacagccctaggcatcaccttcctaggacttctgacagccctagacctcaactacttaaccaacaaactcaaaataaaaaacccactgtgtacatttcacttttccaacatactcggattctatccctgtattattcaccgcacaatcccccacctaagccttcccataagccaaaatttatccctacttttattagacctaacttgactagaaaaactaatacctaaaacaacctcacagtaccaaacctccgcctccatcatcacctcaactcaaaaaggcataatcaaactttacttcctctttcttcttcccactcctcctaaccctcctcctaatcacataacctgttaccccgagcactctcaattacaatatatacaccaacaaacaaggttcaaccagtaactaccaccaatcaatgcccgtaatcgtataaagcccccgcaccaataggatcctcccgaatcaatgctggcccctccccttcataaattattcaacttcctacactattaaaattcaccacaatcaccaccccatcatatttttttacccataacactaaccccacttctattgctaatcccactaaaacacttaccaagacctcaatccctgacccccatgcctcaggatactcctcaatagctattgctgtagtgtacccaaaaacaaccattataccccctaaataaatttaaaaaaaccattaaacctatacaacctcccccataatttaaaataatgatacacccaaccacaccactaacaatcaacactaagcccccataaataggagaaggcttagaagaaaaccccacaaaccccattactaaaaccacacttaacaaaaataaagcatatgtcattattctcgcacggactacaaccacgaccaatgatatgaaaaaccatcgttgtatttcaactacaagaacactaatgaccccaacacgcaaaaccaactcgttaataaaattaattaaccactcatttattgatctccccactccatctaacatctccacatgatgaaacctcggctcacttcttggcgcctgcctaaccattcaaatgatcacaggactattcctagccatacactaatcaccagatgcttcaaccgccttctcatcaatcgcccacat

SEQ ID NO: 34056 - DNA, 2300 bp, Homo sapien
gcacacacaaatatacatgtatacaaatgtgtgtgtgaaaagctgtctaaagagatagttagctgatactctggactcagtcaccaatatgcttgctgatggtctccagatcttctgcatttgccccaagtgttatgctaatgtacagtataggcatttgtttgaattaggataataaaactggccaaggataaaggcactaaagaaactgcattatttagatgtcaaaattaccttatggtgatgaacacatcccttaagtcccttttatcctcaagttttgctatccacttgatttctaaatgtgacatactatctatccatttttacctggagtgaaaataatgatactgttatgtttacttataaaggtatagagcacagtaaaaagagccaaaatttagagtcaggtagactggattcaaattttaattgtgccatttaattgtataatttatggaaaatcacaacctctttgggtctcagtataaaatgttttgcaaaatagaaataatacaatttttgtgattttctttttttattaaacattaaataaaataataaatgtaaagtgcctggcagacagtatctacttggggtaagtattaatgattggctacattcaagagcaattcaaagagagaaatcactgcctctaaaaactagttgctgtacagatataatacataatatccctgaagtaatttataatactttcaactggagaaataaagaaaaaatacaagattcaacaaaatgtcaagattgggattaatggggcgattataagtttgttgaattattaaccaacaaggccagaaaatcaatgtgctgtcctaaatatggtttgttgcattactctcaaaaggttaagaagacactggcctggtgttaacaggggccttgaattgaacatattgcatttttctttatcggtatgctccgataaagaaaatgtttttatgggtatgaggagcatacccataaaaaaaatgcaatagtacctacaactctttcgggaactgactgttttgaaaaaataacagtcagctgccttttacgggggttggtggggaggtaattatctaaatataaggtggcaagtgaaaactagttacctaagaaattgcattacttaagagaagtcgccaaggttcactacatcacatctttcaaatcttaaatgagcacctttcctcacattatccctttgtcggaagcaatttctctttacaactattctggctacctcagacctccatccaaaattctcctgaatccttcattatcgacaaagcctggagcagaacgcaagcattcctttctgaaagcacacatacttactgatcactgctttccaaaaatgcatctaatgcccaagcatgaaattacaagcttgttctcttatgtctcagccatgaaaacaaagaccgttcttctcatccaattcaaatggcgggaggaaccttcaattaattctaaatcaggaaggaacctccccatctcacttcctaaatgtttgtaaaagatgtcttcttcagccaacctcctgccttccaggcacggcaccccagaactacggaaacagtactcaggaatcaagagtggccaaacgctgccaatgggagataggaaactcgttgatcattggtagagaaactcggcacaacgccgagtcacggtacacggtgtcttcggcctcgcccagggacacttggtgacccgaggtcgagttccaagtcggagacagattttgcgagtggataagacggtaagccgggatcccagggccttctccagctgcactgggtgtcaagcgccacggggtttgatggggactccttctggttccaccctcgcccactcacttctcgggctggccataatgctgcacagagccccggccagccattaatatcaggcgcaggagaaaacccagtaaaatcacttaccagtcttccacctccggtgctgatctagcaagagcctgacccgctggccagactcaagctctgcaccaggtattaccaccctggcgacggctccggagcgtcactgacaaccacccggaaatggtactatcgcttccggggctgcctagcgcgcggcgggaaattgtttcccagagcccggattcgtgaagcagttgagtgctgcagcggcagtcgtcgcccctgccgccgctgccaccgaaggaagcatcccagacaccgggaaggtaaaggggctcagctaggaagacacagtgtattctgtctctgtggggatgtttcttcgccgggcggtacctccgaagtttc

SEQ ID NO: 34057 - DNA, 2300 bp, Homo sapien
atgtctcattttagttacattcttgagagaattcgttttgtttagggtttattattcaaagccaacacagaattttttattttactttctaaaaaagttttatttaaatggtgaaaaccctactttagggtaatataatcaagatacatataataaggaaagtactaataaataaaagctatactattggtttcccaaaacgcaatgtttttgaacatcagtggaaaatgtggatgcttattacgaaatcttcagttctgaattttgattatgaaaagtaaccacatttgatcatcttttcaatgactttcacgtgatccacgctttatgctttagggaagcaagaaaatgttaggttatataattcaattttacttaataacgcataataaaatctggatttagaaaacagaataggggtttatttgcagtactgaaggttcgctgtctttacaataaaattgacttaaacattcaagtatttgaacatcctagttcctttaaattaagaatactcaagagttacccggtggctcacgcctgtaatcccagcactttgggaggccgaggcgagcggaacacttgagatcaggagttcgagaccagcctggacagcatggtgaaaccctgtctctattaaaaatacaaaacattagtcgggcgtggtgtcgcgcacctgtaatcccagctactcgggaggctgagataggagaattgcttgaacctgggagccggaggttgcagtgagccgataggcactgcactccagcctgggcaacagagcaaggctctgtcaaagaaagaaagaaagcaaaggaaggaaggaaaggtaagaaaagaaaataaagaaatatactctttaatataaattcacctcatactagcaacttaggtattgaacacctgcaatatacgtaatcaaactttccaataatgagaacatcttgcacatccacaggtatttccaagaattgaggcacaacggaataacataaaccaaaaagtccacaaggtgcattgtctgtcacacatacattgtaaattcagttcaaatgttcattcccaatatttcaacaacaacaacaaaattttttaataaagtcattcgtcaaaaaagaggctggcgcctccaaaatcaagctccatctaactcctgagtcaaataatgatatgaagtacccgagacggaccaattttttttttgtcaatatttaatctgaggctttggaagtggaagaaatcttaaaatagccactcagtcttgtttccagccttcaggcagctgaaatataaaccccaggaacacagaccctcccttcagcgaaaagtgtatgtgtgtatgtttgtgtttaaaggcctatagcagtcagagataggatcactgccgttttagcagtttaaaaaaaaaaaattctactagagaggaaagaatgacacaattttcttcgtcacaggaaagtgggcctggggtatcccagccaccttcgcagacgctaagttatggaaagcagccaaaattctggtatcaggatgaggcgtccccatgggttctatggaaacgagagacgcggggggcctagcgccttccaggcggcgggccgagcggcagagctgcgcaagcagaagcgggggaagtggctcagcccagtactgcagaggggcgctcggtggcagtccccgcagcggcacgggcgaagcgtcgcggggtctgcagctgcagcccaccaactccggcgccgagcgcgaagtcgggagagctggaacgaactgcagctggagaaagcgcgagagccagacaccgctgccgctcaccccagccgcttccttcctagcctcacagccgggaggcagaaacttcggaggtaccgcccggcgaagaaacatccccacagagacagaatacactgtgtcttcctagctgagcccctttaccttcccggtgtctgggatgcttccttcggtggcagcggcggcaggggcgacgactgccgctgcagcactcaactgcttcacgaatccgggctctgggaaacaatttcccgccgcgcgctaggcagccccggaagcgatagtaccatttccgggtggttgtcagtgacgctccggagccgtcgccagggtggtaatacctggtgcagagcttgagtctggccagcgggtcaggctcttgctagatcagcaccggaggtggaagactggtaagtgattttactgggttttctcctgcgcctgatattaatggctggccggggctctgtgcagcattatggccagcccgagaagtgagtgggcgagggtgg

SEQ ID NO: 34058 - DNA, 2300 bp, Homo sapien
cagttcattcaagttgtgtgacagacgctttggctgaatattggaataagacgtggagaccagagcatctcaattatacctagccaaagataggaaactaagtcaaatatcagaatcaaaagccaactctcattgccacaactgtgttgccctactcctagataatagaataggtagctgattaagcaggcttttagttatcctttagtgcatagcactatactttacaaaatatactagtcttggactggctttcctagattataaaaggagacaaacacctaacccattgcctagtacgtaagttgacactaagatacttataaggaataaaaatgactatttatagttaaataatttctctatatttcataagagtcaccaattagacaaagtattagtggcttagagaaaaatatgtggatcatttgtttagctgtatagataatagattattcaatttcaaaactttcaaatgttataccttctgtatcaggttgtgatttttaaatagttaacttatgtagggtactagtatcatacatcttaatttacagattcatatgtagcatctgaaatggacacataagtaaatatattcaggattaggaaacagtttatttcttgccttgttgctgatgatagtggtatgttccctgcattctccataatgagaatgtatatgggattaattcatcctgtattctggacattttttgaggacctaagcctatggatttatcctcccattaccaaccatgtaaaatttaatgccaggtactcatttccccccacctgcaagttacacttaacagaaattgttgttgatacattctttggtcccagtaataggaagggagaaaagtctttattttcttagttttcattttcacctttctgagttgctgaaaaagaaattcaatcagctattctcagggattattctgtggtttcaggattgcagcctgctaaaaggaacggccctcattttaacataggaagccaagtgcgagtgagagggaactaaagatcacgttaaaggccttaacacgttttgttttttttataattgttccctaggaagactgtgattcttcagtctctttgggtagagattgtgaatctctgaaaatagcctttctttctttagatggagtctcgctctgttacccaggctggagtgcagtggtgtgatcttggctcactgcagcctccgcctcccaagttcaagcaattctcctgcctcggcctcccgagtagctgagattacaggcatgtgccaccatggctggctaatttttgtatttttagtagcgatggggtttcaccatgttgggcaggatggtcttgatcttctgacctcgtgatccacccgccttggcttcccaaagtgctgggattacaggcatgagccaccgtgcccagcctgaacagcctctcataagtacattttgggaactgtcatgaacttttactcccagcttgtttatattactaaacttacagaattatatgtataagtatgtatgcaatgaattttaaaataattattggaagttgatttatgaatgcagtttgggttccttggcaagagaaattttgttgtttgagatagagctacattaagataattgttgtttattgctattcaagtaagagtattgtgtaaccttttcctctctatgtggggtatacttgcaagtgagaagtcttaccaggaaaaaactgaaaaataatccaagaagaagtctgtctataattgatgatttgtaaaatctagattgtaactttagcttggacagggactagataaaatatttttgttcttggttattcataaaaatgacttgttagtagatgaacaaagcattaccttttcttgagatatacagaaatcactttattattcaggacctttactatcatgattttttccctgaaagatttttatcagtgtttaacatcctttgatttaagagggtgcattttacctacttgtttgactaacaaagtattatagttaaagttgagtaccataaaacgtacataatattgaaaatacacttagatgattgcctaaaccatttttacatacatacagaaagaaattcagaatgatgaagattcccaaaccaattctgtttggactgaacatagcaatgaagaaacaaacaaagatttcaggaaagatgcaggatttcttgaaatgaaaggtgccttaagagagaccatgtatagaacccaggtaaactttataggctgaaaaacatacatttctgatgtttcttatagaattgttt

SEQ ID NO: 34059 - DNA, 2300 bp, Homo sapien
ttctgtgaaacaggaaaaacaatcctaaaatttgtaaacaactgcaaaagaccctaaatacccaaagcaatgctgagcaagaaggactataaatacccaaagcaatgctgagctggaggcacacactacttgacttcaaagtataccacaaagctatagtaacccaaacagcatggtactggtataaaaacagacatatagaccagtgaagaacagagaatccaaaaataaatccacatatttaaagcaaactgattttggacaaggtgccaagaacactcacgggggaaaggacagtcttcaataaatgatgttgggaaaactggataatcataagcagaatgaaaactagactgttatttcttcaccatatacaaaaatcaactcaaaatgaattaaagacttccaggtaaaacctgaaactataaaactactagaagaaaacacaggggaaacacttcggggcattgatgtaggcaaagaatttatggccaagacttcaaacacatgacttatctgtgacattattgaggtataaatagcacagaattcagcctatttactaaatgtccaaatacattactgtataatagactaataaactaagaaaatcattttaagacatattaaacatactaatgaatcatatgtatatatgtatatataattatattttgaatacactacagtaagacacgatattatacaaaatttttcatgtgccaagttttacctgagctctatatatgtgcttccttaaggtattttttatttcaacaacatccacatctgtcttaatagccatggcttttgattctttggcatattcagcaaaaatagaattcttcatttctttctgcatatagcaaagtaaaatgactttagaaaatgtactaaagacagtgtcaacacagatgatatcacaaaggacaatataagaggaacacattcataccatgttaaccacagcaaagatcctcacaatcatatatcaagattacacaatgaaagaaaaagctcaaaaagcaaacatttcaatttgtaaagaattaactgatatttacatatgtactttctttttttttttttttctttttactctttttatttgctcctgccaacatatgtactttcttaaggcacttttcatttatcctgttccaaattgttcctggaactgcttttttgttgttgccatggtcatacaaaacaaaattcattacttatttacctttatcattttcctgaaattcttctgaatatatgcatatatacataatatggcatttatttatgtatttaggtatttatttttgagatggggtcttactcttgtcacccaggctggagtgcagtggtgcaatcttggctcactgcaacctctgcctccgaggctcaagcaatcctcccacttcagcctcccaagcagctggaaccacaggcacctactaccatgccagctaattttttgtatttttggtagacatggggtttcaccatgttgcccagtctggtctccaactgcagagctcaagcaatctgccccgttggcctcccagagtgctgggattacaggtgtgagccaccgcatccagcccatggtatggtttagatcgttaaaaaaaaaaaaagtcatactccagaaaaaatttacccaagaagcattcaattttaaaaacaagacatctcattaaaaatggtctgtactatacaaaagagcaaaataaaatttacattagaaagtattacccaactatacacacatgtagttttaaagattttttcattttaagaaatagtcttttccagtttctttttcttattcatcacattcaggcaaaacaaaattcactgaataccttgattattaactcagatttctttgtatatgcatgtacaagtacatttactgtgaaccaaagttaactggaatattaactatgaatattacaccagattgactcaagattttttcttaaaacatgtagcattatatatctagattatatcagagaacagccaaaaaataaaaaagaaagctatagcttagcttacaaactttacctgatctctattatatatgtgccttcttaaggtactttttattttttcatgttcaacgcctttcttgcaattgctttcttttcctttcttgcgttttctcctcaaagtataactcctctgaatatcttcatcttttttcttaatttccttctacatgtatttagaccacaattaaatctcaacatcaatgacatatgttacaaaatccaaataaactcaagagtgactttcatact

SEQ ID NO: 34060 - DNA, 2300 bp, Homo sapien
aagatactggctttacagagaatggagttgatttcctgcagtgttttctggagactagcactagaccctagtcctgccgatcacaccaggggaggtgttggtgctactgatgtggtcagacctgctgctggtttcccatgccatatagccgcaactgcaaggcttaaactcagctgtcctatcaaggcaggagactgggtgggattgacagccacctgtgaagactcacctgctaggatctggctggctgtcttggtcgctgatcatgtccgaagaagtacaccactttcttaatcatgcagcttttaaaaatctcctcagccccacacttgagggtctctctcctagattctaatgtctagccctacacgaatgcagtatgctgcccttgatgtgataggacaacagaggacctgcacacatgctactggtcctgactgtgttttccttccataaacactgttctggcaagctggttttatgtgctgctggaccatttgcttatgtttgcacaataaaccagaaattaaactttggttttgaaatcatttatctgctagctagagctattagatatggaatgatatcccaatgaaatattgaatatacatataagaaatttcttacctgagggcaggagaaacaaatccagtagtcactgagggttcagagtgctagggatttctttctcactaatcccatattaggcataatatgtgctagtttggtctgtaatatataactctaatacactgaaatacacataatttattccgtaatatataacataataacatactgtttatgagtgtgttagtttagattatagtataaaaggatccaagaacctgatttggaagtgccttttatgtaaaatgtactattctaatccctaaaattccatgtaaactatgaagacaaagtgtgaaaataatattttaaaaacacctttgatttaaatataaacattttttcgaaacattaaaaccagctgaaattcctgttacttgtcgtctaggcttgttggatatgtgaaaaaatcacaaaacagttgggtaaaaggcatgtgaaaaggttttaataaatattgtgataatagattaggttattagtaatattagatctattagttatagaccaggttcttagatccttttatactgtaatcttttatacatgaacagaatgttatatattatgttatttaagcataatatatgcctaatatgggattaattagaaagaaattagatggcagaacatagttataatctattactgtagcatttattaaaatgttttcatatgccttttacccaactattaatttagtgattttttttcctacatatccaacatgcctagacaacaaataacaagaacataagaatttcagctggttttaatgctttgaaaaagtgtttatatttcaatcaaaggtgtttttaaaatttcattttcacacttcttcatcttcatagtttctactgaattttagagattagaaaaatactttcaaacattagcgtagggtaaagcacgcttagaaggtttgtatgccttgttacatttcttataagaatttaatgatgtttattataaaagtaatcatataaaatgatatacttttttttttttttgagacggagtctcactctgtcacccaggctggagtgcagtggcacaatctcctcttactgcaagctccgcctcccgggttcacgccattcttctgcctcagcctcccgagtagctgggactgcaggtgcccgccaccacgcccggctaactttttgtatttttagtagagacggggtttcaccgtgttagccaggatagtctcaatctcctgacctcgtgatccacccacctcggcctcccaaagtgctgggattacaggcgtgagccaccgcgcccggccagtgatatacttttaaaactgatctctacatctctaagttgggtaattagtatttgatatataattaaataataaaaattggaatcagtatattatagcaaatgaataatcttgtttactagaacttttattcattgggtttctcaagtctttctggaaaatgtcataaagagaaatgtaaagaataattctgtatataaacagtggaggtagataaatctatcttcttttatagtcctatctctcctatttataaaaatctacaaaaaccaggtattttctcattattttaatggaattatttcctaacaaacttgatggtattggataaaattaaagtttattctaaactgttaagttgtaggtccttggaaaattt

SEQ ID NO: 34061 - DNA, 2300 bp, Homo sapien
ttagccttctgttctctccacaagcaagcagaagcaagggaggcacaggtatccatcaggaagggaaggcatgatcctttacctggtgagttgcagatgctcactcttgaccataagaggaagaagacaaagacagaaaagccagacaccagggattactgaaaataggataaccagattgacccaacattggctcttttagtagaaaaaaattttaggaaacaattttgacctagagagagacaaaaagcaagctacatgccacaaaggtaaggaacaactaattcctaagtattatgctgaggcattgtatagaagaaaatctctttagcaatcatcctttattgggtcaaaattgccctgaaaaaaaaaaactcacctcaagtaagtacaatatacaataccaggaaattagaagaaataaaaaacacatttatccacatgaacaatatgttttgctgaagtgtcttaggggccttctgtctcataagaaaaaagtgccataaatgagattccttgagttgattagttctaataatttcatcttgattcacataaacatattaccatcacaaccagtcttccttgacagaataaaagctatccccattttataaatggggaaaaggttagagaggttgactcagctaaatccacataatagaatctaggctttgaatacaaatctgctaacttcttggctctcatgctaaagggtcagaggacatgatatgtttgttagttcctctttagtggatgaacacttaggagaaatttcaaagaatgcaatggtatgcctgtaaatggtgatatatttatatgcccaaccctggaggctctacacagtgtttctattttctttatgattttggcacactcttaagaagtaccagactggattccacacaaaaagccttaagtgattataatcttcccatgttccagttccctgattttctacttttaaaaacatttttacatcatggtttttgcctttgtcttcatttttcttttccctttttgtctcagtaaattccttcccatctcctcagtactttttttttttgtaacttctacttctgttcattggtctcgtttccatttgttatcatgtcttgttgtcaatactgagtcttgcagccttctctgacccagtcctctacgttaccaattacttttgccagaatgctgtccttcacaaggagtacatgagagataatagtaagcaatgctgattttattaattatctatgtacttctgggaagaagggcagtaagaggtgaatttttgcaaggctgttttgttcctctttcctgatttccagttctatttcaaacatagctgaggtaggacaagtgagtagtttaaggaattctaacattcagaggatttttaacacaaccatgtaagagttacatctaccaagagttgctggcaacattttattcccaatatggggaatactgagagttgatagaaggaagaatggtgggtccaggggcattcccctctgaaaagccagagaaaacaaggatgggtactagtcttagcagtagaaaaataaagaagaaaaataaagatcttctttcatgtggggagtcacccaagtagcacaatggctttagactctgaagtcacctggaacaatctggaggaggtggcagcaagactctttacttgggccctgtgttcatggaactgagcagattatggctagcctgcgtcctctgataacctattacaattggaatctattccagagagaaatgcagactaactaggtcccaagttagaatcatatgtattttaatatttgaaaaaagtatgaagtactcagattgctgatgtgttaattttccattcagtactttcaactggactgtcccattcttaagctggctggccattgtagccctctgtgtgttcacagccatcctgtactgcattccgctgagatacattgtccttgtctggggtaagtaaagcctcccccactcccccaaactgtcttagctgctaagaacaaactatgtttaagagatgagttacactgtcagcagttccctgtatttatggtcatgaagctactccatgatgaaaagagacaggttggttaaaaatcacaacagtataaagatttaggtccacctgcaaaatgtatttttcttatctggcacactaggcttcatcatactataaacatgttagttgtgcagattcttcatatatcaaagtgtagctttgtctagatatccctctgatttattttcaccatttatatacaaacagaggcatttca

SEQ ID NO: 34062 - DNA, 2300 bp, Homo sapien
ctaattctaataaatcagaatggaacatgaaaatgtcaacttaatcaagcatttaaattttattaatcaagcctaatttttatgagtgcaaataatcactgaagctggacaaatttgttctcgattgcatcagaaacataattttaatatttaatggactgatgaatttaaatggagaattatctttatgaaacctgctcttcataatttgccattaaatgagaaataaaaaaaaatcaacataaatcttacctaaaggttatttaactaaatgttggtactataaatattataaatgcattatacactaatttagcaatcacacagtacactacataaagcagaaatgataagtagaccaggcaggcttttcctgggatatagagttctgtgttatattgtgggaagctcatgatataacggtttggaggttttgtgtgaagtttcgtgaacattcttttcattcaggcttttatgctacaattcaccattcaccacagacattcttttcagtccaaatgtaggtctaaacccactaggactttcttttgtgaggtgattattctttatataaaaaagataaaaaatatcattatttatagaaaaggatataagaaaagaactgaagttttctgactttatgattttttgacacacaaaacatgctccatttttaaagttaaattctctgacataatgtcctcaggcctcaaaatgttctagatggaaaagaaaagaaaaagaaaactcaaattagtgtcagaatattctttgcaaatgtacacccgttccactcaccctctttatgacccaaaacagattgcttaaaatagggagctgctgtaaatttaagtgaatcaaacctaacagatcaatatggtccaaaagtctgctggcattaatctccaagataaattttttgttgttgttgttttcaaagtatattctttaaagatccctaatgttcccaaagtgtagtattttcagtactattccatatatggaatcatatatggaaatatattccaatatttccatagtattttgcatacttgtgctaaactgtgcatttacctgaaaaataacttgcctattgcagctcccaaaattattgatggggttggagcaaaggatatttggaagattgcaggacatgctactctttaaaatgtcacagcagctcccttttcttgctttacagaaatttttttaaataatgtgtaccttttattagacacttaaaaacaatttctaagattttcagagtttgaaacatttaaaattatgcctttttgttacaaagttgaggttctggaatggaaaaattggttctaaatatagaggcataagtacataattttcttttttatttgtactctgttattaatgtataaaatattttgaaaacattaaattttataaagtagattcgtggtgagtagagttagcttttaattttacttgcaaagcacattaaacaactcaattttttggcctttggtgtatacttttttcccttgacaaataatatagtttcataaaagcattattatttaaaaagcacattccaggttaatagttgacctattttttcctactcaattgaattaatatgcaatatcctaaagacaccaagattagaattttcctgcaagtgaaaaacccaatacattgtaaagcctttagatggagacagagttcaaataaactctagaattctgttcatagtgctttgtgtgagaataagaatgaacacttaagaataccgaaaaggaaatatgaaaagaaatttaagaggcttatactgattatagaatttgttattgtttcgcctttcttaatggaagagtttttctgcatattaagctgacacttaagaaaataaaaggtaacatactttttggtcagtaaagtaaatttactgtctttgcaccttatggcaaaccagattatacagcaaatactgctgttgatgatgcagaagccatgctgtacgtaatcagtggcatgcatcaaaagtcatctgatagccacattaaagccacattccttattaagaatcagactaaattacaacgtggcacttcccagaatgagccaaggaaatgcattttgtgagaagaataattgtatttgagtgtctctgtaaaaatcaggaagtcttttagcagtaagtactaatgcttttttttttattctgccttcttttgtactgcaatatattcagcctccctggcaagcctatcacactaattattattacatctagtggttcagttatcttgatgactactgtagct

SEQ ID NO: 34063 - DNA, 2300 bp, Homo sapien
agtgtataatgcatttataatatttatagtaccaacatttagttaaataacctttaggtaagatttatgttgatttttttttatttctcatttaatggcaaattatgaagagcaggtttcataaagataattctccatttaaattcatcagtccattaaatattaaaattatgtttctgatgcaatcgagaacaaatttgtccagcttcagtgattatttgcactcataaaaattaggcttgattaataaaatttaaatgcttgattaagttgacattttcatgttccattctgatttattagaattagtctccatctccaggcctggtatgctggtgtaggtttacctttctcctcctcttacccgacatcctgagcgagatgttagaaagaagaattttgcttttggactcaatgatgatttcagtgaaacgccctgttctttgctcatggtactgcctgtctttgtcttcatgcacggtgcacagtggagatttgtattacaataatcaagaaaaatgtttcttttaaatatctatggatatgacctgtaaaatggcatatgcttatggtatttctgtaaaattcagttactaaggtgctttaaattgttgaagattgctttgctcaaatttctttatatgcttttattgataaaaatacagtttttatttttgtgggacttccgtatacattgcaaggggactatggatacaggaaatcttactgtggcaatgctattatctttgcctacaggcttaaaaccaagaaaaatgactcacggccatgaaaaaccattctcttccacaggacttacaagggaactcttcaagagagatagtgacatataatgtctaagcccccacttgcttgctgttttacacatggcaaagttcccaggtgtcatctattaagcacttactgtttttttttgttttttttttttgagacggcgtctccctctgtcgcccaggctggagtgcagtggcgcgatctcggctcactgcaagctccgcctcctgggttcacgccattctcctgcctcagccttccgagtagctgggactgcaggtgcccgccatcgcgcccggctaatttttttgtattttaatagagacggggtttcactgggttagccaggcacttactctatgcttaacatgttatgttaattgtctcttaaattcttagaagactccaacaaggtacctattgtccccattttattggtgaggaaattgaagcatagcagaatgaataaccttgtatagctaacaagtagaaggtttggaatttaatcccagatcttccgaatttcaaagcttgggcttttaacctcaagccactggaaagatacagcggtaactcttatcttaaaggtgtttttgctgttgcctatgggagtataacccatttgaaaactttatttaggtaaactgactttctcttgtttaagcaacgctaccagaacattcagttagtttttaaagaactgatagagtatactagtttctttttgttgtataatgaagtaaattcagtaagtaacaaatgacaaaaaatgtccttgaaggtatattttagtttggtcactaaaacatactgtttcagttctatgtacacaagggtagaaacaccttaaagttgtatgctcttgacaaaggtatctcatacaacgctttaaaaaatgaacacaaaactctcagcgttattggactcctaatacttctgatttataaacactttccacaagcagataaagacatatcatttgttttccacttttagcttgttaattggggtcttataatttcttgtcacctttctgaaccaaggacaataattctccacaaatatatgaaactctctgctaccatcacccttcccccaccaccaccaaacagagaacaatgatcaagactagaaatgcaaactagttctaaggtcatgagtcaggccgaaggtgcttctgttggcccctttttctccctccctccctccccatgtttagaatagtttggctctctgccaagaggagagtgcaaagtcatttagaaagaacaatcaggaaatcggtaggataacacatccaccctcaaaccagaattgtgggtatccttttttcctccccagtcttacatctcaattacggaaatggtgaagtcctgggggcagatatttggaagaacagaaatgataagaccctttggcagacatatgggtggacgctttggagaaccatcaagatggtgaattctttggatccatggaaggatttgaggggtttaggaagctggttt

SEQ ID NO: 34064 - DNA, 2300 bp, Homo sapien
tgatgatgggaatgctttttactctagtaacattttaataactttataatgcaaaagtatgttacgttctctggttatgaaacattttataaattatgaaaaagaagtacctttgatttacagagtagaagtgctgatcgtgtcataagaaaaatgctatgaagtgtaaataaacaaatgcatattagcattctgttggttcattttactctcaaagtatttgtgcccattaattagacttctgaattattgtattggtttccctcttttaattccttcaagtgctacacttataaaacaccaccattattaatttatgaagtgaaatagattttatcatttggatctgttttttctattgaagtttcaatacttctgtgcatactaaaatagcaaataaaactgtaaatttaagaaaaatttccacttttgaatttatttttagtcatcaatttgattgactgtaaaagattgtgtatgtcttttacttatgtagaactacagtagtcttttgaaataaatactagaaaatagtctttaggtaatttaatcctcatctaacccatgcaatttccaaaactcaccaagaggaaaatagtagaaaaaaataattagtttaatgttgatcttcttatccccaaagtctgaagagtgttatatatccaacaatgtgagatttaatattgataattaggctgaaagtggtggttcatgcctgtaatcccaacactttgggagccaaggctggaggatcacttgaggccaggaatcagagactatcctgggtaacataacaggacatttttctacagaattttaatttttttttaagttaaccaagtatggttgcacatgccggtagttctagccactcaggaggctgaggtggaaggaatgcttgagcccaggatttggaagttacagtaagctattatcatgctactgcactccaacctgagttagaccctgtctctaaaaaaataaaaataaaaataaattttaaaaaagccactaatctccaaaccattatatctacagatgaaaatttttcttggagtggtttgctggctagaggagattgaaaaaggaagcagacatatctattccataatttattgttcaacatttattgataattatttatgggattaaatgtgttttttttattctttcagaaaatctacttatatagcaacaattatccacatagaggggtgtgtgtgtgtgtgtgtgtgtgtgtgtgtgtggtgtacattcatgagggtggaagggtaatttatactgaagaaacacaaatgaccctttgaaccccttatgcagcatcaacgtttccattctatacatactaaaatggcaaataaaactataaatttaagaaaaattactcactattttgaatttatttttttgagttggagtcttgccctgtcacccaggctggagtgcagtggcgcgatcttggctcactgcaacctctgcctcccgggttcaagcaattctctgcttcagcctccagagtagctgggattacaggtgcccgccaccacgcctggctaattttttttgtatttttggtagagatggggtttcatcatcttggccaagctggtcttgaactcctgaccttgtgatccacccacctcagcttcccaaagtgctgggattacaggtgtaagccactgctcccggcctgaatttatttttagtcatcaatttgatttattttaaaagatactgtatgtattttgcttatgtaaaactacttaagttcttatgtagaattgcataagtcttttgaaataaatacgagaaaacaatgtttaggtaatttaatcctcagctagcacatgcaatttccaaaactcaccaagaggaaaacagtaaaaaaaaaaattagttagtttaatgttgatcttcttacccccagagtctgaagataaactaaaaaatgtaatgttttctcagcacactctttaagactccttgggacctcccttttctaatactgatgttggggtctttcagagcccattgaggatatttcacaacctgaaagatgtgggatttctccaggtgaaagtcatcagagcggaagggttaatggctgccgacgtcactggtaagagatgatgcaattctcctattgctcagatcaagcagcacacaaggtctacaccatttaataattcaactttgcatttcacctgatggatcatcaaaataaataatttaaagattcagggatgatcttagaaatatttgccaaccccctgatttttatagtatctctgctttttaaa

SEQ ID NO: 34065 - DNA, 2300 bp, Homo sapien
gttttttaaatagaaatcacaccgatcaatagcttcaaatcatcctttcactattctctggtcacttctcaacatcattctcagcatctggtctcaactatatatgcaacagggtctagaaaattgctctgagccaggaataaaatgatgaggctaggggagggacaactccagacagaagaaagattcgcacaatttattttattttggggggtcacagaaaattgagtatgaggctttctaaactcagaaattcctgtatcattacatctttatagtatacaataagaacaatttttccccattgtctcttctcactttaagaaataaagtgagaggagtttatggttcctgtaacttactaagccctggctcttcttcaacttgtaagatatgcaaaatataaactaagtgtttaatttgttcagtgatgctgccactgttggacacagatcgatatcaagatgaaacaatttttatatgaatataccttgaaataaatcaaaacgattttacttgtaaaaatcttgtctgctcaaatttctacttagagtcagtattcctttttaataatgactaatttttttagaccctggaacatgacagtctttttccttccattctgattgaatcatgcttttacctaagcttttctttaattttgtcatttttattactgtgaattaatatatatcaaaatgtttttatatttatggtaatgacttaatctgtttgaacaagtgtctcttactgtacattttctccctaattcctatggcattaatggcattaatgaccaaagaataatttggcttacaaaaaagtcagggctcccattaaaaatcacctttattattttaataaaatgaaaaaggcttattaaggaaggttgctgaatatttctaacttaatgttcactgtgattttcactaatcaaaataaagtttcaagatgttttgaagaaatatttgcactgttcatatttgtattactttttcctttacagttatactttacagttattgttatattaaaagtgtatatatttttaaattcatataattggatatatttgtgtaaaaaacatgacaacccatcaatatgtaacaatattctttcagatatatttaacatgtaatgctagagcaggatattatataatacttagtattaattaatgggaataatccattctattgtataaaaggaagattagaaatgaagattctgccaggcacagtggctcatgcctgtaaccccagcactttgggaggtcgaggtgggtggattacttgaggtcaggagttcgagaccagcctggccaacatggtgaaaccccatctctactaaaaatacaaaaattagccagacgtagtggcacatgcctgtaatcccagctgctagggaggctgaggcaggagaatcgcttaaaccctggaggcagaggttgcagtgagcagagatcatgccatttcactccagtctgggcaacagagtgagactctgtctcaaaaaaaaaaaaaaaaaaaaaaaattcttctttaaaaattatattaaatgtatatttaaatgtaaatataattttaaacataaattaagtaaaaatatataacatatttttgttccatatacagaaaatttaaagtgaataataaacatctatcctctactgttttatatctaaaattcttggagtttatatttattattagcaatccatttatatattcgaacggatgcatttttcaagcttccaactgaagatacagaattcctatgtctaacagcactcatttgagtacttggcagattatatttagtacagcgttaacataagcttttgggttttagcctaagggattttcaactttgaaaaatttaatggggatattgaatactaagtgaagtaaaatcagttaactcatttgatttttcttttctgtgagaacatactgaacacctgctaattcattcagattttttactgtgccctaaaacatttgccatattcatctatattagtgttacaagagcgcaatgttaaatccaaaatcgggggaaagtttgacatttcaattactagctagtccaccttccttcacacactctgctacattgaaactgctccctgaatcttttcctccggtaaattgtgcttcctgggaaactaaggggtaagggactatactgtgtagctttatagattttactatgttactgttttatgaaaatgcatcattttctaaatatttcaatcttcttaaaaattcttgtctgagtacagatttttcgttttttat

SEQ ID NO: 34066 - DNA, 2300 bp, Homo sapien
tatctggtaattacagtagtattatcaggaatctgcctttcacgtatttggctttgtttttctcttcatcagcctcatttttaggcaacctcttttagacaagttttagaccaccacttttagacaatgtggtagcagatacaacaaccaacagttctactcttaacattctacaaacttaacctctttctcaatgttagcaaaagtggagaggttggcatgcttactagaccagcgtgggtcacatgcccatccttgacccctgcgttgtagctctgtgcatagtatgcattgattttatgtttttgtaaataggagataaatagacatcctaatagtgtccaaatttacatcactgggattaaagtgttctaagtatttgctagagtaatgaaataagtatgttgtttcatagcattgcatatgagaatgaaacatgttatacatggaagatcattaatattctaaaaagtggacaatttctcaattcaagaaagtgttgcccagtgtatttgctggaaattcagtgatatgagaaacacatttcttaattttatattatttgccaaaccataacaaaaaaatccatattttattcatttattaaataattttttgattaaattctgctatgtattgatgaccatgtcaatagcctcctgaaagaaaattcctgccctcgggtttcttacattcttgttagagaccacagactataaataggtaaacaaatgaataaagaagaacatttcaaactgtgatgtactataaaggaaataaaaaagatcatccgatagaaagtaattggagaaggttacttcaggggaggtagtcagggaagaccttcctaaatgttctgaaaagagaatatttgaaccaccacctgaagactgaaaatgagccttgaaccctaggcctatgctattcaatatggtagccactagccatgtgtggctattgaacacttgcatatagctagctcaagtggaaatgtcacacaagtgcaaaacatacactagatctccaacactagtaccaaaatgataaaatatttaataattttattatgattacatattgaaatgatgatgttttagacatactagggtaaccattactaaaattaatgtttctttacttttttaatgtgactactaaaatattttaaattacatatatgcttcaccttatatgtctatttaacagccctgttctagttagtttcagcctacttactgttattaacatgggctttttcagctttttttccttgatgaggctgatggcaagtgaatttatgtagtagacttttctccaagcatctatgtctatatttattgactgaggtatctaaatataataattcaatatttgatcaagcttaatacagctcagtgttaagggataacatgtggtggagaaagcatgtaaaattgccacatttactagaggagttgtatcattagtcatgttcctttagaagggctcacagaacagataaaaggggaccctgagttggtgaggtaggcagagctagaagcacaaggtaatgacagcgtaggaaaggatttctgtgggaaacagcaacagcaaagcacgaagatctatttccattctctacttagtgaaggagattctattgtgttgtaaagcatgccacttcttgcatgttaaaatggaatttttttctacacattgtttttataccgatgggaatgttagtgactttagtgttccttttttttttagatgtctttctgggagatgttggcaagttctcacatccttaataacattaaattaattcactgcagagaacaagcagaatagttttctttgtgcagtgttgttattctcatttcctgttgtggcttttgccatgaggaagaggttgactactaacactgcatgtttgatttagcaggtgaagtttttagtatttaatgtgagtattttagaaccccagatatgatgtttgttatgtaatctgtactaacagttttgcaatgggaaactcttcccttactggtttgagagttgagtcatatcctgtgaatctaaagctacgttatttaaacatcacgggttcttcttactttcattccaagtcgctgctgtgcagagcagcaagtgctccgtgcagggctgttgctatcacttggaggtgaacagcctcttttgccggtattcagtgaagaaagcaagtctaaatatgcagttctctcactggagtgaaagatgttttgttcatttctaatcaactatgctagacagctgcaagctgaaaagtgcctgcaatt

SEQ ID NO: 34067 - DNA, 2300 bp, Homo sapien
ccaatttcatttagaggaaacatggactctcactctggctataggacccactcccttagctgaccttttgtttcactacatctcttaccaaccccacccaccttgctctactctatttggagtggtatcgttctgtccttgaatatgcccagtcaagctgcttcctgcctcaggacctctgtatctgctgttccttctacctgaaattctacagtcagatccgtcaatagctggttctctgtcctcattaagtcttaactcaaaattttatcttctcagagagactctccctgtacacataatgtaaaaaaccaaaaacctctccatatggggctgccagatttagcaaacaaaaacatgacacccagttaaatttaaatttcagataaataatagtattttagtataagtatgtcccatgcaatatttgggacatacatatactaatattattcattgtttctctgaaagtcagtttaattgggtgtcctgcattttgtctggaagctcttcctctgtagccactctgttatgtggtaccctgcttaactgtttccatgggacttttgcatattagaaattctgtttattgtctcgcatcacctcccaaccctcaccctcacaataagctccatgtgggtgggaccctgatgccctgttcacagctgcatccccagagcctatcacagtgcctggtatatagtaggtgcttaataaatatttgttataaaggtaacaaaaacaaaacaaaacaaaaaacttaggttggtaacacctccaaagcatactgctagctagacaagactgatcagtgtgctaccgcagcttagggaactctcccgttttccccatttaggaggacgaaagaggcattgtgttgctggcctttcagaagtctctcctagcagaatcagaagaccctggctgagcagctttgggagaagcaaagtctgaatgagctaaaaagccttttccgtttgccttgcaacaagcaaatgaagtaaccaaagaaaaaatgcgcttgaatgaaaagaacaagattctgtgcgtgccgaatcggatcaaaggcagtgcgcatcacccatcttcgtccaccgtaaactccctgcaacttaagggctggctttatcgtcagactccggaaatgctagaacctgatcataagagaccagtgcagaggcaaataaagaaaagggaggggtggatggggatgaagtcaagacagaagaaattaaactctcgtcttggacccagggagcgcaacggggcgggggcagacgtcttcagctttagaactccgtcgggttcatcgctcagtgtggacgatcggcgcccccacgagacccatcgagggcacatagtttccactccagctcgcttcatccgacccagacgatcgccagcgcggccagcggccagcgcacagcgagctgcctgggcaactgtggccggatcctagggagcaagctggcttcgggccctacctagctccacccggctcctaccggccctcccacctaggagctggaggatggtcccggggcgccccagggggactgctggtccccggagtctccagccagacgcgccttgttgtgtgagccgcgtgcgcgcccaatttggaggcagccgcccccgccgctgacaggtgctgcccagagggcgccgggtgcggtccctggcgcagctggacgcgcacgccccggtgcgtgcagcttcccgagctcggtcagagagaagagggagccagggcgcggcctgggggacgccagtggactggagccgcggagcttcgagggaaaaactttgcaggcgccgcggccgggattcggttacggctccagcccaccccagcaggtgcgggaggaagaggcagcgccggagtcccgaggccagagagcctcggcggcggcggccgcttctttcccccgagctggcctgaagtcgctgggcactcccggtttctgctgctgcgcccgccgccgccgccgccgccaccgccagcgccgcggggacccgggaggaggtgcagccgaagagggaggagaagcaggaggaggaggaggaggaggaggggagaggaggagcagggggtggaggatggagccccgggctgccgcggcgggcgagccagagccgccggcggcgtcctcctccttccaggcccggctctggaagaacctgcagctgggggtgggcaggagcaagggcggcgggggcgggcgcgctgggggtccagagcgccgcactgcggacaccccgtcgccctccccgccacccccggtgggcacagggaatgc

SEQ ID NO: 34068 - DNA, 2300 bp, Homo sapien
tggcagtgcacacctgtagtcccagctactcaggaggctaaggcatgagaattgcttgaactttggaggcagaggttgcagtgagccaagatcgcaccactgcactccaggctgggcaacagagcaagactctgtctaaaaaaagaataccatagtctgggcatttatttggctcatggttccagaggctgggaagtccaagattgagaggatacatctttatattacatcataacatagcaagaagggaaataagaatgcaagacagaaagagataaactaagccaaactcatcctttctatcaggagcccactcctatgataactaactcattcccacaataagggctttaattcattcattaggagagagccctcatgacctaatcacttcttaaagcctccacttcctaatactattagaatggcaataggccaggcacggtggctcacgcctgtaatcccagcactttgggaggccgaggtgggcagatcacgaggtcaggaaatcgagaccatcctggctaacacgatgaaaccctgtctctactaaaaatacaaaaaattagccgagtgtggtggtgggcacctgtagtcccagctatttgggaggctgaggcaggagaatggcatgaatctgggaggccaagcttacagtgagccaagatcgcactattgcactccagcctgggtgacagtgcaagactacaactcaaaaaaaaaaaaaaaagaatggcaattacatttcaacatgagttttggtggagagattcaaaccagagcagacattaataatatacatatatattatgtgcattgttatgttaaaattgaatagccatttatgtttagagaacaaacctaccaaaattgtccattttagtagggcccatttttctaaccaaataccatggattaaaagctgaatttaagaagagaaagaatcttaaaaagttgttaagcaaggttaaatctagtttttctttctcacacagactctgcttgtgactgtttcttggataattggcaccttgtgaaataatcgctaataatagttatcttttagtggattcctggcaccgccctcagctgagcgctgtaagtatattattacatttaatcctctcaaccatcttatgggatcgatattattagctcatttcacagaggagaaagttgaggcttaaagaggtgatgtaattttgtccaaactaaacagctggtaggttgaggagtcagggttccaatccactctctcagaatctgtagccacctgctcttagtcactgctgtgtgtcagtctcccttggcactagatacaatggtgattagggtagcataatgagccttttggactgcttgcaaaccatgaactactgcatctttgagttttaagggcttagcttaggactaggggatatgcatggaagcccaaatcataggtgtcctttatctgtgggatcaaagtttgtcactcagcatcctgaacattgtgtgcctttaaacaaggcaaatctgataccataatttggacaacaacttagccaaagcatcatttctgtatatggaggccaagtagtactaacaaacatgcaaattctaattttaaaactcagacaaacattttacagctaaaacaatccacccccttttggctaaataactgaacaaaatttcccctacaaaggcaaagttcaatattttcatttctgtaaaactctgacccatgtcacttttcatcagtgctgcactatctgtgaagtccccttctaacctagaagagttagcttcctccctaacatacttggagaaagatttgggcataccgcagcatttcatttcctctttgtctagcttgatgataactcgtcacttttcaaactgtgaagatgaaatcaggagaagagtgtgaaatatcagtataacaatggccacttcccaccccatgagacaaagaagtgaaaggcttagtgatttgtatgatgatgagcactacagaaaacattcaaagcttctaaatcccagggatttcctgacttcagttgtgagggccagccacactgacatcatagatccttcctgcagtcacaatgctactaagtcacccttgggaagaggccccagaaacaggaagaccttagttaggatgcaattacaattccttggtacattggcttcctcagaaaaaagaaaaaaatcacagagattgtttttcaaaaatatcaaatctacaaaaaataaagctggaaaagcaagcatcatgagttcaggtacttatggactattcgaggtctctaaat

SEQ ID NO: 34069 - DNA, 2300 bp, Homo sapien
tgtgcattgaaactcatggattcttatcttactgggaaaataacttcaaaaatggaatgtatgaggctagatgcggtggctcactcctgtattcctggcactttgggagactgagatgggaggatcacttgaggccacgagtttgagacgagcctaggcaacatagcgagaggctgtctctacaaaaaattaaaaaattaaccggtcctggtgacacatgcctgtagttcctgctactcgagaggctgaggcaggagaattgcttgagcccaggaatttgacgttgcagtgagccatgatcacaccactacactccagcctgggcaacagaatgagatcctgtctggaaaaaaaaaaaaaaaaaaaaaaagaggaatgcatgttgtttaaagagcaggtagtggtggtgatgacaattatgatgataacaactaaaatttattgattactgtacttgccacaaaccagtcactgcatttagcattttgtatttgaacttcacaacaatcttatatataggtatttattattatcctcatttttacagataagaaaaactaagacttaaagaggataagtaatgtgcacaggagcttacaattaggaatggatagagttgtgatttgaactcacatttgtctgactctaggactcaagctcttattataggtctttaaaaaattttttatttgggtgtcattagagaggcagtattttcctttgatttctgattggttccttcttaatgctatattttccagtatcccttcagttttccaaagttctggatcacatagaatgactgtggagattgttgagtgggtgactggaatctactcagtagtctgtttttacatgccaggattggagggctctatgcttgcaggctctgtgaataaatgtgtattaccttgcctagaacatagtaggggctcaataaatatttactgaaagaatgaattagtttccaaagctcacttagaaataatgtaatggttaaagagagttttgaacgtgacttttcctgaaaacatcgtatttcataattgcttaccatggaggttgtgtaatttttttggaaagatcagtatacattttacagagaaagaagaatggacttttgaagatttctttggttcttaaattctatgaaaagcagagtgatacattttttcttttatttaaggaattccatctaagttcaggacagggtattacacagtaagtgtttactaagcataaattgacagttgctatgtgccctctgatagaataagtgatgcctaatgaacctttccttgtcggtttgttgttgcaatctcttacttagaagaaagcaatcaaataaattttagaaatacatttaagatctaatgagtaaaaaatagaaaagtatgctattgagggacaagcaataaagaaatatttgaaacaatagtgggaggacttgtttacagaaattcttcatatatataaaaatatatacacatacagagaatataagtatatacaatacatttatgtatgtatgtaggtaagtattttaagatagaaacagtagcttaaggaaatggggaaaataggtcatttttcttactcgcagtacttgaaaaggctgtgcctagaagaaagacatgtagagtgaatacctttgttaagaggttaagaaagaaaaaaatgtatgcctcttttcttcttacatagtatagtttattccagtatggaatagtgatagcattcccacttaattttatatttatattttcttagttcaactatttacttacatttagaacctaaatttttcaggatatcacttaagagtaaactaagtcaaagggaaatacatgtagactacagtaatagcattactgattttaaaggttattttaatgtaaagtttgatatttacaggctgttcattgttttgtttatttaattatttgcagttgttttctctttaataagaaaaggtataaaccttcagaattttattttcccaacttggagaataatgctttttacttttaacacttaagaacctatttgatgtgttcctctttgggatttgatttctagaatttaaaaagtaaccctgatcagccagccgttatcttacttttgagacaagttcagtgtaaaccactcctggagtcacaaaagccactcccagatgctgtacttgaagaactacaaaaaacagtcatgtccaactcaacctctgttccagcttggcaggtaagttttctcctttcttacttgagtcctcaattaaaacacttcataatattagttaatgt

SEQ ID NO: 34070 - DNA, 2300 bp, Homo sapien
gaaaaagcacaggctggacaatccactcagcaggaatgttttaggataaactgaatgtcagatgggaagtaggactagaagcctcttagattcttccagcacaacgtctctaaggctctaaaatatctgtcttgctccaaatcactgcagcacctgctcctattgacactgccaaggggagaaagaagaaaaagatgtattcttgtaagcctgtcatcagagtacatgtcctgtggaaacaaggctgtagagagtaagcacagtttatggaatcagacacaaaattaaatataacttttatgaatttaaatgtcagtcaatattgtcactatggtagaaaatacgttctacattccaaattaactcaaaacaaatttgtttttatgagagagcccacttgtattaccttccgtgctgtattattatttcatgtatgcttggttttgcttccctgaaatctaaactcatgtaaactgagactattgtttaggggtttttttgtttttgttttttttttgagatggagttttgctcttgttgcccaggcggagtgcaaaggtgcgatctcagctcactgcaacctccacctcctgggttcaagtgattctcctgcctcagcctccctagtagctgggattacaggcgcccgccaccacgcccagtattttgcgtatttttcgtagagacggggtttcaccatgctggccaggctggtctcgaacccctaaccttcggtgatccgcccgtctcggcttcccaaagtgctgggattacaggcgtgagccaccgcgcccaacactgtttacgtttttgcatgctcccgcagatctttatcatgctgcttgagtaacaattctgctacactaacagataaactaactgcagacagagcatttagtgagttacggcacagactcttcaattttcagtcgtgctctgactggctccctgtgtaaactcaggccagtcatttaacctctctaagcctgttttcctatctgcaatatggtgaaagtgaggattatagaaaatattccatataaaagtacgtggcacgcagcagatgctcagtaaatgcttagtataacgctcagcacctaagtgccatgtgagtattaaataaacaaatctgttccttactacaattatcttaggcaaaaaaaaacctgccagatattagtattcagttgacttaagtaagtagtataactcctcttttaactgtcagaatattaaaactactagtgtgatgtgcaaattatatacccgaaactagatacagaaattggaatttggctttgggacagaaatctgcttcttccagaactctccaaaggaattcaacagtcaaaagagaccggtttttattctgcagcaaaacaatgatattctgaacctacgtcaactaactgaacatgtcacacagcccatttccccctccagtttcgcttatctcctttgctctctgaaggcaaggaacagctatgctttcccctgcctacagcctgaaacttcttactaggccccgctcctcgccccatgggagcacagtaaatcctgactgcacggggtaagagaagcaataagatgagacaggctagagatttccctgggaaggtattcgggggggtctaaggcattcacggcgcacctgaggcggtccacccagaggccccacaaggcaccgccctattcaacttaagtgacagccgcgccgccacctcatcgccgcccagttcacgctctcgccgaacactcagccacgcttgcgcggcccaaaatgaacagccccggccccgatcctttctttctctaagtaccatttcaatcgcctttaggatcccttgtgcaaaaccgacagaaatccaaacccacctggagcagatgctcctcttctacaaacgccgaggctgcaatgagagcgcatgcgcctttcccaggactcattcacgtgactggaagtggctgggttctgatttgctcggtatttgattaaaaggtcttaacgtgggtaaaagcgggaatttctctgttgcgcatgtgcgcgctctccgcctgataggagttgtagttctgcgggtgaagctcggcgttactatcaagcaaccaaactgcaagctttgggagttgttcgctgtccctgccctgctctgctagggagagaacgccagagggaggcggctggcccggcggcaggctctcagaaccgctaccggcgatgctactgctgtgggtgtcggtggtcgcagccttggcgctggcggtactggcccccggagcaggggagcagaggcggagag

SEQ ID NO: 34071 - DNA, 2300 bp, Homo sapien
aggacagtttgaatattaacaagtatgtgaatgcaaaaattttttttattttttattttttaaaaatttttttatttttatttttatttttttttcgagacggactctcgctccgtcgcccaggctggagtgcagtggtgcgatatcaggtcactgcaagctccgcctcccaggttcacgccattctcctgcttcagcctcccgagtagctgggactacaggcgcccgaaaccacgcccggctaatttttttgtatttttagtagagacggggtttcactgtgttagccaggatggtcttgatctcttgacctcgtgatccgcccacctcggcctcccaaagtgctgggattacaggcgtgagccaccgcgcccggccgtgaatgcaaaaaatttaagcacaaatatagaaaaatctatgcattcatactacactaaaaaaaataacaaacctatatatctcagtcatctttggaagtttctgggatgttgtgatccacattcggattcccttttaggaatgaacaattgcctctgctgaagacagctgctttgcccaacaccatgccccattctaggagcagcccacaaccagtggccatccaacatgcaggtggaaaggtctgttctcctcactcctattggaaagcagctctgaagcaccatactagtttgagaactgtcattcataagatggcaacaaaattcagcttctcctctgcacaatcctgcttccttcatttgcctttgattacaagagcactctgtaataaaatgccatctagtcaatttccagtactgcccattctctaagtttaaatcacaaagataactttaagtaatattttcaaaaaatcccatgggcacatccagactatgtaattttaatcatcaggaatctacgagaaaggaaatacaacatatgattacaaacactctttagtgccagatatgcttaacaccaacatctgtgtgaccacagtaacaccgagtgataataaactaatattacaattaataaccaaacaattgtctaagcagcactttttaaaacatggatcatcctaaaagcatcgcgtaaggttgacagtagcacctttggcttgggaaagtttcaaaaactgtttaagtttgggattcagccacattaccaacacacacacatacacacaatttctctggaatacgggggagtgaatcaagttataccaacgattccatttgaatcagcactaacaggattatcacagacctgggtaataaaaataaactttcttcacttctcacccaaacatgaattcctgcaaacttgaggtgaactggaaaatgacttttggaaagctaacacgcttttatggagatgcagaatgttattttaccacacaattaaaccaaacgggggtatggactgaaagttcattagtcgtggtaaaataatttagcgaatcgaggtcagtattaaaaaaaaaagatctgcaaagatgttttcagtgtttcactattgttttacatgtttgcataggtatgtggtgtacgtgtgagtacacggggcctcacataaaatgtatttctttctttgcatcggggtaaaaggtgtttgaaaatgtctcaggttctgctccccaaagcctgcagcacaggcggcggcggtgaggtcgccgatccccagcggggcgcccctcccctgcctcgcggtacttacgaaggagtcgctcacgaccagcaccacattgggcgctttggctgctctccgcctctgctcccctgctccgggggccagtaccgccagcgccaaggctgcgaccaccgacacccacagcagtagcatcgccggtagcggttctgagagcctgccgccgggccagccgcctccctctggcgttctctccctagcagagcagggcagggacagcgaacaactcccaaagcttgcagtttggttgcttgatagtaacgccgagcttcacccgcagaactacaactcctatcaggcggagagcgcgcacatgcgcaacagagaaattcccgcttttacccacgttaagaccttttaatcaaataccgagcaaatcagaacccagccacttccagtcacgtgaatgagtcctgggaaaggcgcatgcgctctcattgcagcctcggcgtttgtagaagaggagcatctgctccaggtgggtttggatttctgtcggttttgcacaagggatcctaaaggcgattgaaatggtacttagagaaagaaaggatcggggccggggctgttcattttgggccgcgcaagcgtggctgagtgttcggcga

SEQ ID NO: 34072 - DNA, 2300 bp, Homo sapien
actttcaaaactatgtgcattgtataattttaataagaattagtttaggccaggcccagtggctcatgcctgtaatcccaacactttgggaggccaaggtgggcagattcttgagcccaggagtttaaaactagcctgggcaacatggcgaaacttagcctctacaaaaaatacaaaacttagctgggtgtggtggtgtctgcctacagtcccagctagttgggaggctgaggtgagagaatcacctgagcccaggaagtcgaggctgcagtgagctatgatcatgccacttcactccagcctgggcaacagagtgagaccctgtctcaaaaagggaaaaaaaaaaaaaaaaaagaatttgttgaaaatcaatgttttatcagatcttactaaagttctgtgaaatttcactatagtcattttgaaatgctaatatataagagcatttcaacaaatttgagacaaatgatagactatcttgagaaacactgaaatgatactggctaggaaaatcactgaatgatgaacattgctcagagaaggctccctggaagaagtgcattataaactgggatgatgtgtgtgcatagaaaaaggccttggataaaaagttctaaagggagagtatgaaaatcaaaccaggattttagattttccaaggctatcactctagctttcttaaatgtcccaccaggaacacttattcctatgtctccacagagcttccttgggctcctctggacaatactggcatagtataaaaggaattttttcttaggtgatggatttatagtcaaggcaggcatttatgctcgaaggtatctgaaaagcatcgtatatccactaattcatcaactcaacacatacccactgataactacaacctgtcagaccagagcgaggcaccacagagatgatgatgaaaataaccaaggtttctggccaaaggacaacagcttgggaaatgggattcctacagcagctggcaggactatcatggaacccaccaaatcttcctaggccatgaatcttaaagttccaaatgtttcctcagattgggaatgtgaaccctagacaacactcatacctccctggcccccaggccaggaagtacaggaaattctactttcaccatgattaacgtggagggtgcataaaaagacaaatggatgcttccaacagggaaactaaaatgtgtttgtgaggagacaaggctaaaatgaaagcagcaacatttaatctaaaccatttcctgtgacttggatttcttttttaaaaaaattggccgccttatcactttcttagtcaccttttctctaggcttattggaggcgtagcccctcctagcaacttcccatctgctggaaaacagaatcaagagaatgaggagtgtgatgacgcatccttcactggatgaaaatattaggagaaaagcaataaatgcactaccatttgcataaaacctattaatgccctcttcagactaatgaaatgaattttacatcaccaagaaagcagctgtgacccactgctcctagtatttggaacgatctgcaacactgccactcctaaaagcaacatcattgactttagtaccctctaattaaaatactttcattcttggacagagaagacacatcttgatcaaaattcagctaataggtctcctctttgctcaaaacgctgttaggtttcttgtgttcctgtttttctcatgctcgtgcagatccatggcatttcaaacctttaaaataaaaactaatgtcttttctatttttttcctactggcaatcacattggggtggtgggggcgtgtggtacaatctcagtcaagaggtcctctcttgtgtgggtgctggcataacactggccgtatacaatggccaagcaaagcgacattctgtcctgctgtgctttacacgtaaatagagaatggatgaggttctcagcgcccaggggtccgcggcttccgcgagggtagcgtcgggggccgctgcagagattggaagagtacccgccgggaatgggagggaagacgcggggaaggtggagaataggaatcatgtgtgttcctcgagtgtacaacccacatttgagtgacaaatcacgaggacaatcgacaaaaacaactaagcgcaaagccgcccgaatccatctccctctctgtgcgtgtgccttttcaactaactttgggaactcgtatagacccagcgtcgctccccgcgccgcctcgcctccactttggtttcccgcgtcctgcccgccctcttcggtgcctcctcttcctccgggacaaggat

SEQ ID NO: 34073 - DNA, 2300 bp, Homo sapien
atggttttgtgcatttgtgtgtgtgtgcacttgggaagtggagaagggtagtttattctgacctccattatagctttccaaacatcacatgactaaccatatgaatacttttggtagagataaaagaaagtttctcttctttcatcctacttgtgtgtatatgcatgtataactactgaggtcttcagtttattcaatatcaaatttaaggtcgatggatctaagatgtgtccttttttaatgcccagaatatgacaaagcaaaaaaggatttctaaaatggcaaaccttatttaatccttcgatgacaagctggggactactaacaccttccatgtgccaataaaatcatttgggatgactaacagataatggaaattacaataaatcaaaatatattttatatctttgataactgatacatcaaaactagatagttaatttgtgtttgggtcagtgaaaaaaatggccaaaagggaaatgacccaataaaatattattgatcaccataaaactgtattgaagagaaaaaaaacagaagaaactagcactggaaacaaattattctgagctattcaacttcttacatgttgaggctcatttaaaaaatggcatttatatagcacactgaggtaaatggacaaagttcctgggtttcggctgccccagttcattgggccaccctagagcctgagatcactatgtcaccatactaaatacaagttgtagtgttcaaccttgggttcacactggaatcactcaggaagttaaaaacatacattgaatctgcccactcccttcccaccccaaataatctgtgttttattttgttggtctggcatacagactgggcattacgacttttcaaaactcccaagcgactctaaggcatagccagggttaagaatcactgcactggaaagtagtcaaggaaattaaaaacttaggctcatctagtttcccagctcggaacacaaatatgagggttttggtggttttctttgttgttgttgttgtcaattcagggaagtacaatgagaaaaaagcaaaattgcaaagttcataatatgaaagtgaaaactctccatctcctcccaaagcaaccactattgtttcttttgatttttcgagaaaaagtttatgtacatacctgcatgtttgtatttcaaaaaataattgtttacattaaagagaggacaccatatatagtattctacgctttgcctttaatattcattacatgatgggcctgtcctttgagtatacagtacacagctacgaagtaattcacatgtctgtactgttgtgctgtgttttattgaaccattcctccgtgttatcacttcagctattttcactacttcacagcaataaacattttttttttttttgagatggagtttcgctcgtgttgtccaggctggagtgcaacggcgcgatctcggctcaccgcaacctctgcctcctggattcaaagcgattctcctgcctcagcctcctgagtacctgcgattacaggcctgggccaccacgcccggctaattttgtatttttagtagagatggggtttctccatgttggtcaggctggtctcaaactcccgacctcaggtgattcgcccgcctcggcctcccaaagtactgggattacaggcgtgaaccaccgcgcccggccttaacatccttatacatgggttaccagcatcgcgacgaccttctgcaaatatttttatagggtaaataactgaatgaagtcgctgggcgcatctaaaatttgaataaatgtaatgagatcaacaaacaactaaaaagtaaactgatgctatccacatttgtcaagtacacgagtatgcctgccagtttgaaggtgctggcgcggcgctgttggccagagatctctatcaaccagggtcatctgccggcaatgccatagaggcggtcccgggggcgggccttcttgggtcacgtggacggcctcgccccgcccccgtcgaggcgccgcgcacgtctggagctctggctcgtgcagtagcgtcacgcggaggcggagcgaggactcggggacagtaagttctgttctcgccgcgcagggggcgggctggcgggaccagctgcttccggctgggctgcgggcgtggactcctcattccggctgtggccgcgccgctgcggggcctgaggccctcttgggttttggttcagcgttagttaacggttaacccgccaaggcgggcttccgcccaggcacaggagactcaccgagcttgttcaccttgaaacttgggccacacctgagacctgc

SEQ ID NO: 34074 - DNA, 2300 bp, Homo sapien
gaacccaggaggtggagcttgcagtgagcccagatggagccactgcactccagcctgggctacagagtgagactccgtctcaaaaaaaaaaaaaaaaaaaaaaagaagtgggatatatgtgtttttatgtaaaatggtaacctaagacttgagtggaattacaatgcagattccttttgatcaaggaaaggtacattatcatgttgcttaactcctgtgaaatgctacagtattactatatttgaagaaggtgtggatgatgaaatatcttcctaaagttagaatatttatttgaagttgacaactgatttgtaattttgttaaatatttgtagacaagtgtgtgtttaatatcttgagcattccacagcaaactttttttaaaaaaatatttttagagacagggtctcactctgttgcccaggctggagtacagtggtatgatcatagctcactgaagcctcaaactcctgggctcaagtgatcctcctccctcagcctcccaggcagccaaccctacaggcaagtaccaacccacctgggtaattttttaaaaacatttttatgtagagctgggtctcagtatgttgcctaggctggtcttgaattcttggcaattgattttcccacccaggcctcccaaagtgctgggattacaggtgtgagccactggcctgagtcattattttgattcaagggcaggatcaaacctataatccttaagcctgttcctaaaaataatattgagatatttcttagtcttgatttttttcccaccttttaatttctatatttggccaaaaggatattaaagagtggaataggagacaaactttagaaatacagggaaaagagagtagtaatggttatattctgaatataagctcttacttggatactaatcagtatttgatttctaggagggtggatgtatagggagtaagtgaacttacaaagagaaaagggtacagggtaggcacaactctttatagaacaaccaaagtttcaggacagtttcctaagaacctcgagttttcttcatgtattatttattgtttagtacacagacgtgaccagcattggaatttatgtggcctcattgcctgcctttttttttccaggttaccacctatttgcaattcaaggagaatataagacagagaagaaagctgtgaatgaatttcatttgattagcaatagattggacactctactgatcttgcctctctacaacctctcttccacctgacctctaaatgttgaagtgtttcaggaattgtcttagaccttcttccttatctacacttcctctccaagtgagtccatagaattctatgacctggaaactccccagtttttctctctagaaattctcgactttagtctcatatatctggttgttgacttgacatctctacttggatgtctctgagataccttaaactcaatatgtgtaaaatatatatagctcttgattttccattctgcaaaaataccattcatttcttggcctttctcctcacagtctttggcactacagttcacctagctgcacaaacctaaaacttgggagtcatctttatttatttttctgtagcatcttcattcaagttcatcaacccaacttctctgtactataaaattaaaataatacctttttagtaacatggaggattaaaggagttaataaataaatgtagcctttgaatagtgcctggcacatagttaacacaatataattgtagctactactgctactgttgttattactttttatcccctacagcatcaaccccctgcggcaagccaccacctttttcatggacccctagctttctgatttctgggcatccattgttgttttgctataatccattctccacagagccgggagcattctttcaaaaagaaatcaattcacactttcctgctttatactcttcagtggctttcctttgctcttagagtaaaatccatacacagcactgcacaacctggctcctgcctgtttaccaatcttgcatattatgttccagtcttctggaacacattcaccaagacttttctttccttcaggcttttgtatttgctcttctttcagtatggaattctcttccccaagctgttggcatgtctagttcatttgcattttgggcatttcagctcagctgtcatctcagtgaccagtttttatctgaggtaagaaaatgaaaggttttcattcatacccaccttctcttgctgtaatagctatctggttgtgcctgtaagagccaactgtgtactccaggcaaaaccaag

SEQ ID NO: 34075 - DNA, 2300 bp, Homo sapien
aatttgcccacggcaaagcctggtaagtgatagaattgaaactcaaacccaggtctgactgacccccagatttctatatttctatcactaagtttatactgtctatatgtgattatgtaaaatgttcattttcttcaaagctgtgtgcaaaacaaaagttctgttcttctgtattaaagccttttaagtacagataaatctgtacagctgtcataaaaattatttggagatatttttaattgtttcctagtttattttataattatggggtactctattatgaactctaaagaataacataatgaagaattaacaagaaaaaaacagacattgtgggttcttttgtctaagtttattatctgaaataacataagatgcataagattattggcataagaagataattaaacacaaaccaaaatattataaggtcataatgtaagtgctgcagggtgagattttcttactccatcaccgtctgtcatttttcaccactctacttctggggagagggctcttaagtaagaaaagacaaaaaggacgttgttagcaaacacaaagagttgcttatgctttaagtgcagtaaacattagcctgagaaatgcttttcctctagatttgttaattttataggatgcctaggagggagaggactgatgaaaagagaagaaaattgggtaaaaccagttgggcaatgacattggaatcagtggataaaaagaactaggggatggtggaagggaggagaatggagaacagggaggaagaccagaaagagaaggatctgccaggtgttcatctgcagtggacgctgatgaccaactatcttgctaggacagataaagtatttcattatctcatagactcccagcgtgtgtattcatcattgtctagtatgattttctttgtaccgatggattgcactttccaaatgttaagggcatagttatcttaaccatgagagtcatgagaggcaagcaggttctattttggttaggagaggtgaatgtggtatggcggagggtgttctaaggcagattgtggactaagaacaccatgagagctggggattttcaggcttcccatgctagaggaatcctgggatgaagatttctctttcccaaactgttcccatgaagacactttcagcagccgtggctttatgcttgctgaagaaagtggtctagctgcaattaaatatgagggcttcaaattagaatgggattcaggttaaccaactatttcattcacactaaaatataactaggctgtcggccgggcgtggtggctcacatctgtaatcccagcactttgggaggccgaggcaggcggatcatgaggtcaggagatggagaccatcctagctaacacggtgaaaccccgtctctactaaaaatgcaaaaagttagccaggcgtggtggtgggtgtctgtagtcccagctactcgggaggctgagacaggagaatggtgtgaacccgggaggctgaggttgcagtgagccaagatcgcgccactgcactccagcctgggcaacagggcaagactccatctcaaaaaacaaacaaacaaacaaactatatatatataaaactaggcagtcaatcaagtctgcatggtatcaagttcttcccatatttgatcgggggaactaatggtcatctgacatgtgagggtactaggagggtaaaagatgaagaaaagagattgagattataaagcagagaaaccaaagactttacagttttgcccgagtttgacctagtgatcctcattggtgaagcaaaaacaatctattcagaagtctttctgaattcactgctggtgtttcttttctatttggcatcatatataaagcatttcttttaaagcacatgccattttttttcaaagggaccttttgttctcagatgatccattatttgtggtatcactgcagaatttgggacaaatttcaacttatatcatagaactccttagtgtactttattattcaatcccctcactccttcccttatgcctccaaacacactcctcttcctctcactgccagagtgatgtcagaagattctgtagcaggttctcggaagcctattgtacagtaacaaagaattccagcagtgagctgtgagttctgtccttgctggctttcccaagtggaaggctaccctcatctttcactaatggcagactaggacaagcattacccaggcctgcaagcttgttaaggactaggaacccaagcaagaactcaccatgccaatcaaacctgttgggtggatatgtgggcaggtgttgaa

SEQ ID NO: 34076 - DNA, 2300 bp, Homo sapien
tccatgtggagaaaaagaaaattgttttcctgttttgtgttatgtataaaaattacttgcaggtagattaaatacctacatgtgagaggcaaaatataacactactaaaaataatatagaaaaaattttatgatctcagggtagggaagaatttctttaacaagacagaaaaagtcctacttataaaggaaaatattgataaatttgatttcattaaactaaagaacttcagttcagcaaaacaaagaaactaaaagattaactacagaatgagaagccatatgtaacagatatagctaacaaaaactaaaatctagaatacagaaagaatttgttcagatcaagaacaaaaaccactcaatgtaaaatacggacaaaagatttcaacagataccacataaaaagacaaatccaaatgactaataaagccaatcttattgttgtcaaggaaatgcaaatgaaaatcactatgactcactgtccaccagaactggcaaaaatacaaaagtgtgaaaacaacaggatggttactttggtgaggatggagagtagagaggatagagagtaacagagggaaatatggggtgggagcccccacacagagaccccactggggcattgcctagtggaggtgtgagaagagggctgccatcctccaaaccccagaatggtagatccaccgacagcttgctccgtgcacctagaaaagccacagacgctcaacgccagcccatgaaagcagccaggagtgggggttacaccctgcaaagccacatgggcagagctgcccaatgccatgggagcccacctcttgcatcagtgtgacctgcatgtgagacatggagtcaaaagagatgattttagacttttaagatttgactgcaccactggatttaggacttgcatggggcctgtagccccttcattttggccaatttctcccatttgaaatagtatatttacccaatgtctgtacccccattgtatctagaaagtaactaacttgcttttgattttacaggctcctaggtggaaggtacttgccttatctcagatgagactttggactggtggacttttgagttaatgctaaaatgagttaaggctttggggaactgttgggaaggcatgattggcgttgaaatgtggggacatgagatttgggaggtgccaggggtggaatgatatgatttggctatgtccccaagaaaatttcatctcgaattgcagctcccataatccccacgtgtcatgagagggacccagtgggaggtaactgaatcatgggggtgagattttcccatgctgttctcatgatagtgaataagtctcatgagatctgatggttttataaagggcaattctcctgcacatgttctcttacctgccaccatgtaagacatgcctttgctccttcaccttctgccatgattgtgagtccattaaacctcttccctttataaattatgcagtctcaggtatgtctttattagcagcatgagaacagactaatacagctgggtcatggggtccatatattcggttgcttctgtgaaggtattttttgaatgagattaacatttaaattgctggactttgaataaagcagattaccctccgtaatgtggatgggactcatcaaatcagccgaaggccttaacagaataaagattgtcctccctcaaccaagaaggatttcagccagcagactgcctttgaactcaaactgcaacttttccctaggtctccagcctgccagcctatcctgtagactgtggatttatttgagtctccacaattgcatgagccaattccttaaaataaatctctctctgtctctctctcaatatatagatatgtgtgtgtatatgtgtgcatatgtgtgtgggtacacacacacgtatctatttacattatatacatgtatgtatatgtttgtatatacacacacactacacacacacatatatatacacacatcatgttggttctattactccagataactcagctaatacagttggtgacaaaggagactctgaaggggaggagccaggggaagaaaatatcctgtctcattctgctgcctctgatctctgcattgactaaacctaactagaagccagaggccaaaggaatctgtcgatatacaagctagcttcccagtggatggagcaggatggagaagaggaagaacgggcctggagggacaaacaaagggttaaaagaaaaggtgaggaatcattataataaaattcaggatggtggttgtctctagaagggtgagaagattgatttag

SEQ ID NO: 34077 - DNA, 2300 bp, Homo sapien
tttccagaaaaactcatgaataatccaccccttgtttagcatataatcaagaaataactataagtatactcagtcgagcagcccatgacactgctctgcctatggagtagccattattttattcctttactttcttaataaactggctttcactttatggacttgccctgaattcttcgctggaggtccaagaactctcttttggagtcaggattgggacccctttctggtaacaaattgctttagcttcttaaggtcaatgaccaagtcttatgtaccttgggatctcctatgcctacccagcacaggcttggctcacctattgagtaactaaggaaaaaatgaatactttctccctttctgacacttccaagttgtcagcaactttggtgtctatttttgtttcatttttgtattaatatttttatattgtcataaaatataacaatagttaccatgttaatcatgttctagtgttcagtacacgctctagtgtttagttaacaatgttctagcgttcagttctatagttcagtatagtacgaactatatatgcacctcatgcaacagatctctgtaactttttcttcctgcaaacctgaaacactatacctgttgaacaacgcccccttttcccctctccccagcccctggtaaccatgattctactttctgtttctaagagtttgactactttagatacttcatataaatggaatcactttttgtgatttgcaactggctgattccacttagcacaaggtcctcaaggttcatccatgttgtagtttatgaaggaattttcttcttttttaaacgctaatcatccattacatgtgtataccacattttctttatccattcatccattctagtgtctttgtttttgacttatgggtttccggaaaagactgatgagaaaatatattttctattaacccaagagaaaaagtgatcttgcatgctggaatttttaaggatggtttaggttctagagactcaaagagaaatcgtagaaaatgcaaagggaaattagattaaaaaaaaaaacagtgaccacataaagaatatctcccattatatcctctctgagcacgagaaactattaaactactttcaaccgagcaataagggcccataataaaaagctgttgccctagtttttttactgccctactcaataccccctctttcataccctcaaaatagctcagctgagaaaagaaacagtccaattttacagaagggaaaaataaacagataaaaggataagcaagaactcttttcaacacagagtaaggtactggttagaattttaatactgtatggaggagtctaaccccagagtaatccctggcccattttggtgttagtaagtggatcccagtgttcgtttgtatcgaggtagtttgaagcacgttagggatattcatagcctttacttcagtgcattattatgaaagaatctaaagtatctttgcatttacgtgattatgttttcagttggtctgcggagctattattaaatatgtggccataacgtgtacagaaaaatctccaagtaaactggcatttaacttaccaacacgttaaacccccatacataacttcctttaaaaacgatcacactaaaaatcccagcatttaaaatcctgaagttttcggtaaaatacgctaaatatagcttgaaatagtaaataatccccccaaggcgacattagcaaattaattggtgtgtgaacaaagaactctttctgcagcagcatgaatgttgcctttattttttctcacaagtatgattttagaaaacagctgtagcgcatgttgacaaatgagaaagcggcagacgtggtaaagcactttcggtcaaggccaagagggggggaaatcgggttgctggggcggcactcgggctggaatccctagcttccctaacctcctttttccagtccggagtgagcgggggccccatcgccccacccccctttcctggctctggttacggccttgcgagttgaacaaacttgctgcaggcggattggcggctgggagctctcgggctggggcgttgtatttattaatttatattccgcggcgccccgcgcgggcggctcctttgtgtccagccgccgccaccggagctcccggggcctccgcggggagcgcgtcccccgcatccgcccgacccccggggctggcacgtgctgcgcccggtccgctgagggggcggaggccccgatctccccgaccccccttctctgcttagaggaggaggagcagcggcagcggcagcaggaggc

SEQ ID NO: 34078 - DNA, 2300 bp, Homo sapien
aagttctcttttacgatgcacgaattctacagcacagtgttaggccaagcacatatcctatttcagttttagtttgacttacaaggttgtctctgggttctgagtataaagcattggaggttgtttctctccccttctctctaataagaagtcagcattttggtgcagaaagggggcttagtgtgttatcctactgctgtgtgctgaggtcctggagtatacacaatgacgagagaagctcttgctgcctagtgggaccaccagctgcataggatgcccaggccctgagaggtgtaaagggcagtgcaaacactactacgggccccactgtggctgccaccctgaggaccttttagccattggttcccaaactttgctgcacattaggatcacctagagagcttttaaaacaatccttatgcccaaattatgcccctcaataactaaatcacaatgtcagaggtgggagccaagcattagttttgtttgttcgtttgttttgagacagtttcattcttgtcacccaggctggagtgcaatggtgcaatcttggctcactgcaacctctgcctcctgggttctcctcaacctcccaagtagctgggattacaggcgcccaccaccatgcccagctaatttttgtatttttagtagagacggggtttcaccatgttggccaggctggtgtcgaactcctgacctcaggcgatccacctacctcggcctcccaaagtgctgggattaaacgggtgagccaccacacctgggatttttatttggaaaaatcccttggggattccaatgtgcaacacaattgggattattgttctcagcccaacagcatctattttccaggaggtaaagcaaacctcttcatgtgttcatttaacaattgctttttttttttttttgagatggaatttcgctcttgtcgcccaggctggagtgcagtggtgtgattttggcttactgcaacctccaccgcccaggttcaagcaatcaagtagctggaattacgggcacctgccaccacacctagctaatttttgtatttttattagagatggggtttcaccatgctggccaacctggtctcgaactcctgacctcaggtgatccacccacctcagcctcccaaagtgcaggtgtgagctaccacacctggtcaacaattgctttttcatttctttgtagaacaacaatatttcttgtagtaatcttttaaggtttttttttttttttttttttttaagagacagagtcttgctctgtcacccaggctagagtgcagtggtgcaatgatagctgactgcagcctcgaactcctgggcttaagtgaccctcccacctcagcctcccgtggctgggactacaggcatgagccatcatacccagctaattttttaagtttttgtacagatgggggtcttgttatgttacccaggctggtcttgaactcctggcctcaagctatcctcccacctcagcttcccagagtgctgggattacagatgtgatccacctcaacaagcctgtttttcatttttagaaaaatgtttttcacagattcttgaattctgagtgcattcctcctaggggaagaacaagccttttaaagctgcatgtttgatccccaacagggaagtgtttgtattcaaagggtctgaaagctcccgagggtttttttttttttttttttttttttgagacggagtctccctctgtgcccaggctggagtgcaatggcgcaatctcagctcactgcaagctccacctcccgggttcacgctattctcctgtctcagcctctcgagtagctgggactacaggcgtctgccaccatgcctggctaattttttgtatgtttagtagagacgggttttcactgtgttagccaggatggtctcaatctcctgacctcgtgatccacccgcctcagcctcccaaagtgctgggattacaggcgtgagccacggcgcccggcctgatcctgcagtcttaattattctataaagtagctgtatctagtaggtaatcagcaggacatgattatggaaagttagtggcttcaatcaagccatgtacttggtaaaacctgtttttgttttgctatagtcacagctcctaaattagtgccttcatttatttctcctctaatgcacttttctttacatagatctgagtttctgaactatatcatttcccttctctctgaagaacttctttgggcatttcttgcaaggtgattccattggtaacacattccctcaagttttgtttaccttagaaagtatttctcc

SEQ ID NO: 34079 - DNA, 2300 bp, Homo sapien
ctgaggcaccaggaagggaggagccaacaacagaccggagaagagaaaggctctgagtgagtagcaggtgcaagtcgtgtggataaacctcaggctgagggaacttaaggcaacagcctgagggccctgaaacagaccctggacctcctggcaggggcctctggaaggagcctggccacagggttctgaggtaaaagaatgaaaaaagagaggaggctcagactctgtggcagagcctactttggagggaagtgggaagtgggaagtccggagccctgaccacgtgaggggcctcccagccctgccacatccttttctctggacagagctgtcacttagctccccctccgtgactcagaatctggctttctcattttgccattttaattctagtaacgatgagagtcacagtaaaaagctgcttctgggagtggattttcttcccttcccttgatcgcagtatgcttgggattcctcttacgtggcagtcgtggtgtccagctctggccttggccccgcctctttgaagatactctggtttcaccataaaacttcctggggaaaggatgattcacgtttaaaggacatagtttttccttgatttgtttatttaagctaccatacactagagggggccggaactagacccaggagtagaggactttgctttgcgggataaggagaatgggcaccctggggaagagcgaaagatttcctactgttacaacccgtgtcttataacacttgaagtgaatgtggtgtctgagttacaacactacttcccctcacaaacagttaaaagcagagggtcacaaacataggctcaaccagaaaaaaagattctcatttcatctgtagttttgtatcaaggattgtgttggaatttgcctccatattaaactgctgttcaagggttaccaactcaaatggttatggggtgaagccggtgtctcaggcatgggcctgtcgttgggacctgtggcaaaccaaagccactacttgccctatacaaagggggcaacagctgtcagccccagcagcttccactaaaaggtgcaagctctgtattgcccgacctgacttttcagagagaagttttaagtccgaattgttttgtgagacctccagatttttaaatactgagaatgaattccattaaaaagatcacaacaacaaacacccaccatacagtccaagcaaaatgctgtgagagcaaccttcatgaggagtgcaaagtcacagtttcaatttcacttcttctaaagagatttccaagtgttctgtttcttaagtgattctgtttgcattttaaaatacaactgtatctcctagagggaaaacaagaatttgctctaagaagtcactgcctcctcagcccctttgtgagtaagcactttatgcttccccagaggtgactaaactctgatcattgccaatgggcaggcactccccaaatgtccaaggacaacaaagatacccagagtgtctttcatagctaccaatgattaaatagcaagtattgcattcctgggcattgctaactagtgaagtataccagatggaaatgtcttcgaagctgtccctttaaaactcgagcaagctaccaggcaaactccgcctccagggaggttccttattaaataggagccaactggctgggtcggggctcaataccccaagcaatacctgcaactgaggattcttcccggggagaccgcagcccatcggcatggctcaagagtttgtgaactgcaaaatccagcctgggaaggtggttgtgttcatcaagcccacctgcccgtactgcaggagggcccaagagatcctcagtcaattgcccatcaaacaagggcttctggaatttgtcgatatcacagccaccaaccacactaacgagattcaagattatttgcaacagctcacgggagcaagaacggtgagtttcattttaaacggctagggaaaggctcccggattgccttttcttgtcagagctgtgcctttctttaggataaggctgcggctccgtacttcaaggcgtccagagggctgtgcggggcggggggtgtgggggagggcgccttagagaggatctcggtcacttgaatgagcggcggcactgcagccaaaggtcttcacggggcagaagagggagtacagctgatgtctgctgtgcggcagggtaagtgggaccagcagcttgccggtgagtccctggggaattatctagagtctttgttttaagcactgccaggaaatgacagttttcagttggcagggctggaggtggaagctggggt

SEQ ID NO: 34080 - DNA, 2300 bp, Homo sapien
gcaggactgattctcccctaaaaaatgccctcacttcccaccctccaaggtgtattttctgagagtgcctgggagtgtctcacacaagccaaaggagagtccacacgtgttagtccacacgcacaccctctttccatccacagcacttgacgcatctgcagtccccatggcggctttccattgagatgccctaaggtccatgctgggtttcagctcctgctgtacaatgcagcagaggcttctatgcttgtcatttttcactgagttgaagccacagcattttctgagaaatggagaggacacccgttctttgccatctctttgtctcccattttccacatggtgcctcacaaaaaaattgcctttagcttgtgccttatggccatctgtcctaaggcttcagacaccaggcagtccccgggactgagtgagaggcagacaatagtctccctggatcccagcctcttggggcaggtgactaatttgcaaaaggtcaggatacctagctaaatggtcatttggtgacatagaggccatgattagtgtctgccaacaattcagcagaatggttgacaaggtcagataacaacaaaatgagagaatggaggtgagaaaggtacagacagtaaatttcatgaaagggcagaggcaggaaagcaggaaatggggagtggtggtggtggtggtggcttttaacttgaacacagtggcaggctgaggcaccaggaagggaggagccaacaacagaccggagaagagaaaggctctgagtgagtagcaggtgcaagtcgtgtggataaacctcaggctgagggaacttaaggcaacagcctgagggccctgaaacagaccctggacctcctggcaggggcctctggaaggagcctggccacagggttctgaggtaaaagaatgaaaaaagagaggaggctcagactctgtggcagagcctactttggagggaagtgggaagtgggaagtccggagccctgaccacgtgaggggcctcccagccctgccacatccttttctctggacagagctgtcacttagctccccctccgtgactcagaatctggctttctcattttgccattttaattctagtaacgatgagagtcacagtaaaaagctgcttctgggagtggattttcttcccttcccttgatcgcagtatgcttgggattcctcttacgtggcagtcgtggtgtccagctctggccttggccccgcctctttgaagatactctggtttcaccataaaacttcctggggaaaggatgattcacgtttaaaggacatagtttttccttgatttgtttatttaagctaccatacactagagggggccggaactagacccaggagtagaggactttgctttgcgggataaggagaatgggcaccctggggaagagcgaaagatttcctactgttacaacccgtgtcttataacacttgaagtgaatgtggtgtctgagttacaacactacttcccctcacaaacagttaaaagcagagggtcacaaacataggctcaaccagaaaaaaagattctcatttcatctgtagttttgtatcaaggattgtgttggaatttgcctccatattaaactgctgttcaagggttaccaactcaaatggttatggggtgaagccggtgtctcaggcatgggcctgtcgttgggacctgtggcaaaccaaagccactacttgccctatacaaagggggcaacagctgtcagccccagcagcttccactaaaaggtgcaagctctgtattgcccgacctgacttttcagagagaagttttaagtccgaattgttttgtgagacctccagatttttaaatactgagaatgaattccattaaaaagatcacaacaacaaacacccaccatacagtccaagcaaaatgctgtgagagcaaccttcatgaggagtgcaaagtcacagtttcaatttcacttcttctaaagagatttccaagtgttctgtttcttaagtgattctgtttgcattttaaaatacaactgtatctcctagagggaaaacaagaatttgctctaagaagtcactgcctcctcagcccctttgtgagtaagcactttatgcttccccagaggtgactaaactctgatcattgccaatgggcaggcactccccaaatgtccaaggacaacaaagatacccagagtgtctttcatagctaccaatgattaaatagcaagtattgcattcctgggcattgctaactagtgaagtataccagatggaaatgtcttcgaagctgtcccttt

SEQ ID NO: 34081 - DNA, 2300 bp, Homo sapien
caatcttggctcactataacctccacctcccgggttcaagcaattctcctgcctccaccttctgagtagctaggattacaggcacccgccagcacgtccagctgatttttgtatttttgtataaacggggtttcaccatgttggccagactggtcctgaactcctgacctcaggtgatccacccaccttggcctcccaaaatgctgagattacaggcgtgagataccatgcccagccgaacttaagaacttttgaaaattataactctgagctttttaaggacacagggttaaaaggtggtttgttggcagatgggcatcagcaaagcctgtttcgaaagctcagcatgagtgcacacatgcaatcagccttggccttgcactgtaaatttttagcaaagtacacaagtatggggttttgttgccaaggaaatggctttgtttctctgaggaaggagacattgaggacacttctctgtaagtgatcaccgagcaaggccatattgtttcccagacctgctgttctgtacaacgtgaagctcttcggtcctgtctgtgcttctctggccagtcttcattacagtggcagcaggcaagccaggcttttgctgacatctaccttccctttctacttgcctaggcaattgtggcttgtgtttgaactgaacgatgaagaaagatctcaggcagttttgagtcagccttcaggttcctcagaaactttaaacacaggaatcaatgaggtcactgaggtcaggaactctaggcgcccctgcctcatgcttggagcatcaacttctggaggtcaagggtaggactatcagggactgcatgacgaagatgatagtggtaagaggtgacagcgtgctggcagtcctcacagccctcgctcgctctcagcacctcctctgcctgggctcccactttggcggcacttgaggagcccttcagcccaccgctgcactgtgggagcccctttctgggctggccaaggccgaagccggctccctcagcttgcagggaggtgtggagggagaggcgcgagcgggaaccggggctttgcaggcggcgcttgcgggccagctggagttccgggtgggcgtgggcttggcgggccctgcactccgagcagccgagtggccctgccggccccgggcaatgaggggcttagcacccgggccagcggctgcggagggtgtactgggtcccctagcagtgccggcccaccggcgctgcgctcgatttctcgccaggccttagctgccttcccgccgggaagggctcgggacctgcagcccgctatgcctgagactcccacccactccatgggctcctgtgcggctgagcctccccgacgagcgccgccccctgctccagggcgcccagtcccatcgaccacccaagggctgaggagtgcgggtgcacggtgtgggactggcgggcagttccacctgcagcccaggtgcgggatccactgggtgaagccagctgggctcctgagtctggtggggacgtggagaacctttatgtctagctcagggactgtaaatacaccaatctacactctgtatctagctactctggtggggccttggagaacctttatgtctagctcagggattgtaaatgcacgaatgtgcactctctatctagctcaaggtttgtaaacacaccaatcagcaccctgtgcctagctcagggtttgtgaatgcaccaatcaacagtctgtatctagctactctagtggggccttggagaacctttatgtctagttcagggacatacaccaatcagcactctgtatctagctcaaggtttgtaaacacaccaatcagcaacctatgtctagctgagggtttgtgaatgcaccaatccacactctgtatctagctactctggtggggacttggagaacctttgtgtggacactctgtatctagctaatctggtggggacgtggagaacctttgtgtctagctcagggattgtaaatgcaccaatcagcgccctgtcaaaacagaccactgggctctaccaatcagcaggatgtgggtggggccagataagagaataaaagcgggctgccccaaccatcactggcaacccactccagtccccttctgcactgtggaagctttgttcttttgctctttgcaataaatcttgctactgctcactctttgcgtccacactgcctttatgagctgtaacactcactgcgaaggtctgcagcttcactcctgaagccagccagactacgaacccaccgggaggaacgaacaactccagatgcgccacctt

SEQ ID NO: 34082 - DNA, 2300 bp, Homo sapien
tatgaaggattgctttgtctctgagctttattcctaaataatcctaaaactaggatttaacaaatccctataatgctctgaagtatcagttactgtttgttgactgttcaccaagtatcaggcactcggctaagaattgttttggtataattcttcccaattctcaaaccaatctcactgcattaatttctttttattctttttttgagacggagtcttgctctgtcagccaggctggagtgcagtggcttgatctcggctcactgcaagctccaccttccgggttcacgccattctcctgcctcagcctcccgagtagctggggactacaggcgcccgccaccatgcctggctaattttttgtatttttagtagaaacggggtttcaccatgttggccaggatggtcttgatctcctgacctcatgatccgcccgccccagcctcccaaagtgctgggattacaggcgtgagccaccgcacccagcccattgcagcaatttctacatgccaaagccttgcccatgcttcttgtttgatgacatgatatcttgggtttggtcttatatcagcacccaccactctacccattgatgccacttaatagatgcttctcgacatgcccacgcaggcctctagccacttaaggagagattttcaatttacagtgacccaaccaaccactcgttagatgctctgatctgttcctctcacaattattactttaatttgctgtcctctctcgggccgtgaggcgacaagcttgtaggctgcaaggcagacagagttgaagatgtatttaaaagtgcttatgcgctattagcaaaacttactaaattcctgctgtgtttagggaactagaccacagagcactgtgagccaacacagttcctgcctcagagaatagtcacccagacaagattttaaaacttttcattagttttacctgattgataaaattagaatggagaaaatcagaaaagtaaaaaacgaaaaagcagctagtcatagtctcactatccaaaaccagtgctattcatattttgatttattgccttctggttatttctttatttatttttagttttaagaaaattaatacacttcattttttagaacagtttaaagtttatagtaaaattgagcagctaggacagctgtttccctctgccctccttccctgaacatattcccttccctattattaacatcgtgtaacaaagaacttgtattagtgccatatatttgttacaattagtgaaccaatattcatacattattattaaataaagtctatcatttactttaaggtttattctctgtgttgtacagttctgtgggttttgacgaatgcaggtcagtatccatcatttcagtatcctacagaatagtttcagcatttatcttttgtaccgtcagctcctaccattgtacactcctgcctgcagctttttttcttgtttctttatttttcatatgtgagcctaacacaagccttcctttatgctattgtacccttcctccacatgtttataaactcttataaacatcatgggatacaacattctatacttaaccatgcccctaatgttggacattcatgttgatgacaagcgttcaattatcatataggatattttaaaatcatttcatggaaatagatttccaggatctagatagcattcaggggaaaaaaataatttagaaagaaacagcattgtgtggtgtcccccagcacctcccagacaaaaggcttttgtctgaaggttggaggcctgtgctgtcttggcctagtgagtgccagtttccgcatggctgcccctcacccttgggaaggctattggggggtgggcagtgctggcctgggtcttgcttccctgctcctgcaggaaggtctgggcttcctcattcactcccttctactctcatccatcagcaccttcaaaccgaaacctggaactatggtattctctttggctcttaggacgggttggcttaatgggggaaatattaatagcactggtgtcggtggaagtgaccttgagccatgtaaaaagattctgataaaacgtgtcactcttgttacctatcaggatcaaactgcatcacggaagctgcacacgatgacaccctgtctggaaagtttttgccagagggcaaaagactgcaagcagaatatccctttgccatttctcatgtaagtgcacaccagaactaataagaataatttgagaataagagtactttcttttttttttttttttttttttgctgtgaaactgataaccataaaatttggta

SEQ ID NO: 34083 - DNA, 2300 bp, Homo sapien
attactttgtacttgatcatttcctccttccacagttgaaaagctcaaaaggggaaaaatacaaacaaccattaactcactacaataatatattaatccgtgaaagatttgttacccactaaaatagggcatgagaaaaattttcctattataatttttaaaaaaagtcaattactagtaagaagctacaggtcagatatttgaaaactacaacgaaaaccatccttactcctcccccacccgcttggatgtcatcagaaattctgagtaagagtaggccaagttaggatatcatgtgggtggggatttacccacattcaccggaaaagcagtgggatacaggttttacttgttccggtcaaacctcccttccccctcacctcccaaataattaaggctttagctatgtgctcagtcctttactatcaaaaaaaaaaaaaaaaaaagagagagagaaaagaaaagttcaagtacagaattatttttagattatagtccgcttagagatgaactatttgaataaggtttctacttttggaaagcggagaaaactaggtagtaaagcctctatttcccttctaagagtaaactttttaatccaatttgatgattaccttaatatctctactacatgaatttaagataacactgtatcactaaagtaaatgaaattagcaagcgttaatcacgtcttaacagctagccaatcttagtggattgaaattaagtcaatttacaaactgttttcctgtgatggagtaacacttaatacaggtgtttccacttaatccaattcattctgtaattcacattatacacctactatgtttgaaggtctgaatcaaaaaggagtgtacccgtacggtggggaaggcatttattgggaggggaggacatggaatcatggccctaatccatttaaaataatgaaaaatactgattaaatatctataaactttcccggggaatcccagtagaacagaacatggttttataagctgagggtaaaaacaagcgtctcagtttttttattaaaagaacttttttaaactgcctttcaacagtttgaaagctttcaatggtttgttttatctggtgtttctgatcaaccaattaatccatcctctgacaggaacccatctgtcagtctatccacacacaatctgaaagggactccagattaggctccctcttttagccacgcctacacaggaagcatcctgtggatggaatggaaagtatgccaggcctttgcacgcccctcacgcccccatctccttcgcttaacctcgacagcctcttacctttaaaccctagctaggttttcacacagccctatcaaataaaaaggacaatactcaaactgaattagagaatgagaattgtcgaggtttcttttaatttagatcaatgccagttttactcttcttctagagtcctttttaaggagatatcatccccaccagttgtgatcccagagaatcacaacagggcatggcgtaggaaagacctcgaagctcaattctctattataccatgcccaccatacgaaaggcatttaacctcccgcgtgattttgtccttaagatgctccacaagatctaacacaactcctacatctaagagtcgactcactaatttcaagggtttttgtttttgtttttgtttttataagctctgcgtgtggcacccgataacttcaagtttagagtgagcagtttcctcccaatgccgtttgctcaactacagtactaggagttttgaggagcagctctctagcgagtcctcctgctgcgtcctcccccacacgcacgcaccaagttccacagcttccgcagccgtcggggaacaaagtccttatttggtcacggccatccccttacatagtggaggtggagatcctcctctccaaggaccacccgcgtagggcgagattccccaattctgacttttcactactatcccccacaggggcggggctccaactccaggtaaccagaccaggcaacctggacttccaattagcaggggagtccccaagccagcctggccaatctcggccggctagccaagacgaccagacgtgacgtcagacatgattaagttggcgcgtcacctagacgtcagcctcttacctctcggacgtcccgtcccaggagcaaaactctagtgactttgggcccgcccccgtgagagtggagggcggccgatgagggcggttctgaagggaacaagaccaatgagacgagcccggggcggggcgcggggccggagggtggggcgggtggcggcggtggcag

SEQ ID NO: 34084 - DNA, 2300 bp, Homo sapien
gtgagagtttacttggccctgttaggtatataaaccaaatgtttattccaggcttctatggtgctccatttaagacaaatgcctcattaatgagagagacacggaccctattgccaacactctgccaaactgatttacttgaacaataataagaaagggacaaatatgttcctcctctgacacatctaccgttataaaacatttgccctgggcttctcttgccttgctagtgcacagttagtgtctgtctgctgtgagaatgaaacacccttgagagcttgaggccacaactcaggccgaggtgtgaagggaaaagaagacagcttacccagccatcaacattcacacatgtggatttacagaacagacaacaaagctatcaatcggagcccattccatttcatctcatgtgagttacattattgtaaaacacttaaccatgtcacatggcttattaacattggcatttgattttgtaaagatgctttatgtttaaagaaattatgtagtgcacatttctgcaaacgtggaggcaaatgaaaaattagcactacagagcctgatcctccaccaagtcttgtctcatttgcttcttgtaaggaacatctcttgcttcctttctccacttgtttatatgctttctttccaaccttctcccctttcttctatttctacagcatagatcgcgccctcgggcggttgagctttaaaaaacaacaacaacaacaacaaaaaaaaaaacaaacttcccaggtgcagcatactctctcaattccacctcccggcgattttacttttggcctgagtccaacacgttcccaagagctggacacaagttgtcacgatcatgaacctaaccacactcccccctgcggccaatttcctattttgctgttcaaaagagggaaatgcacatatcaaaaggaaaacagcttggtgctggccagctgcagaagggtggaggtctttggtgctcagaagagagagcagctcctgcggcagtcctgcgtgtgtcgctgtccagacctcggtgctgaatactaggcactggtatctcccgccaggttcaatccctcagggttcgaataggctccaccatgggagactgaactcacttccctagggtgaggggtggagaattcatttagatgtttccttgctctcctcccacaggaaaccatttttccacaaagaggcattgtgcattttatgggaaagtaatggcacagctccagctcagcaccaaagtgaagagctctactgaggcacaatggaaagtcgaggtaaataaaaactgctctttccctccctgaatcaacacaacagcttttgggatcctagatccccttgttgacgaattcttaaaaatatgtttttttaaaatcacatgattaatcattttactgataaacaccctaaaaggtggtggtggcgctggctttgcaatatcggagtataactactgatattgttttactgaggttgagaaacaaaggggaggagggaagtaaacttgtaaactaaggtggcttgaatggttaaaaattcatttttaatagtattgctttaacatagacatgctaattttctcagacaatttagaacagaattgggacagtagtagcttcccttcttctccttactctcctagcctctctctttgaaagacctaagagccttgttcttcatagcaggtgctgatgcccaaagggccattataagaatcctatagcctccccccctccccgccacacacatgagataataaagtaaatacagagaaaatggatggaagggagggaaagcactcccagcctttgattcttggtagttatgttcaagtggggcacttctctttgaaaagtgaaaatgtttctcacggtacagaatttatgggcagacaaggagcagacttaactgatcccagcaaacagttccttccttttcctaatccctggctgcttattttagccgcttctccgccccgccgggaataccattcggatcttagtccaggtagatctgacgtcaagagatggctttcgtcgatttgacgtgtaaacactcatttccattctggctgggaagggctggggctccactcagcctggagaccgaagcgcttcactgagcgctcgccgccgcccagcctctcctctcgcgcctcctagctcttcgcagagcaaccaggagccaggagtggtctagagcccgagggtgggaagggggagtctgtctggcttttctcctatcttgcttctttttcctcttcccttcccactcttgttcaagcgagtgtg

SEQ ID NO: 34085 - DNA, 2300 bp, Homo sapien
attgtttagcaattgttctgcttatgtgagttctgacttttaagctaagcctgaaggttagggttattacctcttatagattttgatacctaatatatcatgtattagtgtagctgctccacaaacaatgagctggtgaatagattgattacttactccattacatagaccctccgctccagccaggtgagtgggttcctctttatctcgtcaggtgcccccaccccttctccttctgttcacacctcaccagctagccagcctgctcatgtctccttcctcctttccctcctattgttgatacaacccctgtggaaccccaaactcccaaaacacctttgtacttactcacacactgttaggtctttcaatatccctacaccatcatgtgttacaaatgccatataacttcagctaaactgtcagtccctggaggacaggcaatgtatctttttaatctctatatctctccttctactagtcctttcacaatgttttacatagaatactctcaagaaatatataactggtttaaactcaatttttaaatactctgttggaaaataacctcaaactctaatgccaccaagtcactggaaaccattccagagtttgaataaagtactccagggatctaaaaccttgattctgggatatgtaggctccccagtaagaaaatcattctagttcctggggtggaggccaggaaggaggagctgcctgtcacctcacccctacagcttttgtgtttgtttaaattactgtagtggtgtggtcacaatcataagaagatcttgttttcagacttatggcatagtttccctcctttctgaatgtaaccgatgccaacaatcatttgtttttcctgagtggacatagtcccaatatctaagttgtttcatttttatgtataaattcctgcagtgctacctgtttgttgaaatactagatacacagacagtaagtacgacactttaagaggaaatgcatttaaatcctcttctccccgcatcccctccctcaaaattaagaatgctgctagcctatcctttgaagaagaagtcagaattcctaaaatgaggaggtacaaaggaaaccagaattctgttctgccaggctccatatagcatgacaaatctctccttaaaatctgccttctggccggctgtagtggctcacgcctgtaatcctagcactttgggaggcagcactgggcagatcacttgaggtcaggtgttgttcgagaccagtctgaccaacgtggtgaaaccccgtctctaccattaaaaaaaaaaaaaaaaaaaaaaagctgggtgtgacaacgcgcctgtagtcccaagtacttaggagactgaggcaggagaatcgcttgaacctgggaggcggagattgcagcgagcagagatcgcgccactgcactccagacagagcgaaactgcctctccagaaaaaaaaaaaaaaaaaaaaaaaaggctctgccttctctctcttcaactgtctaaaccccaacgctgcagaaagcggtgaccccaagtcccagaatgatgatgctactgcagggtaacaaacaggttttctgtcaggcctgattgtgaaccagcagcaactgcaggctgacagtttctcacataagcacgtagggcttgttaaatttcacttccagccccaaaccaggaagcgctgtttaagatgagcccaagaagaaagcaatctagcttcagaaacaaaactcgccagactctagaaagactataagggtttaaatttgggactgttctccgttttgcattggaacctatgttctcctccccataaaagtttattaaaattcgaaactgccaaaaaacaaagtaaaatcatataaaacatacacaggcgcgtgcacgcacgcacacacacacagaccaatttgtttttgtgatccgcttccttatctagactgtccaggcttgggccagatttgagttggtaaactctcgcagctaaagcggagcagaatgtagaaagagtatctacttctccggattgttgggaggagggtcgaagcgtagactggccacgcccgggtcccgctctctcgttgcacaactgcaagctagatctgggcatcgaaggaggaacgctgcaacctccaaccccttctttctgaccaaccgggaccagagcagtgctggggccggggcgggtcaccgggtgaggaccggggcggagggtgttaagttacagggcaggagcccgggtccctccgcgggcaggaaggggagggcccatcggggctaggggaaccccggcgcagacct

SEQ ID NO: 34086 - DNA, 2300 bp, Homo sapien
agctggtgaatagattgattacttactccattacatagaccctccgctccagccaggtgagtgggttcctctttatctcgtcaggtgcccccaccccttctccttctgttcacacctcaccagctagccagcctgctcatgtctccttcctcctttccctcctattgttgatacaacccctgtggaaccccaaactcccaaaacacctttgtacttactcacacactgttaggtctttcaatatccctacaccatcatgtgttacaaatgccatataacttcagctaaactgtcagtccctggaggacaggcaatgtatctttttaatctctatatctctccttctactagtcctttcacaatgttttacatagaatactctcaagaaatatataactggtttaaactcaatttttaaatactctgttggaaaataacctcaaactctaatgccaccaagtcactggaaaccattccagagtttgaataaagtactccagggatctaaaaccttgattctgggatatgtaggctccccagtaagaaaatcattctagttcctggggtggaggccaggaaggaggagctgcctgtcacctcacccctacagcttttgtgtttgtttaaattactgtagtggtgtggtcacaatcataagaagatcttgttttcagacttatggcatagtttccctcctttctgaatgtaaccgatgccaacaatcatttgtttttcctgagtggacatagtcccaatatctaagttgtttcatttttatgtataaattcctgcagtgctacctgtttgttgaaatactagatacacagacagtaagtacgacactttaagaggaaatgcatttaaatcctcttctccccgcatcccctccctcaaaattaagaatgctgctagcctatcctttgaagaagaagtcagaattcctaaaatgaggaggtacaaaggaaaccagaattctgttctgccaggctccatatagcatgacaaatctctccttaaaatctgccttctggccggctgtagtggctcacgcctgtaatcctagcactttgggaggcagcactgggcagatcacttgaggtcaggtgttgttcgagaccagtctgaccaacgtggtgaaaccccgtctctaccattaaaaaaaaaaaaaaaaaaaaaaagctgggtgtgacaacgcgcctgtagtcccaagtacttaggagactgaggcaggagaatcgcttgaacctgggaggcggagattgcagcgagcagagatcgcgccactgcactccagacagagcgaaactgcctctccagaaaaaaaaaaaaaaaaaaaaaaaaggctctgccttctctctcttcaactgtctaaaccccaacgctgcagaaagcggtgaccccaagtcccagaatgatgatgctactgcagggtaacaaacaggttttctgtcaggcctgattgtgaaccagcagcaactgcaggctgacagtttctcacataagcacgtagggcttgttaaatttcacttccagccccaaaccaggaagcgctgtttaagatgagcccaagaagaaagcaatctagcttcagaaacaaaactcgccagactctagaaagactataagggtttaaatttgggactgttctccgttttgcattggaacctatgttctcctccccataaaagtttattaaaattcgaaactgccaaaaaacaaagtaaaatcatataaaacatacacaggcgcgtgcacgcacgcacacacacacagaccaatttgtttttgtgatccgcttccttatctagactgtccaggcttgggccagatttgagttggtaaactctcgcagctaaagcggagcagaatgtagaaagagtatctacttctccggattgttgggaggagggtcgaagcgtagactggccacgcccgggtcccgctctctcgttgcacaactgcaagctagatctgggcatcgaaggaggaacgctgcaacctccaaccccttctttctgaccaaccgggaccagagcagtgctggggccggggcgggtcaccgggtgaggaccggggcggagggtgttaagttacagggcaggagcccgggtccctccgcgggcaggaaggggagggcccatcggggctaggggaaccccggcgcagacctggggtggggtcggaaaagctgtttcatcgcccgctcccgggccctccgctccctccctccctccctctctccctggcaggactccccgccaggcctccccgccactctccgcggcgcattccgggaggca

SEQ ID NO: 34087 - DNA, 2300 bp, Homo sapien
tatttgtgataatttaaaaaagactagcaatctggataaaatgtgggttatcccctccttttaccatctcacatatcacacctgcatcactagcttcttagcagcctcttttgtttttatcacatttatctaggtttttttctttccttggttgatggtagtaagtgtatgcttgggagagactatttattctacagatgatgcctgggagcctgaactcctgcaaatgcctgtgaggccccctagagtggttggcgagtggacacatagagattgtgctttgaggacagcaaactaagttttgattttggggcatgctaaggcaaaatttaccctgaagggaaagaagacttcagttcaaacttccatggcatgcattttcaataaattagaaaatataaatttggctaaatatttcttctaaatattaaagaatgaaaccaaattattctcaattatacatataaaatatttgttgcatagacatagaacactttaatgtgttatatgctagctaatttatgcattatcttgccttgtgtattcaatatttacagtacattattcacactttattgaccttggagcatatcaccattttacattataaagctttatacttggccaggcacggtggctcacgcctgtaatcccagcactttgggaggctgaggcaggcagatcacgaggtcaggagatcgagaccattctggctaacacgctgaaaccctactaaatatacaaaaaattagctgggcgtggtggcatgtgcctgtaatcccaggtactcaggaggctgaggcaggagaattgcttgaacccaggaggcggaggttgcagtgagccgagatcgcaccactgcactccagcctgggtgacagagcgagactccatctcaaaaaaacaaacaaacaaacaaacaaaaaaactttatgtgcttgcttctttgaaatatagatattcataagaaagagaaagagatacaggatatgaaggtcttgttgaggaagcaactgtgtattttacttttcctttttcccccatttattttctttttctcaattaaaatagttacataagaaaacacaaaaaagcccaagaaggattttttaaaaattactcttcacaccatcagaaaataacctcatatgaccttaaaggatcatactaaacatactattttataatttaacttttcttcgtataaaatatgaataatatgtttttatttaatgaagtgtttttctaggacatgatttttaataaccagatgatatttcatcctatggctctcccataacgtaaccccctattatgggatgcagtataggtaggtaagagattggagtctggagcagatatcctgccttttactaactgtcaccatggccaagtaatttattccttctgttcctcagtcccctcacccataaagtggagataacaatagtattaggtttatattggtttatcttgttactcatggtatttaaaacacttagagtacttagaataacgttctgagaggctttattcttgaagcattttatcctattactatctataattctattattctaataattacctggcacaccatagtacttaataaacattcattattatagatactgttttcagcttttttaggttatagtactgtgatcagtatctttgtagaaaaatactttttctcttctcttatttccctaagatacatttttacaagtagaatagcatctttgatacatatttctaaatcaccctgcatagacattgtaacattgtatactctctatggcactgtaagggtgagtgaagtttttggaagtacatgagaactgcctcagtgagttttgcagttctccaaaatcactgaatattgaacaattgagacttattcaacttactcttcatttcaatatttgtatcatcttcaggcaaagtaacgaaaaattcaaagcatatgtttactttgggtgtgtttcaaatattagtctgatttttgcttgagaaaatatttgtattgatatgtaagtttgcatttgactacattggtaaggtgttttcccccattgaaactaatattttctattttcaagaaaaaagcagcaagcctcggcagcagtcaatcctccagaacctatgctggtggaacagcctcggccaccaaggtcagtgatttcctgaacacgaaaagacccctactgtattctacagggatatgattagtgggtggggcctgtaggaatggcaaacagtgtccagatatcactgaaggttttttaacaaagtatcat

SEQ ID NO: 34088 - DNA, 2300 bp, Homo sapien
ccaagaaattctgattcgccggggtgggggaagagcccaggatttcatatatttaataggcattcccaggagtttcagatgcagatgatttgagaaccacactggcaggaaggacaccctcagggattgtgatggccacagcacagcagtggaactacattgtttgccttcactctaaggaaaggagcctttttccacctgacttacagcagaagaatcttgcgaaaaaaatttttttttttttttgagacagggtctcactattgcccaggcaggagtgcagtggtgtgatctcagctcactgcaacctccaccttccaggttcaagcgataatcctgcctgaagcctcccgagtagctgggattacaggcaagcaccaccgcacacagctaatgtttgtatttttagtagagacagggtttcaccatgttgcccaggctggtctggaactcctgagctcaggtgatccacttgcctcggcctcccaaagtggtgggattacaggcatgagccaccatgcctggccagaaaatttgttttataaccatgtgattactcatctgtactcatcaggagcacagaaatacattcagagataggcatcattgagctgcctaactctggaagctgtggggcccagggcccatccctatggggtgtggcccaaattagtcaccctgtgctgtttttgtcacaggagaaattaatgtcagtgaaacctagatgagcttttagtctatttttaaaaaggaatgacaatactaatgatcaacaacaacaacaaaaagggatatataagctatatatcaagaagaattctaagtccgggtgcatggctcatgcctgtaatcccagcactttgggaggctgaggtgggtggatcacttcaggtcaggagttcgagaccagcctggccaacatggtgaaaccctgtctctactaaaaatacaaaaattagctaggtgtggtggtgcatgcctgtaatcgcagctactcgggaagctgaggcaggagtattgcttgaacctgggaggtggaggttgcagtgagctgagatcacgtgactgcactccagcctgggccacatagcgagaatcccacctcaaaaaaaaaaaaaaattataaggacagggtcttctgctctggaaatgttagaatcttaaagttggaagggctcttatttcactagatttttgacagaaataaaagacaaaaaaaataaggtagctgtgaggagtaccttgaaaggtacatcagagggccctaactgccttggctgcctggtggggtacaaagctgtatggatgagttcacctttttcatgccactggccatcatttgtcatgactcgacacagcactgtccaacctgtcctgaggtctgtgttcctcaaacagtgaccaacactacctccttcactcacaccccaagttcagggttcagagcctttaatgtggttggtgtacggcttttcatttattttaaaattttttataattattttctctaactcttatcattcaatatttattagttggccttctatatgaaagagtggcttaacccctctatttattcattcatttatttacagcagtatagactcatgaatttatattgtattcaatagcttcaaatctattctaattttgaagtttgtaatatactataatataaagtaatcgggtagaattcttactgttaaactactctttaaagaaatccattacacagttttaactgcatttgcaaatccctggttgtagtcattactaatccactttatagtttcaaaagaggtcttcgggggagcatatttgcgaagtgcacccaccgtcgttgccttattctggtagtcacagggtgacagccgagggagcggtaacctgtaatcagccggcggtgcgcagcccacacagcacgtggtccgcatcacaggctgcgttattgagtgagccagtctccagatgccaggcgcatgacgagtccacggagcgggacctccctccccacgcatcccgggctcccggggcggggccgccgggcaggggggcggggagcatcctgcgtcgccttcccgggaccgccccgccccgtcgcactcagagagctgggctggagctccaagcggaaaccgcgggagccgagcccagctaggaatgcagacctcctgaaaaccaagccgaggactgcggggtccggtgtccacgcagagtgagtactgtcttccgccgctttgctccaggccgcgcgtgctcccgggtctagggcctgtgcccccggctacctgccctgcgtg

SEQ ID NO: 34089 - DNA, 2300 bp, Homo sapien
gcctatattgagaatgcatgcatgtacttacttgtttttgcacaagtaatgtttagttggataaaactgtaaaatatcatactaaagatgctaagttacaaccagttctgtagaagcatttctagaactttaaattcgatctctgcatacaggactgtgatgtgcccagtaaaaatccatgcactaaatatttacaattttggggggattatgttgacagaatttcataaaactttccgttacatctgtgactatttgatcataactaaacattggatacataggaaaaaatgatattcatgtagtctttacacagggaaaggaaaggaatgagaaattaattttattaatggaaaccttcgctgaaaaaaaccttcactgaaaaaatgtaaacacaaactgaaatatctgcttaggaccttagaatgtaagtgcctacagcttcttggagttatacacatatgcatcgagtagatgcaatagatgaatagaattgatataatcattttaaccctttttgtacatgttacttatttgactgacagataaaataaaattatacctggggctgtgctcttatattaggccattccagtcagccaacagatggaaggaccacatcttcctaacaagaaaaaacacaaaaaacaggtgatgttgttcattgtactagggcatctctgtttactaacggttacatcacccgctcagcatgtgctaataactgcaattcacagtcttctgttaacactgagatcccatcatggactttctgtaggcttagctgcccatcagccacattctggcactaaaagtaattttcactgctttctgtgccctcaattctgtcaccatcccattgttttacactgtcagccaaaacccgtgatgaatatttcactgataaaaacaccgtgttagtggcatggaaacacagtgcccttggctttgtgatgaaggtttttattttctgttgcccatttatgtgttaccatgtaaatagtaataaatctttacatatctttgatatacctagcaaggagatataaattgctccctgaatagtaaagcagaatattaactagtatacctaattgtttatctaaagagttgcaatttcaagcaaagtgtaacaaacttaactgataatgtttataattacattaaaaatcatctcttttgagtttcctcagttgaagaaaatctgtgatagtctttgtaaactatgtctatctttcttttcttccttcctttttttctttctttttttctgaacttaggctgtaaaaacagaacctgagaagaagtcacagtcaaccaaggtaaatagtttaagtctgttagttagttatttggattctttttaataataatgaataatcaacttcctgccttggcacagctgtgaatggtaaagggggttgctggctaatttaattaatttttagacccttttgaatggctgtgtacatgtagaatatataaaatataacattaagtccgtatattgttaaaaagaatatataatattttataaatgaaaactatttcagaagcattttgttcaaatctagttttttgttatatgtatagtgattgctttaaaaaagaaaaaagcaagaggaacagaagaaaaaaggcaaagagtagtaatgaatatccaattccaattccaatgagacatcaagaataaggtgtctgctgaactcagcacctagatggcttagggatgagaatctttcctaagaggctggctgggtttatcgtgacagtcttacctcagttggtggagctagttaacagttacacaggaggctagcttctgttactttcctgacccatgactgtccagaatgaatgccattctgcctctgcatggaggtgaaccccaggttgtgtacggcagcacaaatgtttctcttcaataaggtgctgcattttattttgtcaagcacttaaagcaagtactaagacaagaccacaaggtttcctgtggaaaagcacagatatttgagcccaggtacttcaggcacaggtgagggtgaaaggtgaggcttgtctgattttgtggaaggcctcctggtggcccctggggatggtagaacatagggtactccgagtgaagaattcagcagctaagtggaagttgtcttctattccactttaaatacttttatctactgaatcgcaagaaaattgggtttctggtggtaagatcttctctactaacaaagaaacaaaactctgtaaatcctatgaaaggagtttttttttttttttgcttttgagacggagtctcg

SEQ ID NO: 34090 - DNA, 2300 bp, Homo sapien
gttagttatttggattctttttaataataatgaataatcaacttcctgccttggcacagctgtgaatggtaaagggggttgctggctaatttaattaatttttagacccttttgaatggctgtgtacatgtagaatatataaaatataacattaagtccgtatattgttaaaaagaatatataatattttataaatgaaaactatttcagaagcattttgttcaaatctagttttttgttatatgtatagtgattgctttaaaaaagaaaaaagcaagaggaacagaagaaaaaaggcaaagagtagtaatgaatatccaattccaattccaatgagacatcaagaataaggtgtctgctgaactcagcacctagatggcttagggatgagaatctttcctaagaggctggctgggtttatcgtgacagtcttacctcagttggtggagctagttaacagttacacaggaggctagcttctgttactttcctgacccatgactgtccagaatgaatgccattctgcctctgcatggaggtgaaccccaggttgtgtacggcagcacaaatgtttctcttcaataaggtgctgcattttattttgtcaagcacttaaagcaagtactaagacaagaccacaaggtttcctgtggaaaagcacagatatttgagcccaggtacttcaggcacaggtgagggtgaaaggtgaggcttgtctgattttgtggaaggcctcctggtggcccctggggatggtagaacatagggtactccgagtgaagaattcagcagctaagtggaagttgtcttctattccactttaaatacttttatctactgaatcgcaagaaaattgggtttctggtggtaagatcttctctactaacaaagaaacaaaactctgtaaatcctatgaaaggagtttttttttttttttgcttttgagacggagtctcgctctgtcgcccaggctggagtgcagtggcgccatcttggctcactgcaagctccgcctcccgggttcacgccattctccttcctccgcctcccgagtagctgggactacaggcacccgccaccaagcctggctcatttttttgtatttttagtagagacggggtttcactgtgttagccaggatggtcttgatctcctgaccttgtgatacgcccgcctcggcctcccaaagtgctgggattacaggcgtgagccaccgcgcctggcctaaaatatattttctagagtgggattagctgtcaacaaactcagtagtcacatggctcatgtgttatctgtgtacatttgtgaaaaacaaccagtaatttagagacatacgtgtatttgaaaatattattcagatgaaatactgaatttttcattattctgataatcaccattctcagagactgctgacagggttactattgacctgataccacatgtctacttctgtgatcctaaagagtgggcctgagtgggcctaagcgggcttttcctgaaaaaggcagaatgttttagttggaattttgttcttgttcttgtttgaaagtattacaagttggattccagtgtaatcaagtttaatcttttgaaattgacagctgtctgtggttcatgagaaaaaatcccaagaaggaaagccaaaagaacacacagaggtaaatgattatcatcaggacttaattataaggcaacctcttttggtgggatataattaaaatctttcattaattcaaaactaatccctacaatggatagttggatattagttttttcagctaaaatggtgccatcctgtggcaatagcagtgtttacaatttatgtgattcttgctgaattttgggggaaggatttgcactatttcaaattttgtacctaaagtgaaattgtcacatgtacatcacactaattgaaatttacataatttagaaccacagacagcacaactgttatgaacaatttttattctatagagaaaagtatcagtattatgtttaagactaccatcttgttaacaatgtctttatatgtgtgtgggcacctgtgtgtgtactttcagccaaaaagcctacccaagcaggcatcagatacaggaagtaacgatgctcacaataaaaaagcagtttccagatcagctgaacagcagccatcagagaaatcaacagaaccaaaggtaaatgaagcagattgataggaaaaccttaacatcaactggataataagatacggttcccctgttcacactgaggtgtgtagttcaatctatggggctgtgctgaatatattttgtattatagtg

SEQ ID NO: 34091 - DNA, 2300 bp, Homo sapien
actggggttaagacttgaacatatagatctggggtgggaggcacaattcaacccacaacgggcaatacattttgccgatcttaaggattaattctaccttctcaacatcatcaaattaatatttgtttcagaaaaaggaagggatcacagggcctcctgcagactcttcggtgagtttacatacatgtcttctgatctaaattaatagttttatatttttggctgggggaacagggctatcaattctatatttgaggattatgacttaactcatctccaaatcaaatggagtttctgtgtgttcagagaaaggggttggtgggagggttgtctcagtgctcctgagtctcataagtaggttttttgagggaaaggagaaagaaggcgagaaagtattaggatagaatattatgcatgttcataataatagaatgagaatgtaactccttttgaaagggggaagtggaaaataatactcaatgagtagccactctcttcaaaacatacactttgatctaagttgtttcattaacacacctcatttggtagcaagggaattggaaaagtgcattcttcatttgctaggtttatgatccattcttccacttgagtgcttcccgtaagttacccatcactgtgcctgtttctttagaaacccatagggccagatgatgctatagacgccttgtcatctgacttcacctgtgggtcgcctacagctgctggaaagaaaactgaaaaagaggtattgtttttagtgttgttaagggaaacttgttaggaactattttgaactttaaaagaataactttttagttcaggctattacagttaaactttcctcatctgtaagtctaatcttttgtattttgtttttcaggaatctacagaagttttaaaagctcagtcagcagggacagtcagaagtgctgctccaccccaagagaagaaaagaaaggtggagaaggtatagtcacagtctacctgacagcagttgctttccagagcctgatctagctcattcaggaaactgccagtagcacataacccatgatgagaagccatgattttttccctctcaggtctatgtggaatagtgaagccaatgagggttatgttgatcatctccaggcaagccttgtgtgtttctgtaactgcttgtgaatgattttagcacagttgtctcagtcatcatctaagaccatctcaccattatgatacacagaagggcagaaaccagagaaattgcactcttggaacataaaaccttcaagtttgattgtataaaggactttgagccctgaggatcactagagggacaccaagtagctggtactgcccagcattctcaactatatttcactatgacataattctcacaaatcgcaaaaggcaatcctgcagctctgtgctggctgggaacacatgtctcctctgcaaacagtcaagataatgctcaggaacggtttctatcagagcagcttgtgcctctcccctcctggagtggacagtttatttttatctggcaggctggggaacagtggtgagtaccacacccctgagagtgggagttcctacaacgatcagccattgtgccttcagagaagaaggcagcaggggccacttcaagcttccctgcttcctaagcttaggttgtcagaagcctttttagagatacatttttagaaaaagaaaaatagtgtggtaacagtttactacttgcttcttttttttttgtttgtttagagtattttatagtaatattactatagctttatgtctagcttaccaaataaggggtgaagtgtgccccagagaacgctgttactgtagaaacgtgtcttagccccaatttccactcattggtaagttctttttcctttctctcttttgcaaggtttcaaataaaattgcctttctagagcacttccccaatccatattcagtttataatctaaaatgtattttacaaagaagtaaatggattgttcgggctccagagatgtcttttttcatgcacaggattttttacttttaacaggatacaatgagtgatcaagcactcgaggctctgtcggcttcactgggcacccggcaagcagaacctgagctcgacctccgctcaattaaggaagtcgatgaggtactgaccttagagttgatttacaaagcttgttagtctgcacattacaaaaccgaatgcactctgcatgtttagaattctcgcacaacttttattggagagtaaaagtgagcattcttcattgtgccttatttattgctgagtggttagcaactaa

SEQ ID NO: 34092 - DNA, 2300 bp, Homo sapien
attttggtgagtaagatgattcctggtttaaatagcagtgtcagcttcagggtctcctattacaggaaccaattctccttgcttgcattcagtattcctcaagatagcaattccacatcctgctagagcccttcccactttgatagtaccaactcaccctgcttgcgttctttgggaaatttattatttaaggcccttgcctttgaagctgggaaaaatccctgatgactttctaagtgtaataagctatagtaaataagatgtaaaaacacaagtaactttttataacactttaagtagaattataagtgataatacatgatggcagaaggttcacaaatagtgtttctttcacttccaggaccagaccctttcatatgtttcccccaagtctacacaaatgattataaagaatagtaattaagcaaagctggtaaagaaatagtggggactcaggtttattagttattgcaagtctacactccattttatccaagtcaagtcatgggacaatagattctctactgcctaaacctaagtaaacctttacagatatctatgcttaaccaatagtctgccttctttttaaggacaaaccagtgaagccacctacaaagaaatcagaggattcaaaggtaaagaccataggaacatatttccattaaattttgttttattctagccataggggtatttggcattttagaaaactaaaacatattgaatgcctactctgtgcctggtactttgtcaaagcatgcatataaatgtgtgtgactattgtttacctctcttttagtcttcacaaaagccctttagggtggaaaactgaggctcagagaatgctaagcaacgtgtattaaagagtagatggaaaaaaagccatcaagattttcttgtttttctatctcctttacaatacattattattaataaagaatgtcagtcagtttttttcttatagaaacatcttttatttgtaagtgatgtgggaaaagaccccatattgcattttgccttctgcttcttcactgatggttatttctactcatatctcagaaacctgcagatgaccaagaccccattgatgctctctcaggagatctggacagctgtccctccactacagaaacctcacagaacacagcaaaggtactgtgctttttcacatttcactctttgaaatgtgtgtgtgtgtatgtgtacatacatataagttttatttattgattgatctatctatcggtctgtcttgtaacagggtcttactctatagcccaggctggagtgcagtggtgtgatctcagcttactgcgatctctgcttcctgggctcaagcaatcctcctaccttagcttcctgagtagctgggactacaggcgtgcaccaccacacccagctaatttttgtatttttttgtagagagggggtttcgccatgttgccaggctggtctcgagctcttgggctcaagtgatctgccaacctctacctcccaaagtactgggattacaggcttgagccactgcgcctggcccttacaatttttaaactgtagaatgaatcaaacgatgatatagagaacctgaaaatgaagaaaagaaaaaatgcctataattccactgcccccaaaacagtattattttgtggatttccttttttttctatatgtatattttacataattatacttacagtccacttataaaacactgcttaacgttatttcttaactgctactttgtaatttccatagccaccattttttatctccacactatatggttgtgccacaataatgctatgtctgtgttcatttaaagtgagagcaggccctaactacatcaggcactctcatgctcatttgctctctggagcttcctccccttttctgtctgcttagcccaactggtctactcttcattcctcagggcacagctcaagcatcagctccttagggaagactttcttgtcttacatcttctcccttcccagtccaaagttagaggcctctcttccatgccctccttgctctctgttacctctctgtgcttgtgtatcacaccactgagctacgcatttcatacagtagtgatgtgtcttttacctctgtgctcctcattagcaaaatgcctggtacttagcaggtgctcaaaacgtgattaaaagtgaatgagaaacaactgtgtaattcaacaagtgtgaggcattttccctcaagctacaccctcttgtaaatcaaatagaaggaaacgtgaaatgagtacctccttgttattttcaggagagttaattctgcag

SEQ ID NO: 34093 - DNA, 2300 bp, Homo sapien
gtcagcaattactatgcatccctgtcagggaatttggaagcccaaagaaactactataaaatacaatgcatgtgtttctctatggcatggctgtcaccgtttaataagattttgcattgcctatacaaaatgagaattattcccataccatcctaactccccagatatttgacttttatgcatagaagttccctcctagcatttcttaaagttacgagatacatagataaatcttaaaaagcaatttattttccagaaaagggcagcaggggagacacttaaactttttgttttccctaatgtttagtaccaatgatggaaaacagaaaagatgcccttcacatcaacaaattggttatttagtaaggactgacctcaagtttccattggattccttccactttctgaaatagccttctgccctctgtacgcacggctgatagttgtgcacacaggcgaggagtagtagttgactccgcagcattcgctctgagactgagccctcgtctgtccatgtctgcttatcaatgaggtcccttagcagcctgatgaggaaggcctgagggcgttgtacagggaaacagggaccagtattgtcacaggtcatttcatgttaatataatccattatggtctcagatgatgggggctaatttttaaagcataatctaacttttactgtataaatcatgcagcactgtttaattataaaagggccaaaaacaataaataatgatgaatgactttcatattttcataacaaacttttataagatatccatctacttaaagtcaggatgaattgcgacttttaaaacaaactcaaagagagtttacatgactaaattttgagagcaaattatgcaacaagacttcaggacattttgccaagcataacaattttgtgcctcttcctcaagtaccatgaagagtcccagaaaatctgaacgtcagccattgtaataggaaaggaaaatgaaataaaaggtttgtgaaaggaaggaaataacaaatccatgcaaattaaatagagtctaagaatgccattcctatttttagtgccaaataaaaccaaaatcttgctagtccatctaaatactgaactaatatttatttgcttttccttaatatgtatataaagatacacacacacacacacacacacacacacacacacacatacacacacaatgattaacactttttaacacaaataataattacataacttttatttcaggcttttaccttgaattgagtttccacttcattcatatctcttttctccattaacttatacataggaatcagctcattcaaaccttgaaacacgggcataatttcagtttcatgtttcaagtacagggataaatccaaggccttttcaatggacagcttcccaatgctgaccaagagacactgtggttagtggtttaaaagtaaatccgggaagtcaactttttgcttcaaaatatattttaatcttctagcaaaacaagcaatcagatataaatgtcccttataaatagataactacggccgggcgcggtggctcatgcctgtaatcccagcactttaggaggccaaggcaggtggatcacctgaggtcgggagttcaagaccagcctggccaacatggtgaaaccccgtctctactaaaaatacataaaataggcaggcatggtggcaggtacttggtatgtgggaggctgaggccggagaatcacttgaacccgggaggcagaggcggtgagctgagatggcaccactgcactccagcctgggcgacagagtgagactccatctccaaaaaataaataaacaaacagatagataactactatataagtctcttttctatcacatataacacaacatccggcatgtttacactagggaggaagtttctcaaacagtaacgtctagggctaacgtggataagccggaaaggaagcacatcagcatctatccctgtgaaacactggattgagtggtgaacttctagagtaagcaagggatttccatcaaagaccctttaggaagcctggtcaaacagactatcatctggtcaaaaccatgagttcctggaggaaacacattttcttctccatttcaaagacactgcatatccttagaaacccttcattacagagggttagtgttaaaaacctcagtggtagggtatatattatataagttaaaaaataaaaaagaagaagccctctaaggctcaagcagaaatattctacagaggggaattttttaggcagaaagaaacagctaggtaagcaacccataact

SEQ ID NO: 34094 - DNA, 2300 bp, Homo sapien
tctctaatttccttgcccaatcttggatgagaaaagctttcttcaggcaggggagcaaatggaactttgatttattttatttactctagatgtgctcatcctcccagaagaggtggaatggatcaaatttaatgtgggcatgaatggctattacattgtgcattacgaggatgatggatgggactctttgactggccttttaaaaggaacacacacagcagtcagcagtaatgatcgggcgagtctcattaacaatgcatttcagctcgtcaggtaatacacgctgcacaaagtcgcggtttatttctgaaagcagctgttattgttcaaattcttgatttctaaagacaaaaatgattgattgataacaagaagttgaaaggtgttttcctttaagttcttctaacaacccaagattgcttttagtcttataattaacctcctgtctgtgactactaaggcacttgaaggaaggaatctgtatcttaatctttctcattaataattcagatcatactgaggcggaagtgtagataaccaggagatcaacatcctggcgaaactccttgccttgtccccgcggcatggtcccgcagcttcttctggccccgctataccggatcaggtttctcccaccactgggtctttataacagccttgaagtcttcttagaagactaagtgacacaggcccaagttgtttgcattacatttcttgggttaaagaagggatttttttttctttcctaaaccagatacctgaactttgcagcatctttatggaatatagctcataaaatgtagcccaaccaaatgatctctgagtgtgtgaagacagaattaacactaccctttttttttcctcccccatgacaatggtttttaaggaaatgctcccaaagcctaaaactcaaacttcttcaacatgtaggcagacctaaagtcctaagaggaagcatgcaggtgggaaggattatctctttctcctcatacccgtatccttctggcctaaattttgagtgccttctggttcttctcaccaccatactgggcctcctgaagtgagaaaaagcaatgggggagaaagttatgggttgcttacctagctgtttctttctgcctaaaaaattcccctctgtagaatatttctgcttgagccttagagggcttcttcttttttattttttaacttatataatatataccctaccactgaggtttttaacactaaccctctgtaatgaagggtttctaaggatatgcagtgtctttgaaatggagaagaaaatgtgtttcctccaggaactcatggttttgaccagatgatagtctgtttgaccaggcttcctaaagggtctttgatggaaatcccttgcttactctagaagttcaccactcaatccagtgtttcacagggatagatgctgatgtgcttcctttccggcttatccacgttagccctagacgttactgtttgagaaacttcctccctagtgtaaacatgccggatgttgtgttatatgtgatagaaaagagacttatatagtagttatctatctgtttgtttatttattttttggagatggagtctcactctgtcgcccaggctggagtgcagtggtgccatctcagctcaccgcctctgcctcccgggttcaagtgattctccggcctcagcctcccacataccaagtacctgccaccatgcctgcctattttatgtatttttagtagagacggggtttcaccatgttggccaggctggtcttgaactcccgacctcaggtgatccacctgccttggcctcctaaagtgctgggattacaggcatgagccaccgcgcccggccgtagttatctatttataagggacatttatatctgattgcttgttttgctagaagattaaaatatattttgaagcaaaaagttgacttcccggatttacttttaaaccactaaccacagtgtctcttggtcagcattgggaagctgtccattgaaaaggccttggatttatccctgtacttgaaacatgaaactgaaattatgcccgtgtttcaaggtttgaatgagctgattcctatgtataagttaatggagaaaagagatatgaatgaagtggaaactcaattcaaggtaaaagcctgaaataaaagttatgtaattattatttgtgttaaaaagtgttaatcattgtgtgtgtatgtgtgtgtgtgtgtgtgtgtgtgtgtgtgtgtgtgtatctttatatacatattaaggaaaagcaaataaatattagttcagtatttagatggac

SEQ ID NO: 34095 - DNA, 2300 bp, Homo sapien
agctcctttctgcccacatccattcagggcattgccctgtttgtctcctcagctgtcttctgtattaacctccagcctgttgggtgcattcagttctgccagctggactttcaatatgtatttaaaaagacacataaacaaaaaacaaaaacaaaaacaaaaaaactttactagaagccaaaggaaaaccatcatattcaaaaatataaatataaaagcaaagaaatgcatacatttactggacaaagaggtctcatcttgagtaaactgggagcactccgagatgtctggaggtcttggaggctacacgctatccattgatacctcctgtcaaattctgaacatgcagaaattaccagatctcaaagtcctcatttcttgttgaattttagtgaaaaaaacttccctggatcccaccgtagttgagtcttggaacagggtgttaatctttatattataaaatgtccttgactagagataataggcagtatgaaacattatatttttaaaaaggaaacataatattgaaaaaaaaagagaaatactgttgcagtgacttggaatccccagttctcaaagggaagaaggccaataaagaagtgggagaagaaagtctgagaaccgcatgaaaagggtcctgttcccactaggaccatggtccactcaccaaattatcagagacgtttgaaccagagcaactccatcttgaataggagctgggtaaaataaggctgagacctactgggctacactcccaggaggttagacattctaagtcacagaatgagatagaaggtaggcacaagacacaggtcataaagaccttgctgataaaacaggttgcagtaaggaagctggccaaaacccaccaaaaccaggatggcaatgagagtgtcctctggtcgtcactgctacggtctcaccagctccatgacagtttacaaatgccactgcaacgtcgggaagctaccctatatggtctaaaaaggggaggcatgaataatttcccccgcttagcatataatcaagaaataaccctaaaaatggacaaccaacagcccttgggggtgctctgcctatgagtagccattcttttattcctttagtttcttaattacttgctttcactttactccatggactcccctcaaattctttcttgcgcaaaatccaagaaccctctcttggggtctggatcgggacccattttcggtaataaacttgtagcatttggtgttttaatgtttgtgttttcttgacttgttacctcatttagcctcaactgtttaaagatggtctttttggccattttattcagctttaattgttctaaggggagtgaagaaatggtcatttactttgaaaaatcagagggaacgtgttgatgcgggaagcagctaatccttggggtacagtggcccttggtagtgcaggaaagtcctgggggccacctctaacccaccttcctcctctacagcatctcccactgtagtcattctctaccgaagccccagaaggtgcggcactttgccacgacagagtactgggttcatgtttctttccgaggcgggccaagagctctcagcccactggcagtggcgagatgacggacacccagcgagtccaatgggcgtcgaacgcgtctaggcttggtggacttgtcagcgcctgcctggcttcggtccccaacttgagcaccggccctttcctgcatgcccctaaccctcgcaacgctaaacagtgaaaaaaaaaaaaagacaaaaacaaaaagcatctcaacacacacacacacacacacacacacacacacacacacacacacacacacacacacacacacacacacacacacggatccgcgttcagaaaggcgtgcacttcctacgcctgatcccccgcatcgcaacctcgcagcttccccggcgtgcagcgctcatttaccaattcccttcctgggagttgcggcttccctcgctcggccccactcccgtttaccctttccccagctcccgccttagccaggggcttccccgcctgccgctagggctcgggccgaagcgccgctcagcgccagcctgccgctccccgggctccactttcactttcggtcctgggggagctaggccggcggcagtggtggtggcggcggcgcaagggtgagggcggccccagaaccccaggtacagcgcgctcgagccgcgggtaggggactgcgggccgggaggagagcgcggcacccgccccttccctgcgcccgtcaagtggggggctgagggcctggggcacgggaggagggagac

SEQ ID NO: 34096 - DNA, 2300 bp, Homo sapien
cgattcagatagtcatcaacaaactgcagctgagtccagactctgtctacctttcttccctcttctgtttgcatcatctccaatagtttttctaggatccaaaactgatactgatgctgcccagtttttagtgctggccctttgaggttcactgattctcctacattttctggctaacgtgtggaaaatctgctttgttcctagtacaacagtgataaaataattttttattcccctaaattcccaaaagtagcttatacttgccatgaagtttaggctatatctcgatctctatctttccatttatctatccatccatccgtctatccacacatacatatatgtgtctatttatctctcaagatttacagtatcagaatttttcagagtgtggctcaggaatcttttttctgttaagcaagtttcttaagcattgtgatgtatttttttgcttcaatttacttattgcatctgttaataaattactgcttacaaaaacagtaaagaaaaaaaagaattaaaaacaccttaatggctgagtgtgtctgtaatcccagcactttgggaggccgaggtgggtggataatttgaggtcaggagttcaagaccagcctgaccaacacgaagaaaccccatctctactaaaagtacaaaaattagccggatgtggtggcgcatgcctgtaatcccagctactcaggaggctgaggcaggagaatcgcttgaacatgggaggcagaggttgctgtgagccgagatcacaccattgcactccagcccgggcaacaagagcaaaatcccatctcaaaaaaaaaaaaaataaaaaacaaaacaaacaacaacaacaacaacaacaccttaatagtttgggtgttttatttagcagtgcatttacaaagatcaaattagtgacataaactttgagttttctattttcatcttttagaatgggaacagtcagaatgctaaactcacacagattttataaaagtttagcaatctaccaccaggactggaaaaccaagggaaaaaacaaatctaacacaatgctacagaaacagaaaagcccagaattcttgctaatttaactgaagtttaattttgacatctttggctgatccaaccactcagtcttggtctctttcccttctcttatggacagggagttaggtaataaaaatcagccaaagattctcaaagttctgcagaggtagacatgggctggtcttgctgccagagctggttagtactttgggtctttctagaatatttggtgttaggcctagataactcagctacatctgtagtgcttctctgtggctgctcagtttataattcaggtcttgctcggacccctagtcccaaggacaccttttcctttgtctttctgttaaaagtctcttcaactttgagcttccattgggcctatactattttctctagactgtaaaggctctttctacctttaatcatcttcttcaccgatgttcaaatccagttatcggggcttggtctctttgttggtcaggatgtcagctgccttctttctcctgaatttggcatcacttctgatgagcataagctaattcatttttccatcaggaaaaaagctatcattgatttctcatgaatatctcttatttgggagatattcctattttcagctcaatgaagaaccaaatctttctagtctctagaatctagtcacttctgtaatttcttcccaattatccactcaccagttatttttttgatatatgtctccttccctgcctcaaaaacacagactatgccaatcctaagattataatagtagaaatatcttcaatgtgcagtaacattagtgtggcagacgtaatctaagttgcccccatgatccttgcctcctggtattcattctcttgcataatttcctttcttttagtgtgagagaaacctgtgacttgcttctaacccataggatatggcaaggaactagtcatatctgagagcagcctccagaaaacagtcagcaaaacactgaggttctcaatccgatagtcaatgaggaacggaatgctggaacaatgatgtgagcttggaagcagatccttcccttctgctgggcctcaggtgagactgcagctccagtcatcatcttgattgcagcccacagaaactaccaacccacagaaactgtgagttaataaatgtgttgttttaagttgatatgttcgtattattgatacacaataatagataactaataaaattaacaataagagacacttttcctccaaaggaaggaaatgggccatttt

SEQ ID NO: 34097 - DNA, 2300 bp, Homo sapien
gaccaaagctaagaagaaacaaaaagcaggctgacaggataggccttggtgatggtggatttagggaggagtggtactgccttagagccaacaaggagggtctctctgagtaagagacaattcagagaccaggatgaaatggaaaactgagacatgaattccctaagcaataaacttcccaaagcttatcccaaagaaaagagaagagaaaagaaaaaaaaaagaaggaaggaaagaaagaaagagagagagaaagaaagaaagaaagaaagaaagaaagaaagaaagaaagaaagagagagagaaagaagaaagaaaagaaaagttaggagcccattttgctgagaaactcttttaaataagctacaagtacttgaatctggctcaattttcacttctaggattctgcagctcaattccatagcctgtttcttcattctccatcaccacttctgttccagtgggcaggagagagctctgaaaacacacatgcactcgcccacatacccacagctaggctggatcttgtgacaaggaatatcacagaaatactcccagcctcctatacctcttctacctgcccccacgccctgcagagttagagtccgtagataagcccttggggcctcctcttctttgtcgtctttgtccccttctttttcccactcactggcttccagccatcccccttcctgtggtgcccctctcactacatgaaatgcagctctgagggaccccattcagtcttatgtttcgggccttaggtgtaggctactgccttcctttctgccccttctactttatcgacttgttctttcaggttgaaataataaaatgtagaaaggtggaaaaattaaagcttgagacttaactaggatctaatcatggcaacatgtgctattgggccaaacataggttgcaaacacaaaccacagcaggacaaggcacatgatacaagtctatgaagagtgtctgcaacatgataagagctaagcttgttatatttcacttgacaatagaaattgtatggatgtattgccatttaatagactgtgattcaaacaaaacaactataggctggcatataggctgccagtaggccactatggttcccacactaggacttgcccctctgtaaatggggaaatcaaggaaagatcttgagcagtgggggaggcatggtcgagcagtagttgaaaggattaatctggtggcatcgtacaagtaactgcaagaagctgagcttgagaagctgggaagacatgattgaaggccattgtgaggaaggatgaggacctggactactttaataagcggtgggattttttcttagttggatagaaagagattgaaaatgattcaaaaaggccagttgcggtgtctcatgcctgtaatcccaatcctttgggaggctgaggcagaaggatcacttgagcctaggagtttgagaccagcctgagcaacatgggaagacctcatctataaaaaaaaaataataaattagctgggtgtagtggtggatgcctgtagccccagctacttgggaggctgaggtgggaggatcatttgagctcaggaagtcaaggctgcagtgagctgggatggcaccactgcactccaacctgggtgacagagtgagaccctatctcaaaaaaaaaaaaaagaaaagaaaaggaaaaatcaacaggctttggtaacaaattggagagggacagaatcaaagtaactaactatatggttcaatcctagataatggaagaaggctggaagcatataaagcaaagggtgtttatctggggaaagaaaacactatttgagttgtcaggggttctggttcaggttagggttagacatccatgtactgttggtccatcaggctgttggaattacagcagcagaacccttgaaggagggatcacaatgggagcaatgtgggatgaatggggataaatgctaaatctgggtactggaaaggataaagagagggcagagcaaaggccagaggtttcatctttgtggaaggtctgtattcagagcagagaggaagttgaagcccaactcaaacaggcagataaagagagatcaaagagatgagcatgagatacagtcccctcgtgcccaaggagacagggtggttacagacatggaaaatctgagaataatcacctctgataaagatcacagaagctgcccgggaggtgtttggtaagcttggagttacgtttgtggggtggatgggcagaagtcagatttcatagcactgaggatgcagcacaaggagaagttcaagatcaattcct

SEQ ID NO: 34098 - DNA, 2300 bp, Homo sapien
taggctggatcttgtgacaaggaatatcacagaaatactcccagcctcctatacctcttctacctgcccccacgccctgcagagttagagtccgtagataagcccttggggcctcctcttctttgtcgtctttgtccccttctttttcccactcactggcttccagccatcccccttcctgtggtgcccctctcactacatgaaatgcagctctgagggaccccattcagtcttatgtttcgggccttaggtgtaggctactgccttcctttctgccccttctactttatcgacttgttctttcaggttgaaataataaaatgtagaaaggtggaaaaattaaagcttgagacttaactaggatctaatcatggcaacatgtgctattgggccaaacataggttgcaaacacaaaccacagcaggacaaggcacatgatacaagtctatgaagagtgtctgcaacatgataagagctaagcttgttatatttcacttgacaatagaaattgtatggatgtattgccatttaatagactgtgattcaaacaaaacaactataggctggcatataggctgccagtaggccactatggttcccacactaggacttgcccctctgtaaatggggaaatcaaggaaagatcttgagcagtgggggaggcatggtcgagcagtagttgaaaggattaatctggtggcatcgtacaagtaactgcaagaagctgagcttgagaagctgggaagacatgattgaaggccattgtgaggaaggatgaggacctggactactttaataagcggtgggattttttcttagttggatagaaagagattgaaaatgattcaaaaaggccagttgcggtgtctcatgcctgtaatcccaatcctttgggaggctgaggcagaaggatcacttgagcctaggagtttgagaccagcctgagcaacatgggaagacctcatctataaaaaaaaaataataaattagctgggtgtagtggtggatgcctgtagccccagctacttgggaggctgaggtgggaggatcatttgagctcaggaagtcaaggctgcagtgagctgggatggcaccactgcactccaacctgggtgacagagtgagaccctatctcaaaaaaaaaaaaaagaaaagaaaaggaaaaatcaacaggctttggtaacaaattggagagggacagaatcaaagtaactaactatatggttcaatcctagataatggaagaaggctggaagcatataaagcaaagggtgtttatctggggaaagaaaacactatttgagttgtcaggggttctggttcaggttagggttagacatccatgtactgttggtccatcaggctgttggaattacagcagcagaacccttgaaggagggatcacaatgggagcaatgtgggatgaatggggataaatgctaaatctgggtactggaaaggataaagagagggcagagcaaaggccagaggtttcatctttgtggaaggtctgtattcagagcagagaggaagttgaagcccaactcaaacaggcagataaagagagatcaaagagatgagcatgagatacagtcccctcgtgcccaaggagacagggtggttacagacatggaaaatctgagaataatcacctctgataaagatcacagaagctgcccgggaggtgtttggtaagcttggagttacgtttgtggggtggatgggcagaagtcagatttcatagcactgaggatgcagcacaaggagaagttcaagatcaattcctaagacaacaacttggcactaaaaaacataaactatgttctgaaggctttaccctggggacaagggaagggaggtgataacagcagaagtggcagccactggcgatcctttctttccatggtttggcttctactccaaagccacttatttgtgcattctacaaaaagtttcttgtcctttttgaaataaagctcttatcctaagctccattcacacctgcgtgataatgaaccagctagtacttactgtactcaggaagcatgcaaagttctgaatcttagaacagaaagtgaaagcaaaagtaaattccccttcagtcaaatctgcagcagcatgatttaaggtaacgtatcaacatttctcttgggtttgtcttaaaattagattttttcaataagaataatgaactgaaggtatagaactgctgtgttgagaaggttttgtaatctaaggcaaggttctgggggactggggtgaattgggcgcggctgtattagaaagtgtatgcagttgag

SEQ ID NO: 34099 - DNA, 2300 bp, Homo sapien
acctcaataataatttcatatccaacactaattacttacttcctatatgctccatgctgtgctgtgccaacttcttcacatgaattatttcatttaatcatcccagcatgaggaaggtataattattacactgttttatggttgagataaatgaagctcaaaaagtaaaaaactttgcccatgatcacgtaggtgaggttggtggaattagcgttggaatctgggcactctgattccaaagcctcagacccacataataagccactccattttttttaaaccctccaaaattcaagctaatagaccaattatgagtgtacttatcagacgttcttggaacactgagatttgtagcagtaatttaatgcttgtttttaaaaagagggagaagtatctttaatattattttatttttgttcctttaacaatacctgtcacctgcattaatattgcaaattgaaaaattgaagtaattgtttggataattaatgctgcagaacttgttaaggattataaaaagaagaagtagcagagaaaaccttcatggtttgagttggagcagtaaggaagtaagtagaggcaggtggtagggtggcagtaagaattgattcccccaaattaactatgctgtttgtcctaattttatatgtgttgtagctttacccttcaaaaagaaagaaacttagttctatttacaaaggtagtaaattcagtttgatttaattgtgctttcaaaagtagtgtaaagggaaaagaaccgaaccttaaaaaaattctgtaagaatattataaactcaaaatttatttccatggcttttgacatattgaaaataaactggggataaatacctaccttgaccagcaacctttacaccagtagccataaaatgaggccattcagataatgttattgaaagaggtgaagttcaatgccattcgtagtaataataatatctggtatccaaagaatatagaatatatatatagaatattctttgtgacttatgaagacaaaatagagacatcttgcacagtttactttcaggcatacacttaaaattacatgtgtgcctgtggttccagctaattgggaggctgagacatcaggattgcttgaccccaggaatttgaggccagcctgggcaacatggtgacacattgtctttcaaaaaaaataaaatatggccaggcgcagtgacccacgcctgtgatctcagcactttgggaggctgaggcaagtggatcacctgaggtcaggagttcgagactagccaggccaacatggtgaaaccccgtctctactaaaaatacaaaaattagctgggtgtggtggcacatacctgtaatcccagctactcgggaggctgagggagaagaatcacttgaaccccagaggcagaggttgcagtgagccaagatagtgccactgcattccaacctggacaacagcgagattccgtctcaaaaacataaataaatgaataaaaataaagtaggctggtcacagtggctcacgcttgtaatcccaacagtttgggaggattgcttgagtttaggagtttgagaccagcctgggtaacagggagacccccatctctacaaaaaaggtagccgagtgtggcggtgtgtgtctgtagtcccagctactctggaggctgaggtgggaggatcacttgagcccaggaagttgaggctgcagtgagctgtgatcatgattgcacactctactcctgcctgggcaacagagcaagaccctgtctaaaacataaataaataaacaaaaatttaaaatataaccaaatgttaaaaacattcaacatgcaatgaatttacacacctgccttctgctcgctgcacaagaattcagaagaaattcattacattcaattttaaggtagggttttttgggggagtcctaaagggtttttatttgtaataaccagataacagcttaatttctgctctattttgtggatacttggcctaattctgacagagagcagattttcccttactcacacatacctttttacatgtttaagattttatttgtaaattgaaatcttttttgtcatgctataagtgtgtttttttcttctagattaaattcatgtattgaaaatattgttcagaccccatgtgacataactggagccagtgcagtgccatgaagaactacgagattagcctggatattaacttgtcttctagagaatagatttcatgttccattcttctgcaatggttaattcacacagaaaaccaatgtttaacattcacagaggattttactgcttaac

SEQ ID NO: 34100 - DNA, 2300 bp, Homo sapien
ccatgaatgcccttcagaagattgctgcccacttgtaaagtaatctgaagactgtcagaaaaggaatagtgcttaaactgtttctagaagctacagacttataattttctgttctgtaactataaccaggctcttctgaatcttagaatcttattgttgaagctttggtccgtctagagattttaatcttagagacatacactagatgtgcagtattaggcatatagactaaataaataaaacataaaagcacataaaagaatagtaatatttaaaatgcataatacagatcaaatataggtaaagggtaaatatgtcaattatatttatgcatcctttttatttgatttatatattttttaaatcttagacctttattgtttctagtggcccactgaagtaagtcaggggcagaggttaacaactgaatttgctcttcagtaatattatataacaacctgagagccctaaatgaattcttatgattctcctaagtacctgctacttaatataaaaagataacttcacccaggacacttggatttatatttctcccttgaacatcatcatatatcaaggacaaggtgagattgttcttattgggcaggaaagaaaaaaactacctccataaagtgttccattttctttcttaatattaaatctaataactaggaaatgttgggcagatagaatgaaagtcgaagagttaagggcattgagaacacacaaaaaaaagaaaaaagaaaaccaagcaaaaatgtggtggtgagaataagaaggcaaggaaatcagtagaagaaaattgtacagagagaaaagggtagcaaagagagaagagagatcctaactaataaaaaaaaagttagtaactattgtattttttgctaaagttaataatttttatttgtttaacttctaataatattgagtttttacctcctagtggtttggcaacctggtcacaatggaatggtggaatgatatttggcttaaggagggttttgcaaaatacatggaacttatcgctgttaatgctacatatccagagctgcaatttgtaagttcacaattctgtgtatcatactatatggtgtaaagaatcatcaattcactattaaaatttcaagtgaatgttaaacagaaaaactacataatgttgtggtttttgaacatatggcattttgtttgatacacgaaacagatcacagaactggatgaaacattgaaggttttagaaaacaatcaacataaatctgtcaccccaaagtctgtaaagagagaaggcaaactaatacaaatgtagaactgtgtatgtgggttgagaggaaagaacatcactgtttgtatacatctgcacaggaatgctcatggctactaggtactatagagagttctcggcatgtaacctgaaatcaacatcattgggggtgtacttttctagaatttccaaagggtctgctggcttccccaaaatgtgtgaagggatttcttcaggtacgtcttttttaaaaacgaatatagtggtctgaacactacacaaatttgcatatcaaggtggttagtaatggttaattaggtctttgggatatatatttagtccagtacactatagacagacatggattcaaagttaggctcttcttgttactgtgtatgtactgaatttgtggcttaatgccaaagctttatatattcttatttgtaaaatgcatataccatatctcccttgcagaggtgttgacaggattgcagatgataggtctaggcacgtaacaagtattcactaaatggaaaccattattttatttctgtattcaagggctggtacatgataaacattcaggcaatgtctgaaggaatattggatttgtatctttttaaagtagagaaactttaaaaagatgtattcccctttggccaaaggggaatacatacaagaaaagaaacatctcccaagaaatatcgattgaaatcttacctctaagaacatcttactaaacctactatgttttctattgcttttacagtgtcaaatagaaactaaaactaaacatttttctccctgtttaggatgactattttttgaatgtgtgttttgaagtaattacaaaagattcattgaattcatcccgccctatctccaaaccagcggaaaccccgactcaaatacaggaaatgtttgatgaagtttcctataacaaggtagtaaatatcaggtgcaggtggaagctctgctttcagaagtgtaataatgactatagaatcagcagtttaagtcactggtgccagttcctgctact

SEQ ID NO: 34101 - DNA, 2300 bp, Homo sapien
cagtagatataagtgttcaacatgttgaatatacctatgaaaatattctaggtaaacttatttatgctcacaatcaaaaatatgtgattaaatattgttggttttttctaaactccaagattgctagtatgaattttaatgaagaatttctttacatagattaattgattacttcattcatttgtggatttgaaatgtaactagttgcacatttcctttatgccagccaggtattgctgtaggagctaaggataaagaggtgaacaaaacaaccatgtggcctaccttcaagaagcttacaatgtgtttgttaccaattgttataaagttgttcagcaaaatacactaaaatgaaaacaatatgtattataattatttgatctttattatattattcaaatgtcacttggggtatttaagtacatatagtatagaggaagtagccaaagcattagaatcatagggttaaatcccatctgcaaatggcaaattatgtcatcttgtgcaagttacttaacttttctgagatttatttccgcttaaaaaaatcaggataataactatctcagagggtagcttttgacagttaaataagaggtatggagactagtacaatctctaccatatggtcactttgtgacaaatgcaaatttctggctccctcctcaatgctctgtgttgtgttttttctgagacatcaataacagttcttattgatccgttgacatttgggattaaaaagtcatatgcccacttagaataaaaactggttaatgtcctcaagataataaaaatcaaaatagtggtgtcttttgtagaaggacagaaaatcatgtcactgcatcttaacagttttaaaaaattataaaataactagacactaatgaattgtaccaaattaagactctctaggcctagagagtcagatgactcccagacaggcctcagaaaatgctctcaactaggccaagtgccgtagctcatgcctgtaaggccaaggggtaagaagatcacttgagcccaggaatttgagaccagccttgtcaacatagtgagagcccatctctacaaaaaaatttaaaaattagccgggcatggtgctatgtgcctataatcacagctgctcaggaggctgaggcaagaggattgtgcaggaggctgaggctacagtgagccatgatcacgccactgcactccaacctgaacaacagagtaagaccctgtctcaaaaaaaaaaaaaaagaaagaaagaaagaaaagaaaaaaatggccgggcgcggtggctcacgcctgtaatcccagcactttgggaggctgaggcgggcggatcacgaggtcaggaaatcgagaccatcctggctaacacggtgtaaccccgtctctactaaaaatacaaaaaaattagccgggcgcggtggcgggcgcctgtagtcccagctactcgggaggctgaggcaggagaatggtgtgaaccccggggggcggagcctgcagtgagcccagatcgcgccactgcactccagcttgggcgacagtgagactccacctcaaaaaaaaaaaaaaaagaaaagaaaagaaaaaaatgccttcaacttggtgataaaaaagcatcaagtaatcatctttaaaaaaaaaatcttatagcaccaatagtggccactaaatgatagaatttatataaaccagtagttttgtatttcagaaagcttttatatttgttgattacatcaactttctattttcacctcagagtaggttaaaattttatgcttattttcttgctaacattttatcatcagtaggagataaaacacaaataatttgcagagtaaaagcacataaaatatttttataagagttcggcagagaaaaagatttaatacattgagtactgaaagcagttcagagattattgtgttataggacttaaaattgtcataagaaaaaagtttttctttcataaaactttttcttcatttttatgcttgatattacagtataccaacagatgttttaaagattgtgtattctgtgggtgctcagacaacagcaggatggaattaccttttagagcaatatgaactgtcaatgtcaagtgctgaacaaaacaaaattctgtatgctttgtcaacgagcaagcatcaggaaaagttactgaagtaagttcaataatttaactaaattgttataagtaaactgacacaaattcagtgaagtcactaaaacttcagccaccagttttaaaggcataagataattgaatcagaatgtgtatggctttaactttactttcagaaaag

SEQ ID NO: 34102 - DNA, 2300 bp, Homo sapien
cacaacctccgcctcccgggttcaagtgattctcatgcctcagcttctcatgcctcaccctccggaatagctgggattacaggtgtgtgccaccactcccggctaattttattttttgtatttttacatgtctttaaatggtccttcatgtctttgtgtgtgtgaaggaatgggaggggtgggaggcaagaggttggcaaagaaatcatttgtctctttgtcaaagaaatctcaaaaagacataatgatccacctatattcgctagtgcatttttttttatcacgtctctgcagagttgggatatgtaaaacaaaacacaaggtaacatgtttcacacttaaaagcatgatagactgtaggttacaggtgaagtgaggtgaggtgatttaacaagctgcagtgttttaaatatctcctatactaagtggtttggttgcaaaaggaacttcaagggaacatgacatgacctaaaatatagagaagagcgtcttatttaagcaatacaatgtgtgaagtatgttaacaaaatctagctctgcgtgtactatataatatctgaactgggatacatcagctcctgtggttcactatttttggttctaaaatgtcagtactaggggccagcctaacggttctgattacctttcacacattagggagatagcagctctgaggtatcatatgatacagacaccttctctgtactgatcaaacacatcattcagtatggagtcattaactggaagggtttgcagcagtggaagtgaactctaaacaccactatgtccttcacttattcatgcaaaaattatttattgtatacttacccaggcattggggatacagccttaaaaaagattacgactctgccctcacaaagcttgcattcttgagaagggagactgataataagcaacaaatccaaaacattgtttcagacagtgatgagtgctgagaaggaaataaagcaaggccaagtctttatagagtgtttgtggctattttagatgtatggtcagacaagggttctttgcagaggtgacatttgagccgagacttaaatgacaagatggaatcagtaggcaaagcactaagcagaagaaacagttcttgtgcgaggagcgagcaaaaggaattattaacaatgatggatggaacttggcgacttccgggaacagcatgaaggcctttgttaccaaaatatggtgagtatgtgctgatgaggtcccagagttaggcaaggagtttcattttttattctaagtgcagttggtatccactggaagtttcaagtagagcgtgcgttgtgagggatgtaataacaacaggcagtttaaaatacaatattgtacttcgatttgacttcttcgaaacctagtttccaattccagtgctggtcaaacaacaccctggccgtccctgtttgagcaggctgtttgcgcttgccgcggcttgtttgtccctggcgccccgctgttgaaagcctcagagcgtgtgacagttggcaggcgcagtgaggcgcagcccgagccaagtcaatgcaggggccggggctgagggaggggaagaggcagaggaggcggtgatggcgcgctgggagggcggcggcctctgcagcgagggtggtggcgatgcgcataccgagaggataaggaagcggttcccgacgagcctcctcggggcttatggggcccctggcggttcggcctcggaggctagcggggctgcccgatttggcactggaaacaatggtggctcggggctggaggcaatggcgcgagtgctggggggcaggggcgactaggggagtttcggtttctcgggcctagcgccgcggagccttgctgcgggccccagtggtagcacccccgggaaccgcaggtgttgatttaaggctcggaacaggcgggccttctgcccacatcctgcggcgcccgcgacccgggccgggcgatccggcgccgggttttgttatccgcccgcacctagaggccgcaaggcagccgccagccccgggactggaccccagggcgccctcggccctgcgaggtccccgccctctcttccgtctcctcctcaccgccctcctgaggcactctgatgcgggcgggcatctctgccgaaaacacctacagcgcccgctccctcggtccttcgagcagtgatccctccgcggccaacctccccagggaaaccagcgattcgcggttcagatagcgaccttcgcccgcaggttcctgctctgccttcagacttcggcttcagtggcacctgctcagcgaggcctcgtctaaccaag

SEQ ID NO: 34103 - DNA, 2300 bp, Homo sapien
cacatcattcagtatggagtcattaactggaagggtttgcagcagtggaagtgaactctaaacaccactatgtccttcacttattcatgcaaaaattatttattgtatacttacccaggcattggggatacagccttaaaaaagattacgactctgccctcacaaagcttgcattcttgagaagggagactgataataagcaacaaatccaaaacattgtttcagacagtgatgagtgctgagaaggaaataaagcaaggccaagtctttatagagtgtttgtggctattttagatgtatggtcagacaagggttctttgcagaggtgacatttgagccgagacttaaatgacaagatggaatcagtaggcaaagcactaagcagaagaaacagttcttgtgcgaggagcgagcaaaaggaattattaacaatgatggatggaacttggcgacttccgggaacagcatgaaggcctttgttaccaaaatatggtgagtatgtgctgatgaggtcccagagttaggcaaggagtttcattttttattctaagtgcagttggtatccactggaagtttcaagtagagcgtgcgttgtgagggatgtaataacaacaggcagtttaaaatacaatattgtacttcgatttgacttcttcgaaacctagtttccaattccagtgctggtcaaacaacaccctggccgtccctgtttgagcaggctgtttgcgcttgccgcggcttgtttgtccctggcgccccgctgttgaaagcctcagagcgtgtgacagttggcaggcgcagtgaggcgcagcccgagccaagtcaatgcaggggccggggctgagggaggggaagaggcagaggaggcggtgatggcgcgctgggagggcggcggcctctgcagcgagggtggtggcgatgcgcataccgagaggataaggaagcggttcccgacgagcctcctcggggcttatggggcccctggcggttcggcctcggaggctagcggggctgcccgatttggcactggaaacaatggtggctcggggctggaggcaatggcgcgagtgctggggggcaggggcgactaggggagtttcggtttctcgggcctagcgccgcggagccttgctgcgggccccagtggtagcacccccgggaaccgcaggtgttgatttaaggctcggaacaggcgggccttctgcccacatcctgcggcgcccgcgacccgggccgggcgatccggcgccgggttttgttatccgcccgcacctagaggccgcaaggcagccgccagccccgggactggaccccagggcgccctcggccctgcgaggtccccgccctctcttccgtctcctcctcaccgccctcctgaggcactctgatgcgggcgggcatctctgccgaaaacacctacagcgcccgctccctcggtccttcgagcagtgatccctccgcggccaacctccccagggaaaccagcgattcgcggttcagatagcgaccttcgcccgcaggttcctgctctgccttcagacttcggcttcagtggcacctgctcagcgaggcctcgtctaaccaagccatccgaattaactacccactcactcgccatcacatcaccccgatttaattcgcagcggggcactgactttacactcgtgtgtcttctgtgtttatttatggtctgtttctggaatgtccgctcctgggactgggaccatgattttctggcgcagtgcgggtgtctcggcgtccgggatcgggcgggtcgcagtagggctccacatttgttgagtgactgaacaccgttcccggccggggagagcgccgcagccgggtccacttcaggtaggggctgggctttcccggccccgcctaggccccgcccccagcgcgaacccgctcccacctcgcctgtccacggagcagcagggggtttgactgtgcttttccctcttgcttccctcgctctttctgcagctgccacgaaaacccggaacggcggagcggcgccgcccctcgcggcacctccctggcagcccttggaggccgcgctgggcatgctcagtcagctgggccgcctcagctctcggagtaggaagctcgggcgctccggctgtaaggagccgcggcggggggaaaatggagcccttcaccaatggtgagtgggctgccgaggcgccgggacccgggctctccggagccctgagggtcgtgggcagtcgtgacacgcggggtcgggctgcagccgtctcccccaacaccgcgggcttcccacgagggctgagggaggc

SEQ ID NO: 34104 - DNA, 2300 bp, Homo sapien
tacatgaaagttgaagcattgcttctttttttgttctcttctgtgggatttttccattgtcctcccaaatgtgacagtttgcaaatacccacatctagaagcaatctagaagcatattctataagagaaaagacaccaattttaaaacttgagaaagtactttaattctgtaggcaaaggttcagcaaatcagctagcactaatcttgaccaaatgggtgagtcagcctcatcacagagattttttttttaatttagatgaaatttcacatttaaaaacatggtaactccaagcattcttccaaaaacaaagaatgaacattggaatagtcacttacaaggacttaacgacttgtattaaacatattttacactaaagtactagatggtctctagttcattttagctcaaaccttccttaattcttcgagtaacttcaccagactattctttaagtcttagtaattacaaatagaacctgaatgagaaagaaaattcagaattaaagttgttatcagtaagcctaattaaacagtgcagacagaaagatggcagtagaataaagcattctacattaggaatagggagaatataatcagtagttcacagccccatgaatgaagcacagcatacaacaaagtctggctgggatttgggataaagtggacaatatctgtctgctcttgagtggtaactaacaaactaaacagggatatagactgtggcccctattaatgtgatactgtacctgaagtaaccaaccacactcagcaaaacatgtcaaccagagactgaatcctcttttagtgagtcgtctcccttactggcagttttcctactttctatcttaaaagggaatccacacactcaacaccgcaaaacggtaagacatctcacccctatattgtggctctggcacttctggtccgcacaaaagccatggttctaactagggtgggatttatgctccccgttcagtgaagggctgtggctgtttgcagggtgcaggctccctgcgttgactctcgcttcctgtcacacagtggtatcaccaccgtgacggacccttgacattaacaagtctttgactgaaaaactgatgtgatctgcagccagtgaggggatgcgtggtggccctgccgagtacctcggcagggtcaggagggtggcactgtggccaggcacctccgcggcaccgagcgaggtgagcaagcctttcctgaagtttcccttccttccacaacattaacctgccaagcctcccacccccaccccgccctattaggaaaagtcacgccggcagctcactgaagggcagggggacagctcctggcgccccacaaaagttgggctcggcagctgccacaacttaacgctcctacaggagagtcgggccgacaccgcctcctccgggggcaaacctgagctgccaactttcccactgcccactcctctgcgcacagcagcccaaactttgctgtttgcccaccggccgcaccccgggcgagcggcggcggcgctgaccttcaagccagccccgggtcccgcactggccgccgcccgccccccgaacctccctgcctcccccagatcccctctccctgcctccctcagccctcgtgggaagcccgcggtgttgggggagacggctgcagcccgaccccgcgtgtcacgactgcccacgaccctcagggctccggagagcccgggtcccggcgcctcggcagcccactcaccattggtgaagggctccattttccccccgccgcggctccttacagccggagcgcccgagcttcctactccgagagctgaggcggcccagctgactgagcatgcccagcgcggcctccaagggctgccagggaggtgccgcgaggggcggcgccgctccgccgttccgggttttcgtggcagctgcagaaagagcgagggaagcaagagggaaaagcacagtcaaaccccctgctgctccgtggacaggcgaggtgggagcgggttcgcgctgggggcggggcctaggcggggccgggaaagcccagcccctacctgaagtggacccggctgcggcgctctccccggccgggaacggtgttcagtcactcaacaaatgtggagccctactgcgacccgcccgatcccggacgccgagacacccgcactgcgccagaaaatcatggtcccagtcccaggagcggacattccagaaacagaccataaataaacacagaagacacacgagtgtaaagtcagtgccccgctgcgaattaaatcggggtgatgtgatggcgagtgagtggg

SEQ ID NO: 34105 - DNA, 2300 bp, Homo sapien
tgccaaaaatacaaaaaattagccacgtgtagtggcgcacgcctgtagtcgcaccaactccagaggctgaggcaggagaatcacttgagccctggaggcggaggttgcagtgagcagaaattatgccacttcactccagcctgggcgactgcgtgagactccatctcaaagaaatccatggtaatgtgaattgttaccctgtatgtaatatattgaatttttttcctagctgattttgagtatttctttacttttggtttgcagcattttgtgtcttggttttctatgagtttattcctttttgaattggtacattgatgtcttttaccgtatttgtgaagtttgaggtgattgtttcttcagataatttttctgccccaatatttttctccagtcattctgggactccgactgcatatgttttagtccttttgatattgccctacatgtccttgaggcgctgtttattttttcctcaatctttcttttctctgtgttcctcaaattgaatcatttctgttaatctttaagttcactgacttttttttctttgtcatcaccattctgctcttcaggccattcagtgaatttttcttttaagaatttttgttgtctgtttaaaaattttattttggtactttttatagtttctatttctctgctgagaatttttactttcttgtttatttcaatatgttcttctttacctcgtggagcataattataataaccgctttaaagtattcaataattccatcatctggtgattgcgttttccattgaggattgtttacattttcttggtcctttgtatttcaagtagttgtggcttgcatcctggacattatgggtgttatattgtgtagactcttttatcctctgaagaatgttgatatttttgttttggctggcgatcaccctgctcaggttcagaccttagttctgtttcaccatctgtggccagtggctccaatgttagtttagttctcctagcctttgtatggtaggcagaataatggtctccaaagatgtccatttcctaatccctgaagccttggtaatattttaggttacataatgaagaggagttaggttgcaattagagttgcggttgctaatcagctgaccttaaaataaagaggttatcctggattatctagttaggcccagtgtagtcataaggtttttaaaagtgagaaagtgaggcagaagagtcagtatcagagtgacaaagtgtgagaaagattcagcctgcacttgtggctttgatgatgggaggggggcccaagctaaggaatgtaagcagtttctagaagctgaaaaacagaaagaaacggattctctccagaacttccagaaggaatacagcactgttgctatcttgattttagcccagtgagacccattgtagacttctgacctccagaatcttaagataatttgtgttgttttaagccgtcaagcttgaggttaatttgttatagcagcaatagaaactaatagactttgctatattggtttgagtctgttctgcacatatgtagctcagtgattattctgtaacttttgcaggttcatgcacagatttaagggatcctcttttctgattctctcccctctgggatttcccccatgctgtatagcctacagggtctacttctggtttctctggatagaaatatgggactcattggaattttacctgttggcatttccacaccactctgtgaccaaagcctgccttcagggcaaagtagagaaaggaaatggaacaatattaaaacagaaactcacccctgtgtgttttgcttcagcaagtttttgaccctataacctattataaagtgaaatgaaaatgtggacacctgtgaagcggtccgagtgcaaaatttgtctagactttcaatttttttccccagtcttttagagttgtctcctacctaattcaacaacaattttagtggcttgcctttttgagtttttccagtgatttcagctgatcttctcagaattgctttcttcatctattttgcaagttaattgaattacctaatagctataccaagcataactcgaaatgccacagctgaacttgggcaagctcctaactccactaagtacagaagtggagccgtacagccatgaatgtcaggcatgttgtggggactagttgtattagttttctattgccaccataacaaattaccacaaacttaagcaatatagtacaaatttatcttaaagttattggcaggtcagaagcctgatacggatctcattgggctaaaacgaaggagttg

SEQ ID NO: 34106 - DNA, 2300 bp, Homo sapien
tgaacccaggaggcggaggttgcagtgagccaaggttgtgccactgcactccagcctgggtgacaaagcgagactgtctcaaaaaacaaaaaacaaaaaaaaaagagttaagtgttgattttgttggattactgacagtttgttgagatggattttaaaaagagtctatttaaaccaaagtacctggaaccataatctgccatcagattgctaaacattcacataatccccatgtttcatggggcttcagggaaggcaaatacatctgagatgagccacctccaaggacagcatttcctgggctgcaaaactagatgtggattttgttacttaggcctctctaaaaactgaggccatggatatgacatagcttttcttctcacctatgcctttgttacttttgtatttattggaattaaatctctttttaaagagcttccttcccccttcatcccatttgtatttttaaaaactaagttatatatatatttgcttgtttttgcattcttttattttgtgctccattccctgctttgccagttaagtactacctgaaaagtagcggttcaaaagtatggtaaatctcctcccttaaccttattgcctgtgtgggtgacagctaatggaaaagttgatcgatttttttcagtggtttttttgggagtatatactttaaaaatgtacatacatgtttttgatagtttttatattatttcattttgtatatttttttcctgatgaagagtgatatatcatcctatgaaaatttcatctacccttcccattttacctgtatgggcagtagctacagactagttatttggtttccttctttggaagaaggtggtgatgttgagaggagagcaagctatattcttttaaaagtgtgtacagatgtttttgctattttgtgttatttcattttgtatttcattcatccattttgtggacgtgtagataaaacgcggtggtccaaaagcatgacagatgtcccctttgcgtttctccttattgttcgcatggacaataactgacagagtagtcctagttgctgttgttttgatctagtcttggggctggggttgtatattattctttcaagtgtgtataaatattgtgccacctttttatacttcattttatacttgtttccttgtatggatgcatatatacttaatgaaaattgaggttcagagtatgacaaatctcttttcccttttccttactgcctatttaggcaatagctaatagagtagtttgttttgttttggggtgtgggggagagtggagtatgtacttaatgtatataaataaacttgctactacattgtattactaatttggttcacactgtgtccttctcatggatgtgaaagtaccaatgaaatgtggagatctcgatgtataacagtctcccattctcctcatcccttattgactgctgggcagtagctaacagagtagttgtcaagtggcgtatttgaggtgagggggagggacggggaaggtaggaaaatgcacttaatgtatatacatgtttttactactacattgtattaattcatcgggtgcccagactgaaaggtacctaatgaaccatggagttccggatgtataacagtctcctcttttccctttcccttattgcccatgtgggcaatacttaagagtagtttgggtttattgaagattttttgctaggagagagaaaattttttgctaggagaggtttcaaggtaagagtatatactttaaacatgtatataaatgtttttgctacttttctgtcactacctttcttaccttgtcctttacatggatatatgaagaaaattgaggttcagcctgtagcagctctcctcttctgcccttcccttagattgtctgtgtgggcaggtgtctaagagagtagttgattagcttcagggattctttggtgggtgttggggtatatacttttgtatatgtatgtacatatttttatttctttattatagtgtttcattgggtacccggtccttcacttggatgtgtaggttcctaatgagccatggagttatggatgtataacaatctgttctccctttacccttttaatgtatatgggcaataattttaaagtagtttggatttttttaagttttgaggggtgggaggggtctaaggcagaatatatcctttttaaaaatgtatatatacttttcattaactatattgtattatttcatgctgtacccagtccattgcttggacttacgggtacctaatgaaacgtggaggtccggatgtatgaaaatctc

SEQ ID NO: 34107 - DNA, 2300 bp, Homo sapien
tgaagaaggatgtgtttgtctccccttccaccataattgtaagtttcctgaggcctccccagccatgctgaactgtgtgtcaattaagcctctttcctttataaattacccagtcttgggtatgtctttattagcagcatgaactaatacagtgagtataataggaattattattctagttcggttccatctatttccttttatgaagcctgctcttctacaaactagctgaagaagctgatcacatggaaggtatttcatttttatacagtctttaaaggtctactttcagttcatcataaaatacaacctagttatggaatctgaaaattggaagaaacactggaaagcaatctttgtggctaccctggaaaaatattttaaataaaagtttgacaatcctcaacaacctccttcaacaagtaacattggttacaaccactaaaattagttattttatatctggtataaatccttattatggaaaaggaatcctgtgacttatatttatgtcttctatggaaagattatttaacaaagtgttacaggtagtatagatcatgaataggtagaaaaagaatttctgttttcttaagatctttaaaggccaggcatggtggctcatgcctgtaattctagcactttggtaggccgagatgggtggatcacttgaggccaggagtttgagaccaccctgggcaacatggtgaaaccccctctctactaaaaatacacaaattagccaggtgcggtggcgtgggcctgtggtcccagctactagaaagcctaaggtgggaggaccgtttgagactgagaagtcaaggctgcagtgagcccggatcatgccattgcactccagcctgcatgacaaagtgagactctgtctcaaaaaaaaaaaaaaaaaaggatacagctagggactaaattaagccttgcatttgaattcaggagccactcttctggaagccaaggcttgttaccccccacaaccctcccaaattttagtcacttctattgggcaggggcaagtaaaacctgacagactgtcttacagcttgcctgggaacatttgtttccctatttacccttcaaagtgaatcattcccaaggttgactttaattaattctgatgtaattcacttcctttcacttaataattattaaaaatttcagggcagggtgcagtggctcacgcctgtaatcgcagcactttgggggcccagacaggatgattgcttgagcccaggagtttgagaccagcctgggcaacacagtgagaccccatctctacagaaaatttaaaaattagccaggcgtggtggcgtgtgcctcccaactacttggggtgctgagatgggaagattgcttgagtccagggctcaagcccctcacttgagtcaaggctgcggtgagttatgatcacgccactgcactccagcctggaggacagtatgagaccctattaaaaagaaaaataaaacaaagaaacaggacgagaaaatacatatatgtttcttaaggtagttattgaaagatttttttaaaaaattgagacagggtcttactttgtcaccaaggctggagtgcagtggcacaatctgggctcactgcagcctcgactttccaggctcaaaccatcctcctgccttagccctccaagtagctgggatcacaggcatgcaccaccacacccagctaatttttgtattttttgtagagttagggtttcgccatgttgcccaggctggtctggaactcttgggctcaagcgatctgcccgcctcagcctcccaaagtgctggaattacaggcatgataaactgcacccagccccataatctttatagcactcctttaccaaagaagaattacactgaaaatttagatttatagggattatactgttaacatatagctggcagtcctgagctggaagctgtcttgtcattcaggaaatttcctggagaaataaccttcctgattccatattcctgggggcaacacaattgaagatggagggccagaagaaatactcaagtcagaaagctgcacagcattcagacaaaatctggttggagaggaaagctgttttcataatttagcgagcttccccagctagcctgtaggtgggtgtgtttaacagaagaaagcaatgggaacccgcctgtcagccagcctttcgagctaattagctcagcatacaacaaagataagtgagcctgggaagagggccccctgaggggtctttagattctgggaaatgtctgattggcagatgttaaaagggattccttggtaat

SEQ ID NO: 34108 - DNA, 2300 bp, Homo sapien
atgtctatacttatgctacagaaagaaatgtcatttgaaaataaatttttaaaacgttttcaacaaaataatactaaaagattaatgcctggcactggggtggtcagtactctttggatgatgactaatcatgatttttattaataaggagtaacatagtcacacagtaaaggaacatctaggagcctccagagtgtgacagattatgacattctaggtttaggctgcatcgttctatggagagacattgtgatttaatttcaatttttatgaaccagttctggggccaaggagctgtgctaattgctagagattgagatataaataacccctatatatgctttagaaaatgttactgtctcgtagggagatgtaaacatatataaaatagtctttttaaaatgtattagtatttttcccagagtaccctgtgagcaaagaggagaggcattatcttcctatttccaaacttcatctttctcaaagagagtcaattgcacattatcctgtccttaattctcccttgtctggaaatcttctagagaattgaatccatttttgctgctttgtggtggcccaaaaaggcagcctgatattcagatattgttctacttttggtccagattaacatgtcctcagattatttttataggctgtagcattatttatccctttgggtgttattgcaaatcggctaatggataacaaagatacataaacataattcagtagtctccaaacttaactgtttaatattaatatctttttatcgtcagatctttcagttggctaggggttctagtgagtgttgctgataagaagcatagccagactcaggacgaacagaataagtggaaacctatccccaaaccataggcccattatcttatttcctggggttcacattcatctttccctagtgtatctaactatataccagtaactatgacaaaaccttgactttcctaaccgtaggaactgcatggcattgacagcttatatccttgagatttccttggattttagtttttcaaacacactggttaactcatttgtatcttttttcttttgtgtaacatcttttatctccttgtgtaaggaggagcaataccattaaccaataagtatattgtcattggctaataaggaaaaagaggagcaataaagactatatcataaatgattcttgcttttgcaggtattttgacagagatgttaaatgcattaaagatttctttatgaaacgtttcagctacgaaagtgagctttttccaacttttaaggatatcaggtttgtactccccattgctttacataatagaacagtttaaatatctggtctgtgtatttctaaaaattaacattttcatctaaaaaactttccaaattttgacacgtaatcactgttagatgtcattgctctgtagtacataactgaaacttaaaaacttgaaaatacctgcatttggtccattaaggcactgttactgaattttaggaagcggacatatctagattcttataaattcaagaacttttattctattttggatgctatttgagtaactcattcataaggaataacaccaaacattcattgaaatttgtgtttttcctttatcaaggaccaggaggtatctttaattgattctcaaaacataactatcatgtgcattctcaaagctcagttttctcatatttattttatacacttaagatattttctgatctgggatgagtcacataatctgaaggaaatccttagccccctttgaaagttaatttacaaagttaataaacataagctgaggtttttataacctttttatttatattgttgcttttcagttattttattcttaaaatgacagccagcatatacctttcatatttgtttacctgtgtcatttaaatattacattttagggaaggaaaatttatttttaacatataagctattaaactcacttgaatcataatttatcagagtagtagatatttgctcctcttagataaacattttttctctctttctatgcttgacgccttttttttctaggagagaagacactcttgatgtggaggtttctgccagtggctacacaaaggaaatgcaggcagatgatgaactgcttcatccattaggtccagatgataaaaatattgaaacaaaagagggatctgaattctcattttcagatggagaagtggcagaaaaagcagaggtttacgggtcagaaaatgaaagtgaacggaactgtctagaagaatcagagggctgctattgcagatcatctgga

SEQ ID NO: 34109 - DNA, 2300 bp, Homo sapien
attaggaacatttgctaaagtgctggattcggagtagaaacataaatggcttgtttcccattccattcttgctctagaagttagttatttgcatacaaatggccaacaggtacatgaaaaattgctcaacatcactaagtatataagaaatgaaaatcaaagccataatgagatattatcttaccccagtccaaatggctactgttaaaaagacaaaaaataatggatgttggtgaagatgcggagaaaagagaactcttatacactgttgatgagaatgtaaattagtacagccactgtggaaaagtatatggagatttctcaaaaaattaaaaatagaattattcaatccagcaatcccactattgggtatctacccagaggaaagaaatcagtatatcaaagggatacctacacttgcatgtttatcgcagcactattcacaatagcaaagctatggaatcaacctaagtgtccatcaacagatgaatggataaagaaaatgtggtatatatacacaatggagtactattcagacataaaaaatgaaatcttgccatttgcagtaacgtggatggagctggaggtcattatcttaagggaaataagccaggaacaaaaagacaaatatcacacgctcttacttatatgtggaagctaaaaaatttgatcacattaaggtagagagtggaaagacagataacagactgggaaagatgaggggagtgggaacaggatgaagagagtaggttaaaggttacaaacatggagtcagatagaaggaatatattcactgcttgatagtagagtagggtaactatagttacacaaaaatatattgtatttggatgacagacaccctaaatacttgtaacaaaatttctcacgtaccccataaatttgtacaaataaagttagtcacttggtttttttaaaaacttttcgcccaggcgcggtggcttatgcctgtaatcccagcactttgggagactgaggggggcggatcacctgaggccaggagtttgaaaccagtctggtcaacagggcgaaaccccatctctactaaaaataaaaatattagcagggcgtggtggtgtgagcctataatcccagctacttaggaggctgagggagaagaatcccttgaacctagagggcagaggttgcagtgagccaagatcgcgcccctgtacttcagtctgggtgacagagccgggctctgtctcaaaaataaaaaaaaaattcatttctatgccttcttatgtaagtacagaaagaaaaattccgtttaaatggagatgttcattggttgaagatggttaatcaaagacatgctgcattcaagtaaaaagcagacaaaggcttgaatatcgaggagttgcagagccagtatgggtaactattctaaaatccttaaatcgctcctgggccctcgaagtcctacccgcgtaggtcagcccgaactatcaaaatccccacttcctctggaggtaaggacgtccgccgcgctctccacgtgtcaccttaaactcccaccccaaccagcgcaggcgcacttcgaagcctcctagaccaacctaagagaagtactgagcaagcgcatgagttccattaaccacgccctccggagctgccggagcaggcgcaattaggagtagagggcgtgcttgtgtgattacagtccactttacctttaacagatttggttgtctggactctagctcaggttcttttacccctgtcttgttggaagtcactttgcctagagtagaagttgtttgcgggaaaaatttgctcctcccattaagtaaccactttgctctctgaggcggaacgtgtcattgaggcagcaagtcctgacagatatggaaaaaaaaaggcacattgtagagaatatctacactccgccaactcagtcacaacgcaaaaattacacaaaaataaaacgttcacttgttacatactatgtgtttcataagacatacaagtagttttattttcctatatcaatgagaacagcacttctaactattaacaaggacctatactaagacgcagcgcgtgcgcgagccatctggcgctgtaaagcgcttagaggctggaataacgacctgccttacgctttgcggctgtcgtcggagaggcatctgggttcggactggggccgccatggggaaagtgaatgtggccaagttgcgttacatgagccgagatgacttcagggtcttgaccgcggtaagaaacccgccgttcctgttctcccttccccttaacactgtgtgacctcttcctgttcctgc

SEQ ID NO: 34110 - DNA, 2300 bp, Homo sapien
caaacccacagccaacatcatactgaatggggaaaagttgaaagccttctccctgagaactggaacaagacagggatgcccactttcaccacgtctatttaacatagtactgaaagtcctagatagagcaatcagaaaaaagaaagaaagaaagggcatccaaacaggaaaagatatgtcaaactgtcactattcacagatgatatggttgtataacctgaagactcatccgaaaagatcctagatctgataaacaagttcagtaaaatctcagcatacagtcaatgtacacaaatcagtagcactgctatatgtgaacaacaaaactgaaaatcaaataaagaactcaatccctttatgacagctgcaaaaataaatcaataaataaaatactgaagaatatacttaaccaaggaggttaaagatctctacaaggaaaactacaaaacactgctaaaagaaatcatagatgacacaaacaaatggaaacatcgatgctcattgatagagagaatcaatattgtataaaatgaccacactgcctaaagcaacctacagattcaatgcaattctcatcaaaataccatcagcattcttcatagaactagaaaaaacattcctaaaattcatatggaaccaaaaaagagtccgcatagcaatactaagtaaaaagaacaaatctggaggcatcacattactcaacttcaaactgtactacaaggctatagttacacaaacagcatgtcactagtataaaaataggcacatagaccaatggaacagaatagaaagtccagaaataaagccaaatgcttacagccaactgatctttgacaaagcaaacaaaaatgtaaattggagaaaggacaccctattcaataaatggtgccgggaaaattagcaagccagtagaggaaggaaactgtattgtaatctctcacccatacaaaaatcaaataaagatggatcaaggacttaaatctaaagcctgaagccataaaaattccagaagataacattggaagaacttttctagacattggcttggcaaataattcatgactaagacctccaaagcaaatgcaaaaacaacaaaaaaagtgcatgggacctaattaaactaaaaagcttattcatagcaaaggaaataatcagcatagtaaacagaaaacccacagaatgagagaaaatgtttgcaaagtatacatttgacgaaggactagtatccagaatctacaaggaacttaaatcagcaagtaaaaaacaaataatctcatcaaaaagcaggcaaaggacatgaatagaagaaatctcaaaagaagatatacaaatggccaataaccatatgaaaaaattctcaatatcactaatcatcagggaaatacaaattaaaaccataatgatataatgagataacaccttactcctggaagaattgctataatttaaaaagtcaaaaaacaatagatgttggcatagatttagtgaaaagagaacactttacagtgctgatgggactgtaaattattagtacaacaactatagaaaacaggatggagattccttaaataattaaaagaactatcattcgatccagcaatcccactattaggtatttacccaaaggaaaagaagtcatatgaaaaagacacatgaacacacatgtttatagcagcacaatttgcaattgcaaagatatggaaccaacttaagtgcccatcaaccaacaaatggataaagaaaatgtgctatatattcaccatggaatactactcagccataaaaatgaatgcaataatgtcttttgcagcaacttggatggagctggaggtcattattctaagtgaagtaacttagaattgaaaaacaaatattgtatgtactcacttataagtaggaactaagctatgaggaaataaaggcataagaataatatactggactttggggacttgaggagaaatgttgggggggtgggggataaaagactacacattgggtacagtgtacacttcttgggtgacaggtggactaaaccgtcagaaatcaccattcaagtatttattgggagtggccaagatggccaactagaagcagctacggtgcacgtctctcacagagaggaatgaaaacggtgagttaatacagctccttcaactgaaacatccatgtacttgcattgggactattaaaggaaacaactcaacccacagagaatgaagaaaagcaaggcaaaaacgatagccctcctgggagggacacagagccaagggaacctcccccacccagggaagtggtga

SEQ ID NO: 34111 - DNA, 2300 bp, Homo sapien
tgtttaaggaaactttttttcccaaaaaagtatcccaaagggatacttaagaatcctctttaatagataacttttaacagtgtgcattgtatgaaagccaagccattctaaaattctgttgttgaaattgaagcaagagatttgtaatttaaaagttagtgcttcattatgagattttacccttttttgccttagttgcatagaaagttctcagaaaacagacaagcttacccagagggagaactaatgttcaagtttccaaagtgggtggtgaattgaaaatcatgaaaaatattatgaaactaaagaaaaattaaacgtatgatctgatgaatgtatttatgtgatgattgacaagttagcctctaggttccactgagcaatatttatgggaaaggagtggaggagacagggaattctggcagcttgtgcctgctatttatgtaccgttcagcttagcaggagagggacgaagaactggggctgcattaaaaaacatcctctgggctggctcactgggcttgctttgaactcttgttcatcattattttatgctgcagcttgtctttgtgttggtggaagggaaaagaaaaacacaagagactagcctttagtttctaaatcaaagctgtgctttgctgactgctggagtggcttttcaaaagcaaaacaagtggggacattaaaattccttgcttttgtaaaccaggagctgagttggggttttttttttcttctttttaaattctcagatgcaaaagggtatgtttcaatgtgtcttacatttaccttgaaacaatctcagtatgtttttttccatttgactggcacttggagaagataaagcaaggtgaaaaaaatactaaggaggaacctgcagaggtttggaggaagggcgttcattgtcatcgaatttaagaaagagaaggatatgtaaattttactaattaatgcctcttacacatcctttcttgatagtgaccccaaggtccaaagacgttaaatcagttgcctaaagcccagacccagaaagtcaggactagaccttcctctgtggattcccactcgtcctctttacactgccctatgctgcctctagcgttagccggagaaactgtaaggaggggttaggggaggagaaggcaaagaaaagctggagagggtcgtagattcttgcctaaggaggcaagaagtgacctccctgagtcaggatacttgagcatttgacttgactaagagaagtagcccgctagttccaggcgttgaacgcgccaattagctgccgctgagtatctgggatgttttttgtttgtttgtttttctactttggaagatcaatgtaaggtagaaagttaatccctttcttcttgccctccacgccttccacgctgatcgaagcgaccgtcctccctcgaacatttcgtgggctcattctttgtaacacacttgctctgggccttaggtgtctctttaaaccctctctcccctctttatttccaaatctttatctttggctttcttaagctgtaaaggcacactggcaccttaggtggtcaggtaagatcgctggattccttatttcggcgaaagtccagcggaccattcccgccactgtacccattttagaaacacttggaagacccttaaggatcatttacggagagaaaggtgtgcattctgcggctgccggcgggcagctagagaacgtggcggggggcagcgcatctggcgccttggccggggcgcggagtgggaacagcccgcacgcgtccgctgccgccctgcctggcgacgagtggcacaatcgcccaccaggaatcggctggtgccgcgggtgggcgaaggcagcgccgccggcccggagggcggcgcggagggtggcgctggcggcgtgaaaggcgtctttgtgcaagattgagtgtggtggggggaaggcgaagagagaactgatccaggacctggacgcgggggtctgcggcgcccctacgcccccacgcccccagccgtccgcagtgccggaatgagccggatagcgccggcagggggcagtgtggcgatataggggttgccggggggagaggagggtctctgttcacctctatttgaggctgactggggagaaagctgcctggaggaagctgctggggtgcggggggctgagggatttggctccccgccctctcccctagatggcggagaaatcgggctagctggaagggcgcagctcctctcccagagctcattctggagtcggagaactgggagagcggcccccgaggcggagcctccctcccgccccg

SEQ ID NO: 34112 - DNA, 2300 bp, Homo sapien
ttcaggattctccagaccagaacgttgtgaagtgtctcatatatacaggacaaaaaaggtctggaaggaaaagaaacttatctaatgctgtttgttctcaagactaaaggaaaatgaccctttcaaccttagcattaaaaaaaattctttgtctaggcaaattcctagaaaaaaatagtgtgaagagcgtcctggattttcatgaaacgattttttaaaaagaaaaataggtatcacatggtagaaggctcatttgcaggcttacttcccttggaacatacgcctcaaggctggggaagcgccgacctccagaaggcagcatggttatctgtcaacccctcacggagcccgaagacacccggctagtcacaaaacacgagcttttcccgggaggctgatcgctgaacaaacgcagcttttgccaaaacgaaagaaatccctgctcaaaaaagttgacgttacttcgagattaactcccaggtttgcaaaatctggtaaaaatctttccatctggtgtacttccttcgcctcgccgccacccccaactccagaaaagcagcacaaggctccttgtctccctccgaggcggctgcgacggcggaaacctgatccgagcctgactttcagtaaacaccagcgcagagagcaataaagcatccggaacatttgtctcgggcgcgcggcccccgcccgctaaatgtttgataagcggctgtcggaggggagatttgtcagcggtccgagccgaaggcggggagggtggagagaaggctcgtctctgcgcccggcggccgcccggtgggtggctgcgttactgtggcccggagcccgacagaggtgcgtgtcaggggctcgggaggcctttcccgttgcgccacgccgcccttccgccccggcgagcgccttcgagacctggggctatttgggaacaaagccctaggccccggggctggctcccctcgcgcgctcccgtcctacctgcgtggagcagcccgaggctgaacagcagcagcagcagcagctccagcggcggggggcagagcccggggctgcggcgctgctcaacctcggcggcggcagcggcggcgctggaaggtgctgctctcaagcccatgcccgtccatgcaggtctcgtgggctccggcgagggcggcggcgcgggcgccgtggcgggtctgggcccgtggctgcggcatgggccggggggcgcgcttcgcttcctcttcttccttcttcaggcccgtgtagcagatggggcgccaccaccgccgcagcaagcagcgcgcagccggcgcagccagtccgcggcggcagcagcggggcgcaggggcatcgtggcggccggaggcggcaggcagggaaaggggcggaagagaagacacaaagaccgtgagcgactgctgagacgagtcccgagcgcgccggcaccccggccccagccagcgtgggctcggcgggcgtggacctccaagaggctggcccagccctagcgaccacccaccggcggcccggatatctctgcgcggcagcccccgcggtcgatcaatctcagtcccgcactgccgtcccgccccgccctgtgcccgccaatccacgacgccataatcccccgccgtgtccctcccttcctccccattggttgtgaccgcacgtcagcccgactcagcctgccaatcgcaggacccagagggccctctcccccgcccgctcagtgtaattcgagttccctgtccatcgactccaagtcctctctcctgcgccgcatgctgcctcgcgctccctttccttccccctctacccccttccgcgatttactgtttcctcgcgcccaacagaaatgggcgaccgcaagtcttactctcgccggcgttacaaaggtaccggcctttgacctctccttgaattaatgtgatccgattcatcttccctccaagttttttttttaatttaattacccctccctgccctggccctgccagcttcagctccacctccttggaggaagcaggcgcttttacagagcgccgcgcggcaggtcccctttcagccaatcacatctgcggaaccgcgttccgagtcgtttgagggtgtctggtaaagcaagctcggggcggtgttggaaatctgaatgtcacccgcggtccggagcagataggatgggctgggaaggtacccgcgaactgccgccggaattcgctggcagctgtgcgaggctcaggtgttctagtttgacatttcccttcctgaaagcggcaaggagaggtctaagagtgggcaaacttcaacgttcggttacagtg

SEQ ID NO: 34113 - DNA, 2300 bp, Homo sapien
ctagactatatagtattttcccctttttgacccaaacacactttctctgtatttagccctcttccctcccatcatctctgtagcaaaatgctgttggaagccttagccaaagcagaagaacccaagaagatttgaaatttaaaatttaaaatttaaaattttgcaaatttaaaagtggtgacagagttgtcttcagaagttgtcttctcccacctgtttctcccagccaaagccagaaacagagcttacaagctactaaattcagatttaagagcagtttactagtgaaaatgttaaaatagctttctaagacaatattaggctaaattttaagtctttatcagatggagttccctaaatcttgatatcatcctgaagtttattgcatccacatcttgaaataattatatatttaataataatctactggccctgaattttttcccccatccagaatacaaatcataagatatttactgtctggaaaagaatacaaagttcgtcttagaatagcttcctcatttctcagatgaggaccctcacatttaaagagattaagagacgtctccatagtttaaagacctataaagattttatgtaacacaaataatgtgttacagttcatttatataaaatttgcagttgatgacaaagaacagtgtctcttttcactaagtctgttgtttccattttatggaacagaatattaaattatttggggacacacaactgacctagtattggtagtttttgtgctttaggagattttataaatttttgtttgagaaactagtggtaaaaagcatcatttggaaattgatttttttaaaactaatagggcagtgatactttggtttttcataatgtttatatgaattgtttttatttagtgtgcttttacttgtgatctgcttgggagctaggatcctagggtaatggagatagacagtaaggaaaaagtaaatatatagcttggtcaagtgaatcttgtttttttttttcttagagcatttacattttgtagaaattaggaaattgtgtcagtttatttacagtttcttggtaaacgtgcctcaggagaagtagaatgacagtacctggatttttttttttcttattctgtagccatacaggtaaatcaagtaaaggtgttttaactaattatactataatttaggattttacaccttcctgaagtggggaggttttaaccatggttttgtgcctagtgctgcttttccaatgctttctgaaggaagttatgcaattttggaaaatcaaaacaatgttcatgtttttggcgtaaccttagagtaatctttttcaaaacctatgaacaaatagcaacatttataaaatattttatttactattcccttgtaatctcaacctgtgatcactggactagactcatgttcactcacagtggctcatgctttaaagttgtaagttaactaattgcatgcagtttttcttccagtggcttagtttgagaaagacacaggaacacaatgaaaccctgtatctgaaggcttcttaaaataggagtacagtgtataaaatagaacaaacaattcccaaagaacaatgtgattttctcatgtagctcaggaagttatgaagagtttacaaatgtttggtcttatcttctttcccataggtgactgccaacagccagcccaatgtcgaatccagaaatgcaccacggacttcgtgtccctgacttctcacctgaactctgccgttgacggctttgactctgagttttgcaaggccttgcgtgcctatgctggctgcacccagcgaacttcaaaagcctgccgtggcaacctggtataccattctgccgtgttgggtatcagtgacctcatgagccagaggaattgttccaaggatggacccacatcctctaccaaccccgaagtgacccatgatccttgcaactatcacagccacgctggagccagggaacacaggagaggggaccagaaccctcccagttaccttttttgtggcttgtttggagatcctcacctcagaactttcaaggataacttccaaacatgcaaagtagaaggggcctggccactcatagataataattatctttcagttcaagtgacaaacgtacctgtggtccctggatccagtgctactgctacaaataaggcaagtataccttcttttttccctctccctactcaactttcaaaagatgtttgattcttcagataacttttgaaatgtgctataaagggcctagtttaaaaggaacttcttttgaaaagcaattaacagtt

SEQ ID NO: 34114 - DNA, 2300 bp, Homo sapien
gttatcattttggaggaccactgaatgaaaatacttagttgtatcttcaccaattttttgaatccttataattagggcttagatttttgaggttcaaagagttagaatgtctaccttttctgctttctagatgagaaataaggaacatcttattgaaattacacagtgaatttggttgaaagtaaatttaaaaatgagcaaagaattaaagaatttgaaataaaattttaagtaaaataaaaaaagttacacagtgactaatacaaataggtaccatttcaaattcggtttgttataaggaaagggtggggaaacctttggaagaagagagactaatagccaggagacttaactttttcattgtgttctgtcactttacatcctaaggctgtgctctcacctcacttttctttactcagttgggcagattacctttttggttttcccctgtttggttctcagttactttgatttcatattccttattgttcattcctgctgccactctctctggttaaaccaaattcccttaagggggagatggggaaggaaagagggaaatatcccataaagcaaaatagcttttgctgtcttggagaaattttattttgatttatttatttttttgagatggaatcttactctgttgcccaggttggagtgcagtggcgaatctcagctcgctgcatcctccgcctcctgggctcaagctatccttccacctcagtctctttggtagctgggactacaggcccacgctaccaggcctggctaattcttgtattttttgtagagatggggtttcaccatgtcagccaggctggtgttgaactcctgacctcaaggaatctgcctgccttggcctcccaaagtgctggggggaattttttttttatttttaatgcagaaacaagaaaaaaaagtaccttatattaagacctatcattggctgacccgatcccctcaagaacagtcattgtgggctgggcacaatggctcatgcctataatcccagcacgttgggaggccaaggtgggcgcatcacaaggtcaggagattgagaccatcctggctaagacggtggtctactaaaaatacaaaaaaaaaaaaaaaagtagtcgggcatggtggcatgtgcctgtagaaccagctactcaggaggctgaggcaagagaatcgcttgaacccaggaggtagaggtcgcagctattttgctttaagggatatttccctttctttcctgaatgaaagaagatagagatctaaaccacaattacagaacagttggcattaagcaagtgttacagtagttaccataatgatctttttgttttttgcttacaatttttttcaatatattttttgaccaaatttcttaaaaacaactgaaatgcaagactagtttttatttaaagatgactgtaataaagtgatggccaaaatagaatgtatatttgtattttgtcttattaaatatgcctcattctagctgatccttttaatagtattgtagaaaatgtgaacagatatttactattccattttacagaagaaaaaaatggattcagatgaaaagcattttagggctgggactggagaatgacaaaggaaacacctaggacctgaactgtttaaaagaggcactaattcttaggtttgtgtaagtgctgacgcttgcctcagctctggtgctttgttcaagatcagacagtcattcggatgatataattaagaccagaatctgattcctgactagattttttggggggaaaatatatttttataaggaatttacttaggaacaaaaaggtactttattaacttcctaccttttacccttataagttaatcgtagaatgtagatatgttcgagatagtctgtgaatttatataaaggctagatgaattttccttcttctgtggatttcatttcagtaaggtatcattcaatatattctcaaagttcattttaaaaatatatttcaaggtaaatattatacctctagtgtatatttgaatcttctagggatactaccctaacttagaacctaacattccttttctttttggaggtatatttgacaattacagttccttatatatttaaggtatacaatttgatgatttgatatacacatgcattgtgaaataattacagtctctgattaattactgatgcctcccttgggatgggaagagatagcaaactgtacctcatttatggtgtttggttgtgttactcttgggaccattacattaccattattaagtgacagttaactttttaatgcattatttaa

SEQ ID NO: 34115 - DNA, 2300 bp, Homo sapien
acgccggagccctaggactgggcggcggagatcccgggcctgggcgcgggggaggccgtccacccgagtcggctccctccgccccgccaagcccgccggtaagaaagggggcggcgggcgggtcaggatgtggcggagaggacaggaaccggccgggcggagggcgggcgcggcgcggtgcccaggcggcggcccagcggccgggtgaaggccgggtggctctgtgagtgccggtggcggtgtacgggcctggcgcgcagggggcgtgtgagcggcgagtacaggccggggccgcagaacgcatccttgcgccggcccggcggccctgccccggcctcttcggcttggtgccgaccgggccgcgagaggagacccgcgaatggctagcacttagccggtgcgtgggtcctgccgcgacccgggctcccagcacgtggggagcggcgggagggggagggggcggcggctcgggcgagcctgggagggcgcggggcgggtctgcgggaagtttgaggcgggaagagggactcctggaccgggatggaggccctgggagaggggggcaggtccgcgagggaggctgattggagcgcgctggatggatgagtgaggatggtttccaaacctctttcgagtgccgctttaaaaacttagcaggagcaaagcaactgctaaaagacagaggattgaagaggtttaataacttagggtagtcattgtggagacgcttgagaggacacagcgctgtgtgcgcttggagcttcagaactcagggttgtgaaaagggtctcagaggacttattcggataagggagatggaggggaaaggaagttaaaatgtacagagaaagccattttgagggacgaaaggaaggtgaaaaggaaagaacgaaaaggggagtgaactttttaaaggaagaaacgggaaaggcagtttgttaacatacttagattttttaagacttaattgttcagtaaggcactttgactagggttgagattaatatttaacattaggaataaatgttgagtagaacggttactttttagataacctgttcttgcagagtctactggacagtagtctagagaattaacatcctgatccagatgcagactttgctatcattgagttggtaacaatctgtttccctccctctcttgtggaatggaaataatcgtaggagtgaattctctttgctgaggtcggaggacagctctgctctcagttggctgtctcggtactttctggctggggaaggatctgacgtctccttcccccgcttcttcctctccctcccctgccagagatctcctttgtttattcgtggatggcttgtaggtgattcttcagtgttgtactgaaatctttaaaggtggaaatggtgtgtcttggttcattattcttgccccaaattttttacgtaaaaaatcagatatagtgtatattctattaccttttcaatttttttcacaaaataaaaaccaagtgcaaactggttaagtattatttaaatgttatcatcccactatccgtttacctgttaaataacacatttattttgagctatgcatttttgttgagagtatatggtatcttttatttgcctgttcctcccatgggagcgttttcagaactttctcactcaagtgtatgaagttcttggtgataggagtgagggcttgattaaaggtaacctcctcccacccccccccccacttcatttattcgaccaagttatctaataagactccgttatctactcttgggatgtatgcatatgttacatcgtatcaccttgctttaggagtctataaaaacattgttagttgcagttagtctctaaaaatcctttcactccacaaatattttaattttttctgtccgaagtatattagcagtagcatactaaattctagttagcagtcaggagtgtagttattacaagtctagatattttaagtatttaataaaaggcccccacttcttccttaacagctgtagtctaattggcctacgtagatttatacgttttagacagggcttaatttaccttttttctgcaggaaattttgttaatttattaatatattttctttaggtgaatcaaaggagagtcccagaaaacctgtgactgttgaagaaaattcatctgtgaatttttatattcaaggagtcagtatttatattcatcttttaaactgggaagatttatattttactttaaaacttcttgataataatttacaatgaatggacacagtgatgaagaaagtgttagaaacagtagtggagaatc

SEQ ID NO: 34116 - DNA, 2300 bp, Homo sapien
gatactcaattctcaacaaaagtgatcttaagcaggcaacatacctggaagttactgtgctctttttagaataccatattgtttgtaaaacatcattatataatgacatcttgaaatctgtcatgggaatgaacaaaaattttcctaggagaagatactgtgttttgtttgtgcaatagaaagttacaattttgagcacaaatatctatgtgaaatacaatctttcaaactaagtaaaattagttgtttatgaatttttctcttaattttaatatacttgttcatttacttgttatcaattggcttgcaaacaagttgtaccaagcacaggatataaaaaaaaaatacataaataaggggaaaaaatctcagaatgagaaatttgtatcaggttactgccacattattatattctcctaattaataccatgatttgattctagcttcttaatcaactattgctagaataatgtggcataatcaataaccatagaaatatcagtggcatacagcaaataagcatttatttttcacttctttggtcaagctggggttgactaacttaagctaaccttggctgcatttggtgccaggctataggtttagtcatagtttacgccagatatcccacagtctactaggatcagaggactagctgggtcatattcttttcaaggttagggccagaactttctgtgcagagagggcaggcaagtgaaagggggaaaggaataatgagagaggtaggtgtgtgtatgcatgtgtgtgtgtttctggctctctctctgtatatatctacctgtatctgtctctcttttagcaatgaaaacaataacttactcaaaagacccacgtatacccttgacaggcatctcattggtgagaggtacatcatgcggccacttctagttatctgcacaaattgaagttccatattactgaagtcaaacaggcaaggaagacattattgaagactactgctgttgggaaaggggataaaactcttctaatctcaactcctctaaaagaaaaaaaggagtggagagttattaagagctattttgggaagatcaccggccacctgagtttgctgattgactttacccaaaggaaaagtaaattttctcctccatgacaggaggtggttttacaacttgaagcgagaagcctacaacagttaggttcctttcctctcacacaaaataagagatggcccactaccttccttgctgattatatttcaaaggcatgatggctttccatacccttgagatagttttcaattatataactggccagaagctttaaaaaatatttacatctgaaaagggaagagaaataacttacaatggtaaagttttctaaagtaattttttttaatatactttaagttctagggtatatgtgcacaacgtgcaggtttgttacatatgtatacatgtgccatgttgctgtgctgcacccattaactcgtcatttacattaggtatatcccctaatgctatccctcccccctaccccacgacaggccccggtgtgtgatgttccccatcccgtgtccaagtgttctcattgttcaattcccacctatgagtgagaacatgcagtgtttggttttctgtccttctaatagtttgctcagaatgatggtttccagcttcatccatgtgcctacaaaggacatgaactcattacaagcaaatgctctttagaaagggaggtcagggacccataggcaggaaaaaaagcctgcttaaagcttgtaatgaagctaaggaaaactaagcccttctggcttacagattaaatgtgttattgcagtttgacaccaatgaattcagattatgagtttccaatctctcagggttcctgcatgagagagttgctgtacattttacacaatctctttttgtctacttactttcttaatacgcatccttgaccgctcctcactaacagtgaaaagaacaatgcttccaaaacggtcacgtcctcgctttttacacaagtgcgcgtgcgcactgggcgctaggcctctgacgtcaccaagtgcatccgcccctacaagttagcaaccgaaggcgtccttagcagcagtggccgctgagatgtacgaacttccggttctccgggcagctgccactgctgtagcttctgccacctgccacgaccgggcctctccctggcgtttggtcacctctgcttcattctccaccgcgcctatggtccctcttggagccagcgtggcgggcctggcggctcccgggtggtgagagagcggtccgggaacgatgaaggcc

SEQ ID NO: 34117 - DNA, 2300 bp, Homo sapien
gataaaaaatagaaacaaaaaataggaaatggatagatttttatatttacttctgcattaaatcctttgcaatgtgttgtttggttgaagcatacaaagtaattccatcttcgcacagatataaacttggaatggaaagaaacattttaatagcctttttatatatgagtggttattcctttatgatactactacaccaaaacttgacaagcagtttcttaaagattagttgcaatgtggaatctgaaacaatatcaatgaactacttgtaccctataagcctgtaacagaatgtattattttgaaaatagttttaatactgtagatgccctgaagaggtctaagtgaaactcccacctgtgtggttccctggcccacatgtcaagaaccactggcttacactattttttaactagccaagtgatgttggttttccattcatgataataacgacttgtttaaaaggaaacttttgctttaaataatcagtttaaagaaatatgttaaattacaatacagagggtatttatgggaaaaacgtgaattttgaaaacaataaacaaacataagctgcaaacctaccctctacacttattttataatgaaataaactgctagacagctttccctcaccttatctctttgctggcttctcctaatggtgaggtcttggctctgtatgtcaactcttcaggaaggtgattctctgccacttaggtggcagattaaagggcaatactaggaaacactgatagtaaggaagaacttttcttctcctgaattttataaaaataaaatatccataaggcacctctatattactattaatccactcaaatatatattgatttcctattaagtggcagcattgtacaaataatttgtaagactcacaaacctactaaatagatatcctgtctttaaagagtttgcattctgattggcaaaattttgaccagttaggtatacaaaaatttagactagaaaggtagaagtattacaagacagagtagtcaaaattctagggaataaagattatcctcacttcagagaaagggtgccctttgaggctgacgtgggttgtaggtcagatgaagagatttggaggtagggcactcatttataaacaaaaggcagcaattagttataggtttaaattgctccaaaggtaacaggcctttaagaaagtcaatatcatattcttaagcaggagtccctgatgctggggaagggggaaagggtcacagaagtcagccttgctggagatcaccggcctgcgtatctcaggcccacgggggtgccccaccgaggctttgcctcacctgaccgtcctgaccacgaagtacaccagcaccgcgccgctcaccaccatcaacacggtcagggcccgctgggtcatgggcttgtcgccagggttggggctcacagcaaggccgccacccaccgagccttccccggccttccctccgtgatcgtccgtctcaagcccggccacagggttgctgccattgcctccctcggagccccgcggccccgcagcttcagccagaccacggcccggctgctgggcaggggtagggcccggtggcagcggcggtaatgtccgtggtctagggtcaggaggcccaagacctggcgcggcctcggctgcctgcagcaggactgccaggggcccgcttagttcaggcagcaacagcaggaggaggacggaagccaagaggtggctgagacagcagcagcactgcgaggccttcatcgttcccggaccgctctctcaccacccgggagccgccaggcccgccacgctggctccaagagggaccataggcgcggtggagaatgaagcagaggtgaccaaacgccagggagaggcccggtcgtggcaggtggcagaagctacagcagtggcagctgcccggagaaccggaagttcgtacatctcagcggccactgctgctaaggacgccttcggttgctaacttgtaggggcggatgcacttggtgacgtcagaggcctagcgcccagtgcgcacgcgcacttgtgtaaaaagcgaggacgtgaccgttttggaagcattgttcttttcactgttagtgaggagcggtcaaggatgcgtattaagaaagtaagtagacaaaaagagattgtgtaaaatgtacagcaactctctcatgcaggaaccctgagagattggaaactcataatctgaattcattggtgtcaaactgcaataacacatttaatctgtaagccagaagggcttagttttccttagcttcattacaagctttaagcaggc

SEQ ID NO: 34118 - DNA, 2300 bp, Homo sapien
gggcttcaaaaggcttaaacaccccatctgcttcaacccaggagcttactcagataccatatatattttaaatgatgtttctgattcatgttgccatactgtaaattattatttttaaaagatgccccctttgagtgagtaggatttgtgtctgactagatgctaagttttattcatctttgtgttcccatctccgcacacattgcctgccccataaccattgcttaagaaataatgagtttaatgaaacgatgcatattactctatccctgacagagagtgatgttttacctataatctaaaatatagttgtctactgtttaaaaatcaaagtttatccttgagaatttagcatcctaaccatgcatccctctcccacccgacccctgccctcagccccggatcccttttaacttaaataagaagctgttttattctggcagtttttgccagaagaaaagtgagtctaacagaagtcaatctaacagaaatgcattaatgcaggctggatttgcctagacatcaataaactcgaaaggctccctgtgggccacttgtagtgtcaataaacgttcgtaattacttgctccttggagcatttttatacccgaccccgttcgctgtgctgcaaagaggaaattcaagatctcggaagttcttaacttcttaaactctagaggaagtatggtaaacactggcgggaaccttgggtttttaagcaaagatgctggctgttttcgttgctattttaagctgtcaggcgacaagcaactcagaattccccttcttacttccggcgggagggaagattggaattgggcctcatcatttctgagcgtgaaaaaccgctgaagctactgttcaacctgaaggaacacggaattcaactggagagaaaccctggcgaccagggagctggggaccggcgcatatagatgagggaaatcctggcttccagacactgtctcatgctagaggtgcctcccgacctaccagccaacagtaaagaccggaaccaaggcgtggtactagcagagtagcaagcatctctcccaatgagggcaacgactggaggatggtggagaggtactcagagtgaacaatcgaacacagaactcttgaaaagtgtccctgccacccaatacaagtacgaaaaatggtgggacggaggagaggtgacaatcagaggctatatatataattgagacttttagagaggactttgctcttccttcctcccctcccttttctttcctttctttctttccttccttccttggtatccgaatgtgtgtgggtgtacttgcgtttaaaagagaggtccatggtagctgcttttttttcagaactctgtttctccgcaatgaagtttaagtgggattggagtttccttgacttctgcgtgaggagtttccaaatggcaatgaaagggaggcgcataaatatccataaagttcctaatgacacctctatcatcacttgtttcctgcagaatcctgagccagggtcgtcgtccaccacccatgcagagtgggcccatcggctaacaggttcatgtgtgtatttgcactttccagattgagtaataaaagtcttcttccttccaccgccgtccccacccccgcaccccgtttcactccaccttggagggcgtgtttttgcgtgtgagggtgtgtgtttagcaaaagcgattgaaagaaggtactcttcttgcaatccacccctagctctacctgaagcattcctctggcgggacgcttttgtaatctgtccccaggcgaggtgccctctcacctagatgcggatagactatcttggagctcccaggtccagagagctgatgctttgatgtcccaggagagtgtgtgtgattctgcgtgtacgtgtgtgtgcatatgtatgtatgtgtgtatgtatgtatatgtgtatgtgcgcgagctcgcaggcgcgtagcactgtgagcttcctctcccggcacagagcaggcagagccggggacgttactctccaagcagcctccgccccctcagcctggtgattggctttgcgcagcgtttatctcctagcaagagggaagggccagtgacgcccccgaacccagctgcagaagctgccgccacctccaatgcacaaggtgtctcatctgaaaagaaacctgagccccagggaggcggcgcggagcgaccctggcagagctggcgcaaacagggcgagaggtcgctgggcagcgttcgaggaccagagggagctcggccacagaagaccccagtgatctgatcccgggatcccggctccaagct

SEQ ID NO: 34119 - DNA, 2300 bp, Homo sapien
ttaagtggcagttcacttattagctatgtgactttgggacagttactaattctttatgggatatggtttcctcaatatgtaaactatatataacagtgcagctgcttttgtaaagattttaataatggggcatatagcagacattttaaatgttagctcctacttctactctttccccatgttttaggccaatctagaatttatttttatttttaattcttatttttttgagacaaggtctggctctatggcacagctggagtactcattgcaacctcaccctcccaggttgtaagcgaccctcccacctcagcctcccaagtatctggaactacaggcgtgcaccaccatgccaggctaagttttgcatttttggtagagacagggttttgtcgtgttgcccaggctggtctcaaactcctggactcaaggcacccaccttggcctcccaaagtactgggattacaggcctgcacctctgcgcccggctggccagtctagagttttctcgattgtgaggaaacaggtaacagaatgtacctctgtccaaagtaagatacatattttatatctgtctctcaacccagtaaacacagcatatataattgaaacaaaagtttcacaaaatagtatttatcatattatgtgccatgtactatgtattattactgtctgtttcctattaaaacataagcaccataagggtaggggtatttgccagtctttgttcacttgtgtacccccagaacttagaacaatgtttggcacctaggacacaagaattttttgtgtctgtgttaagtgaaagaatgaatgactaaattgtacctaccatgacacaatggtgttaagctcttcgaagtgtttttcttatttattccacagttagacatgtattattattattattattattattaagagacagagtttcactctttcacccagactggattgaagtggcacaatctcggttcactgtaccctccaccttccgagttcaaatgattctcctgcctcagcctcccaagtagctgggattacaggcctgcaccaccacacctggctaatttttgtatttttagtaaagacagtgtttcaccatgttggccaggctaatcttgaactcctgacctcaggtaatccacccgcctcagcctcccaaagtgctaggattacaggcgtgagccaccgcgcctggcccggtagaaattatttacatgattgtcatcactgtatatcttacatatgcaatatacagcagagagacaatttctggtccttcagtttcggagaaggaaaagcaaagcagtggttatgctgtgatgttcatcctggtggtgatgggggtggggtggggtggatttctttttctaaggaggactgaggcaggaaaatagggtctggaggcaggaaacataaggcctattcacacttcagctgtaacaggaaatatcctctccatagggcgtaggccataaatgactttgtaactttacttcatcttctccctttacatagggcatacccaaagtaaccaatggaatcctctagggggtatttaaactccccaaaattctgtaaccgggcctttgagcccctatgctcgcccgttcccacactgtggagtgtactttcattttcaataaaccccttcattccttccttgctttgtttgtgcgttttcttcaattctttcttcaagatgccaagaacctggacaccttctaccagtaacaggatgacaggcaagagtcttatcaagatgctcatgaaccaaagtatacctctgacgtcttgattcttggagtccaagcctagactgctttggtaagcagcaaaggaagaaaacgcaagatagtttcctgaacaatctcctgatgcaactgtttacaggtttcatgtcagcacccaaggggagcttatggccagagactcccacagtctctgtgtgttcccagtgcttgggctcaagggaggcgcgctgcgggctgaaggctcaggtcagaaccgcaggggcttgggcggaggcggactccggtcgaaggctgtggggtgagaactctcgccccctctactcggccgccgccgggtggcacgcccacgccgcgccttccggttggtccttgaggcgacgggtgaggcacagctgagcgccaaagccacaggctggggcgctaacgcccccgctcagcgctctgcgctccagacagctgcgagctggagtaggaaggttcaggcggtggcggagagtgcgctggaggctggagggccaggaggcgggaagcttcccgcacggg

SEQ ID NO: 34120 - DNA, 2300 bp, Homo sapien
catgaaattctatcatgcatggtactatcataaaggtagccaaaatgaattaagtgtgatgttttctaaggttaaatgagcaaggtaaacaaatatccacaatttctacttaaatacttagagtacaatttttgtagctggatgacagtgtcctacattatgtaataaaaatatgctgatcaaagaatgttgaaggtatgtttgtcagtgtttccattccacccttagctttcagcaggtcctgtatgcttgcaccacaggtagggtttccctctgctctcttgactcacctatattggtggagtgctgttttttcactcatgcaaaactcctcatcgaggcagaagctaggttgtccctggtccagcctcaattttggacatgccctgaatgcctgaacctcaagttcgggctttgccttgtttcagtggggttcttgggaagaaatgaagttcctgctcctctctttttggcaaactgttttatttctatccctctctctggtggcagtcaatcttaaggtaggccatagacaggatggtttgctgctcctccttcagtgggttttttcttctgtaacagataacctttgtcacagactggagggcatgagagtttcctgcctcaatcccagaggcaaaactgcttttgctttggatagcagaagggtcagtggaggtaggagggaaagtattccttcttctttctcagggacagtctaccacgaccaaatcttttcccttaaacaaagatctggtaaacgggtatagactccccttatttcttaggcttctagggtttctaaactgttaagcttcccttggcctttaagaattcattaaaatttcaagtgtttctatcttcctttatgactgctttttcttctttctgtgctctttgaaaagtaaaatggtttgtgtgtcccatcctttttctgaagggcttattgtcctttagaatcaatttgcctagtttctttacagcagccatagctatagaaatgtagctctctgataaaaaaagtattttttcatactatccagctttgttgttgttgttattattggagtgggggttacattttatttggctttctacattctgggtagaagtaaaattcccagtaccattcatttttaatggagttgtcttttccgctctgcacccaagcagtacctattctggttttgaagcacaagaataagagcccaccactccccactgtctttcctacctcctaggattcctgtggatttttttttttttttacatttattatcatgaagcagtgtagagtcgaaatcaggcttcaggtcagtggttcttaattcttctttccctggtctaccaggccagcactattggagcagcacaaaatcttgttgaagagctaaattgtttttggcaacacaatgtctaatccataggagagaagatagtgccatctctcctggaaagtcaccctccacatatacatggcctaaagagcttatatatcagcctaagaaaagaaaaccaataagaagttgcattttcattaaaaaaagaaagccacgtttcatatcctactactcttcgcttacattctttctcttcaataaagtttttatacctgaaaaaataatcctctggttctcgtgccctcatttaaggtggaaaatgataatcttttctgttcttgagttgggatagagtttgtagggcaataatttctatgtgtaaaacacttcacttaaggacattcagtcggacattgatttctgatttttgtgcgtccaaatcttttactgtggtgaaactgtttttgttgttgttgttgttgttgttgttttaatgtcttctgctctctcctggtccttcaacaattttcaggttgtttctagtgagatttttcagttggaaagccaccataataaagtaagtctggggaaactggggacggacagttccactttttttttttttccatgcttctggtgctctttgtctgtgttagcagttatcaaaatctagttttagcttttttttttccttccgcacgtggaagaaaagaaggaaaacagctttggaagttctcaaccgtcaacccccgggaggacgtttgcctcctgccctaggagaaacgttcgctctggaggcttgggcggcaagagccccttgtggccaccgagtcctccgacgccctcgccaggctggcctttgggttggcccaggcaggacgggcagccgagagcactcgggccgcgtcgccaggagccgcccagggtgagccatgttcgtaggcgtcgcccggcactctg

SEQ ID NO: 34121 - DNA, 2300 bp, Homo sapien
aggaaaatctaccaagcaaatggaaaatggaaaaaagcaggggttgcaatcctagtttctgacaaaacagaccttaaaccaacaaagatcaaaaagacaaagaagggcattacacaatggtaaagggttcaattcaacaagaagacctaaactatcttaaatatatacacacccaacacaggagcacttagattcatcaagcaagttcttagagacttccaaagagacttagactcctacacaataatagtgggagactttaacatcccactgacagatcattaagacaggaagttaacaaagatattcaggacctgaactcagctctggatcaaatggacctgacagacattcacaaaacactctaccctaaaacaacagaatatacttatgtattagtcaattctcatgctgctataaagaactgcctgagactcagtaatttacaaaggaaagaggcttaatttactcatagttctatggggcttggagggggcctcagaaaacttacaatcatggcagaaggggaagaaaacacatccttcttcacatggcagcaggaagaagagtgagtgaaatgcggaagctccttataaaaccatctgatgtcatgagaactcagtcacagtcttgagaacagcatgaggataaccactcccataattcaattacctcgcaccaggtccctgccatgacacatggggattataggaactgcaattcaagatgagatttgcttggggatacagccaaaacatatcaacagctcattgccacaggctcttattctaaaattgaccacataatcagaagtaaaagactcctcagcaaatgcaaaataactgaaataataataaacagtctctcagaccacagtgtaatcaaattagaactcaaaactaagatagtcactcaacaccatacaattacatggaaattgaataacctgctcccaaatgacttttggataagtaagaaaattaaggtagaaatcaagaagttctttgaaactactgagaacaaatatacaacataccagaatctctgggacatagctaaggcagtgttaagagggaaatttatagcactaaaagcccacatcaaaaagttagaaagatctcaagttagcaacctaatatcacaactaaaagaactagagaaccaagaacaaacaaagtccttagctagcagaagacaagaaataccaaaactcagagctgaactgagggagattcagacacaaaaatcattcaaaagatcaatgaatccaggagctgattatttgaaaaaaataataaaatagatagattggtagatagattaataaagaagaaaagagagaggattcaaataaacacaatcagaaacaacaaggaagatatcaccactgaccccacagaaatacaaataacagagaatattacaaacacctgtatgtacataaactagaaaatctagtagaaatggatagattcctgacacatacacccttccaagactaaaccaggaagaaattgaatccctgcagcaaaccaccacagcacgtgtatacctatgtaactaatctgcatgttctgcacatgtaccccagaacttaaagtataataaaaaaaaataaattgaatccctgaacagaccaataacacgttctgaaattgaggcagtaataaatagcctgccaaccaagaaaagcctaggatcagacagattcacagctgaatttgagcagatgtacaaagaagagctggtaccattcctacagacactattcccaaaaaattgaggaggagggactcctccccaactcattctatgaggccagtatcatcctgatattaaaacctggcagagatacaacaaaaaaagaaaacttcaagccaatacccttgatgaacattgatgcaaaaatccataacaatatactggcaaaccgaatccaacagcatgtcaaaaatcttatccatcacgatcaagtaggcttcatcctagggatgcaagattggttcaacaaatgcaaatcaataaatgtgattcatcacataaagagaactaaagacacaaaccacatggttatttcaatcgatgcagaaatggcttttcataaaattcggtgtcccttcatgttaaaaactctgaataaactaggtattggaggaacctacctcaaaataataagaaccatatgtaataaacccacagctgatgtcatggtgaatgggcaaaagctggaagcattcccctggaaaaccagcacaagacaaggatgccctctctcaccactcctgttcatcatagcattg

SEQ ID NO: 34122 - DNA, 2300 bp, Homo sapien
ttggtagatcttcctccatccttttattttgagcctatgtgtgtctctgcacgtgatatgggtttcctgaatacagcacactgatgggtcttgactctttatccaatttgccagtctgtgtcttttaattggagcatttagtccatttacatttaaagttaatattgttatgtgtgaatttgatcctgtcattatgatgttagctggtgattttgctcgttagttgatgcagtttcttcctagtcttgatggtctttacattttggcatgattttgcagtggctggtaccagttgttcctttccatgtttagtgcttccttcaggagctcttttagggcaggcctggtggtgacaaaatctctcagcatttgcttgtctgtaaaggattgtatttttccttcgcttatgaagcttagtttggctggatatgaaattctgggttgaaaattcttgtctttaagaatgttgaatattggccctcactctcttctggcttgtagggtttctgccgagagaaccgctgttagtctgatgcacttccctttgagggtaacccgacctttctctctggctgcccttaacattttttccttcatttcaactttggtgaatctgacaattatgtgtcttggagttgctcttctcaaggagtaactttgtggcgttctctgtatttcctgaatctgaacgttggcctgccttgctagattggggaagttctcctggataatatcctgcagagtgttttccaacttggttccattctccccatcactttcaggtacaccaatcagacgtagatttggtcttttcacatagtcccatatttcttggaggctttgctcatttcttttattcttttttctctaaacttcccttctctcttcatttcattcatttcatcttccatcgctgataccctttcttccagttgatcgcatcggctcctgaggcttctgcattcttcacgtagttctcaagccttggttttcagctccatcagctcctttaagcacttctctgtattggttattctagttgtacattcttctaaatttttttcaaagttttcaacttctttgcctttggtttgaatgtcctcccgtagctcagagtaatttgatcgtctgaagccttcttctctcagctcgtcaaagtcattctccatccagctttgttccgttgctggtgaggaactgcgttcctttggaggaggagaggcgctctgctttctagagtttccagtttttctgttctgttttttccccatctttgtggttttatctacttttggtctttgatgatggtgatgtacaaatgggtttttggtgtggatgtcctttctgtttgttaattttccttctaacagacatgaccctcagctgcaggtctgttggaataccctgccgtgtgaggtgtcagtgtgcccctgctggggggtgcctcccagttaggctgctcaggggtcaggggtcagggacccacttgaggaggcagtctgcaggttctcagatctccagctgcgtgctgggagaaccactgctctcttcaaagctgtcagacagggacatttaagtctgtagaggttactgctttttgtttgtctgtgccctgcccccagaggtggagcctacagaggcaggcaggcctccttgagctgtggtgggctccacccagttggagcttccctgctgctttgtttacctaagcaagcctgggcaatggcgggcgcccctcccccagcctagctgccgcttgcagtttgatctcagactgctgtgctagcaatcagcgagactccgtgggtgtaggaccctccgagccaggtgtaggatataatctcgtggtgcgccgttttttaagcccatcagaaaagcgcagtattcgggtgggagtgacccgactttccaggtgccgtccatcacccctttctttgactcggaaagggaactccctgaccccttgcgcttcccgagtgaggcaatgcctcgccctgcttcgactcgcgcatggtgcgcgcacgcactgacctgcgcccactgtctggcactccctagtgagatgaacccggtacctcagatggaaatgcagaaatcaccagtcttctgcgtcgctcacgctgggagctgtagaccggagctgttcctattcggccatcttgtctcctcccgtggtaagtttttttgggggttagaatttcaacttaagagtgttggaaagacacaaacattcagaccacagaagtttcatttgtatttacaatttgtattttcaatttgacataaataaaaatgagact

SEQ ID NO: 34123 - DNA, 2300 bp, Homo sapien
aaatttgattattatatgttctacattatccagaattataaaaaaaataaaataggtggacatgttttttttttgatctgatgatttgtattttgtctttagcttacaagtcatccagaaacaagaagcataattagctttcatttttataagaccttttgttctattcatggctacaaataccaactttgcttctacccacaactttaattcccttttctttaagtgggtggtttagggacatcaaaggtaataaaatcaaagagataagtggaatatttttttcaaaggctagtacttaagggtgtgttcctgttagagaattttaatacttaatttgttttcaagtgtttgtgtaataccaaatctccttgccaactggaagagggactgtccttgaatcctgttctgaataaaatattaaaatataatcccttcttcatatatatatatatatatatattttttttttttttaaagaacttcagggaatgtgaagtattgtcatttgataggattatactttgttgctagcaaaggcaatagcatagccttcctgccaattgtttctcttcctccagaaggagttctttcctttacccacaggataaggataaagctgaaggtttttgtttctgaaagcccaaacagcaagccaaagagaaagttcaaacaaatattgtcagtcttttaaaaatgtcattgcttatgtaaattagctgacccttgactgctggtgagcctcaagcatccttgatttggttggatgttaagtcaggttttatttatatttggtatatggtatctagaaagcacttatcatgaagaatctcacttcatttaaggttagtgcttttttatttgttttggttctaggtttttgttttgttttgttttagattagcttcactatcttgtgatttccagaggctgatgtattactgtgaaacattccgatatgatttttccttattttttctttttactgttacacatcttcccatcaaattcatttgagattcttggaacgatgtttatagttactgactaaaataaaactttaatctctttctttggaagtacagtatttttatattgtgaattatacagttttaatttatgccttcagactaaaatttgcaggtttgataacatagttttaaatatattcagtcaaaatatgaatattttcaagtttaacctagttgagtcctcttataaaacgttgagctgtaacattagttcttcatggcctctcatttgtattaatgtgacgttcttgatcataacctttgaagataaaattcatttggggggcagctaagattctccctactctttctaattatgttgtaaaactccaaacttaggaaaggatatcttttggaaggcatgccttatgagtacaaaattattattttgcttatgagatgcaggatttttaaatgggcatttacatcttgtgtatcatgttagctgtagagtttttgtttgttttaaaataattctgagaacttgggcaattctgtgatgatccttgggagctcttggtaggagatatcattcctcttggatctgtagctctgtgatgcatgtatataagcatgcctttgttctcaaaagtctttttctatctgattactgtggtatccagtgctttgtctttgcctctcttcgttttttgttttgtttttttccttgcgccttagccggtcatttgtgtgatgtttacattcagcagagaggtatttagagcatttttggtgagagaaaggagtgatagaggaagtaaagagaaattcagactggggtggctgtgagggataaaggggggaagaagtaggaaaagaaaacaggagtgggtccaagggaggaagagcaagcaaagacagaacaccggctctacaggggctgcgccgtgggggttcctgaaatcttgggggctggctgtgggggagggagctcaacagaccagcattttccccaggcttgggcgcaaccttgtgaaactactaatgtattaaagaacctcagctgggatttgctgaggacaaatgctgtaacgtgttagtcatccattatctgcttctatttttgcaggttctgaatgatgactgacgcgggtttgggtgatacccctcacagcccctgtcattccggagtcataaggcacccgcgcgtctagccccagcgccagggcacgcgagcggcgctggagggaggaaagcttccgcctgcgggccggacaaaagtcccgcctgcccacggctttttgcccgccgctcgtgaccgagacgcct

SEQ ID NO: 34124 - DNA, 2300 bp, Homo sapien
ccagaggtaaattatttcacttttgaaaacattacagttcactttcacatacatggcactataagtaaactgtgtctaagaaggtatagacttaagccttagtatctatgtttggaaaaggacataatatctatcccttttttgcaattacgaggatgattaaaagtcctttgtatatggtaatgtataattattatcatatctaagtattatcatccatatcaggctgtttaaagtaacataaaaccctttcttttcccaaaatcttcacctacatgaaaaaatattttaaaatctctttcctttcattaatggtgttaatgttttatagcaatgtttataaagcttcagtgctaagaagaaaataatcagaagactcacgaattgtatccttttataacgatataacagtctaatgcagttcacaaactgctggttctggaggtagagagacagatgacaaggagaaatagaaaatgcgtaagaaagaaaactcagttcacgaaaagcatagcctttgaagtagttaaaagttttactgctaataattggtattcatatacaaaagtaacgtaaatgaaagttgttttttttttttcaaagcccatacatatgagaaaatggcttgaaactgtaatattcgagacaaatataaatatcttcttatactctgattgctaagtaaaggtatcatttacaagggggattaagtggtttctactacataaagaaagactgtcctgggacttctttggatatgctcatattttcaagaatttctcttaaaatcattacttaatgtacttaaacatgtaggaataagaaaaaatgaaagtgattgattacaacttgtagttttgcaagaggaatgtcagggtcacatttggttaagctttatacactttgtcccctccataaaagcaaataaaatcaactcattgcttaattcctttaataattttgtgttcaataaagtaaggcagttaggtattatgtcaagattaggacttaactgtttcaccaagggttaaaaacaaagccaccaatttaagcccctaaaaggttataatacccgctggttccatcttaaaatctgcaattttcaatcaacatgttaacttggatcggaattctgacatttgaattattctattttaagctccaaaaaatggacacgcacaattttatgcaacgtcaaggacctgtaaatttaaatacacttctctgtaatctggttcacttcagagtacaaattcattgaacaaaaaaatgccttcatcgccatatgcattcacatgaagccacatgggataaatgcatttccactttaaaaagtatctactttggttcagaaatgcccatttaagaaaaacctacactgagataaagtggacatttttcttttaaaactacgtgacaggattccctcttgacctcacgtttctccccgccacgtatttaaatttggggcaaaatttctgattaaatgactgatcaaagtaatggggagaattcttcaacgccggccaaaagtgcttagtctcaaacgctgtgagggagcatttcctaagctttgggcgactcgttaacggaatcttaagggcaaggtccaaccacactcagaatcagcaggaaaatgaccgtttggtaaaactcaattacacccagtaggcacctccccaggcccgaaacagcactcgccctttctgctcagctagcgcgggacatcgcaacgcccaaggccctcctatctcaaaggcgcttgcgcaaaatctccccacagactcaattaaacccttccttaggccggtcgaggcgaatggttttgaaattactgtcgggttacgcctcactttaaaaaacagtaggtatgacacagcacaccagaacgaccactcaccgaggtggtcctaaattcaaacgacagatttaagcttcctctcgtgatttatctcgcgctgccggaagcggaactacccgggtcctttagagggcagtcctttggggaaccttggaaccacggtcagaaaggttaggactgatcatttggctcttgccggaaatcgttccgcccggtgaggtttcggcgtgagacccgaggagggcggggaagaggcgtgacggagattcctgaggtgtagtagcctgaggttcccttatgtggccctatagctgttactgaaggaagtagcctacgtccacgcctacaactgaagtctcttgacaaacacctcacccctgcctccgggatgaaagggggtaacctagacctgaatgggcttgaccatctcacaactgct

SEQ ID NO: 34125 - DNA, 2300 bp, Homo sapien
atcagggttgggttttttcctccccaactttttattatgaaaaatttcaaatattcggaaaagttgaaagaacagtttgttaatcatctatatgcccaccattatactcacaattgccaacattttgccatatttgctatttatacacacagacacatacacacacatacacttgctgtaccatttgaaagtactagatatcaacacacttcaactctaagtacgttagtatgtatctgctaaaaataagaacaccttcctacataaccacaattccttttccacgtgagaaaattaatagtccataacattgtctatattgtggttgcatgggagcttttaaagaatgaggacctaatctatatattcccactacttaacttggttcatagcacttatttgggtaatcaacagatgttctaccaattgttcagtttaataccctcacaacaactactctgaaagtcatatgaatttaacatttaaaacagcaacctttgattttaaaattttctgcaaatcagtttagtcatttgctttaaataaacctgtgctgcagtaagtacagtattctgggttctgcactacttaattctgcatcacaatgctccataaagacagagatcatgtctaacttttgtcagacatataagtaggtacaccaaaattttttaaatgaatggatactttcagacactgaaaatgttagtgaagaaattgaaatcgaggaagaacaggacaggacaatagaatacagattttgaaggcagacagatctggtttttaacacagattcaaacgtttacttataacaaatgtttaatagagcaagttgcttgactgttcaaagcctccatttctaactctgtaaaatggtgataataatctaacatacctcctggaattgttgagaggaataaatgacaaactatgtaaagcactcggcacacataagactcagttaatggcaactatcgttattattttatctatctgagacaaaaaaattatctatttcatttaagaattctcaatagcaaaacaaaatcctgtcccagtgtagagcgaggattttacgtgctaaggtcagctatgcttcccacttccacagttaagccttccagcaagacaactactagccaaaggacaccaagagtcgcaatctcccaggaagtggtcaagaacctcgtgaatgagatccagggatcatcaccctggccccttcttcttcaaggcgcagaaggctgcaacgacctccaaatgactaggtgcggcagtgccctgcagcctcggtccctactatgaaaagctgcaacacatgaggcttttgttattttaaagtgggtgtggggttgacagagagagggataaagactaaggcagaaaattttttaaaaagccacctctacccacagcagtcccataactcgaggctaatcacttcagtggagccaggcacagcgtggggtagaagctcagcggttcccttttagctgatcttcaatttctggcgtctcgaacccaagaaatgaaaaagggaagccatgggggagcaggaggagaaatcaaggcgcgaaaggaccctcaaagctgtactgtcactccacgcccaggctgtcattctctccagcacaagcccctcggtggagcatgtgtttagggtctgcagagcacaggagacaaagcagaagcccagcagccgcctcaaccctggcatgatcaggttccgcatctccggttctcctccggttttgggccctcacctgccacgaatgcggtcgtcacgcgagcagttgtgagatggtcaagcccattcaggtctaggttaccccctttcatcccggaggcaggggtgaggtgtttgtcaagagacttcagttgtaggcgtggacgtaggctacttccttcagtaacagctatagggccacataagggaacctcaggctactacacctcaggaatctccgtcacgcctcttccccgccctcctcgggtctcacgccgaaacctcaccgggcggaacgatttccggcaagagccaaatgatcagtcctaacctttctgaccgtggttccaaggttccccaaaggactgccctctaaaggacccgggtagttccgcttccggcagcgcgagataaatcacgagaggaagcttaaatctgtcgtttgaatttaggaccacctcggtgagtggtcgttctggtgtgctgtgtcatacctactgttttttaaagtgaggcgtaacccgacagtaatttcaaaaccattcgcctcgaccggcctaaggaagggtttaat

SEQ ID NO: 34126 - DNA, 2300 bp, Homo sapien
actttatataaccagcacttaatactatgccttctataataagtaaatagtgtttgttggataactatattcatttcaacaaataatgaacaattcattcttttagatttacatgttagagtcagtagggagtttggtttacaggagtgttcatggaaactatggtttattgagtgtttaatatacgccaagcacttatgctatctcacttagtctttacagggttacagggtgttactatactcccttttttatagactaatagcaactagcacaagtcactagttaagcactgacagattaaaacagatgtacctgactccagaacattccccttccattatcgaaatatttgagctgtttttagatggaaagagtaaaaaaattgaaagaaaccaagagatatttgccatttgataggaaacagaactgagatcaacttatccaccaacatgaagttttacagccactggaaactttctgttgttgttgttttttttttcagtaaacatttttacatgttaaacagtacagaggaatagaacaaaaggcattgatttataaagtaaattatttctgcttttatttttaaattacaaattattttaaatgtaacgctgtattttaaagatggttaaagtgaaggctgactgggcaaattgattttaatgtctactggggagtcaccaagttatactggaattagatctttaggaatagaacttttggagttatgcttttaattctacctagcatattgtttgacttttaagaatatttgatcaagtaatttattgtactaccagtaatcaaatgaagcatttgttatgtagtttcatcttggtatataattaattttaatatgaccaggaagcaagtacatgtaaacaactatggtaaggaatattttgagatgctactgctcttatagttcttatttatttatttatttatttatttatttatttatttgagacagagtctttctctgttattcaagctggagtgtagaggcacagtcatagctccctgcagcctcaaactatttggctcaagccatcctcccaccttagcctcccaagtagctgggattacaggtgtgagccaatgagtccagctatgatagttctttaactgatactcatggacgcctggttatgtggaagagtttgaatgtcagtgaatcacataaaattcttgcagaatttagtgcacatgtactttttttttctggggaggagatccatagattttattagatttgttaaagagtttttgacttctacatgtttaagagctgctgttaaatgaaatcttgttctgactctaatctttttttgttcatttatgtatgagaccagaatatagaattgttatgttccctaaaaaaactgtttacagacaacttttacaaattgacttaatgtaatttcagattaatatttgtcagtggcttttaaagctgcattccatttgtctgttcttttccattccattcagatatttcataactatgtgctaagagatttagctttaatataattttgttataatttgagtaattttctcttaattagtttagctattttgggatgaggaatttaatgtgtagtctttttgttaattcatatgtttgtcaaattgctaagatgtatattactgaagatcagttttagtttcttaatttttttgcttttattataagtaattttcttatgggagaaaatgtattttcattttgacaatatacatcaagttattgggctgattttacaagtgtcattaaaaattattttttacatgaatgtttttggagtgcactctccaaaattagttttttcattgcattttaggtaagaagattgctgtatcaactcaagaaagcagtaacttcactgtctttgtattttgaattgcaacaacaactttgatatcaacaatgaagcaatgatatctaagaacaaaagagtatttgccaacagtcatcataatatcaagtgattgtataagcagaaacaagctgtcacagacctgtgcgtcagctaatatatggagaatgctttcttctgatactatttacttagaggcagttttaatataaatcatttcaattatatctacatcaaataaaataaaaatgagtgaagcccccagattcttcgttggaccagaagatacagaaataaatcctggaaattatcgacatttcttccaccatgcagatgaagacgatgaggaggaagatgattctgtaagttgtttgtttttcctttggcgagagaagaccaatacagtatagg

SEQ ID NO: 34127 - DNA, 2300 bp, Homo sapien
caatcaaagtaatggctaccaagaagtggaattggtccagtcaaagcagaagcagactggtcaagagcagaggtcatggcaatagttttttgggacgctcaaggcattttgcttgctgactttctggagtgctaaaaagcaataacatctgcttattatgagattgttttgagagagttagccaaagcattagtagaaaacacccacaaaatcttcactacagagtcctccatcatgacaatgctcctgcttattcctctcagacaagggcagttttgcaagagtttcagtgggagatcattaggaatctaccttgtcgtcctgatgtggctccttctgacttctgtttgtttcctaatcttaaaaaaatatttaaggggcactcatttttcttcagttaataatgtaaaaagtctgcattgacgtgggtaaattcccaggatcctccatattttaggaatagactaaatggctggtatcatcgcttacaaaagtgtcttgaccctgacagaccttaggttgagaaataaagttttttacttttatcttttaattcaatttttccacatactttctggaagttccccagtattttgtatatgtattatatgctctagtcttacaacagagggaactagagaaaagaaaatattaagaaaattctagagtgagctagagaaaagaaaatgttattaagaaaattataaggaagagaatatatttactatgccttaaggggaaatagatcatcttagaggtcttcatctttattttcacattgagtaggctgaaaagaaagaggaagaggaggggttagtcatgctgtctcaagggtggaagaggtgaaggaggtggaaggggaggcaggagaaacagtacattttggtgtaacttttagggaaaaaccctgcatatatgtggtcctttgcagttcaaacctgtggtgttcaagggtcaactgtattttgtggtcattttaatttctgctatggaattattctccagctactggaaaattttgtatatatatattgttctcttagacaattaggcataaccagatataaaatatatactttactcatttgtagcttactccatctggaagcatttctcttatcaaatcaatgcatttaattaaaaaccctgtgaagacctgtgataaagtttattccttaattcagagtttgacttctcaaatcagacatcgaatggaagatcctaaatcatcaggtaaatatgtttttcttagagcatagaacaaataaaagttactattcaattaagcatttaatatatgatgcaccaatcttgttgtaagaaatcaagcctctcttgagagctatgtatagtatgagttaatgtatatcaagcaaaaaaataatggctaagttatagtggtttttatccatgacagcatgaaagagaaaataaaatattctcatttgattatcttattatgcagcattgctatatagttaagcagtgagtagacagggtaataagaaggagcaagcaacaggaaagtgatctaggctctggccccaaagcttacttggttagtaactcagacaactttggcatcttgggtttttttctggcagaaaatggatcatttggactatttttaatgtctaatgttcctctgctagtctgcctattcacttagttatgtgagtctaataagaataacagtattgaaaattgaaaatatatgagcttaaaagagctttgttaaaattgttgctctttttcttcttattgttattaaagtctataatatatggaaaaagtctaagcctagttcctaaccctttaagtctaaaagatatatggttgctagtagcgtatgcctaaagtaactctctaacttcatacagttgtatttttgacactttaaaaagtttctaattattaacatattaatatatattctaaatcagatttttaagttgcataaactaaaaatgttatgttgttttagatattcagctttaccatagtgaaacattggagcttatgctacgtagatggtccaagttagagaaagactttaaaacaaagaatggaagatatgatattagtaaaatccctgacatatatgactgtataaaatatgatgtccagcataatggttccttgaaattagaaaacacaatggaattatataggctttcgaaggcattagcagatattgttatccctcaggtaagtcattcttaagaatcaatttcttataatattgaaaaaatacttttaaaatgtctgttggtggataaaaaggtagttggttttcatgt

SEQ ID NO: 34128 - DNA, 2300 bp, Homo sapien
tggttgtttgctagccgacatcatttacatcaacgtagtataatatttcccaggcagctgacattttaaagtcattttaaagggattttctggaaaggatgccttgaggcaaagacataacttacacaaggagtgtgtgagatggagcttctgagtccccaaattcagaaggcctttcagggctctgggtctattctacatttgggcctaaccctttatatgaatgccatttttctttataggttgaagagatcttcctaaaacactaaaaagctctgggaagggattctgcattaacttgcacctcttatatgcccctcagccacggcacttgcaacccacatccaatccgagtgaagacaatacccagtcagtatctctaggtggcataaacatatccttgatggagccacacataaagctattatcaaccattactgcatggtgaattggtttattaggtgttctttgtgacactcaagaactgacttaggttctgattgggtgaagattcagggttaggatgggagcatagaacaccacccagggagggaggcaatttggagacaatgccctcaagagagctagccttgagcctaataaactaagaggggaactttattgcttttggccaaagcacactgccaaactctcagcgcaaagggcaagtacaagacattcttctgaaaaagttataagatttcagacaggaagaaatgaaattaagtctcttaatataaaatatacaatgttttggaggtggttttatgagaatgatcatcaggacaatacactattgtgtcaaacagattataatcggaaataattctcggtgtattctcctaatgtactgatgcaaaaaaagtttcttcatttatttattcatattatgttgtgctagcttctatatttttgaaattacatgcaaatctatgtcgggaaaaaaagtaactgatgttttgtaaaattgtttagggaacattccttaaaacttattcttccctctaccttcctttacttattttagggcacataagcagtagcataaaatggcttatagctgagcggcctccgggagtggttctgttggactagaggtgtttatatattttttgcctttatattatcaggaacatatgtagattctggaacaagtgtgaatcaagactcgtttaaacttatattaatctactccagatttatgtcttttatgttaagataaagcattttgtcttttaaaaaataaaactctcttgattggacactggtaccgaaatttataacacttataaacaattttggggttcaccgactgcgtacacattcagccttagccactcagtaggcatatgacctaaactttctgcatttttaaaatgtggatcataattggttacttcctcacagaatggttattgagagatgtaaatttggatatgcatgccagtaaatattcttattgctgagcttaaccagttcggcagaaatgtacatgaattgagagaagcaaatcttcatcaaagaaaataatttattacaataatagacaagatcaacatttgtgcaaattaaaaaatagttaatccaatcagaatctgaatttgaactcccccccccgccccaccccgccaccttcactgggtattacgagttttcgtagactgatcctataatttttaatttcatggccttctagttttctgtacttttgcttagtgctgagccctttaagcagagactcacaagtgacaaatatcagcacaccacttaactgaggaagccggagtgttcccaggtccgcaagttggagctctttagttggagtgctgggtttagactagagagcgggtgttgcgactcctcctccccaccaccagtcaacaaccccgcccacccccgccaacttcttctggcctcttagcgcctttctgcagccagccggcccgcccttcctccgggtgtctgagagctgggcgcaggaggcgggctcagcgctgacgggctgcgcctctgcagccagagggaggaggcgggaaggcgggcggaggaggaggcggaggaggaggcggaggagggggcggggactaagcagggcggtagctggcgccgagcgcggtgggagaggagagggtacccggctggctcggctggcggcctctgcctggatctcggcgccgcagtcctgcgcctctcccgcccctgtctcccgctccgcagccccgggcacggcggaggcagcggagccctgggccatcggtaggttgcacggggacgacggctccgtctgtaaccttttgtgc

SEQ ID NO: 34129 - DNA, 2300 bp, Homo sapien
ctgaaaaagttataagatttcagacaggaagaaatgaaattaagtctcttaatataaaatatacaatgttttggaggtggttttatgagaatgatcatcaggacaatacactattgtgtcaaacagattataatcggaaataattctcggtgtattctcctaatgtactgatgcaaaaaaagtttcttcatttatttattcatattatgttgtgctagcttctatatttttgaaattacatgcaaatctatgtcgggaaaaaaagtaactgatgttttgtaaaattgtttagggaacattccttaaaacttattcttccctctaccttcctttacttattttagggcacataagcagtagcataaaatggcttatagctgagcggcctccgggagtggttctgttggactagaggtgtttatatattttttgcctttatattatcaggaacatatgtagattctggaacaagtgtgaatcaagactcgtttaaacttatattaatctactccagatttatgtcttttatgttaagataaagcattttgtcttttaaaaaataaaactctcttgattggacactggtaccgaaatttataacacttataaacaattttggggttcaccgactgcgtacacattcagccttagccactcagtaggcatatgacctaaactttctgcatttttaaaatgtggatcataattggttacttcctcacagaatggttattgagagatgtaaatttggatatgcatgccagtaaatattcttattgctgagcttaaccagttcggcagaaatgtacatgaattgagagaagcaaatcttcatcaaagaaaataatttattacaataatagacaagatcaacatttgtgcaaattaaaaaatagttaatccaatcagaatctgaatttgaactcccccccccgccccaccccgccaccttcactgggtattacgagttttcgtagactgatcctataatttttaatttcatggccttctagttttctgtacttttgcttagtgctgagccctttaagcagagactcacaagtgacaaatatcagcacaccacttaactgaggaagccggagtgttcccaggtccgcaagttggagctctttagttggagtgctgggtttagactagagagcgggtgttgcgactcctcctccccaccaccagtcaacaaccccgcccacccccgccaacttcttctggcctcttagcgcctttctgcagccagccggcccgcccttcctccgggtgtctgagagctgggcgcaggaggcgggctcagcgctgacgggctgcgcctctgcagccagagggaggaggcgggaaggcgggcggaggaggaggcggaggaggaggcggaggagggggcggggactaagcagggcggtagctggcgccgagcgcggtgggagaggagagggtacccggctggctcggctggcggcctctgcctggatctcggcgccgcagtcctgcgcctctcccgcccctgtctcccgctccgcagccccgggcacggcggaggcagcggagccctgggccatcggtaggttgcacggggacgacggctccgtctgtaaccttttgtgctgcagaaaaggtggtggttatggggggcttgggggagtgggtttgccccaggctccgatccccagtgccagccctaatcgcggcgccgccccttcctctccgcctcgtgtctgggccgggcgcacgatgcccgcggtgctggggaaacccggccggaccagcttctgcgatgggcggcggggcggccccagcgtcccttggccttggtggaccggttcccaggcacccgaaggggactggggtctggtaaactgggtggggcccgcgcggggtgcggggagcttgcggttccctggcacaggggtggggccgcagacgccgtgagtgtgcagcgcgtgtgagtgtgcgggggcgtgcgcccccgtgtgcgcgcgtcgtgcgctcgctggggaggtgcggggactcggcgacccggagcgcctctcccgcggtgccgcggtgcggaagtcggggcgcgttggcgcgcacgctcgctcgctccctcccttggccgctgttcccgcaccgcggggcagcgggcctggaggcccctttgagaagtagctttccccggccggcggcacctttggctgcgtgcccggccgcgctcagggtgcgactgcccgggtcagatagcacctcagggcgagccccggcggtctgatctcgccgaccctcctcgtcctggttgcaacccgcgtgcg

SEQ ID NO: 34130 - DNA, 2300 bp, Homo sapien
tgaattggatatgggatatataataatgaaggaaaagattaagaatgactgctaggctagagactttaataatttggtatatagtgataccatttctcaataatataggatgatggttagagcaaggaaagcaggacagacttggattaaaaaaatcaagagtttacttttgggcatactaagttttagaaatggacattacaatcagatgtctgaactggaaatacccatatggcagtcatcaacacacagatacttaaatcccaaaaaactactgagattacttggagagttgagaggaagcaagaaaaactcagaataagacctgaatccccctaaatttaaaggtaagctgcaagcaggagagccatcaaaggagttggaaacagtgtggccatgaggtaggaagagagcaagaggcctcagggaaaccaagacagcagagtatttccaggagggagtggtcaaatgtattgaatgctgttatgaacttgagtaagatgaaggcaaagtggtttttttgttttgttttgttttttaaagcatctttgtctttggtaatatgaagctattgatgaacttgacaagagaaacgtcagtggagtgaaacgaacagaaaccagattatggtagactgatgagttactgggaagttaggaataggtcacttgtcagtgaccaccttcccttaggtgatagaggtccttccagagactgcttaaatatctcctcctcaaagtctggtgtggtatgttttattctccacacctgtggagaaatcatcaaacttttttaagaaaatttattttctttagacatatatatatatatatatatatatcattttaagatcaaaaagatctgataaatgagctagttgcttgcttttttcccttgtaggaaaactgaggccttttaactcacttgctctataagtttacacagttacttaacttttctgtgactcagtttactcctaaagaaaatgataataatagtatctatcttctttagggttgctctaaacattaaataatctatataaaattccttgcatggtgcttggcacattgtaagtactcaataaatgttagcttttcttattgtgatgattctgaaataatgtaaataccctagtgtaagttacatattacaaggttacgtagcaggcaaaaacgtaatgttgtctattcattacaactgttttatttatttttcccagtttaaacgatgttagaatttttgttattattttgttcatttcaaaaatctgtagaccaaataatctattttagggagggtaactttgtcaagcatttaacatatagcatttctagtcttattgcctcaactgtaatatttctggccaggccatattaactttttttgaactaccagagtaaaacctatagctaaagtgtatatattttaagatttatcctattaggcattttttggtaaacaaagttaaccatgaatgtagtaaatgcagtgtgttttatactgtgtacatgcagtctccagttgaaaacaggttgtgttccacatggcttggaccatcaatggcatagtcaccaagagagtggtgatagcctcctacagtttcctagtaatatttcctttagagtacaaatctcacttaagaactgactttgtggtatatttttattaaaatcactattgtaaaatcactgtttgtaaacttactctacactagaatcatgaataccccaaattttaaaatcacctacagtaaaagcctgatctaatataggatgtaagatagatgtcagtatgtctatcttatatgaaagttatattttattcaaacaaaaaaatctaatttttgtaatccagaaaattaaatcttttactttaaaagaagaatacgcattataaaaatagaaatactaaaacccctgatcacacagctattcttattgtagcttgagaacattttacttatatattgattttaatttcttacagaattaaaatttttgtgcttttcttttttttgaaggggttgtagctcaagcaagatctgttcttgcctggcacagtcgatacaagttttgcccaacctgtggaaatgcaactaaaattgaagaaggtggctataagagattatgtttaaaagaagactgtcctagtctcaatggcgtccataatacctcatacccaagagttggtaagccctttattttatatctcagccacctggatcttggggaataagatattttggaaagagaaaatttgtgaggagctaaagagttttcctttttatggaaaacatg

SEQ ID NO: 34131 - DNA, 2300 bp, Homo sapien
aataatataattatatttatcataattatatatcaatgtcatatatttatcataaacatttaccatatttttataatatttatattattatttatcatacatgttatcaggttgacaacatctgaacccaatgatcaagtataacattaaaaaaagagagacaaccagaagttgtaagcctcttgaagtaattcaatacaaagtaaactgtaacacctataaagtcttttgtgaaaaaaaatcaaactttaatctgagtaattctataaagttaactaccagtttgcaagaaatacagggggaaaggacagcacaggaataaaatctgcaaaattcagaatgtggaaaattctacagaacaaatgatcattactctttagtaaataaactgccagaaaaaaaggggaagaggaaggaatccatagatttttaaaaatcaaatgtgatgtggagactttgttcagatgaatcaactgaaaaacatataaaacttctgaggcaagtgagtaaatttgatattgaatgtttcttttatgttattacagaattattgttaaatttgtaatactagggatattgaagttgtgttgtttttcaaagcccttatattttagatataatacatatttccaaaaagtttactcttaaatatttgtcatcaaaacaatatggggtctggaatttacttcaaaacaatcctaacaactgggagaactatatattaatagttgttgactctggatcattaatacacgagggttcactatactaatctaacatatgtttgaatgcaaagattgggtactccaagtgaagtaactaatcctttctgaccacctgtctggtcactgaaatcattaaaggctgaaaacaactagtcacataaagaagcatagggcggccgggtgcagtggctcgcgcctgtaatcccagcactttgggaggccaaggcggatggatcacctgaggtcaggagttccagaccagcctggccaacatggcaaaaacctgtctctactaaaaatacaaaaattagctgggcctggtggcgcacacctgtaatcccagctactcgggagactgaggcaggagaatcacttgaaaccccgggaggcggaggttgcagtgagccaagatcgcactactgcactccagcctgggtgacagagtgagaacccatctaaaaaaaagaaaaaaaaaaaaaaaacagcagcacagggcgttagaagccctcatgatcaatgtcaactggtgcatacagcttcacagtgagaaggagcttccaagggtaaaatctgggtgggaaacagtgatcaattgtaagagacccctgtagctgttgctgattaccaaggagagagtttagtaaaggaaaaagccctggtctggaagttagaagaccgccaacacctagttttgtaatctcggactcataacttctgtaggttttggagcataaaagcacaggaactgaaataaaaaataacgacaataattttgttgtgggtgcccactctgcacttcacaacatcctaagagctttggatacattatcctatttacacctcacaacccaaggaggtgttttgcgcgcttgatacatactttttaaaggactactgaataagttaggcgtcagtatatgataccagttttcccatggggtgaatgattaaggtgttacagaggccgaatatctcgtttaagagtgacttggtctagtcaatagtccaggattatttaacaggaaagaatgctttgagcactcaattgcattggactgtattggagagagggctaggagttgggtgggagacgctggaaaatttaaaatcgtttccttaggcctacagttttccgatcgcctgcaccacgttctatctacacatcacagtctcaggagaaggattttcagcccttcattcagctccaatcctttagaccgcgatctctcccgcgccggctcccaaacacttccacccccaatctccaccccttctcccttgcgcacaacctgtgggcttcaaactacatctcccataaaaccgcgggggcccccctcccgccccccccccacccccggatctccaccggaagtcgggaagactgcatccggctccaggaaaagcgagtgggatatcccaatctttggactgcatcctggttgcctctactgtggtcacctttgggttagtagaagcagtggggagttagtcgtctcattgcctcctctgggggcggtgaccacttccctgggctctttggttcccgcgctgccctgcgtggccctgctgagttgt

SEQ ID NO: 34132 - DNA, 2300 bp, Homo sapien
caaaaggaagatcctcacgctaattgacaacaaaaatatcaaagaaatgctaagctggagtgattatatgatacacaggtactgctcaattccttcatctagaagaaagagcacattacttattttaatggtggtgacttgcagaaatgttaataacccaaaagaagaaggttagttagaggaggcagaagctacaccaaatgattctgcattctgggaaaggaaaaattcttacttaagtaatgttttggggaattgttaggagaatcataataaatgtgctgaaaagctcccaggtctgaggacaaagtgctctagtagcaactttttcatataacaaagatacagtagcttaatgggcattccatcatcatagcacatgtatctatcataaaactgcaatgaaaaatatttgttcttcaggcagatctccagtttgtgactgcttgctgctatccaccttttttttttttcttttctttctttcttttttttttttttgtgagacaggatctcgctctgtcacccaggttggagtgcagtggcgtgatctcggctcactgcaacctctgcctcccaggttcaagcgattctcctatctcagactcccgagtagctgggactacagacgcgcaccaccacgcctggctaatttttgtatttttagtagaaaccgggctacaccacgttggccagactggtctcaaactcctgacctcaggtgatccacccgcctcggcctcccaaagtgctgggattacaggcgtgagcctctgtgccccgcctatccatcttttatggaaagaagaaatagtatttatataggatcacctgatgtactgtacattctctcctttatactagtctccaatacaggacaatcatccacgatagtacaggaaaaaaacattagaatttctattttcatttttctacctcatcctatttatgttttcgtgcatgatttataatgtacaaaataattagtagagtgatgtttgcataaaaatatctcaactttaatatacataaagttgagatgagggcccaaccttaggcattacgttgttactgaaagaggtgtaatatcaaaaaagcttgaaatcatctaccctaatactctaaaatctaactacagtttaaagcagtccattggttacttgagcagccgaacaccccatttttctgttaataattttggtctaaaataatgtcatttcctacagtgaagtacactatatgtatggcattacattctctctccatctgtgctaaatatgcctcaattttctttcaatgagctaactctaacacaatagatatagaattagtggtgctaccttcaaattctttcgccctctcctggctaaagaacgggcacaagagcactactgaacgatcagacttcctctcccttgcaactgtaagtcctgagcagaaaaaacaaagcctgaagatggctgcagctgattcattcagaaggtaatggcctgaagagcttacccagtagctcattcatttgatggatttgctctgacacatattgatgtcagtggctgctgccatcatgccggctacggcagggaagcgtggctggggcaccacactccatggagccagcgggagccctgccccttctgaagaaagctccccgtgccgctacagcggcgcaaactgcccctgcagatccaggcctctggctcaacgacgcaagcaggagaccctgggagggactacagttgtccaaactgcagctatggatccaagcctctctgtgctcctgggggagccaggaacaggcaggatcagccctccagggtgcagctgcagcctcccaacctgaggctacccacctgggcctcccgctccatgaaacaggcaggagctggagaaaagtgggagctcttccccttccaagttgctgggtgcagctgctgctgccgccctcccaggcgcaggagccgggcgtctctgcagcctgcaccctcgggtccccaggaaggaccaacctccccattcccagcccctaaaggtttaggggtgtctgctcccactgcctggccactttctgctcctggcacctgctccaatcagatggaggggaggaacggccaagccctggggccatgaatggcagcaggaggcatggagggcctgaagactgagggccgggctgccagtcccggaccagagtggggaatacttctgcctcttccgggcctgccccttcctgcccatgggccaatccacaggcacttcctcccttctgaggcctgtaaaagtcctgggcttagtcagac

SEQ ID NO: 34133 - DNA, 2300 bp, Homo sapien
ttggctatgcacagattaatttttctctctctctattctctcaaactgctgtatttttcaggaaacccactttctttttctaccctcactgtcctctcacaggacttagatgaaggcaacatcatatctttaagtccctgtgacctgctggatgacaattaaaggacttcagaatcttcagtgcaaaacacctccaagaaaatatttgtatttttctagccaacattgtaaattattagagaatgactttgattaattagtttaacagaatatgtgtctctttacctgtcttatgaaagaccctgtctccatgtctagtaagcgaacagaaagaaaaaaaaaaaaaaaggatgacagggaaataaaatcttgtattgcctacatacatattctctttgtgaccctcaaagttaattatttcactctaaatgcatttgcaaaaccaatttatctgagaaaccttgataaaagaccttccgaatgatatgttctgatgactgactctaaactttctacccctactcacagtattgataattttgatggatcaagatgtgcgagatagaggtcaaatttaggtggcttcaaacctataaaaagaagcctaatttcattttcaagtagatggaatggcctgagtggccttaaaagtcattacagttttatatgaggcttggcaaattcccagtcctctgataggaactcatacataggcatagagtacaaaggccctgggcaggttgagatgatctcagtatttatgttttggcaccagcagtccatgaaaaataaatgacttatcttagcaggtccttcatatttttaggaagtcattttacttcagctatatttcagattaagagctgttaagatctttagtatacttaagatgcctgtattcaggataatttctacatcattaattcactgtctgcctcttttgttttaaattactgtatttgtgggtattgatgtttattttattaggaaattaaaaacagttttcctataaatgattctctgagcagggctactcaatattctttcttgaacagaatcaatcacatctggtagtttttatgaacattttcccccagttttacaaagggtctagacatacctaaaccaatgattttgtcatgtttttgcttgttcatttcatttttatatggtcacttcgaattgtaaagctatgcctctccacatccactggctattttgcttttcattgtttgtcttcctctctgacacgctatatttacctattcacattaaattgttttcattaacttttattccctacaaacataaattgctactcttcccatcacaaagatccacataaaacctaaaatatgagatggtttattgcctgttttgaggcttccccaattattcacaccactgaaatatccattcgagttgtgaatgatatttagtgaggaactactaaaattaaaatacttgctaataattttgtggacagagaggaaagcacacacatgtgtgcacaaaaatgaatgcctgtctcactctcctcaacaggcgtgcaatctagtgggatggataaaattaacatacaaagtatgaggtgagaaatttcttaaaaatgaatctgacagaatctgctagaccctgctattcaaagtatggtctcccaagcaatagtattgctatcctttggtgacttgttagaaatgaagaaccttgggactgatgtgccagatgtagcaattcagaaggtgcatttcaaacaatattcatagttatgtcctgtgcacgttaatgtttgagaagctttgtgctggcgctatcaggttgcggggggaaatgaaatgtttatgtgtggaaatgaaagtcctatagagttagagatatagagattgcaggaacataatatcagtcatgtcaattgtacaaagaaaggtgctgtcttatggatagcttacaccatttgggtggaatatgagaaggttatatggaatgaaaccataataataagtttgtctttgatgttttgtagagtcagaaaatgacatgtatggttgcagaaggctttggctactgttgagttttttatttattttatttatttatttttttcaggtagttgggagccagggaaggagtgacactatccctagatgtagtgatatggtaagagcttaataaccaataaatttggaaatctagagttacaaacagatatattcagaaatattagtcagatatattctttacttgtagccttaataattctatctcagactaatgatcatggagatttatatttatgtttg

SEQ ID NO: 34134 - DNA, 2300 bp, Homo sapien
ggaacgcgcactccctgaggctccgttccagcccatccgtcacctgcggggcaccagagacagatgccggctctccagccaaagggtgggcacaggttcctttaaaatcgaaagaccctactcccaggtaaaaagatgtcaaatcattccttagcccagacggaattcagcacccaaagggttacacgtggctgccgggctccggcgcaggagagggcgcctcggcactcccagtaattcaattagtcaggtttctagaaggtggggcgggggagggggtaggaggcgtggggaagggagattaggaaaacgcctctttctcgtggagcaaaccaatccggttggagtaaagagagaggaaaaacccccaatctgtaagcaaacagtaggccgttccctgactggttgctccagctatccccccaccgcgctcccacccttcccaagtaaactgcttggaaggaggaaaaaaaaaaaaaaaaaaaaaaagacagtccacatgacccgggccgcagcggcagcagcgctggctgggcgcgggctggcggcacctccccctgcttcgtccggagctcacacccgcgctcgcgccgcccgcccgtcccgcgtcccgcgcaacacgcccgggcggagccccatccccccgcccacgtccacgttcacgcgtgcggcctcgcgctctgctgaggctgctgccactgggtcgccgccgctgtcggctttccacgcaagtcattaacgagggggcgtgcccgaggagattttttttcccataaagcattttttctctcgctctctttttttccccctcttttgcaaaactgacttttacaaaaccctttccacttcttgccagtcgtttcaattcctcctgggctgctcgtgctgctgctgctgcactcaagtttatttattttcccgcctgggtaggggttttaggattcggtttgtggttttcacctctgttgctgctgtgcctaaggagggaaagaggagcagctgcgggaggatcgggaaggttttctgatgtagtcatcggggaggtgccactcgctcgtgcgctttttttttttcctcttttcccatttcaaactgattgatgcatctctacaagttgctaggcttggacccgctggagtcgcagggacacttctgagagctcaccccgggctcttggcaccgcgtgtgggggctcagtctccctctcggaaggcgatcggagactgacatcggcccatccaggagttggagggatccatttgaaagtgattgtttcccctcccgctctccagccgaacagttgggttggcgtcgtcttgcaggtttaggaatcccagctctgccaggccggctggtcttaacctctgctcttcattcactgtggtgcacccacacccagccaaggaaagcacgcgcgagaaatccccgaggctcggccagcccccggggtgccctcttccgctaccgccgcgttccgactctgctgggggacctgccggaagacgcgaagagccaaacttttctttgaggttttcgaggcaagaccgcttcgaaagccggcgcagctgccgcttaaccagttccaggacaccgacaaggctgggttgcggctccggatccccacccttctcggcgcaccgcccggtaccgcagcacttacgactcctctgagatttctgggggtcgccccgctaaggcacagaggaggctgaggaaaggggttctcagactcccgggaccacaagcgcgaagccctctatcagcacgtcgcccttctcctgcagtttcccaccggccgccaaagtaacttggagcgaagcgtggcgcagtgcgagggccccgggcggtggcggagccgtgcgtagcctgctgcgccgacgctgagccgggcccggcgggccggtgtatgtctccccgcggctgcggcgcgcaactcccggtgactgtgcagcgcgcgccgccgcctgccccgacccgcgctgcagccgcccggcccggcgcgcacctccctctcccggggtgaccggcctgccgccgccgcccgagacacagcttggcacctcttcccccgccctcgccgccgccaccacacacacgcacgcttctctccatcttgtgattcctttttcctcctgaaccctccagtgggggtgcgagtttgtctttatcaccccccatcccaccgccttcttttcttctcgctctcctacccctccccagcttggtgggcgcctctttcctttctcgcccactttcatttttatttattcatatttatttggcgcccgctctctctctgt

SEQ ID NO: 34135 - DNA, 2300 bp, Homo sapien
ctcttatatttctcccttttttatctgaaagacactgctcactcttaatcatgtgttgtctcttggccactgtattgcctcctgagtatgctaaatgattttataatacgtattcataattgtctacacctcttgaacttttctctgtgaatagcggggaaacctgatgctcatgaccctttatcagtttttaggacagtctttatccagtgattgatcatcttattttatataaatgttggttcttgttgcttatgtactaacatttgacttggcttgtacagtgaagtcaatttgtgtcatttgctatttgtagtcatctgtatgtctttaatgttcatatgtgcttatagcatatttaatgtaaaatcaagtacaaggaagataaataggatattgcacttgtttagagcataatcaaatatgaatcaggcattttgaactattcaaatagagcatgagaacaaactgcaattaatgatttttggtggccacacaaaatattggatgtgttagtttttttggtaggcaatggaagaggacagtgagatatgtatatttgatttgacagaaagccgtcagattattttttaatgatttaggatattatagtctagggcctttatttgtactcttagcgtgtaaaaatagtttttaccatataaaatgttgttattgttggtaatgtttcgtttctgtttttattcttttttaaatgaatttatttaaatattatgttataaccaaatgacgtggaattaggctttaaaatttccctcacaacctgtatcaatcataattgcattgtgttgctgttttaagtttcctgttttagacatggaaaagtttatccatttttttatagatcttttttgaataggggaagaaaaataatgtttattcggttattctgaggaaatttgaaatgtttatcattccattaaaacaaaattccataaaaaatttttaaaaaacatatatgtcttctctataactaatttaaccttcaataatgaattatgtgaagtaaaattgtataaaatttcctgacattttatgaagattcctacaaataagccagacagcaaataaaatataggaaagacagagatggatactgagtaattttttgatagattatgcacacaggtatcaaattacttgatccttacttcctagaaaaggttaatgactctttttgcttttacccttttacttaactgttatttataaagattaaaagagggactgcattgaagggtgcatttgcctgtgtgtctgtatgactacacaaatttttctgatattataggaaactgagccacaaaatggataatattgttaatcattacttttaaagttcattcgaatctgtatacaacttccgctaggcctattagagcagagtgcaccattaaaaaaaaatgaaacttaaatgaaaccagaaaagacagtcttacatatctgtatctatattgttaaaatggcctaaacctttacaacaaattacttacaatattaagaataagatactttaaagtaaaagattttaaagttatgtgtgtatattttctttcatctttaatctgtaaaattatagctttttagaatatatttgatattatgttgaataaaattttgcaaaaaatactatttcagtgctacctaattccatcattaataattgaaccatgagcatataaccatctacctataataacgatctatctatattctacagttctattataataaattattattatataaataatatatattcattaaatagcatatgtttactagtcttttattaccaaatgtaacattactcttatgggaatatttctttttaagctgtttggttttaaaagatgcactagtcataaatgtatttaaataaagtcatttaggtatgacagcacttgactttaaagcagggaatataatacctttcctgaaacaccattaaagaagctgtggcattcaccaaatactgacctcttcctattatattcaaacccctgctaatttaacttgaaacgcattagtataaccactttttgtatgtttcaggtgtgtggaggtcattgcaaaggaaggacaaaacctgaaagagctatatttggtgtcctgtaaaatcacagattatggtaggtaatgaaccattttcctaatcctttctaagaataaaaagttacaaaatcattgaaagttcttaaaaagaaatcaagaactatatcatagagactgtctatcgtcacttatgctcattgtgaccataccaaaaaataaaaata

SEQ ID NO: 34136 - DNA, 2300 bp, Homo sapien
tgaaaggatccctgaatgtgacagacttaagattggtcatttctgacaaaaaggccagaattaacaattgtttgacagcatgtttgagagcaggctgggtggggctggccactatagtgggaatagcaatgtaggttccaacagtggtcttctccaagccactgggccttgaatattgcaatacttcttcctcagtcagctctctcaagttatccttagcagatttttttttaaacacctgccacttctcttccacccttcagcaggtaaccaagctctatctgaagcaaaacagaaaccaacagaaaggaactctttcaccttcctgctagaaacatccacctctctgtatccgtcctttatctacctttcctcattctctgtaatcacaatgaagaaagtatccttcctaaagcactctccattccaccttctcctcttatttctctcactagagtggctcattcccatggtatttgcctcctctaatttttcgcttgtgaaagctaacctctccgcaccaggtaccgctctagcagctgccctagctctttagcctcgatatagtcaaaccttctaaaggactgcctgcatagctgtttcctctttctcatctggatcaccaacgtttgtcatatagcaggcactgcaccgtcatgtttaaaatatacaacagacggctagacaggattccgagggtgtagacaataaagtgatctacagtttgtagcctgggtgttgaatggctcactgggtggggaagctgttatctttctgctgtgcacaggtaatttgatatatgctttcattctgaaataaagttgtggaaaggcagtagtacgcaacaattaagaaaacacaagtgggtaaacagtggtgccgcacaaccaatcaacccctcacatgacttcggtgcgcatcacccaggggccgcatctgccactctgcccgaagcgcggtcagcgcccacactggcccttccggcggaacccgcctcgcggcttcgaagtggcctcggtttccgagtcaggggtggtgacaggggtggaaggtgaggggaagagcccagcggctcccggccaatggcagctcttgaacttacacctcgagacgtcagcgcggctgtgtaaacggatgtcacacagctggctcggaagtgtctcctcccgcctcagaaacgcggcgcacgcccagcagcttcggaaaaaccttaggcggtgggagggaggggcgtgcgccgcaccccgcaagcccagagctccgtgccctagccggccggcttcttcccgtagtgccggtgtgacggccgtcccgggtgagcagccgggtgccggcgtccccgccacgagcgcgccaccgcaactggctccgccccctgccggaacgggccgcgcgctcctgcggctccgagcagagtcgcgggtgcgcgcgccggcggcggatccgcagttaaaatggtccgagcgggacccggcctttccccggccgctccgctgactgactgagccggctggccgggcccggactggtcgcctagccggcaggctcgctcgctccctccctcgcgtccccaaagctcgcgcccatcgttctcccggcttccctgggcaaagcatgtagcccccgtcgggcactccggcggcccgcagctgacgcccaccccccaccgtcgcgtgtgtgcccgtgtgtgcgtgtgtgtgcgcaggaagggcgacccctccgggggccgagccagcgagcggcctgccccgctgccgggagcccgcctctctgggtctccctccctcccgtcccggtccccctcctcggggccttctatatgggccaccttctctcgaaggagccgcgtaaccgcccgagccagaagaggcctcgctgttgcagttggtgccgccgccggcgccctctcctcaggctgccccgccggaccccagccaaggtgccccctcagccggcggcgccccggagccgggactgcttcttccgcgggccctgcatgctctgcttcatcgtgcacagtcccggcgcgcccgcccccgccggcccagaggaggagccgccgctctcgccgccgccgcgggacggggcctacgctgccgcctcctcctctcagcacctggcgcggcgctacgcggccctggccgccgaggactgcgccgctgctgcccgccgcttcctgctatcctcggccgccgccgccgccgccgctgccgcctcggcttcgtcgcccgcctcctgctgcaaagagttggggctggctgcggccgccgcctgggagcagcagggccgaagtctcttcc

SEQ ID NO: 34137 - DNA, 2300 bp, Homo sapien
ctttttctcttgtgttgctgagtagtatttaattagatgaatatatcagtttattaatccgttctcccactgatggacatctgggcagtttatagtttttggtgaccatgaataaagttgttacggacatttttgtacatgtctttttatcgatatatgcttttatttctctggataaatacctagatgtgggattgctggctcatagggaagatgtgtatttaacttatatgaaatgtataggtcgcaattttttttaagagactgtgtttcgctacgctgctcaagatggactacggtggctattcacatgcataatcataacaagctgggcttaagcgatcctcacgcctcaccagccctgttgtagtttgaatgataggtaccaccacatctggctctgacaggttcatatttttgacataaagttacaaaacactttataatactcttgccttttgtgaaagtgcagcctagtagagatgtcaaaggatctgtaataagtcctcaagcactgctctggggccctggaagattctcctacaggcaaatggatgaaagttatgtggattatatgtgtacgtaaatgtcgttcaggcaatgcatttgatagtgaatagcgtgtatgtctgtgaaatcttttgacaaatatttgcttctagaattccacataactgtcattaggctctgaaaggatccctgaatgtgacagacttaagattggtcatttctgacaaaaaggccagaattaacaattgtttgacagcatgtttgagagcaggctgggtggggctggccactatagtgggaatagcaatgtaggttccaacagtggtcttctccaagccactgggccttgaatattgcaatacttcttcctcagtcagctctctcaagttatccttagcagatttttttttaaacacctgccacttctcttccacccttcagcaggtaaccaagctctatctgaagcaaaacagaaaccaacagaaaggaactctttcaccttcctgctagaaacatccacctctctgtatccgtcctttatctacctttcctcattctctgtaatcacaatgaagaaagtatccttcctaaagcactctccattccaccttctcctcttatttctctcactagagtggctcattcccatggtatttgcctcctctaatttttcgcttgtgaaagctaacctctccgcaccaggtaccgctctagcagctgccctagctctttagcctcgatatagtcaaaccttctaaaggactgcctgcatagctgtttcctctttctcatctggatcaccaacgtttgtcatatagcaggcactgcaccgtcatgtttaaaatatacaacagacggctagacaggattccgagggtgtagacaataaagtgatctacagtttgtagcctgggtgttgaatggctcactgggtggggaagctgttatctttctgctgtgcacaggtaatttgatatatgctttcattctgaaataaagttgtggaaaggcagtagtacgcaacaattaagaaaacacaagtgggtaaacagtggtgccgcacaaccaatcaacccctcacatgacttcggtgcgcatcacccaggggccgcatctgccactctgcccgaagcgcggtcagcgcccacactggcccttccggcggaacccgcctcgcggcttcgaagtggcctcggtttccgagtcaggggtggtgacaggggtggaaggtgaggggaagagcccagcggctcccggccaatggcagctcttgaacttacacctcgagacgtcagcgcggctgtgtaaacggatgtcacacagctggctcggaagtgtctcctcccgcctcagaaacgcggcgcacgcccagcagcttcggaaaaaccttaggcggtgggagggaggggcgtgcgccgcaccccgcaagcccagagctccgtgccctagccggccggcttcttcccgtagtgccggtgtgacggccgtcccgggtgagcagccgggtgccggcgtccccgccacgagcgcgccaccgcaactggctccgccccctgccggaacgggccgcgcgctcctgcggctccgagcagagtcgcgggtgcgcgcgccggcggcggatccgcagttaaaatggtccgagcgggacccggcctttccccggccgctccgctgactgactgagccggctggccgggcccggactggtcgcctagccggcaggctcgctcgctccctccctcgcgtccccaaagctcgcgcccatcgttctcccggcttccctgggcaaa

SEQ ID NO: 34138 - DNA, 2300 bp, Homo sapien
gttcattatctcatttaattcttacaaaaccacggcaaggattcaaccccacaactgctgtctagaaaaccgaggaaagtgacgcaacccgcgggaggtctgacggcccgagagccgcagcgccaggcccgggagccagccccgtccacttccccggtggattcttctccgttccccgccggccgccccaggtgaagctcctttccgccgtcagaaggaggctcccagcgggaagcagcatcgagggcgacccagggccagcacgggaaatgccagggaccgcgtcagccgagcctgctggaaccccgctcctcgctgcagacgccgttccgcctgaggacagtactcgggcatggggagtcaggtgcccgccacaggaacgcaagagaccgcgccggaccagcgaaaaagctccatgctctcctggttttccaacccgacgccgcggcctgcggccactctaggacgccggagggtcctcctctcagtggttggggctgggccgccctgcgccgggagccgcccaccttcgggctgggccgggcctggccagagtctgggctaagcgcagggcctgcatgaatcttcagcctgggaggtggggcaggagcacggagaagtctcgaagaagtggaggaagcacgcactggctgccgcgggaaaagctcagccagcaactgtatcagctttacattcgaccctcctttgctgcatggcaaaaagaaaataaactaccatttcttagttcgtgttttattttcagctatttcttgtttccttggtttcgattctaattattgctgtagacgccttcaggtggtggaagccaaggcaaggaacccctgaccgcaatttcctaacctttgggcagagtgtggggtgtggggactccccgcctgcctttccccgcccccccttcatagagacctaaaaacctttaaaaaggatctaacactagctctattatctaccctgtagcctactcaactaattaattcagacatttataattacacaccaaaaaaaaaagagagagagaaaaaaagttaaaccgttggaactacaaacattaaacatgagcagttcttagggccaaaatctctgaatgtgactgcgacagatcgcacttgaaacgcctgtatgaggtaaacggaaatggccagagaaaatgaactgacgggtatgtgtatttccaaatgtactactatcagctaaaaaagaaacttcaatgattaggtttattgaggtgacatgcaataattcttaaatgttctgcaattagaagtttctacgtcatgaaggcagtttagaagattacagcaaaatggtgaagcatgacttcttcatatgcttattcttcattcaaaagccgtttgcaggttccccagcttaaaaagaagcctaatttcacttattttgaagagtactctgataaatatgaataccgaaatcaaatgttgctttgtgtttagacagttatagatagaaaattctcgcatgggccagcaaagaggtatgggtaatttaagaagaaaaaaaaaaaagttgatgcccctggctggtgaaaaaccccaaggaattcactttcagctggaaattttagagctatttcgcaatacttattaacgagcttattgtattattcattttagaaatctgatttcgcaatcttttattcgtagtggctccctctaataacgtcctcattttatcgctatgtgcataatgatgttctttagtatatccaagagagtttttgatgttggaatttgcaatgactcaagtttcactccagcagcttgaaagagtgataatgaggtgctctcctttttttgtatctatactccccttccaggcatataatttcatttgaaagttgatattgttcttctagattttctattcagtaacgaaatggaaagcaatgattgttcccctaagaacaactaagttttctaaaagctatcataaggactttgtagcaaactctgaaggtatcatttgggaattttaacacaatatgcttgaaaaccagataaaagggaaggttctaaattaaaatgtgtggatgaaaatctataatctggcactaaatcagtagtgatatagtgggtggcaaatagaattgcaggaagaaagtgaagatctggttgcctggagcttgtaagattcaaccctagttcaacacagctctgtacttggaccacaaagacagaaagaaaaagggtgtctgaagctgagaagcccaagaagaataaaatactgaaaatagtaataacagtaagcaacacttatacagt

SEQ ID NO: 34139 - DNA, 2300 bp, Homo sapien
caacatccatgcaaaatgacaaaacagtagagaagatcagatcttttaaagtaaaaaataacttgcgtgatagacaaacccaagtttgaaaacttgctccacaactttccagctacatgaccttgaggaaattacttaactaagtcttagtaatctagttttaaaacaagggcaatgacagcaccaagttcacaaggtggttgtgaggattaaatggcataatgcatgtaaaatgtctatcaaggtggctggcatttaataaacactgtataagtgttgcttactgttattactattttcagtattttattcttcttgggcttctcagcttcagacaccctttttctttctgtctttgtggtccaagtacagagctgtgttgaactagggttgaatcttacaagctccaggcaaccagatcttcactttcttcctgcaattctatttgccacccactatatcactactgatttagtgccagattatagattttcatccacacattttaatttagaaccttcccttttatctggttttcaagcatattgtgttaaaattcccaaatgataccttcagagtttgctacaaagtccttatgatagcttttagaaaacttagttgttcttaggggaacaatcattgctttccatttcgttactgaatagaaaatctagaagaacaatatcaactttcaaatgaaattatatgcctggaaggggagtatagatacaaaaaaaggagagcacctcattatcactctttcaagctgctggagtgaaacttgagtcattgcaaattccaacatcaaaaactctcttggatatactaaagaacatcattatgcacatagcgataaaatgaggacgttattagagggagccactacgaataaaagattgcgaaatcagatttctaaaatgaataatacaataagctcgttaataagtattgcgaaatagctctaaaatttccagctgaaagtgaattccttggggtttttcaccagccaggggcatcaacttttttttttttcttcttaaattacccatacctctttgctggcccatgcgagaattttctatctataactgtctaaacacaaagcaacatttgatttcggtattcatatttatcagagtactcttcaaaataagtgaaattaggcttctttttaagctggggaacctgcaaacggcttttgaatgaagaataagcatatgaagaagtcatgcttcaccattttgctgtaatcttctaaactgccttcatgacgtagaaacttctaattgcagaacatttaagaattattgcatgtcacctcaataaacctaatcattgaagtttcttttttagctgatagtagtacatttggaaatacacatacccgtcagttcattttctctggccatttccgtttacctcatacaggcgtttcaagtgcgatctgtcgcagtcacattcagagattttggccctaagaactgctcatgtttaatgtttgtagttccaacggtttaactttttttctctctctcttttttttttggtgtgtaattataaatgtctgaattaattagttgagtaggctacagggtagataatagagctagtgttagatcctttttaaaggtttttaggtctctatgaagggggggcggggaaaggcaggcggggagtccccacaccccacactctgcccaaaggttaggaaattgcggtcaggggttccttgccttggcttccaccacctgaaggcgtctacagcaataattagaatcgaaaccaaggaaacaagaaatagctgaaaataaaacacgaactaagaaatggtagtttattttctttttgccatgcagcaaaggagggtcgaatgtaaagctgatacagttgctggctgagcttttcccgcggcagccagtgcgtgcttcctccacttcttcgagacttctccgtgctcctgccccacctcccaggctgaagattcatgcaggccctgcgcttagcccagactctggccaggcccggcccagcccgaaggtgggcggctcccggcgcagggcggcccagccccaaccactgagaggaggaccctccggcgtcctagagtggccgcaggccgcggcgtcgggttggaaaaccaggagagcatggagctttttcgctggtccggcgcggtctcttgcgttcctgtggcgggcacctgactccccatgcccgagtactgtcctcaggcggaacggcgtctgcagcgaggagcggggttccagcaggctcggctgacgcggtccctggcatttccc

SEQ ID NO: 34140 - DNA, 2300 bp, Homo sapien
tggtttccatattgcatacctcatcatgatctctattttaggagcagtatgtgtgtatggttagttatgaattgtggataggtatgaattgtggattagaaagcagagagtcacaaatcaaaggagttggcagaaaagagacacagatgaagaaaaggagggaggggtaagtattggaactactgaactaagatggcacacaaccaagattcctcttgcagtctatacttttaaacaggaaaaaagggaggtggagagatggggtgaggcatggatggtgctaatcaaaaaaagtaaaaaacttttcaatcattttttattacccacctaggtttgatgtccacattattattttcattgtccagtaagtaatgctattagaacagacaaagtttggtatttgagaacatggaatatatactaaggtgacacacagtgtttattaaatgtgttgcaatgcaatgtgataattccaacagaggaaaaaaatgtgaaactggatttgctatatatttttgtatgcttcaaaaatgcagcatagatttttgccacattcatttacttcaagtatattctttcacaactgcatttcctagcacaatgactggcatatggtagacagcttttaaggttttggaatgaataggtgagaactcagagaacaattgtagatatggaaagattcttgctgatttttctagatttgggttccttaacacaaacacacatgttgtgtatcaaacagctctatttctaccatatctttattgaaagctactttctgcaaatatgtaataacgtattcaccaaccacatctttctacattttgattccctttgtataaatggagaaattctaaggttcttgggaaaggtattcagtcatgaagcagtctccaaagttgtattttggccttacctaaccaaattttcattcatttcattcttattgacattacatatactataacatttgatgttcacagaaaattaacttctattttaagaagtttactcacagaaccacagtttgtgcatttaacaatcactatgaaatacatatgaaacattaaccatcattttagagaacaatttaaaaactccgaagtaactactttccttaactttgtcatcccaacattctgggtataggcattgttggaaaaatataattaaaaaccaaaatctcccaacccagaaatcctctccacaaacgttagtagacaaaacacttttattactgaataagcattaaacgagactgtgatacacatcacaggcaatttgctaagagattgcaaagacagaaatcttgcccttttgtatagccaagtatatacgacccattacatacacgttttcaagttgaacaataactagtcctcaagtaagaggacctgacatttgtgacattaactttacttaataattggggtgaccatctgtgttagttaattggttttatccagaggaaaaacaaacttctcctgtctttatgacggaaggtagttttgcaacacggagcaagttgctcaccgaagttacgctcctactctctcacagaaactgggagatagggaaggatgctactccgttgatatgtgcagcatttcaaaaaaaaaaaaaaaaaaaaggtccagagacattcctgactgagcatacagttgacaagacctatctagtcctcaagtggatttatacacatttcaaagagttgagaaagtacttaacaattaagaaagtacttaagttttctaagacaaatgctcggagagaaagggacgggaaatctcatcctccattttcaatagggagaattaagcctcttatttaaaatttttatgttggtttttgtttatttagctttaaaacagtagacttaaaaaaagtccaacttaagatttatgtttttttatgtgtagggctgttctctacggttaaataaataaccctgcttagagaaaatattcaccactcttctttggctcctatgtaactcagtttttgagagggaggggaaataccggattgacgctatgtggttcaaccaatgcaaaagataacaccgccttaaaaagtctactacaggaacatgggagggtcacaccctcgaataatgacgcatacctatcctactgttactgatcacctagtaataatcttgtagttcacattactcatttttcaccaaattcttttggtgaaggacgcttcagaaacggccatcactgaagagcagacccgtttgggttctccacgcattctagactcccgaagaggtaagaatttattataggggg

SEQ ID NO: 34141 - DNA, 2300 bp, Homo sapien
tataggcattgttggaaaaatataattaaaaaccaaaatctcccaacccagaaatcctctccacaaacgttagtagacaaaacacttttattactgaataagcattaaacgagactgtgatacacatcacaggcaatttgctaagagattgcaaagacagaaatcttgcccttttgtatagccaagtatatacgacccattacatacacgttttcaagttgaacaataactagtcctcaagtaagaggacctgacatttgtgacattaactttacttaataattggggtgaccatctgtgttagttaattggttttatccagaggaaaaacaaacttctcctgtctttatgacggaaggtagttttgcaacacggagcaagttgctcaccgaagttacgctcctactctctcacagaaactgggagatagggaaggatgctactccgttgatatgtgcagcatttcaaaaaaaaaaaaaaaaaaaaggtccagagacattcctgactgagcatacagttgacaagacctatctagtcctcaagtggatttatacacatttcaaagagttgagaaagtacttaacaattaagaaagtacttaagttttctaagacaaatgctcggagagaaagggacgggaaatctcatcctccattttcaatagggagaattaagcctcttatttaaaatttttatgttggtttttgtttatttagctttaaaacagtagacttaaaaaaagtccaacttaagatttatgtttttttatgtgtagggctgttctctacggttaaataaataaccctgcttagagaaaatattcaccactcttctttggctcctatgtaactcagtttttgagagggaggggaaataccggattgacgctatgtggttcaaccaatgcaaaagataacaccgccttaaaaagtctactacaggaacatgggagggtcacaccctcgaataatgacgcatacctatcctactgttactgatcacctagtaataatcttgtagttcacattactcatttttcaccaaattcttttggtgaaggacgcttcagaaacggccatcactgaagagcagacccgtttgggttctccacgcattctagactcccgaagaggtaagaatttattatagggggccactcccaggacctgctgtatgcttttaaacatccattacaattccagcattgagtttctaacatttttaggcaggctcaggcactgggagtacaggattgaaagacagttcccgtccttaagggactcagagtaaactggagttgctgaaaaccattctaaagcaatccacgttaataacagatacaagtaaaacgtgggaacgtacaggaaaaagtgaccaattctgaggctgaaaagtgcctattttaggggtgggggcctcgcggccctaaagcagcttcccttcccggagatttcagctccagggatcgcccagcgccctccgggcacacttaacattttaatcacgcctccgcccccactctccgaattcctttccggctgccgacccgccgagtagtcccttccaggcggcctcagcttatcatcgccggtccggccacttcccggccgcggccaggcgagcctcccaaagtttcctgtgaggccttcgtccgtctccggccccatctcaccacggcagcccaggacacccgctagggaggagcaggttaccgaggcggggagagcggcacaaacgcgcagacctcgggactccacccgggctggtgagcgagcccagaaagcggcgaccgcagctccgcgtctccactcccagggcccgcagcttgggctaagcgtgcgcccacccagcctagggcccaagtcctgccccttcggggaccgggccaatcggccgctccccgcctcctgggaggtagtggaggagggggctgagggccgggcggctgcgcccgccttccgctcttgcccattggctgaggcctcgagggtgcccggagaccggagtgcagcgggattggttgcagaggttcgtgacagtggcgcctattggctgtggcagcccccgtgacgcggggtggtgactggctccggagtctgaggggttcgggcttgtcaggttctaggtaggtgcgtttcgcgccgccggcggtaggcgctgttgcccggggcaacgcggggggaggggggaagaggagggaaggcaagcctagagcgggggcaacaatgcctgcccgcagaggggcgcccgggattcggccagggcgttgggggctgtgccgaggctcttcctccgccctc

SEQ ID NO: 34142 - DNA, 2300 bp, Homo sapien
gggaaggctttccaggtaatacaaggtacttgggtgctgtcatgtaagctgtatctgtattaggggccacttcaagcccagtaacactatgatttaagtggacttgtaggggcactgcctttgtggtcttggataagatctgggaggattctctacattaccagcagaaactcttgttccctttcgttactttctcccaaacaaatggagtctctctctcttttgagtcacctggagcaggggatggggtgacacagtcacccatgttgctaccagtactggaattgcactgggtcagacctaaagccagcgcagcactgggtcatgcccaaggcccactgtaattgctacctgactcctgcctatgtttgctcaaggcacctgagctttataatcagcatgtggtgaagccagcgaagcttgtgtcctttcctcaagggtggtgagtttctgtaggctccaagtgggtccagaaatgctgtctgttagccaaggagtagagtcaaaaccttagaaatctacctgatgccctattctacagctaaactggcactcaagccatgagacaaagtctttcccgctcttccctctcctttcctcaagtagaagagcctctctccctggccaccaccaccgtaggcccacaggaagtactgccaggctactgctgatgttgacgtgaggcccaagtttccttcagtcagattgtggtgaatgctggcagtcctgggacttaccctgcagggcagtgggctcctctctggccagagcaggtctagaagtgccacctaagaggcaaggcctggaattgggggccgtaagaatgtgcttggtgctctaccccactgtgttcgagatggtacctaaggtgtaagacaaagtccccttaattttctctttgtttttctcaagcagaaggagtctctcaccatagccaccacaactgggaatgtgctgggtctcacctgaggttagcatgtctgaatctgacccagagcccacagcgtactacccgggtatcactgctggttattcagggaccagaggctcttaagtcagcaggtgatgaagcctgccgggactgggtcctccctttcaaggcagcggggttttttttggcccaggttgtgtttagaaatgtcattcaggaggtagggcctataataggcgcctaatgactgcccagtgctctatccttctgtggctgagctggtatccaagaggcaggacaacattctctttactgtttgtctcctctcctcaagcagaaggatggagtcacttttgttgctgcaagctgtgctggccggggtgcagaaggggtgttgcaagcactcctgtagcctccctctctcatgtctctctaggttgctgaaactcaagttctgactgctggaatgggcaattcccctctggctatggctggtctaaatgctcccttcctgggtgggcattggctgagttcatcctggttttgctttctgctgtgacatggcagcagtgagtttattgcaaagtcccacaatcacagtgctctctttctcctccaagcatactctgtgcaccatgtggccactgctgggtgatgggagaggactggtcttgatgattcgagactgtgttttctacccttttcagtacctctttcagcgataggaagttaaaactgggtactgtgattgctcacctgatttttgtgtgtgtaaatagttgttaaatttggttttcctgctggcagggggcagggaggcataattggtggaggcttctagtcatttattttaatggtttttgttgcattacataggattttcttcatacaagatgatgtaatttgcaaattaagatagttttacttcttcctttccgatctgaatgccccttttatttcgtttgtttcactgtaatggctaagacctctggagtaatgttgaagccaacaatagggtggacttcttcatcttgtttctgatctttggaagaaagtattcagttgtgttttttttttttaaccccaaagaagaatctatcataacttttttttttttgaagactaatttcctttttatttaagagtttttctcttttgtttacatacacagatatgtgctgattagaaggctcacttgtgcagtgtggaggataaccagtgccttacaaaatggggtttgggagtgacctgaagaattcacatgaagcagtgttaaaattgcaagactgggaattacggttactggaaacagtaaagaaatttatggccctgagaataaaaagtgataaagaatatgcatctactttac

SEQ ID NO: 34143 - DNA, 2300 bp, Homo sapien
tgctgcctgtaccatcgcacagaactcacaccagtactttagagtatgaaagataatactgaagagaaaagtgacttgtatctaacatttcaatctccttgcagatttcatacatacttaatgattagtacattcagactaaagggaaatttcttttgatggcacgtactatggtaaatcaaagcgcaaactcagaagtgctatggtattgaggcacttaccaaccttcaaaagtaagagtaaaatgggatattcctacccttttttttagtatttctaagtgaatctctgtaatattctttgtctgtttaaagaaaacagcctcccatctcatagtggcttcatgctaagctctcagcaaggagagagaatgatggttttggctttagttttatgaacaagacctaaagcttaatcctgacattctggtgttaagaatgaacacagcattgatatttcacttatccaggctgttagaatttgcagttcacatcattactctgtgcttaaatttaaaaagcttttcaaaacatcgtgacatgtgtagcatttaaattccattttattctttgtcctaaagcaggcagtggtatagttcaggattaataacttattgggagtctctcagtcatatagaatattaaatttaatatagtcacatgcattaagaaaaacttacgcaaacagtttttcactgttaattttgttgtgcttgaagcataatttattcatcccttctgtcactgataattaattattggaattatatactttaggaggctaatccatgcccaggaagcacgaacatactgttcagaatgtgcaagttgatgtagggaaaggaagattcagaaatgtacaaaatcctgtgatttgtttagtaagaaaagagttgtaaccaaaatttcttctggtccggatgtaattagtccagtcacaaatctttgtgttgttaatggattattcaagatatatatatatattcttactactgcatagttcctctcataagtccttaaatttattaaaagggggaggtaaacacaagcagtctgtgtctcactggtcactaaggggcctttatgagacagtttaggttgttcatcatttcacaaggaaagaaatttttcactgttaaattaacatttattaccaacatgtgaaacctaaaattaattttgcattccatgtaatctaaggccaaagccaacatattctttctcttctgggaaaataaaattgacaggttttgtttaaacttcagaaactgaagctttatttcagcctgtcctgccatgaggtctccagtgagaggtctccagtgaaaggtctcatgtaattgtttctcttttatctcccaaatttaatgtgggcaataaaattctcctttcgtaattcactgttttattacaaatacgatattactgaaacatcttattagcagataagtatagaccaggagcctaactgtgttagatattttcagtgcacatttcacagttgtttttcattttaggattattttgagaagaaaaaatgttttgtaattgaaatagttttaatttcctttaaaccataatttggtttttctatctatattatattcagttcagttttcccatataacttttgtgaagattggctagtaccacaaaataactatggcttcacaatactagtgttagattatgtcaagaagaaagtgttttagttacaacatacgccacccactgaggaccttgtagtgggataaacaaaaattaaaatgcaacaatccaaataaattataatgtaacaatacaaatatctgaatcataagtcacagtttttcagggttctttcagtcacaccactttataattaattctggtgagtcatcagatgtaggaatgtacctgaaaaccttacttagtatactgtgtacactgtttaatggccatgcatcttttgaagtttgatattttctgaaaaagcattgtttgcctcagccctcttctttttacgtatactccatttatcattgatattttagatgtttcttatcaacaaaattggctgccctggttagtgctgagtcatcgcaagacttgcttttgcatttaggaagccacaccctcccacaaaacagaacagtgcaaaataagcagcagagagacagacagttggaaaagacatgttttctttaggtattaatatcttaattaaatggaatcagattttgtatggaaatgagtttatattacatttccattatactaagtcagtgtgaaagtttaccatcaaaatagcgttacttcttt

SEQ ID NO: 34144 - DNA, 2300 bp, Homo sapien
cttgtctttgtacggatatatgttgtttctcttgaaaaattacccagagtggacttgctgagttgtatgttaagtgtatgtctaactttataaatatactgccatcctgttttccaaagtggtttaccatcatacattcataccagcagggggtaagagttctagtcgtttacatccctgtcaacattttgtgttgtcagtctttttaaccttagccattctagtaggtatataaaaccatctcattacggttttaatttctatttattagtgatgattttactagtgatatgtttactaattttgactagagatatggaatactttcatgtatgtattggccatttgtgtattttctttagtgaggtacctgttcaaatcttttgttcatttttaaacaatgagttgtcttcttacaattgagttttctaattgagtatgtaagtctggatatgtgactctgtcctctacactttgtctgcttctgttcaccctgcatgacctttacatgcttgcttaatatgtctaggttttatagttgttttctgtagcatgttttgttcagtaatatcttttctatcatacctggaagcaaaagccatttctgtttacatacaacaaaacagagaataaatataagtcagtccacaccgaggcacatcctcaaactgttgaaagccaaagatgaagagcaaatctcaaaggggcaagagaaaaatgataactatgtgtggaggaacaatgaacagatgaatggctgacttcttgtaggaaaatatagaggccaggaggaagtagaaaaacatgtttaaatgataaaagaaatttaaaaatcatatggtcagcctataattctatgtccagtggattttaaaacacatgctacccatacacttggagtaaggtcaatatgtcaacacagacaatgtggaggttttccaggtttctgatgaggtgaatcgaggtggagaattggaatctatggtccctgaatctgcaggaattaagcagcagcagatagtgacactgcctgtcatggctttaccatccaatcccttgtggtgttggctgtgctagagccaggccagctggtcactgtgttttgaaaacatctcctacagcagctgccaatcctactgcctctgtgtgctcagacatgggaggacctgtgtttcctgttgaacatatgacttctttggggacttaaaaatgattggtcttgctgtgctgctaacaattttttacccaatagattaagtttcagaggtcatgaggcaaacaccacgattctgatttcaacggtaaaaatgtcttaagcatcatctttcagtcttctaaatcatttttaccaaacagttcaataggacctgcagtgtcttcatggcataacagaggctttagcctaaggctcaaactgagattcagacacatctggtatattgcacggagacccagaagaaatggatggcatgctcatatggaatgctttgagaagagtttaataaggaactacttacaaatgtgtgggctgagtgtagaaaactcttaaggatggtgtggttccccagagattataagagcagaagctattaccgccttttggcccgaaggaaaatggggagggagcggtttgtggaacctggatatcaagaccagagctgtgggagctggcattcagcatctgttagaggatggtcacagagttcttggaaaaaaacctcactgaatggaaagccaaaggaaactcaaaaggcttgttgatcttgacgtaagcacatgactgattcccttaggagtctcccagaaataactagaggagtgagaaggaagagggatcatgcccatgtgtgaaggtgaagccacggcctatgaaatgtgagtttttgttaatatgacctaagctgagactgggcaacctagagagctggggtcccattctcctgaaatcctcgagccatgagcagtggaggcttacataagagcatctgccagaacgtcagccagcccagagtagttcatgtttttgtaatttgagttttaattccacaagtaaaatatttctctttaagaaataagaatggagggaggagccaaaatggccgaataggaacagctccggtctacagctcccagcgtgagcgacgcagaagacggtgatttctgcatttccatctgaggtaccgggttcatctcactagggagtgccagacagtgggcgcaggccagtgtgtgtgcgcaccgtgcgcgagccgaagcagggcgaggcattgcctcacctgggaagcgcaaggggtcaggga

SEQ ID NO: 34145 - DNA, 2300 bp, Homo sapien
tatataatcctaataaaacttagaagtaaacactattataattccccaaagacatcaaaagattaagtagctgccaaggctcacatagcgagtaagtaagggagtcaggattccaacccaatgcccttaactgctttgttatattgcttactgcataggtgagtgagttaatactcaaggtaagtacaaacaaaataaattttagtgacatgactaataattcttgcagactaaccttgtgaactcaataaccctttaaacattatttcatcggagatgaaaacactaaacatttggatcaaaaaacttagaagttggtaattatctgtattaacaatcacagagaataatcctgaagaggttaaggagaggagcctgaacatgaaattgatttactctcttacctggaaaaaaaacctgatctcagcagatgcaatttatgttacttttatatccactgcagacagaattctgcctccatcattttttttcttgccagcccctatggtgtccacagtgtcagtgaccactgtccgcacctgtaaataggtaagaacaatgatgtggtcaaaggaagcctgttgtatttctaaagcctggtaagggctgggtagaaagcaagttgtgattgaccagggataaacatcgggtccctgttgtgtctcacactaaatccactctacatgatcttgttctgtcctaattggtctctatcccagatggttaatccctttggttaatgaatacccatagcctcatcatctctaggaacaggcgcctaacaggagcctgagagaatgttgccaaagcaacttggtgaaagatgcttgtctgttcattgactgctttgtgctgagaatcaataaaaaattaatgatctaaataaccactatattagctcccttaaggaagaaacagtggcttgcccaagatcatacacagccaaccagtgttggagctaggacttgaatttagttcttctgactactaacagttttctctactatgccaaatactgttcctgctttcctttcacctgtactcactgtaattctctggtgagtcaaggcagcagctacggtgaggtcagaaaaaatggccttcattgaataggtagcatttgcctacaacctgctttgtcccagatactcttccaccagcaaagtgggaaaataatgacttaaataagcagagcaagccttctgtttgtgagtttctgtttctctgcttcggttttgggtcagttttaagacctaaaacttggcgtggggaagcagggacatttctgagagcttgctctgcagccagcactttatgaaaatagaagtacaggatgaaattttgagctctttaaggatgacaacactgattgatgatcactaggagccggtaattgcctcctggtcttaaagtaggaaatctgctgggtaaaaaaataaagacaatgaagggaacattttgtcttataaattgagtaacagcgttctctggcaacttgttaatgtcagagatgatctctacaaaagtgaagataagcttgattgcacctaaaacgaatattttttcctatcaaatgggaatacaaatttaggttgttctgggcaaactttcttgagtttaaaaagagggaagctgaggcaatatttatttacagactccaagttggaaggaactaaacaatcctgccagttgctctagaggtgacaggcacttgccttttctcacttttctttttcccttcttccctctctcctgtctctccttcattccttctttccttcatcagccaggctgactgagcttaaatcctagtcctaccacgttctagctgtgaagtcttgagcagcttactcaacctccatgtacctgttgcctcatctataaaacatgaacagatggttttctatctagggttattatgagtgagttcacatatgtaaagtacttaggatctggcacatagtcagtgttgggtaggaacacgttttccccattcctgatgtttccttccacatggaaggacttcttcattcattatttgatctaaatcttcattgacaaatcacagtatcacacatgggctcatgaattttgtaatatatttttaagtcaaattgtttatgtagacaggaacccaacaaaaatatttgcccaggaccttgcgcgccctagaagtggctctggagaaaagcatttgcctacagaaataaaccatttccttcctcagcctatatcagtaacaaaggtgcagctttggccactatctgccactcctttctcttattcctctgtttgtttag

SEQ ID NO: 34146 - DNA, 2300 bp, Homo sapien
atgtgaatatgtctgcttgattctagagtacaggctttttcagcctccataccagtgtttctcatagtaacatagatcacttatgatgccttggttaactgtagttgggacacgcatgcaggattaaaaacaatgactcatatagtgagaaagtgattgctattccggctctattttttctatcctttgatgacatcatgataaaaataccatttgagtgctgtatctttaatgtgtgtctaatgcttggtagcttgcccttttaacaaagacagttgtctttagacttagagcctttagtggacaacagtttctagccacaatttaaaaacattgttttgcattcatttttcttacagttactttcaacttataataggtgatgctagttttccatttatagtacttttataaagtctccttcttaaagaaattaaagaaaatatacatttatttaaagaaaaaaggacagtgagtagtatacacagatacagtatgaaaaaggttgaaatttgggaatccctgccttctagaacaggttaatgtatccagttgggccaatctggaacaccctaaagggaaactagggaaatgtaattaaaatatgaattttgttttttttcaaagaggtacttggatggttaaagtcagaactcctatagcaacacgtgtgaaggcagagtaatatcaagcaaggaatggttttttggtaagaaacgtactacaggagtgggctgggattcagattggatttcacaaaatgtctggcaaattctcataaacctaaatttctacagtaaattttgggtaatttatttccatcaacagcaaaaaaaaattagtctcagttcactggcaagagagttcgctgttgttaaggggacagcacaagaagtggggctcttaattcgcgggggaggggtggcgatgaatatatcctgggcatcaggcgacgggtcgggggtggggaataagagaagacagagggactgtaatcagataagcggacacgtttcaagatgaataaagggaatatgtgcggaacgaagaaacagttttgtatcactgacataattaactaaactgttacccaggtttaaattaagcaaggtgtccggggactgcagctgttgtatttattttggttgcatgtgatgggagctgttacttcccggcttgacaaacagcctcaagatgcaagctgggaggctgtggtcagcccaaggctatacagaggaaaggcaggcctcctctgaaccccgccccagcagaataagaagcgaggggcaagggtcagcgcggagagggagggtggaaagcgccatatagtgcccagggtcagggtgggtaaacaagcctttcttcgtgtcattttttttttttgtctcaccgatatctgcattgtaactgaactttatgccaggagaccttaaccttgttaatcaggtttccagtcgaatcaggatcgattttaatgcctccattttggttgttgctgttggaatttccgaaaaagcctaactgcgccagtctttctgttagttctccacacccccttccctttccgagaccccgcccttttctctcagcccaaaccacaaaaggccgcgcagttttagctcctacacggtgctccgccccctccccaaacgtcgcagtactgcagggaaaggaggtgggctcggctggggcgggggactgagtcggcttcgtctttccgctcttcagccaattggtgaactccccctgagggagatgggggagcaggctgtagagaaggtccaagtatttttccctttttctgccacgtcccaaccattgacgtgagcccactcctcaggttctgattgggcgtatgcattgtcccccagcagagaccctgtaagctgactggtcatctctgctatgggggaggggcttgcgtactctcctccttcgcctccaccgcggcgcaaggggcgggactcaccgccaccgcctctgcttccgccgccgccaccgccgccgccgccgccacagccgccagccgcttcgcgttcggcgggggaggagttggaggcggagaagaaggcggtggtggcgggtggaggttcgagcgctgttctcgctccggagccgctgcacatttcggtgagggtttttttttttttttttcagtctggcttgttccgctgtcgggagtgtgggggtcggggcgaggaaattgctgcgttcagctcctcagtttctctgtctctagcttcggaaggagcggggcttgtccctggcctgctgcgccggccatggtgggtggggttgat

SEQ ID NO: 34147 - DNA, 2300 bp, Homo sapien
gatccttcttaaagggaacacagattctctttcaaccaagggactatgggtctgtgaattgacttaggtctgagaactgagagactgtgactatccactgtggtgactcaagtcaggttttggctacctgacttagatctttttacctgttataaatatcaagcaataatctatttcaactgcctatctattttgttctcagagcagctccgtaagccaaggcagtctgatttcctgctgccctttaaggtacatgtgcgcccaccttgtctttgttggttatgtgctgcctggtttctgctattctgagatcgtgtcatccccattgaaatcagggagcccatctagatagtggcatcctctatagtcaaggttttcaagcaaggctagtctctttagacactggagggcaacctacttccactgataagagaaagagttggcgtgtttaagattgtcggtttcatctgggtccaacccatttcaagtattgagattctattattaaaaaataacaccattttacacgaaaaactcagaatatgtgtgaatttaatagcagttataattcagtaacatgaaaattaaaattttgtttgattctcagcataattcttgttgctacaataaaccagagcttttggaattctgcagaatatctctggttctcataccataactctgagagttaaaaaacctgtgcttgtcatttctctttataaccactcaaaagcacgcaaaagaatccatcccacaccagtctttctagtcatctttataaccatagcagtcaagtgtagcagccacttggggccccaaggcacaggcttcagttggcacttcatcaggatcaaccacaggtaattgcttaattgagatgcccagcatgtcatgaattacatttccctttggcaaggagctaaagctcaaaacctcaatcaaactgacctttaatcccatctttgcaggtctatttcttgggactactcccgggacagggaaggcttaataaaaagaattgttaactataatagaggattagagtaatgaaggattcactagcaagaagagaactttaaagaatatagcaacagcagctataaggagctaaccttataactaactcttgggttgagagacagagtgcccaatgaagaacctccccaattcctcccagggctaagatctagacgtttttggagagggcatgacctggctcactgaatggcagagaagtcaccattgggctacgtctgcaaagcttgtggaagatgtgccctctgcaacttgctgcaaatgcctctagggtgccagggaagttattcatggggtagtgtctcacctcctctacaaagctcctagagttgggcatgtgagaggaaattgctagttactgagcactataggaccttggcagtggagaaagccaggtatgctgcaaaagcttatcaatacacagaaatcaggaagcaaaatcctttttttctgtaatgtctcttcagcgccctctgctgataaagcttcagtcccagaaggcaaacgaaaaactgtttaaaaggctcagatccgtttttacagtgcagtcaaaaagggcgaatttggagctgagaggcaataaatcaataactggcagaagcatcacttctcagattacactcatggatttcgtagtcagatgtttctacatgtgcctggacggccctttgtcagtctcctttcccccaggttttaacaggctgtcaccaaaggaggaaatagtgagcccgaagagaatgtgcaagccctcttctcttgcatttcctccagcccgtcaccaagtactcttccaggcacgccaggcccgagtgtcctaggataggaaacctgagcaacaaagggaagtggggtgtaagctcaacccctgttggacgtgggggtgctggcgcctgaacgcccccgaaggcctcaactcccagaaagctgcctgccaggtcacaagagccctgtgaggtcttcctatcgccgggacactgggaggcaggcgcggggcgggtccgccgggcgacgcgctgtgattgggcgccgtggggcccgccccctcatctcggagcgtcgggagggggcggggccagccgcccgctcggctcaggcgctgcgggcgcctattgacccagcggctgctgcgccgccgctgtctcctcctgctcgtggcgggcggtgctggagcgccaagtggcgctggagaaccggcgcttcctttcgccgcttccgccgccatctccgcgtttgtggggcgggaaagagggagggggctagcggct

SEQ ID NO: 34148 - DNA, 2300 bp, Homo sapien
caggagtggctttgttataaaaatgagctctcttgcactctcttgccttttcaccatgtgataatgcagcaagaaggccctcaccagatgccagtgccatgctcttggaattcccagcctccagaactgtgagctgaataaacttcttttatagataaattatccagtctgtggtattctgttatggcagcagaaaatggactaaaaacaggcattgacggctttaggatttgtttctttgacggtttatccttacccctttcctgctactggttggttaatgaggcactgagctaggaaccctgtaagtgttcaagtgttaaaattgtgttgttgtacctttaaatataaggagaagaaattgggagagatcagattaaaatattaaatacttatatggtttagaaaagtgacagcataagggagatcaaccaggtttaagggtaaatacttaggtgaccagaagatctacagtaaacttgaggacatatcccaccaagacccacaactcagctccagctgattgtttccacaataggactgaatgcctgcccagggtgacacagatttccagtttcttgggtaaaaaacaaaaaatgtgttttgggttttttgaggttgcttttttattatgaattttttattaaagagttggcttaaaaacaaaaaaaaaaaaacattttaataccatacagacctaccaaaatgtgtgatctacaaatctgccccacagtcttcagctacagatacttacctccaaatgttatgattcaatgtattattcttcattttctctcctccttcctctttgtcttttttactccacccttcctctctagtgttcttctttcatttatttatattgcatttgcttattaaattaatagatttacttcaacagacatttattaagttcccaccatgtttcaagtcaaactgaataaacaagggtaacttaaaaaatggtctcttactatctcaccatgatttaacaggatcgtttaactcaaagtgagcttaataaagggcaccaagaagtctggcaagaagttctgactcatggactaagggctggaacccagtgaggaagagctgtactttgtgtggtttggatcagaaggtgctagaaactttctttaatgtcagacaggctgcagagagaaagctacacttatacagtctgaaaccttccaaccaacaagaaattaaataaggtttatagtactagattagttaagtacaaggctggggtattcatttataacttaaacacataaaatttcctgtagaaaacatgtttttaaaactttgggtttatcatatgatttacagtggaaaggttacctttgtagagattaatttaaatattgatggttcaacagttaatatcttgttgagcctcttgttgctgtaaatatgataagaaagtacatgaatggcagaactctgggtgagactttgccactccaacctggccagcctccagcagtgttattttttcatggtgctcttagggtagtgaaccacaactcttctataaacttccttatctttctaaggacagtaaactacacagtttttaaattcttgaagtccttaatatccatgacattgtttccttttagaagactcccatcaaaatgtctttgaaactgaatcttgtttttctaatgcaaaggtagttaaaaggtaaagtttatcttttgattctaaagggagctctgttttctctataagattggatgtctggggtggcacttcccggcacagggtcatggagcagtgtgcggctaactccatgaaattcacctggggaggcttttcagctttgcattttcaggaccccacctctcaagattgtgtagatttgggataggacccaagaatctatgttgattagaggtgccccaactcattctgttgtgtggttaatttggggaaacaccaacggttaggaagaactaatttggtttggaggattggtatatatgcacgttattgcttctggagtatagaagattaatcaggaagtgttctggctactcactggagtggtgaggaattactccaagagtgtggaacaaagccagagctttctctgaatgtttcttgacctagagtggacttaatacttcccagatttgatgagggaggtgttttcttttctgtttgaatcttttatgttttattactcgtgagtgactttgtcagcaatcctaacttagattatgaagtcctttgatcttggagtacatttaaaatatcttgttgaaattgttccctctctattcatgttattc

SEQ ID NO: 34149 - DNA, 2300 bp, Homo sapien
ctgcattttatttttcataaaagataataggtgcagtgttgaagagcacagcttcagggccagattgcatttgttcagctcactgcccctccaacccccatacttttgttatttctttgtggtgagaacatttaaaatctgactctacttttttttccggcaattttgaaaaatgcaatacattattattaactatagttatcatgttgtgaaatagatcactagaccttattccttctgtctaactgaatttttgcactctgatatctcccccttccccatccgttctcacgacctactccctgttccagatgctggtaatcctcattctgtattctgctttttcactttgccacttaagtttatgagcttttttgtgactcagttttcttatttgtaatagtatctacctccctgaatttcaggaaagttaaattcatattttagtaaggttctggacttggtgatccactgaatctaagctatatgtaaagaagagtgagaaattcaagcgggagctgaagttttgcatgttgagtaatagaattaagataatgatgttctgaactaggaaaaatttggagaaatattgggcatattgaatttgaaggtcactcaggtatatatacccagcaagcagttgaaaacaggtttggaactagggaaataagtgaagcctgcctgggatatagaattgacagtcatccatgttaatgtggccgagggcgaggggcagggagaaactaattccaggaatgaaatcttggggaacatacatttaatggattattggtgtaacagggcccaggaaaagggaaataagggaggtaagaggaagtgattatgtttaaggagagaaattcaagatcaacattgtcatagaagtattaaatagtagaaggtctgaaaaatgatgagtttctacaatcagaaaatcactgctgatcttgggagcatacccagtggagaggtggaagcggaattcagattggaggtaaacaaacagcgagggaaaatttaagcataaggcaaaaattgtgaactatttcaaaaaaagcttagctataaatatttatgctgatatgtaaatatgtcaatagtttatttagatggataaaataaagtcaaaatattaatatgttgtaggataagggaaggagaggctcaagataaagaaagggaattatatttgatgaaaaaagtcatggaggtgggaacagaaggtaatagcagaagtgttatggagactaatcaattagtaccattagcataagtcctaatcagatgtggccgtagactgatagaataggaattcttgtctaacatttcacttgtttttatatcttcattaaattatagaactacttcttaactcctcacagtgttcagcatagtgacttaccaaatattcagatgattatggcagatcaactttgaaaaattatttgagtaaaaagctcaagttctcatattagattgttattgaggatataccctcctcaaaaaaaaaatctttctttcacatacaagaataaaatccccaaattgtgccctcttaccaaatataatagagccttaggttgcagctctacctttaacaataggctgttttctacctgaagctatcagcggctgctacctctccacatagctgtccagtagaatggtcattattaatttttccattatgtggatggactaaaacccaaagtttgtctaaaagtttatacaaagagcagcactgagatgattctgttaaatataatgtggtgttatgttaaattatcttattgttgtaaataataacatcttgtttttattatttacaacatattgttgtaaataataacatcttgagaaggaataaaactggagaatgtttgtctagaatcaatgacattgatttctttgtagaattacaatgtcaaagtatccattatgaatacagcatctattatagcttgatttattttcatctggaagtttccaagcattgttgaacagtaactatatttaattgggcattcaatgattatgaaattgctgtcctgaattatataaactcttacgtataaattatttaccgtctagtattctattataccaccagggggcatacataacattataaatcttaaataggaaactagcagtttctgcatctaagtactgaatttaattatagtttaatagctaaaagacaaatgaaacacagtgcaaaatattaataaattatttctcacagatgatttttcttacaatagcactttctttctctggagcatcatatcacaagtatc

SEQ ID NO: 34150 - DNA, 2300 bp, Homo sapien
gacatgcttattttcctaattgctaattaatggccattttaggattatatatatataggtatatatataataatttgaaaaaattagatttgtcttgtcaaaacttcaatgtagatgactaattaaagggagaaaggggaggtatgactttattagatttatttttcttacataaattttctaaatattcttgtcattttttaaaatcattgtgggtctcctattagcttaatattattgtgactctaaggttataccaatattatcttaaaattatttaaaattatttcctgttttaagcttcattcctctgagatttattgttgctatggtatgagatagtagttcagatttattttctttcaaattgtgctcagcctctgtacagtttttccccactgagttaaaatggcaaatttatcatatataaattttatgctttttctgtaatctttcattctactgatatatatataaataaaatcagtagatacatatataaaatcagtagatatatttagaataagtagatatgtgtaatatatatatatatgtatttgtgaattcttccttatataaacttgttctgttgtcttcactgtagaatcgatggggtgactttttttctctaaacatgctatagtttcaactgattcttatattatggagaagaattttttattcggccttccttttattcctttttaattcaatcttcatttgattatgaataacctggttaacagtttgtatttttttatgcttttaacacttttctagatctcttgaaattaaaacaagcaagcccccaggctattattaaataccacagtcttttcatttttattttatctggattatggtaagcactgttgatattctaggatttgttctctcacatatgtagtttatagtctttgtcaatttcacttttcattattacctttaacttactgatcttctaggagtgatacgtcagagaagcctgagatcacatattgtaatttctgttttaaacataaaaatgcactcaaaaaacaaaaaaacttaattccgaatcgaagtagttcaagttaaattttctttcaaagttctaatttttaaaggcaggtcatttcacaggacaatccctgtatattacgttttagtattttttttttctttagatggaatctcgctctgtttcccaggctggggtgcagtggcatgatctcggctcactgcaacctccatctcctgggttcaagcaattctcctgcctcagcctcctgagtagctgggattataggtgggtgccaccacgcctggctaacttttgtatttttagtagagacgggtttcaccatgttagccaggatggtctcgaactcctgacctcgtgatccgcccaccttggcctcccaaagtgctgggataacaggcatgagccactgcgcccggcctacgtatgaatttaatcataaatgcccttccccattcttccatatagtattttacactggtgaacctttgtaaaatatatacagttgctcgttagtagacataggaattctacaaggatttttaaaggacttatattagataattctattgcatactacctttaaaaagaggcgttcttttgtgtttaaattcgccctctggtgtttagtacatagcagaacattctaggtgctttgtttactcactgacgggtgctgaggacactgactgctccaaattttctatgtaaaaggaacttacgaacggcaatttaatttaaagacatagctacttttggtatgataggcgtgctggtttgttttggggaagcagcattaagacactgaggagacattaaagcactgtgaagccgcttcttgccgtggcttcttgcaggatatgcaagtatgtacaatattcgaaacaaatcattactatgttctttaaaaacgaataaaggtctttcacacaacattgcatttattctttagaaattgaacacaaatgtggtggagacgggacagggcaggtggaaattcacttataagtcctgattggctaagccctggtcacgagaccgtaaaagagcaacgtctgtctcagagcgactcccacagcgtccttagcaaccagccttggttcccagcggctcagagcgcagcggtgagtgattaagaggtcctgcttcagatgatttgggagctcaggttattgtcatattcaccatcctagggcaactgaaagacccacaaagatcctcacaggggaatactgagcctcctttctcagggtgccatagctttgttagaagaaacact

SEQ ID NO: 34151 - DNA, 2300 bp, Homo sapien
acatattcacaaatggctcactccctcacttcattcagttctctgctcaaaggtcacttcttcagagaggacttccttattctaaaaaaaaaaaaaaaaagcttcctttattgctcacttaggcttttttaatacaatcatgtcattatttgacattgcactatatttgacaggatatatttatctgttctttgtctccctaaactagaatgtcagttctaacaatgcaagcaccttgtctggcttatttatcattctatccttattgcttaaaatagtatctgacacgagataggtgcttaataaatatatttttgttaaacaactgtatggatatacactttaaataataaattattaatcaataataattatttgatatttgcattcctgcttatttttttcctattatgagcaagcatgccataaacatatgtatgttatccatgccagaaacatgtaaaaaacccctatatttgttttctaagattttggagtcaaaaaatatggttatttttacagtttttgatacatagtgccaaactgctctccatcagaaagttatgttttatatcacttcagaaattaatgaaagctactttcttctcacctggaaagacaatgtgcattttcccttttaaacaccttaatacgtgaaagataattaagatttaccttttttcaattagtaaaggactttttatatgatattatctatttacacttcctttttttgtatgaattgcctctacatgtcctttgctcatatttctgatttgcctttattcattggtatgaactctttgtacattaaagctactgttccattgtttaaaccatgttaaaatgtcatttttctgtttgtgatttgcctttcaattgtgattactatatattttaaaatttactatatggacatttaaattttatacagtcaagagactcaacacctttgcccaagctgcatcgcaatcaaatttaagaatgtcaattcgttatttaaaaatgttaattatacattttaatgtacgctatcaaaatatctcatgtaacccataaatatatacacctactatacacccataaaaaataaaaagtgataaaaccacagaaaaaaatgtcagttcaatcaaaacaaagttgattatcactctcaatcaaggttcgcatctggaagatcgagaactgcacgtcagagttctcttggaaaagctctaggaatcctgggcttccaacgagttgaaggaacataggatgaaaccatggaagtcttcctcagatctggggagggagcctggcccaagagcccgtggagctaatgaaaacaggtagtaggggacgctctacagtagtcctctcagttattcaattagaggtcccaattttgaacgatataactgggatttcaataccctgagtgatttagacacatcagaaaaaaatacgacagaaaactatagtttctttacagccttagaaaaggaaaacgcgtaatttctaactccaggaggacagtattcgagtacgtgggtttctttcacccccgacgtgcacttcaacttttaaaatgcttgctctggtggtccacagtactttcgcgttcactgggcggtaccatatctctcaatagatttgatccaaaaccccaagtgcgggagacaaagctaggtggaacgttattaaccctccacaactccaacctctactagcttcctcggagcaggcgaggcaccaggcccgtgagaaaacactgagatctggggcgtagctgtgacatggggtatttctggccgggatctcaccgggtaggctccacccgcgggttatcggctccctccaagaagcatctttgaactcctcccatgcaggccctattcctacaccagttctctttctggaatctctttggtactgtgtttcattaatcccacaaccatattcccacctattccctaacgacaacaaacttttaaggtccaggttaccgccgcgtctccctagcaaccgtgccctttaatggttgccggaagaggctataatcacgtgctccgaagacttccgggtttccaacgtgacttccggttgtcagaatttacccctgacgcggcggcggccgacgggaagctgtgtgtgcttaggtcgtggtggccccggtggtggtgggctccgggcgggctcgcgtcatcctgcccccgctgcgatgcatccgcggcgcccggacggatttgatggcttgggctaccggggtggtgcccgggacgagcagggctttggcggcgccttccctgcaaggtccttca

SEQ ID NO: 34152 - DNA, 2300 bp, Homo sapien
taaaatcaccaaacatatttaggattcagtttacacatttatgaaatgagaggtttaatgggagatgacttctaaaggtcacttgacacttgaaagtgttgaaatccttagctaaaagggaacaagtttgaaaatacgtagacaagaatgagtgcacaattttatggttcattcatgtattccacatttattatgtccatgtaatttatttttctatgtctatgtattgtatagtggaagtgggagagaaaacatgatctctagtgtaaaatttagagagcttgagtgatgctcacaaactacaaggtccctatattacaaagaattgagacaggttgttaccaacttggagaagggaaaggaatgcagaggactgtggaaagacctaccaaaagctctcagaagccttccattgttggctccagtagaaattaagctaagaagcaattcatcagttagtgagaacatggtgcccctagcccttctgttggatgtccttgtctcgttaaccactttgacttaaaatctattgtctttgataatacagccacccttcttttcgtaatttacacggaaaatgcttttctttttctttcaaactctgtgtctttatatctaaaataagtctcttgtagacatagtacagatatgtcatttaaaaaaatcaattttgccactcgccttttatttacatttaaagtaactgcagatgatagacttctgccatttagctatttgttttctatctttatgctttttacttctcaattcctatatcactgtcttttttggtattaactgatttgtttggtagtagagcttttgttttgttttgttttgtttttttgagatagttttgctcttgttgtccaggctggagtgcaatggagtgcaatcttggctgactgcaacctctgcctcctgggttcaagtgattctcatgcctcagccttcctaatagtataccattttgttttccttcttcccttttctgtatgtttttaaagtcattttcttggtgtttatctcaagggctacaacatcttaaacatgtaacaacaagttgaatatcaacttaatttcagtagtatacaaacactctgctcctatacatctccatctctctcactttatattgttcttgtcatagatatatttttatatattgtgtgaccattaaaatagattcacttttatgcacttgcctttttaattatacaggaaagagtggagttacaaactaaaagtacagtaatactggcttttatacttacctataaaattacatttacctgtgttatttctttatatgacttcaagttactatctattgtcttttctttgcagcctgatgtactccctttatttctcgtaagaaagttctactaataacaaacttcattaggttttgtttatccgggaatgtcttaatttcgccttcattcttgaagggtagttttgctagatataacattatttaaccttttaaagaaattacttatttccagcattataaatacatcgttttactcccttccagcaagttatgtctgttctattccttctagaaccaagggtcaggtcccacactgggcacccaagctgccatttttaagactgccatgccactgaaccacagagaagacaggagccaaggtaagtcaaagccacaaagctttcctaacaataagttgcctttttcttgatttaacattcacatagttgctgtaaacttttgactgttttccagagtctgacaaagttggttctgacagtttctggttgttttcttctctttccatggagggatgggagtctggagctgcctatttgtcatttttctgttgttactctcctagttgtgaaatgcaggacaaatcacctcctctctgtatctattttattcttaatcaaacagcacaactccaaaaatgtcatagggatgtggtgaggaggctatagagattttaaaaaatagtgtgcaaaaaagtttaacttcacatattttgttgatcttcctttctacctaaaaaaatatacttcatctttaaccaccagcctgaatagttctctcacatcagtaggagaaaaacagtggctttatttcgacattttattgaacttttcatattacacaatttacccaaaacatttaaagtaacagtaagacaaacttaaaaaaaaaaaagtcatacagacaaaacatctctaggtgaggcaatatgtaaatttcattgtcaaatcatgattttgttactctgctatacaacttggtaccatatcaatgatactaaatgact

SEQ ID NO: 34153 - DNA, 2300 bp, Homo sapien
gttattagtgctataatagtaaataattccaacagatttccttcttttgactgcagacatttgccagtatcaatcaatatttaaaatgaaagagggaatatccagagcctataaggaattcaagtcaacaagacaaaaacaaaaataaccccattaaaaagctggcaaaagacatgaacatttttcaaaagaagatgtacaagcggccagcaaacatatgaaaaaatgctcaacatcactagtcagagaaattcaaattaaaatggcaatgaaatactatcttacaccagtcaaaatggctactattaacaactcaaaaaacaatagatattggcatagatgtagagaaaagggaactcatatactgttggtaggaatgtaaatttgtacaacctttataaaaaacagtatgcagatttctcaaagaactaaaaatagaactatcctgatccagcaatcccactactgggtatctatccaaagaaaaataaatcattttgtcaaaaagacacatgcatttgcatgtttgtcacagcactattcaaaataacaaagtcatggaatcaaccatgtgtccattgatgaatgactggattttaaaatgtggtatgtatatcatggaatactattcagccataaaaaagaataaaatcatatcttttgcagcaacatggatggacctgaaggccattatccttagtgaaatgactcagaaacagtaagtcaaatatcacatattctcacttgtaagtgggagataaacaatggggacacacagacacacagagtgtgagagaaaaagaagatagaagcagaaacaagagatagaggggaacaaggcatagttggatgacagctttccactttttcattgcactggagtattctcttctgtcagttccccagatatctgtctaataatttctacttttttagtttaaaccagcttgctttgttgattatttgtgattaaaaggagcttgagtaggacttcatcattttcctgctcacaatatactttattttcaggtccagtactcagaaggaagttaatctgtttaaatggtaactctatacaccagaacgactttttatgccatggaactttacaatcagaaagagaagaatatgtcatattcagttttaatctgaagagcttgacacagttcttggcacatagtaggcccttaaaatcagtttctgaatgaatagaattggatatgtgctcatcaaatttacagataacccaatggtgagaattctcctttggattttgtggagtaggatccgaagctaatctcataattcactgaaagaaaaagaaagctattagacaacagctttgtcatgttaccaacaccaatctataaaccagtctgaatctgtgcctatcctctctgaccttcccccagtttcaatggaagacgagtccttcctgtcattaaaaccacataactccccctaggggtccctcctcagacttctctctgaaaagctggccactttttaatgaatgtttaattacactctctctactggatccttatcatcagtttgcacacatgcccttttgtcttaagaagcacacaactacactcacacactaacttgacttcatatcttttggagttacctacttatttctcaattctcttcatgggaaaacattagaaaattttctatactctctgtctacttttctacctaactttcactcttaagccattgcaattgggctccatccccaatgctctttgagacttctcatcaaattatcaacaatcttcctgttaccaatccaaaagatgatattttttaatttattcaatagcaattcacttagttgaccaatccctccatcacattctgtggcagtacaccatttgtattttcccaccatcagtagcaaccccaagcaagctcctttattggtacatctgatctacctgacatctaaattttcgactgctttagtatcaagtccaggggttctttttttatcaacctataaaaaaagtgttctagtttgtgttattcaatgcctactgacaatatccatcaagaagcattagctaaatggatgaaatcgttatactccctgtatatctccctcttctatctgttacctttgccattagttctgacagtgcagccagatctgtgggtatatgctagatcaaaaagaaacacttttaaactgtctcttgagggaacacttattttagggatcagtgaaagacagtgagctgagcactaacatctacagttaccattacaggcttcagaattttgaggcagca

SEQ ID NO: 34154 - DNA, 2300 bp, Homo sapien
gatctcccccatctcatcaataacctctctgatatcccttccattttttaaaatcccataattatattattgaataaggtaaaaaaaaataccaatctccttttggcaactatttttcaaatccaaactgagttttgcatgagttctaggctactttaaatattcaggacaattcaaggaagaggaggaaagacataaatttaaaaagaaggagggaaagaataagagaataaaagaaggagtgggaaacaataacgaaatgaaagaaacagtgagaagcattattaaaacaagaaataaaagtattaagaaaattaatgaatgatttatctttttagtgagggtaggagaaaagagctatgtcatggatcattttctggtccttcacatgggtaagagtattgcctaagcttcctgagtaatcacagagtgttacaaatgatgtcacttctatttccatatggaagacacaccattcttgacctaacctaggatttcccaaactacgtatgcagatactgttcactccttcagcatttggacaaatgaaaagagaaggaaaacaggaagcttttcagctcaccctgaattttcacagatggccctggtctgaattgttgccccaggtgagacataagcagattccaggaagacagcagcaaagagctagaaaaagaagtatttatagagaggttctttcaatggaaaagaatttgcttcctgacaatgatcttcatagaaggttaatatgcttaagcacattgagaattcattgaatatctattacatgtagtacagaagacagccctattgtggttatgatgatgaccataagcttaagaaaaactggctttcatgatgaatttgtgtgtggtagagcttgtcatagtctaccccttgtagtggcagtttagaagctcaaaactcacttttgagatcaattgttataattctccagtttttagtaatgcttttctatagccttccctgcacctgattctaaccgccctattcctttgctccattctcttgtctcaccttgactgtttttttaccttttgacaccaatgtatttattgcaaatcacttcaaatgctactggaaaggtaaatagtgaacaaatgaactgctataaaacattacctacttttaaagaactcgcaatctaatagagagataaggttgaaaaacattattgaaatgttaagtaatctatagaagccatagaaagaagtccaaaatagatacggcttacaggataatgaggtcacatcctggtaggagaccacttttggagacatcaaataagatgaacatggcaagacatgaaaatctaacatctcagattgggaagaaaacagctcagagcatgtttagagcatattaccttcagatactgtttgctggaagcctaggaaaatgaaggaaatagggctggaaagacagcttggagccaacgcaggagggataattgtaatctcaaaacaaccttgagtaggttgttttgccataactttttgagcagacaagtaatataatccaggtgatctaagaggtcacataattacagataaggaaattgggggcaaaaggaacaagtgtttagcaatgttttaacagacaaagagacacctgggatgccttagaaagagataccctgcctacctcatctgaacaaagactctacatagatcatagacacaaggggtttttaaaagaggaaacaaaaaaagggaggcagcctggttatacctccagaagaatgcaagtcgaagctcagtgtaggctgctttctgttgttcttgcccccatcagcaatcaagagatgaagccgaaggttctagtgggcactcacactctctggccctacagcaagccactagaggggaaggcatgtcaggtgagggtgacagaagcagccaccatgccctttcctttgtctcttggagctatcccagcccagtgaagaaatctaagtttagctcctgtctgcctatataataatgtccagctgccgaccagaataatctctgatgtcacaatagattaatcaggttttggcatcatcccacaataccctgagaagttggtgatgggggaagagtggacttttttttcaaagaatgctgtggtgactcgagtacaacacatgaagaattccagaaaagagccatttttgaagtcagcggtgaatcagaggttttctgaccctctcgagtgccttctatgaagaagagttcaactctggctccagtttgtcccctactcttttcccgaatccctcgacattccttgctctt

SEQ ID NO: 34155 - DNA, 2300 bp, Homo sapien
tttaacagacaaagagacacctgggatgccttagaaagagataccctgcctacctcatctgaacaaagactctacatagatcatagacacaaggggtttttaaaagaggaaacaaaaaaagggaggcagcctggttatacctccagaagaatgcaagtcgaagctcagtgtaggctgctttctgttgttcttgcccccatcagcaatcaagagatgaagccgaaggttctagtgggcactcacactctctggccctacagcaagccactagaggggaaggcatgtcaggtgagggtgacagaagcagccaccatgccctttcctttgtctcttggagctatcccagcccagtgaagaaatctaagtttagctcctgtctgcctatataataatgtccagctgccgaccagaataatctctgatgtcacaatagattaatcaggttttggcatcatcccacaataccctgagaagttggtgatgggggaagagtggacttttttttcaaagaatgctgtggtgactcgagtacaacacatgaagaattccagaaaagagccatttttgaagtcagcggtgaatcagaggttttctgaccctctcgagtgccttctatgaagaagagttcaactctggctccagtttgtcccctactcttttcccgaatccctcgacattccttgctcttttccccaggcaccgcatggcctgtgacatttgctgggactcacacacggcgtccaacctcctttctccgagcgatgactcctaggaacttcccaaggaccagagcgatgcaggctccgacacgcgagggcggggggcgggggtgaggggtgcgatggacgggggagcggaagggaaagagagagagaggggacctgggtgtagagagggcccagggccgcatgagccaagccagggaggagcagggggttcatctcagcaacctgatcggtgtcggcctttccctcccttcaaccctccattggtgttgctggaactgggaagactgctagacagacatcctctagggcactctccctgactcactttgctgtgcttttaagcgctcttttctggatcaacaagagtttgctagtaaaaatctgagcccgccatctcgatgcttctcctgtctctaaaactggtgcccgggctgaggccccaggtgacagacgttttccagtctacgctgcgcggggctaagcctctgcgaggcagagcgcactaaagcgtgcgccgcctccgggagagctgagctcaggacagcatcgtctccgtgcggtcgccgctgggcacccagcagcgcggtctggctccgcttcttgtgtcgctggccttaagagtgggactgtgaaggtggctgggcgctggaatttgtggttttaaaagttcttgacacctgctagaaagtgctagaggactcttcagcccctaaggtgcccctagccaccaagagtaggcgtttttcctgaaattgatatgggaaatttgaaaagtagggtttttgagaacaagccacatcagatctttccccacttatttcaacctcttatcgttcctgcccctaaggttctggtcacggttgcacatttaatgctttcacatggaagtgctgtcgaagactgagactgcaccccaccctccaaagcatcccataagcaagcacagtttcttactagccaaggagaagggaaagcactagttgaaagtggccacaggaaatgctcaaagatgttcagaatgcatgggacatatgcaaggactccaaatccttacagtggctgctggtttcagaaggtgtttctcccaaatagaaaggattggtcacggaaatgccctgtaggagaaagacactggtatccgtttcttaaaggacattcacacttatgaagtgtttagggcaaagcaaaaaggaggaaggtgagggaaattcctgatgactttactgatgttaaaattccatagatttagctactcctttttttttttcctttcacatcatcaattcagaattctataaaggaagagaatgacatggtagaaaatcattggcctaggagaaaagagcccgtaggcgtttaggtgttatatagtgcagccagaaagctctggagcatcagggagactccaacttaaggcaacagcatgggtgaataagggcttcctgtggactggcaatgagaggcaaaacctggtgcttgagcactggcccctaaggcaggccttacagatctcttacactcgtggtgggaagagtttagtgtgaaactggggtggaattgggtgtccacgta

SEQ ID NO: 34156 - DNA, 2300 bp, Homo sapien
gcaccccaccctccaaagcatcccataagcaagcacagtttcttactagccaaggagaagggaaagcactagttgaaagtggccacaggaaatgctcaaagatgttcagaatgcatgggacatatgcaaggactccaaatccttacagtggctgctggtttcagaaggtgtttctcccaaatagaaaggattggtcacggaaatgccctgtaggagaaagacactggtatccgtttcttaaaggacattcacacttatgaagtgtttagggcaaagcaaaaaggaggaaggtgagggaaattcctgatgactttactgatgttaaaattccatagatttagctactcctttttttttttcctttcacatcatcaattcagaattctataaaggaagagaatgacatggtagaaaatcattggcctaggagaaaagagcccgtaggcgtttaggtgttatatagtgcagccagaaagctctggagcatcagggagactccaacttaaggcaacagcatgggtgaataagggcttcctgtggactggcaatgagaggcaaaacctggtgcttgagcactggcccctaaggcaggccttacagatctcttacactcgtggtgggaagagtttagtgtgaaactggggtggaattgggtgtccacgtatgttcccttttgccttactatatgttctgtcagtttctttcaggaaaatcttcatcttacaacttgtagggctggtgttaacttacgacttcactaactgtgactttgagaagattaaagcagcctatctcagtactatttctaaagacctgattacatatatgagtggggtaagtgaagaagcttttttaaaacaaatgtattttcatcagaggagtcggcatacacacactctacaatttaactttgtaggaaagaaaaataatttagaaaaaatcatggccccacattttgtcaaggattcttacaagtgatattcaaatatctaatctaaaatgattatctagaaattggcacattctaagtgtgcagatgctgatgaggagcaggtattgatagacagcgcgttatgcgtcaaaggatgtctatcctttgctaaagtgttactctgactatgctgtaaaaagcaggaggtaagagcttaagaaagaggagtaaaagagataattctcatgagataaactctaaggattgatgctgtgctccaggtctctccagtgttttagatgtttcaggatgctatttattacagaatatggtgtacttggaattttttttaacatacagtagtaatcattttcctgattaacctaatttctagacagagtttgcattcatgaatggccacagtacagatgcggacatccaaaggatggcattattactcacaagcatagtgctatgtgcagttatggcttgagggaagggaggggggaggtcgccctctgagacctgaaccttttggtgtggtttcaagcactaaccagcactatctaatggctatttcactgccttgtcaatgacataggaaaaaggtacctgagtggaaactgttttcagggcacctttaaagcctgggagcaaagggtggagggatgattttccttgtggacttaaaagtctttaccctctttgtcctatttttctttcttccagaccaaaagtaccgagttcaacaacaccgtctcttgtagcaatcgggtgagtagagagttcagtgctgctggctttctccagggagacgccaggcattttggagagggagtatcctgctacgtgcagaactccgagaggtgcctgggctccgggacgccgccgccgggggaaaggggacatctgggctgtcagagcggggctgcgcctagcttgggacaacacttctgttccaatttagggagaggaagtctctatccggaggaaaggcaaattgggaactgggacgagggaacgttgttaggggcaccacctgctggggtccggcgcctccgcgctcgggctcggaattttggcagcctccgccccctggagacttgggaggagcgagcgtgggtgacagtcttttcgcgacgagtgccctccgccaccctcgccacgcccctgctcccccgcggttggttcttccttgctctactcaaccctgacctcttctctctgactctcgacttgtgttccccgctcctccctgaccttcctcccctcccctttcactcaattctcaccaactctttctctctctggtgttttctccttttctcgtaaactttgccgcctatgagcagccacattgccttactga

SEQ ID NO: 34157 - DNA, 2300 bp, Homo sapien
gtcctttctgtttgttagttttccttctaacagacaggaccctcagctgcaggtctgttggagtaccctgcagtgtgaggtgtcagtgtgccctgctgggggtgcctcccagttaggctgctcaggggtcaggggtcagggacccacttgaggaggcagtctgcccgttctcagatctccagctgcgtactaggagaaccactgctctcttcaaaactgtcagacagggacatttaagtctgcagaggttactgctgtctttttgtttgtctgtgccctgctgccataggtggagcctacagaggcaggcaggcctccttgagctgtggtggactccacccagttccagcttccagctgctttgtttacctaagcaagcctgggcaatggtgggcgcccctcccccagccttgctgccgccttgcagtttgatctcagactgctgtgctagcaatcagcaagactccgtgggcgtaggaccctccgagccaggtgcgggatataatctcgtggtgtgccgttttttaagcccgtcggaaaagcgcagtattggggtgggagtgacccaattttccagatgccgtccatcacccctttctttgattaggaaagggaactccctgaccccttgtgcttcccaagtgaggcaatgcctcgccctgcttcggctcgcgcacggtgcgcgcacccactaacctgcgcctactgtctggcactccctactgagatgaacccggtacctcagatggaaatgcagaaatcacccgtcttctgcgtcgctcacgctgggagctgtagaccggagctgttcctattcggccatcttggctcctcccctctcccctcttttttaatttaaagaacatttacaaataattagcaacttgttcacttttaagtcataccaaaaacatggctgaaaatgtgcactgctattgagaaatccggggtacaaatgaaaatacaagtaagtacaacatgtcaaggactaaataacaagctctcattctgttagcatctgccccttaatgatcttaacatccaaagtgtttgaggctttgtgccaagaactataaaataaatcaagattttttttgttcaagaatgtatgagtcaggtattcaaattagctaacaagtgacttttgtttcataataattacattttagaactggaaggaacccgagagagtacactgatctgtgtagagacagaccctctttatctctttcaagtacatttacattagtaaatataccctttttatccctctcaagtactagtatagttacgttagtcactcgacccaaaccttaataggctgccaaaacgttttcataaacgaaatgaaatggaaataaaacagtaagagaagaggttattccatatgttgaactttggtcctgggctctaagctcaccactgttttagttaatgttcacatgctcagagattgttccccaaacctacatcttggtaaggcagctggctcctgaggagtgaggcgtcttgacacccacttcactggaatcagtctccttcagcatcctaaggcactcagctctaatgaactgcccggactcccgtttgcattatgataagctcctctttagaacctctactgtctgcttttgacagccgacctcaaggaatactgacttaatccaggaatcccaataacatttaatatttatcttccttttctgggaggaatctacacttatccaagttgcccaagtgagcagttccctccccacaagtaattagttctactccccagagggtctgtgagtgaatccctctgtcagttttgaaatgtcccattatagttttcatctgtaaatatgtcaatatgtatccaaaagatgaggatctttaaaaacgtaatcataatgctactatcatatgtaaaaatgaaacataattccttaatatcatcagatatccagtgtttaaatttttccagtctcatgtttttgtacatttttaaataatcacatgtttaaatcgtttccatctccaaggcgtcgacctcccctccattctcctgggcgtcgcgcttccctctttgtttcccgcccttgcggttctgtcggaacctaacgagcttccttccaccgcaaaagagctggagaacaatgctaggcaacgtgctggagaccttggccctcggaacccaagtcacgcctcccatgtgagctctggagggagaactttatgtgttgcactgagggcagtctccggaaacgcgattcgcagcgggcgccggaagcggtgttgtgtctgcagctctggcagag

SEQ ID NO: 34158 - DNA, 2300 bp, Homo sapien
aacaaataccattgactgcctactttgtgctaggttcagcaatagtgactgaaatactgtctttgcccatttacagaatttaatacatgatttaatattttaatgataattataatgatttcagatacctctgtttgctccatggatgtgttatttatcattcatgacttgcttctgaaattgagagcagcattactgttgtcatataacagtcatataacatgcaaataatatttttattaaaatataagttattccctttcatgatgtttctataaagatactgcagtcctaaattttttttactgtagcctgtaatataacatgatttttacacacgtatttttttttccacttaggacatttaatttcttaatgaggtggcatagcatagtagttagtttgagacctagaatttgtctggacaatattactaaccttgtgacattagcttaatcatcagaatagtgtgtggaagagtaagaacttaataaatatcacctattattatttcactttttaatgtgtagctgatattgttttcctccaaaaaaaaaaaaatacagctttcaactatttttcttcttgtagtaaacttctatatacatttccaggatggaaagttggagtgacagctcttcagcaggttagtatttttctgttaagtcaaagaggaacaaagttaataggaaaatccttcagtttcaggaatcaatcataattttagacgtaaagacgaaacaatatatagcttagtttacctttaaaattgttagcctgaggaaatagtgttttggaaatgtaagttaaaacaagtaataatgcctttgccaataacacttattggagtcctttgtgcttatagtttgacttaaatctgtggttgctatggatccttgtttctaatcattttgcaagtatatgtagtccattgtcttgtgtagactggaaatgagtgttcagcaatgcaagcggtattgtaagtcatgtagagaaatttgtcaagatgttgagatttatggtttgaagtaattggagccaaaatcctaatgtttgattcgatgatggactatttaagaaataactgcttttttttaatgaatctgcaaaatatgtataaataaatgaatgcatgtctacagcgaatcttgtgtttatattggccacatatgtagccactatacccttatctttttcagtatccattgtctatacttgcccaatttatatgtattccttatcttctcttgctgtcatcagcctagctccacttttgcctatccagaagactccataagtatcagaggattaggacccttgaggacaagggattatatctgttttagtatctccaatttctacacagggtctcatgcatagtagacacttgatgacaaattaataaaacgtgtagcctgattccattctataatgatattggacattgatctttgctaaaatagagaaattcataatagagcctgtatgtaagacttgtattatagaccattataaccatagaatattagaactggaacagactaattgtaaaactttttttgccttttcacatgttttgtaggtttttcctactttcttggataagcaattcttcacttcctttgtaattggttacatgttgccacacatagcgcaagcctttatgttttctagttgtctcctttttctgtttccatccagtccagtgatctgtagtgattttatacatagctttctttttctgttgtggttgttttctttccaaaatcttaccagctaggttttgggaatgaggatgggatgttgactggcagaattgaagctgggaagtaatttggaaaaatcattactgaatacttctatgctgaataaaaaagtatgcttgaatggtaatacttgctgagtttttctgccatcttttagaagatacttcattatttcttttgataacacctaataatgatgcgtatcatcaggattattaaagctattttgcttaagaaagtaaaagtttgaataatttaatttttaggcaccagccgtggatgttgttgctattggtcttatgtcaggtcaagttatcattcacaacattaaatttaatgaaacattaatgaagtttcgtcaagactggggacccattacttcaatttcatttcgcacaggtaacttttaacatacttattgataggagttaagaacacttaaaattcattactttaaaagtcaattttttttgtcttctggtagcttaatctaatagaagtgaatgaatactggagtaaaaggcaaagaaatat

SEQ ID NO: 34159 - DNA, 2300 bp, Homo sapien
tgtgcagctttacaatatattttgtataaaataccttgtatttgtgtttcagctaagcattactataaaggagtcaaaaagttttaaaacattaaaaagtttataaagtaaaagttacagtaaactaaggttaatttaccattgaagaaagaaactattctaaataaatttagtgtagcctaagcatacagtatgtataaagtctaagtagtgtaatgtcctaggccttcatatccactcaccacttactcactcacacggagcaacttttagtcctgcaagctgcattcatggtaagtgccctatacaggtgtaccattttttaccttttataccatatttttattgtacctttcctatgtttagatatgtttaaatacacaaatacttattgttgtgttacagttgcctacagcagagttcccaacccccaggccatgggctggtctgtggcctgttaggaactgggccacacagcaggaggtgagctgcaggcaagcaagcaaagcttcatctatatttacaggggctctccatctcccacattactgcctgaactctgcctcctgtcagatcagtggtagcattagattcccgtaagagcatgaaccctattgtgaactgcacatgcaagggatctaggttgtgcactccttataagaatctactgcctgatgatctatcactgtctcccatcacccccagataggaccgtctagttgtaggaaaacaagctcaggtcttccactgattctatattacggtgagttgtataattatttcactatgtattgcaatgtaataataatagaattaaagtgcacaataaatgtaatgcacttgaatcatcccagaaccatcttccccaccccctgtctgtggaaaaaattatcttccaagaaactggtccctggtgccgaaaaggttggggaccgctggcctgtagtattcagtatagtaaaatgctgtacaggtttgaagcctaggagcaattgactattccatccagcatagctgtgtagtaagctatactatctggttgtgtacaagtacaccctatgatgttcttacaactgcatcgcctaaggatgcatctcttcaacttctcaccgtggttgagggatgcatgactatatatattttcaatttccaatcagctaggaatcacattcctgtaactacttgattggatatttttggttgtttgttcaccagtatagcaggcaggcttttaagaataataaatccataaattagattaaaatattggaccatattaatggttggtgctatcaggaatggagacttactaggaagagtttagcgcatgttggaggaaactcaggaaaaaaaaaaggccaaaagtaacacctgtgaagtaaggtgaaagcgcctggagctatttagccagaaatgagttgtggtataataactgtcatagatatgtatcagaacatgactaattgttgttcgtctttgctgaaatctgaaaagaaaaaagttcaagggtagtttaagtgatgtatgtttaatactgagaagaagagccatgacagctgatggacaggacataagaatgcttatcatgggatacatctcttgggaagagaaaaagggcttttacatgtagcagtcttccctgtcatgaatgaggacaggtcctgccttaaggcagagggtttactagttggcttccacaaggcccttctagaactgtaattctgagccacttcagatgctgagattgaactcgacacagccaagtatctcctcttttaggagctccagcagtgccgaggaggcagtgccaccagcagcgacgacagcatttattccaactgaagacttcactcaaaggtgagtcaggtcagtgtggacctgggcgcttccttttcctccagctctcactgggtccaggcacaggagccctgagggatcggcgaccacagtactccctccccggccaccaatataagctttgacagaggatggctggttagctggtgttaggtgggagggactcgccacggagacgcgctcaaggagggatgagttgcgccaccaccacctaggtccctctctcgctatccggcggggccgcccggacccaggtgctgccagggtacgcctggcgcccgccatcccagagcagcgtcccgctgcgcacggtctccctccagctccggtccccgcgggagggcgcgtgggatgatgcgcgggtccttgtgccttccccaagctccagcatccggagccgccctagccggcaccgcggcagccacagcctgggagagagaaag

SEQ ID NO: 34160 - DNA, 2300 bp, Homo sapien
tgaaatcacagaaatgataaaacaattgtatactaatgtcagaatcatggggcttctttgctcataagagctgtgaaacgagacagaattattaccattaatgaaactgaaaaatatgagagacatagaccacatttcgaattgctgcatgttaagatgcttacatttttccttttctgaaatctgaaactttgccttgtgggggagtaggacttgcctcttcctctagttgttcaagttattttaaaattctagaatctttttgaagaaagtgtgtagttttagtaaaaatgaagtcactgatgaaaagtataatctttgcattgatttttttgtgtctaagctttcttctcaaagaaaaaaatttaaattaatgttttattttctccttttttgttaaaatgtttacttcagacattacagtgatagatgtcatggataagtagctgaagaaaataatataattgactttttaaatgaataaatgagttttttccttcattgaaactgccaaacttcacaccgctttaaagaattgacccatttaaacttttgcaacctattttaaattggctggagagagatgttataaaaaagtatggaattgtaattgttggaattaaaagcaaatgaagttattttaacatcatttttaacataagaattctcctaagaattgaaactgcatatttaaattagatttagtcaaatggatatgcagaaaaattaattttgggaaaaaacttgaaaatcaaattgtttgaaaacatctctctgttgtgtttataaactcagtgaccattattttacatatgggattttatttattattaagaaaatttgcagtttacaaatttgcaatttgaactgacccgtaagtgaagtccacatgctggagaaggatttaatagcttcatggcttactggtttttttttttcatcagccctgttcaggtgccttttgtaagacatatgacccccctccttaacgtactaggtctgggcatcttgactataaatgtgatttgcttctatatatttcaggcaacatctcttcctagcataattgaaaagattatttactggagaatgtcaacaaatggctttttcaaaaaagacttaacatatcctacagaatgatttatatacagcaaactaaacagttaaaatgaatataaatatgtatgtttaattaacttgaaattacaggaattgacaaataaagaataattctggtgataactgctgacttgctcctacatggatggtgatgaaacacttagaatggagtgattaaaggaactaagtcctgatcttactggaaactatgtctagtaggattagaatgtctctaatgaatccttcattgcatcagaagtcattattttcctttgaagggggaatgggagaaaatatagataggaaggtgaatttttcttaataaacataactctcataggggtaccagcgtctggataacataaaataataaaatgaattctattttcccaattcagagacaattcttccattctagccaaataacttccttataccctcccccactatcattttgggaatcctgttttttgactggactccacaactttcctatacataaacttgcttccatttatagattaagttttatttttaggattcaactaaagtataagccattgtagtttttttgcatacttactcttcggtcatttattctctctacagttcacttgcaagatgattaaatttagttggttttcatatgagaaagagagacatctctttgctcagttaagaagtatttattctgaagagcttttgatgtaatgatttaactggcattagaattcggtgaggatgtttgctgaagggtaaatattcttaaattataaagccctggattctttaagcctttcagctaccattggctttggactgaaaagaaatcttaaaacattttatattaataagccatattctctcagtgtccagctactagttagctgtaaattaaacatttttggaaactgcctaaaattctcggggtcccaattaccttataaatgtatcaaaactggggtcttgagccaagatggccgaataggaacagctccggtctacagctcccagcgtgagcgacgcagaagacgggtgatttctgcatttccatctgaggtaccgggttcatctcactagggagtgccagacagtgggcgcaggccagtgtgtgtgcgcaccgtgcgggagccgaagcagggcgaggcattgcctcacctgggaagcgcaaggggtcaggg

SEQ ID NO: 34161 - DNA, 2300 bp, Homo sapien
tatttaaccaaacagttaagtcttgcatggattattttcatcaagattaagtccataatgaaataatcattgccatcaaaactgctacctctgtgtaaacaggcataattgagcatttctcaaaatattaatatattctagaaccaagagggttgggggagatgggttatcaaggtcttggctctctctcctaatataacagggtactgacattaattgagaggaaaacacctaatttgccctcctgcaatctccaactgtggagaatgtcaggtaaatgttttaaatgccattctgaacccattctgaacttccttttactaattcagtcttttattcccttatcttgaccttatatcaggaaattatccaactctaacatttacacgtcagagagaacaggcaccacttaaccttatcagaatataataggttcatataaaagattttatactcttgtcagtcccatggccaaatgctgagtaatgtccacctccatgtttttcctttaatctttttgttcatgttttctatgcccatgcttttgaagctatcactagtggtgatagtggctgccatcatagggagggcagctgtctcaagttacttttcttgaggccatctatcagcaccatagtcttgaccaatccaactccaattattctcaaatatctgtcacagtgagatggcataggttctattttaaatatggaacataataaaacatttaacctgtaatgtaaagtgaatgccataaaaatctgtttggacttttgtagtacgactaggtcagaattcacttgttaaagaaatgcaggtatcagaacggtctaaccttgcattacttgattaatatggttttcacttccgtcaacagcttcagtttaacatgccatggactttccccaatgtcatacaaaccaaagctttgtaaattaaattatattttctaactaacataaaaatttcagcatatgcttgatttccaatcaatgttgaactgttaagttttctaactcagacaagtacagcagcttctcattttttgagactggctctggcaggagctcactatttaaagaaatgcaacatggaagtatatttctacaatatgaatagtgagccaacttactgttcaaacccctaatgctctaatacttgattaaaaaaaaaacctaatgctctgtacttgattttaaaaaataacaataacatttattgatcacttactacatggtcagtccttctggctgctttacattgcatttattttatttaatcctcacaacagtaatagtcctccttgagaaaatgtgtttcattatggtaaaggaattttagttattcagaagctctaggattggtgtaaatgggcatactttagatatcttgaggtcttccataagtgagaatagtagcttaatgtctatacattttccctgttttacagaaagggaaaatagcaacaggaaggttgagtcacttgtccaagatcacacagttcataagtgatggagccagaattccaacccagggcgtctgacttcagagcctaaagctctctcttgtaaaactgtggaagctgatcacaggctggaaaagacttcatataaaaaacctgggcccaccaaatatttgtcaagttttgtcctggctgctgaacctaaaaatctaaggtaatctttctcaagtgtaaattcgggaaaacaatgacactgatttggtgagaaattatttgagttaatacatttagcagggaccttggaaggcagtaagccctgggaaaactttgtctcttgtctttggcatcacctccgcgaagcctggtgggacgcggctgcccctgcgctgtctgtgcacctcctaagaaccaggaagcgcggtgacctccaaagaacaggactgtcccaaatcaagcgggattaccaccgcccctctcccatttaacagctgaggacactgaggtctaatggattccaagtacttaaataggtgagcggcgcgcaggggcgagttgcaagccctgggatccttccagctcgccgcttcccctcccaggggctcaggtttctctttcatctgtgaggtcctctcccgcccggacgccggggcccgccatccccaacgtccaccgcgagctccccagatccatggtctggagcaggtccagaagacgcacctggcaggacgccccgggcgccacagtcgccctccacacgggccaccccaatcctgccgcggctccgtggctctccttacctttacctgaggtgaagcaaggacgtggaagcagctacggc

SEQ ID NO: 34162 - DNA, 2300 bp, Homo sapien
ccatttagctgatcaaattcattatatgcctcttttatatttgaattctagatggagaccttattttcccattttcaaactatttgtaggggagatctatctgttgtgttacatactacagttctctcatgtgtataatgaaaatagtaatagtacatgcctattttcaggcattgctgtaaaatgtaaaatgcttagcactgtgtttggaccatactaaaccctcaaaaatagctccagatgatgtatttgtatatgtatttctgaatctgaagctttgctgttagtagcattccactttgatagagtggcttccaattacccaaacttcattctaaccaagaaaaatggcaacagatgaagaacaaaagcaaaagaaacaaaaacctcccagaaactggctggaagataagaaatcccatgggggcataagtgtgatgtaatgactcccgccgtccaaaaaaaaaaagccaagttaattttgttttaaacatgttttacaccatcctgcaagagaatatatagactgttgagcaaagtatccagaactgaatcctaataatgacagatacaacttttttacttttttgaaatagatacgtggatttattcctctccaccattaaacctgtgtaaaccctcacagtaggaattaggcctttcatttatggtcccagtggtcttcacaggtgccttgacaaagagctaccaagcaccatctgaattttatggagactaagagcccagtttcagagtccagcagacctcagccaaattccagtttctccactcagtaattaagcaacctgccttaagatttatgtctggggctcctcgcctgtaaaacacacctaccttagggggctgttaagaggattcaatgtaattgaattaagtaggtacaacttaattacaaagcacttttccccaaccatttcaaattatttatctacgtattcatccatccatccaaagcacctcaataattggccaataattcctaagtgaaaggagctttacaacacacgaagaactcttctattatgtcacacgaaattataaatataaatataaaacaaattattttacatataaacgatggaggtaaaaaataaatcggccaataataactagcaagtagtatttggtaattcttttggtgaggccgacttaaaaatttacgaaatattatttattttcattgcaagtctatcagaaatcactaatggtgtagcactgcattcttccctgcttttggttctcaaactacgtatcttagtaaacgcaatttgcagacaaaccaagcctcgctaatcagtgcatcatggctactctggtaaaggaagaaattcactgtttgccaagcatcccatcagatgggtgacttcacagccactggaagaaatctttctcatgttcgagtagatggaaactccaaaactgtgcagttgctaaatccacttgtcacacctcctccttttctctgcttctaaggttgccctctaaactctttatctgaggatggaaacacacacacgcacccacacacacccacacccacacacacacaaacgtatttggctaaaggtcaattcacatagtggcagggactttcgtttatatgcattttccttcccagctctctcagttctgagtcaggctaagcaggaggcagagagctcgtcctcctctgcatgggcgctttttcttatttgacttttagtcctgggaggagtagcgtagttgcgagatactaggatatccacaagcgggatgaatttggaccttatccctcactgtgatccttcacttcgccttctgtttcaatttctcccagtcggtttactgcttgacaaaattctttcacaattaagtgatcacaggacaacccaacccaaccaatccaaacctgcaggcaaccccagacatccagggaaccctggcgcggctcgggccagcccacacccacgcggaatcattccatttatcggccaccaatcagccctccacacgctcccgcgccagccaatccgaacaagcgcacgttgttccggccacctcctctcagccccccctccccggagcccccgggatcgggccagggggcggggctgggggctcggcccgccttgccctgaggcgctgggtgccttccagttggctgcgaccagcggtgacttacaagttggctgctgtcgcctgcgcatcggcgggccgggaggctgagcagtactgttgagagcggtgtgaggtgcttggtagcgcgccgtagctgcttccacgtccttgcttcacctcag

SEQ ID NO: 34163 - DNA, 2300 bp, Homo sapien
caggagtttgagaccgggcaacatggtaacatggtaagtctccatttcttaaaaaaaaaaaaagaaagaaagaaagaaagaaaaattaacacttctctgtgaaagaacatcttagggaagttttacataaacgttaaagtccctgtgtatgtatgtgtttatatgtatgtttccttgtagaagcagcttttgaacaaatatcactgggatagatttttggtagtctgatttgatggtgcgcccttggggtcctttcccagcctgaccctgaggtgaatgccaaagatctcaatgttgaggtgcccttgagcagcgtgttggggttccagacttgcagatcagcccccaggcgtctcccctctcccaccacccagcctatgccttacaccttccttccagtacttccctggctggtaaactggcctgaaagggtcaagggaatttgttgagttttatatttcttccctttgttcctagctatggctgccaaatcatcttatttttgcaggaaaattactgtgatgttttagattaattcagagaagctttcagtgggctccttaaacatcatacccagtgcagtctaacaggcatttgttgtggcaatggctttgtagttttaaaggtgacctatagtcccagcaacaagcatacagagaactcagtgcattcttttagaattgtgagtgtaaagtattgctttttaaggtttgctattgctgtacccagtatgttaaatctaaaacatcagacattctgtaaacacgtttaaaaattgagttttgtaaatttgccttattttctttgttacaatggaaaacattgctttcagtgattaggggaaaaagtggatggcaaatttagaagacactatgatcctttatatctttttttcttggaaaggcaatttaattaggaaataatcttctcctgtgacatctgagagttaccataaaatgatatcctgctttattggcaacagaaccagtttatttgagtttgttgcaaaattttgagctattacattactatgaaaagatagattttaaataagaacgacgagtttacaaaaatcagaaatggcaaagcactttattttttaaagcaatcctcgattttaaaaagtacaatttcagacgggcaggcagtgggggagcgtatagggaaggagaaggaagcaccaggggagtatgtcttgggccgatcacgccaggccgcagctctggctggttgtgcgcgtgtgactgtgtgcacgtgtgtgtgtgcacgcgcagccacaggacctctgggcccggccttcaggggcgctccccgccccgggcttccccgcggaagggagtggggcgcgcgtacccagctgaggggcagggtccgacccgaggccgtgtgcaaatgcatccttcgcggactctttgtgtgtctgagcgcggctccgcgccgccgcaggcaccattttctgcttcgctcaggacaggcacataaaaggaaggcggctgccgcccgtcgccgtcctcttttcctcagatgccctctgctgcaggtttattattacagtacgggccgcgccgcctctccccacggccctggcgggccgccgggctgtgcagcaccctggccgccttcacgcttggcgcgcccccaaaccgcctcctccacctccttatttgtctgaaaagcaaccgcacgtcgaggcggagaggctggccgggggcggggaggaaggccggggatttgcgcgcgccgtgctcccggggcggggccggggcgcagagctgcgggtccgctttgtctccccggggcgccgcgcggtgcagtggggacggcgcggcgagcggggcgcccggggcgcgggtgcggggtgtcggggcgcgcgcgcctgttggccgctcgccgacggggcccagagccgccgattcctgccgagtaagcagtctggctcctaggcggctgcacagtggcagcaaggctggggcgctggctccgcgccagctccatcagaattagctcattgttcactagcaccctagcgggagagagagggaaagggagagagagagactcttagagaaagagagagacacacacactcttggagagagagcgcgaggcagggagatgatctcctcctcctttttccaaggctgcacttcttggaagtgaagccggtttgggttttgtttcccttccccctcctccctcctcttcctccacccctttcccctccccctccctcccccaatcccccctccccccccaatctgtctttctagcatgttgccctttttcaaccacatttgtgt

SEQ ID NO: 34164 - DNA, 2300 bp, Homo sapien
caggatagatggaagagggcagaacatggcagctaggaggactgtgagacagctatagctacagtttgagtgaggtgacatggcatgagtttctcatatatccttaagtgattagcacagcccccttcacctagaggagactcaagaatgtttcttggatagttggatgataaccgttttctggaacacaacagataaataagctatgaatctgacccagtgttcttaatacttaaaaatctgtcacctgaatgtctatcattacaatgaagaaaaattggccaagagaggtggcttgtgcctgtaatcccagcactttgggaggccgtagtgaggattgcctgaatccaggagtttgagaccgggcaacatggtaacatggtaagtctccatttcttaaaaaaaaaaaaagaaagaaagaaagaaagaaaaattaacacttctctgtgaaagaacatcttagggaagttttacataaacgttaaagtccctgtgtatgtatgtgtttatatgtatgtttccttgtagaagcagcttttgaacaaatatcactgggatagatttttggtagtctgatttgatggtgcgcccttggggtcctttcccagcctgaccctgaggtgaatgccaaagatctcaatgttgaggtgcccttgagcagcgtgttggggttccagacttgcagatcagcccccaggcgtctcccctctcccaccacccagcctatgccttacaccttccttccagtacttccctggctggtaaactggcctgaaagggtcaagggaatttgttgagttttatatttcttccctttgttcctagctatggctgccaaatcatcttatttttgcaggaaaattactgtgatgttttagattaattcagagaagctttcagtgggctccttaaacatcatacccagtgcagtctaacaggcatttgttgtggcaatggctttgtagttttaaaggtgacctatagtcccagcaacaagcatacagagaactcagtgcattcttttagaattgtgagtgtaaagtattgctttttaaggtttgctattgctgtacccagtatgttaaatctaaaacatcagacattctgtaaacacgtttaaaaattgagttttgtaaatttgccttattttctttgttacaatggaaaacattgctttcagtgattaggggaaaaagtggatggcaaatttagaagacactatgatcctttatatctttttttcttggaaaggcaatttaattaggaaataatcttctcctgtgacatctgagagttaccataaaatgatatcctgctttattggcaacagaaccagtttatttgagtttgttgcaaaattttgagctattacattactatgaaaagatagattttaaataagaacgacgagtttacaaaaatcagaaatggcaaagcactttattttttaaagcaatcctcgattttaaaaagtacaatttcagacgggcaggcagtgggggagcgtatagggaaggagaaggaagcaccaggggagtatgtcttgggccgatcacgccaggccgcagctctggctggttgtgcgcgtgtgactgtgtgcacgtgtgtgtgtgcacgcgcagccacaggacctctgggcccggccttcaggggcgctccccgccccgggcttccccgcggaagggagtggggcgcgcgtacccagctgaggggcagggtccgacccgaggccgtgtgcaaatgcatccttcgcggactctttgtgtgtctgagcgcggctccgcgccgccgcaggcaccattttctgcttcgctcaggacaggcacataaaaggaaggcggctgccgcccgtcgccgtcctcttttcctcagatgccctctgctgcaggtttattattacagtacgggccgcgccgcctctccccacggccctggcgggccgccgggctgtgcagcaccctggccgccttcacgcttggcgcgcccccaaaccgcctcctccacctccttatttgtctgaaaagcaaccgcacgtcgaggcggagaggctggccgggggcggggaggaaggccggggatttgcgcgcgccgtgctcccggggcggggccggggcgcagagctgcgggtccgctttgtctccccggggcgccgcgcggtgcagtggggacggcgcggcgagcggggcgcccggggcgcgggtgcggggtgtcggggcgcgcgcgcctgttggccgctcgccgacggggcccagagccgccgattcctgccgagtaagcagtctggctcctaggcggctgca

SEQ ID NO: 34165 - DNA, 2300 bp, Homo sapien
caatggtggtcacatacctaagggaacaaatatcagaggtagatataaactaaacctatatatgctggctgccccagtccaagaaaatttcctctctctcactgcattagtccattctcatgctgctgccaatcaagacatacccgagactggataatttataaaataaaaaggtttaattaacttacagtttagcatggctggggaggcctcaggaaacttacaatcatagcggaaggggaagcaaacacatccttttgcacatggcagcaggaaggtgaagtgccaagcaaagatctggtgagatctcctgagaactcactcaccatcacgaaaatagcatgaaggtaaccaaccctatgattcaattacctcccaccagctccctcccacaacacctggggagtatgggaactacaattcaaaatgagatttgggtgaggacacagccaaaacatgtcactgactttccctagcaagaaggcaagactaaggcatgttataatccccacactgtgcctttcgctgtctttaaaggacaatcttcgtgttactgccttccttctgcaaacttccttttgccccagatgttacagtgacttcctaatgaagtctggagttacttaccttcttgtaataattatacatttactaattctgtacagtcattttctccagattgatttggttattattcatgctagtccttgtgtgatgaccactgggctgtgagcctgaattttcttttttttttaaaccactttattgaggtatgattgagatacaaaaagctgtatttaatgtatataacttgatgtgttcggagataagctccttttcttctctttccttctttcttttatagaagtaggcttcaaagaaacaacgaaaggtgctaaaactggtctctggatgaatctctgctaggacttagagaaacatggagacctagttgttatcatacaacttgtcttgctgccacttgtcctgtcccttcaaggagttatggttatcaggaaaaaagccaattaacaaactctgcttaatttttgtggtgataattaatcaactctaagatttcagcataaaatcccaacaccttgccctgtgtgacaagaccctaagtgccttgctcctgcctggctctccagctgcatcttgtcactctacactccttactcgactccagccacactggccaaggcctgctgtctccagatcttgcataaccgccttcacacatctgctcggagttcacttccagtcttcctattcctagccccatgagctactgaacacttgaaatgtgtctagtctgaacggaaatgtgctggaagtataaaatatacaccggatttttatgacttagtagatataaaagaaatatcttattaataatctcatattgattgcctgttgaaatatttaaaatatgttgggttattattaaaattaatttgatctgtttctttttacttttttttttttttttttgagacggagtttcgcccttttgtccaggctggagtcaagtggcatgatctcggctcaccgcaacctccacccccaccccgcccgggttcaagccatttctcctgcctcagcctcccaagtagctgggattatagacgcccgccaccaagcccaagtaatttttgtatttttagtagagacggggttttgccatgttggccaggctggtcttgaactcctgacttcaggtgatcacctgcctcagcctgccaaagtgctgggattacaggcatgagccaccgcgcccggcgttcttttcacattttatgtggcaattggaaaatttaaaattacactcatggctcacactgtttccatcggacagcgctaccctatggcatgaccctcttttgctgccctcctggcacttacattgtagaatttcagcatccgggctcacttggtcagtggcctactcacccaagcagaatgtaccacagaaaccttgcctggctcacccacacctgattcccaggcactcaggccagggcctggagcatagtaagtgctgactaaatatctttcgaatgaatgactctactcttcctcagctggactcatgaattctgtcgggtcccaaaatacgtggtctaaagtcctttgggctcctgccgctgccagcactgatcatatgctcttgaccctggtcgggtggggggatgtctggatacctcctctgtggaaagaactggccacacatccgcagaggtgactcgggctgagaacccaggctcctcctccctttggtgacacgcccctcggtccct

SEQ ID NO: 34166 - DNA, 2300 bp, Homo sapien
agatatttttagttagcatttttccccagtatggtacaatgtaactagagtcacagtataatttattgtccaaactcctgacactttagagaatgatgaagtgagttattaataattatatattcataataggcataaattagtactctcctaggcagactggcacataggttcatcctaattaaaaccagagataaatgaggactcaagcattccatcatagctttaatcagagtgacacagaaggaaagactcagcaactctaacttgttctaatttaaataaaatactaaatttactataaaccccataaaatatacaaaataagcaatatatagttactttaaaataggccctgagacgctataaaatgtttaacatatgaaaatatgattttactttatcacaaatttgccttatgactctactaagatgcttgctataataaaaatcaagttttaaattaaaaattgtttgccttcagtttttgattttttttttaatgcagtgagttaaagatctgtgatatctttaaaaggcaggctatccagggaagtttgagtagatatttttttttctttatgaatttctcagagacagcaaatgatgttaccagtttttagaattttgtctgtttatccatgtatccaacttgcaaatcaagaagtatttattaagcagctactatgtgctgagccctagatactgggaatgcagttactaatgtgatgtggctcctgtttctttgtatgtgtttgtctgtatttcagctctttgttttctaatacatatttttaatctctctgttcctctgttcctctttccttttgtctttgaatcagatgtctgtcatttctgtatttggcaaaagatttgattgtctagtcagatgttaaagtcttttttttttttttttttttttttgagagaaggtcttattctgttgcccaggctggagtgcagtggtgcagttatggttcactgcaacctcaaccttctgggctcagacgatcctcctgcctcagcctcccaagtagcggtgactacatgcatgtacctggctggctaatttgttttttgtagagatggggttatcactatgttgtccatgcttgtctcaaactcttggcctcaagcaatcctctttccacagcctcccaaaatactggggttacaggtgtgaaccactgtgcacaaagtcttaatagaggaagagaaatttgcatctctgacccatttcttaaaaaaatacacttcaggaaaagaaatttgaagatgccaatagagaaggaggagggtgtagtaaaatgcaagtttccagcagcaagcagtgataattctcacagttgtctcttttgtttataaggttttttttttgtttgtttttttgagacagggtcttgctctgtcacccaggctggggtgcagtggcgcaatctcagctcatggcaacctctgcctcctgggttcaagtgattctgctgcctcaccttcccaagtagctgggactaccggcatgcgccaccactcctaacttttgtatttttaatagagaaagagtttcactgtgttggcctggctggtgttgaactcctgatctcaggtgatccacctgcctcagcctcccacagtgctgggattacaggcatgagccaccatgcccactcttgtttataaggttttgtattttaagttctcctaattttacttgactctgcttttctcctttccaagaggagcacagatgatcattatcaagtggatttaatgctcaggtgaacattcagggaattgaaaatagttaaatagggttggaaaaaggtgtgtaaattatggaacagggtggtcactgatcagcagcaagaagtgacccaagaagtaagcagaagtaagaagaagtcagttttacaagctatcttaaggagcttgaactttatcctaaaggcaaagggaagtcttttgagggttgttgttgttttttttttaactgaaagagtgacatgatcctgtttacatcttaagaatcctgcttacctcttgggaggattggaaggaaagtaagtatgagtgatggcagaacagttaggaggaggttttagaagtttaggagagagtgacctggtgtaggggatggagagaagtatagatttcagaaacagcatatttggtgattgaatgtgggtgccagggatgattacacgttgttcccaggtttattttacgtggacatctgaaggcgggggtgccatttactgaaatgggcagtggggaaacatgggacattgagcaaattttctctg

SEQ ID NO: 34167 - DNA, 2300 bp, Homo sapien
gggaacagaatccctgcccatccaaaaccctcagccttctcactgccactggaggtaaaaaaacaaaaacaaacaacagcaaaaccaaaaatcagaaagcaaaaaaaccaaatcaaagggccaaaaaacaggtgagagcaaaactcaaaaaaactgggaacagatgattgcttgaaccttttgtttttgcagcctcaagtgtctcggttggatatggaggtaaagaatgaaaatgttaagccatctttcaatcacatttggtaactcctgtcaggaatactgtattacagaaaagaaaagcctctacaagcagaaatgctaaaatctagcataataaggtgtcacctcataaggcaggcaagactttgacaataaaacaaagctggacacgaaatttgatcagaaattcaaaacctgagtcaatttcacagaaaattcagaagataaaatagttttattcatagcctaggtaaagttcagaaatttatattgcactttggcggttatgctgatcctgtgtttggatggggtcacaatagcagggaaggccgaggcttcctacagaaggtcctttgtggcaaatcactatgagaggaaactccatcaaaagtcgccaattgttcatttcatttctactgtgctacggaagcctggttttgttttaagggctaacgtcctaggttttaagcaattttttttgagctttggctacccagctaacaagcagtagaatagtcaactcaaaactacgtctgatgccaaagctctaactctaaaactcaatatagagttttttttctgtgacacctcccctcgtgtctcccctaactgcgactcgcattaactcgctgctggttcccagctggagagcacagattgcacctgctccgaagcccagcggggctcagtgtcgtccgcagctcaacctcggctgcctgtgcacggacatcgggacccaccaggggtcactgcagcttcagagctattgtgcccctcagtcctggacgcggccgaccgcgcggagggcgtgggattgggaccgccgaaccgtggggtccgagcagcaccgcgtcctcttctccccacccagcctccaggtctctcgggggaaggacgcagcgagcgctggactgccccgcggcttgggcgcagtgtgcggcttggcagcgtggactcgccggcacctcgccgctgggaccacggtctctgccccgccctccgcccccagctgataccccgcccagaaggggctcccctgccgcggccagcgctggactggggggtccgcttcgttccagggctttttgcagacgcctggaccgggcccacatgcacctgggctgctcccgcccggggcgccaccactcgcgcggccaagagaactttccccggagcctctgcggcctggcgcgcccagggcgcaccccccgctcgcccgtccgccgcgttcccagctggggcgtcgctcctccgcccgcaggtccccgcctccccgctttgctgaatgtcctgaagaagccgtattccgccgccgcggcaggcattcccggagggagagcttgaacttggctacacacggccacccgtaatgagctcgggagtccccggacgggagccacaccccgcgacgagctgacctcccctcgctggtctgggtaaggagcctgctgccctttccgcctctcttccggctcctcggcgcttgcggctgggggacggggtagcggacggagcgacgaccttcgcctctgcccctgcgcccatggtcggggcgtcgtgggtgctcctcacacaaaagaaaagccgagcgcttcatactcggcggatctgacccggggctgcggggcggggtcgcggctggaagtgcgcgcccgcgggggactccgcaggccgatcggacgccaggacgtcggggccgcgctcaaatccgtgcggcaggagggaggtgcagcgcttccagggttttccaaggccggggagagcctcgaattcccatcactcctttttctggtctcttgcccccagtgccaggagacttttgtcgtccccaggactgcgggaggggccccgcgcccccgccttcggaggagctcgagccgcaggatgcgcggggacgcgccaccgccctccgcgcccagttccgccggcgcttccccggcggctcccgggcgctgactctcccgggcttttccgcctttctcgctcccgccccgccgggcggttcggcggccggtccccggaccccgccgggagctgctcgtctcaccctcgccacggcgcggacaataaattaatgcatc

SEQ ID NO: 34168 - DNA, 2300 bp, Homo sapien
taaaaggcgttgaattctgtcactgttggtgtatagaagagctactgattcgtgtacattaatcttgtatctggaaactttgctgaattcttttgtcagttctaggaggagtccttagagttttcaaggtaaacaattatatcgtcagcaaacagtgacagtttgacttcctctttaccaatttggatgtcctttatttctttctcttgtctgattgctctggctagaacttccagtactatgttgaagaggagtggctacagtgggcatccttgtcttgctctcagagggaatactttcaacttttccccattcagtgttatgttggttgtgggtttgccatagatggcttttattacattaaagtatgtcccttatatgccaattttgctgagggttttaatgataaagggatgctggattttgtcaagtgcttttcctgcatctattgaaatgatgtgatttttgtttttaattctgcttatgtggtgtatcacatttattgacttgtgtatgtcaaaccatccctgcatctctgttatgaaatccagttgatcatggtgaattatctttttggtacgctgttgtattcagttagcaagtattttgttaaggattttagcatctttgttcatcaaggatatcggtctgtagttttcttttttggttatagttttctgttttggttatgtcctttcctggttttggtattatggtgatgatagcttcatagaatgaattagggagggttctttcttctctatcttgtaagatagggtcaaaaggattagtactaattctttgaatgtctggtagaattctgctgtgaatctgtctggtcctggacttttttctgttggtaatttttaaattaccatttctatcccactgcttgtcattggtctgtttagggtatctaattcttcctgatttaacctgggagggttgtatttttccaggaatttatacatctcttctaggttttcaagtttatgtgtgtaaagttgttcatggtagccttgaatgatcttctgtatttcagtggtgtcagttgtaatatctcctgtttcatttcttagtgaggttatttggattttctctcttcttttcttggttaatcttgccagtggtctatcaatctgatttatctttttgaagaaccagctttttgtttcatttatcttttgtattttttgtttgtttgtttcagtttcatttagtgttgctctcatctttgttatttccctttttctgctgggtttgggtttggtttgttcttgtttctctacttccttgaggtgtgaccttagagtgtcagttttatgctctttcagtcttttgttgtaagcatttagggctatgaaattccctcttagcatcacctttgctgtatttcagatgttttgataggttgtgtcattattgtcattcagttagaagaattttttaatttccatcttgatttcgtttttcactcagtgctcattcagaagcaagtcatttaatttccatgtatttgcacagttttgaaggtcccttttgaggttgatttccagttttattccactgtggtctgagagagtgcctgatatactttcaattttcttaaaatttttgaggctccttttatgtcctatcatatcatctatcttggagaaagttccatgtgctgttgaatagaatgtatattctgcagttgttagatgaaatgttctgtatatatttgttaagtccatttattccaaggtatagtttaaaaccattttttctttgttgactttctgtctcgatgacctgtctagtgctgtcagtggagtattgaagtgccccactattattgtgttgctgtctatatcatttcctaggtctattagtaattgttttataaattttggagctccagtgttaggtgcatttacgtttagaattgtgatatttttctgttggacaagcccttttatcactatataatgtccttctttgtctttaactgctgttgctttaaggtttgttttgcctgatataagaatagctacccctgcttgctgttggtgtccatttgcatgaaatgcctttttccactactttaagtttatgtgagaccttatgtgctagagaggtctcctgaaggcagcagatggttggtaagttcttatccattctgtagttctgtatcttttaagtggagcatttaggccatttacattcaatgtttgtatcgaaatgtgaggtaccattgcattcatcgtggcctctgttgcctgtgtactttggggttttttttctttacttttgcttct

SEQ ID NO: 34169 - DNA, 2300 bp, Homo sapien
acttggctttcttttagatttgaagcatagtgactaatgaacatataatggtcgtagctttctttacaactatgtcatttaagtcactgatgaatatctatgatacatgcagtaaaaatttagacaaacattttggctacaaactggtttactaaataatagcttgtatcatagtctgagtcaagagtaataggcttacaattgtgtcttagggtactaagaagttcttttgaggaccttttaaaaggtattctttgttttgaaagactgttttccttctggaagttctaggccttatgagaaattacctattctgaatttgtcacaaaaaatgacttgtaaataagtcctgtgcagtgaatcatgtgctttcagtaagaggattttgaaagccttttgtaaaatgaagtcattctcaaaagagagttatttagaatataatcaaattgatttacatgcttttatttatttcaaatatgaagggaaattgtttctaaatatatttaaacttttaatagaacagtagtatgccatcagtgtggaaataactcacttgttaaataaatatttggggtgtatttgctgtatatcaggcattgtaacacagggactaatgaaagagaaaaaaaacaaagcacgaaaggacagcagaaatagctccataatctcactttccaggaataacctctatggacattttgttgtgtgtctattgcttttctaatatatacattttttaatcaaatggaattgcctcaaatatgctatttaatagcttgcttcttttcatactatttgaaaattaagaaacgattataatatgcttcatttaaaaactttaagtttaggccgggcacagtggctcacgcatgtaatcccagtacttggagggaccgaggtgggcggatcacaaggtcaggagattgagaccatcctggccagcatggtgaaaccccgtctctactaaaaatacaaaacttagctgggcatgatggcacgtgcctgtagtcccagctacttgggaggctgaggcaggagaatcgcttgaacccgggaggtggaggttgcagtgagcggagattgcaccactgcactcgcctggtgacagagcaagactctatctcaaaaaacaaacaaagaaaacttgaagtatagtatccttttaaattttaaatagataatagaaactggtttccccccatttaaaccagaatttaagtttaactttatatattcttgacagtttggattttgtccttcaacctcataaaattgggaatttaagcatcacctggttcgatttaaatgcaatgtagaatttgcattaaaatactacattaaagcctcagatttgtagtagctaacagcacttctatgtatgtgtcagggactgctctaaatacttcatatatattaactcctctattctgtacttctgttcccgttttatacagcaggaaattgaaacactgagaggttaagtaactaaagttacagagctagagtgacaggagtaaagcttcaactcaggcaacccagacttccagagttctgatctccactactaagctgctagcatagcttttctggtaactatttttaattcaaatataattcgagtgatctatctaacaagtcatcactctgacaactcagtgacttgtaatgtaaaattattcattgtaattcatttaatattattgtttctctgtgctgcaaaaatcatagcaatcgagatgtaatttattactctccctcccacctccggcatcttgtgctaatccttctgccctgcggacctcccccgactctttactatgcgtgtcaactgccatcaacttccttgcttgctggggactggggccgcgagggcatacccccgaggggtacggggctagggctaggcaggctgtgcggttgggcggggccctgtgccccactgcggagtgcgggtcgggaagcggagagagaagcagctgtgtaatccgctggatgcggaccagggcgctccccattcccgtcgggagcccgccgattggctgggtgtgggcgcacgtgaccgacatgtggctgtattggtgcagcccgccagggtgtcactggagacagaatggaggtgctgccggactcggaaatggggtaggtgctggagccaccatggccaggcttgctgcggggggaggggggaaggtggttttccctcgcactgtcttaaaccgatggcctttccttggcacagggtccactgcagcatgccaaacgaggaggcaggggcgtcgtccccccgccccccactgcag

SEQ ID NO: 34170 - DNA, 2300 bp, Homo sapien
gtttctaaatatatttaaacttttaatagaacagtagtatgccatcagtgtggaaataactcacttgttaaataaatatttggggtgtatttgctgtatatcaggcattgtaacacagggactaatgaaagagaaaaaaaacaaagcacgaaaggacagcagaaatagctccataatctcactttccaggaataacctctatggacattttgttgtgtgtctattgcttttctaatatatacattttttaatcaaatggaattgcctcaaatatgctatttaatagcttgcttcttttcatactatttgaaaattaagaaacgattataatatgcttcatttaaaaactttaagtttaggccgggcacagtggctcacgcatgtaatcccagtacttggagggaccgaggtgggcggatcacaaggtcaggagattgagaccatcctggccagcatggtgaaaccccgtctctactaaaaatacaaaacttagctgggcatgatggcacgtgcctgtagtcccagctacttgggaggctgaggcaggagaatcgcttgaacccgggaggtggaggttgcagtgagcggagattgcaccactgcactcgcctggtgacagagcaagactctatctcaaaaaacaaacaaagaaaacttgaagtatagtatccttttaaattttaaatagataatagaaactggtttccccccatttaaaccagaatttaagtttaactttatatattcttgacagtttggattttgtccttcaacctcataaaattgggaatttaagcatcacctggttcgatttaaatgcaatgtagaatttgcattaaaatactacattaaagcctcagatttgtagtagctaacagcacttctatgtatgtgtcagggactgctctaaatacttcatatatattaactcctctattctgtacttctgttcccgttttatacagcaggaaattgaaacactgagaggttaagtaactaaagttacagagctagagtgacaggagtaaagcttcaactcaggcaacccagacttccagagttctgatctccactactaagctgctagcatagcttttctggtaactatttttaattcaaatataattcgagtgatctatctaacaagtcatcactctgacaactcagtgacttgtaatgtaaaattattcattgtaattcatttaatattattgtttctctgtgctgcaaaaatcatagcaatcgagatgtaatttattactctccctcccacctccggcatcttgtgctaatccttctgccctgcggacctcccccgactctttactatgcgtgtcaactgccatcaacttccttgcttgctggggactggggccgcgagggcatacccccgaggggtacggggctagggctaggcaggctgtgcggttgggcggggccctgtgccccactgcggagtgcgggtcgggaagcggagagagaagcagctgtgtaatccgctggatgcggaccagggcgctccccattcccgtcgggagcccgccgattggctgggtgtgggcgcacgtgaccgacatgtggctgtattggtgcagcccgccagggtgtcactggagacagaatggaggtgctgccggactcggaaatggggtaggtgctggagccaccatggccaggcttgctgcggggggaggggggaaggtggttttccctcgcactgtcttaaaccgatggcctttccttggcacagggtccactgcagcatgccaaacgaggaggcaggggcgtcgtccccccgccccccactgcagcactggagatggatttcctgtacttcggatccagggtttttgacagaagaggaagaagggggaggggtagaagtgttaaggggagtctgctgagaaaagctgtttttgaagccagaaggggtttttgtttttataatgccatttgacagagtggaataacagtatctaaggaaacgggtagaggacaacaaagaatggagcatattcatggcgaggagcaaaagctctaccccattgaaaggcttcttttcctccctggcgacaaggacacatgcattggtggccaaaagagagaggagacaaaaccgctgcagatggctgatgtgaatctagtggaaagagctactggggatgagagaaagaggaggaggcaggtactgcagagcgtgagtggtggtgttggttggtgaaatactggtcaccagtagtgtgcctgcttttgtaaaacatctaagtaaactccctgtgaacagggtggcaaacagatac

SEQ ID NO: 34171 - DNA, 2300 bp, Homo sapien
tttagtgtagccactaaatgatactagctaatcattgatcatcgtcaatgatattagctacattttctggataacttgctgcagcttctctatcagcacttgctgcttcaccttgcacttttatgttatatgttatggagatggattctttcttaaacctcctgaaccaccctctactagcttcccacttctgaagcttcctcacctttctcagccttcacagaattgaagggagttagggccttgctcggattaggctttgggttaaaggaatgttgtgactggtttgagcttctatccaaacccctaaaactttctccatatcagcaataaggttgttttgctttctgatcatttgtgtgtttattgaagtaatttccttttaattccttcaagaattttgtctttgtatttacaacttggctgttaggtgccaagaggcctagctttcagcctatcttggcttacatatgccttcctcactaagcttaatcatttccatcttttgacatgtgagacgtgtgactcttcctttcacttgaatacttagaggccattgtagggttactaactggcctaatttcaacattgttgtgtttcagggaatagggactccagaagagggagagagatgggaaatggccagttggtcgaacagttaaaacatacacaacatttatccattaagttccccatcttatctgggcatggttcatggtgccccaaaacattattattatttgagacggagtcttgcactgtcgccaggctggagtgcagtggtgtgatcttggctcactgcaacctccacctcctgggttcaagagattcccctgcctcccgagtagctgggactaaaggcctgtgccaccatgcctggcttattttttatattttagtagagatggggtttcaccatgttggccaagatggtgtctatctcctgacctcgtgatccacctgcctcggcctcccaaagtgctgggattacaggcgtgagccaccgcacccggccttaaaactattacaatagtaacagcaaacatcactgatcaccgatcaccataacagaaataatgaaaaggtttgaaatattgcaaaaattaccaaatgtgacacaaagtatacgctgctggaaaaatggcaccaagcaacttctttcaggcggatttgccaaaaaccttccatttgtaaaaaggcagtatctactcgcagcagcaagtgaagtgcaataatgaagtatgcctgtagtgatggcacatggtatccttcagaagttttaaaaggtgaatagttttgtttcgtttttcctagacggagtcttgctctgttacgcaggctggagtgcagtggtgtgatctcagctcactgcaacctccacctcctgggttcaagtgattctcctgtctcagcctccgagtagctgggattacaggcgtgtgccaccacactcggctaatttttgtatttttagtacagacggggtttcagcatgttggccaggctgctctccaactcctgacctcatgatccacctgcctcagtctcccaaagtgctgggatacaggcgtgagccaccgcacccggcctaaaaggtgaatagctaagtttctaacgcagagcacactgaaacacaacgtctataactttgctagttctaccactacaaaaatccattttgccaaactgaaagcaagctctagagcccaggaacggagaaaaattaaacgtaaggagtatttccttccctgtctaacatatatttgcatcctgaaccacacagattcccctcgtggcacagtcttcgccccttaacagagagtagctagtaccacccatactcgctgagaaactggaaacgagggagggtcgaagttaaaccctttttagtggcggtgcatgcgccccacatggtcttcccggcttgggaaaggaatgagaagctttcatgattctctcgcgagaagggaagtcttcatgccacgtcagagactagagatcctggcgccgagcgacaggtgccggaacaaacaggcgatgagaaatcgcggacgcggaaccatttcttgggcaggacttccggcggaaaagcgggctgtctcggaaactcagagccgggttcctcccgggtttctgccgggtttctccctgcggctcctgggttgttgagactcttgtgaagatggcttgcgctgccgcgcggtccccggccgaccaggacaggtgggttctgaggcggtgggtcctccgaaaggaaggggcttgctgtggtgctgcaggtgctacaccgcgcttctccg

SEQ ID NO: 34172 - DNA, 2300 bp, Homo sapien
acatggtctggcatggtggtggctcatacctgtaatcccagaactttgggaggccaaggtgggcagatcacagagttcaagactggcctgggtaacatagtgaaaccccatctatactaaaaacagaaaaaattagccggacatggtggcacacggctatggtcccagctacttgggaggctgaggtgggaggatggcttgagcacagcaggaggtcgaggctgcggtgagctgtgaccacgcctctgtactccagcctgcgtgacagagtgagacagtctcaaaaaaaaaaaaaaaaaagtagaacataatgccagacagtaataaattctatggagaaaaatcaagctagagaccactgggggttgcaatttgagattaggggtaccatttgaacaaatatctgaataatggaaggggacagttaaatggttaactggggaaagatactttcagatagaggagggtttctggactgtcacattattgacatttggggctggataattctttgttgtgggggctgtcctgtgtgttacaggatgtttagcagcacccctagtctctaaccactagatgctagttgcacttgccacctcctgctctccttgtgtgacaatctgtttcacaacgaaagtatctctagacattgctactcctccccccaggaggaagaaggggagaggaagtgctcctggttgagaaccactgaaatagaagaaaagtgaacgaacgcccagaggcaggaatgggcttaccttgtctgaggcacagcaaggagggaggcagtaagggaagacatcagaaaggggagggatgaaccatgtcacctgtgaccctgatgccctccttcaggcagataggaagttgctggagggttgagaacaaaaacatagcacaacttgacgcacattttaaaacagattctactgtctgccacattgagaattaactgtaggtgaaaagacagaagtagacagcaggttgtttcacttgttcactgatttggctgggtggtggtaggaacagctgagaaagctgagctaagaagctctgaggaagaaaggaggaaggagaattagcataaaaggaaaaagctaggcgtgggcaagataactttttgcagaagtggaaggcagtagggtaattaagtagatttgaaagcacagaggggttgtgtaggaccaagacagaatgttcggggccagttgtgggcagggcattgaatgctctgccaaggaatgggagctctagtctgttaggataataatacggagcttcggacaaaaattctgcagcagtgtgcagaataggagtcaacaagagtaattttaggagtgtctggaagtcatatgggtgagataagaggagcctaggtttaggtggaggaagagcatggccaactcattctgaaggaagcaaaaatgagctcctgccctaaggcttggaccttagaatctccgtcttcttcagagtattttgactgtaggaagtgcagagtatattggctccacagagagaatttggacacttgccacagtatcagacaccaagacaacgcaagcccaccatgaaaagatttaatgcagtttttgcttggaaaaggtgtaccccagggaggatgtgttagatttcttcaagggtctttacaaggcaacgattgtctgtaggtgagaaaaactgccaagttaaggcaaagagggagaaagcaggactgcttccaaagagttctttcacgatgctcaaacatttcaattttttaggtcaaaaatgccttaggtttagcacagcaatgtaggtgccaaactcatcgcagtgaattgcaggcgggagcaacaaggacgcctgcctcctttctgcctgctttttgcaatagtccgatttgagaaggggacccacgagagacacaaaatgcacgcccccacgccacatcctttttaccccgcaatgggttaagactgtcaacaggcaggccacctcgcagcgtccgcggagttgcaggcccgcccccgccagggtgtggcgctgtccccctggcgctgggcgggggaggaggggcgcgcggcggccgaggaggggcgcgcggcggccgggcggggcgagcggaggcgagtggaggacgcgtagacgcgccgcggtccccgcctgccgctgctccgccgcagtcgccgctccagtctatccggcactaggaacagccccgagcggcgagacggtccccgccatgtctgcggccatgagggagaggttcgaccggttcctgcacgagaagaactgcatgactgaccttctggccaagc

SEQ ID NO: 34173 - DNA, 2300 bp, Homo sapien
attcagtcagaacaggtagaatgcacacccagcaaaatagaactgaaggggctcactcttacctttaccaatccatccactacactggctggaggtccaactgctagtatctgcatttctttgccgtaggactttttctggccaccagagcccatcttgctgcccatgtagcaggctagagtgcagaccccaggagctgccttcaaccaatgaaggaagttggtatataaatccccatctccctcaccccttgagtgggataactctgaggtatatgttttatactggccaccagagttctccagtgacagtaagctccagttaaccacagtgctaatttccttgataataaaccttttggctttcctcccctccttgactcactttcctgctctcctaccaatgtttcccaagatcacctccctcacaggctatctgcactcaaaatcttgtctcagtgcctgcttcttaggaaatctaaaataagacttggactgtgctgggagtactgaataaagcaaatggaatactgcagcctgtgcttctgtactggactcccagaatacatgaagctgtgcctggaagcattttctctttagggaatttcatcagcagaaagaattacgtacagatactgataccatgtgtttccaaccaacagctcagccagatcatcctacagtgaagctctcaggaaacaagtaccatctacaaggtgagagcttccaattagctttcaaggcacttgactccaggttaaggccttactcttaagtgtgagtgaatagtcaaggactacagaggcttctaataggatagatgagatcaagataatagcaaaaagcagctgagaggaataagactactcagggagaagaaaacgtcaaaatctattattaatatcctcagaaggataaaataaaatatacaaagcaagaatgtgacaccacaagaaaggggcatttgaagaacaaaacagaactctaaataagtaaaaactctgtagttgtcaggaagataaatttgaggaattctccaagaaagaggggaaaaaaaagatggaaaacgggagcaaaatagatggtgacgggcctcttatgccaaaggaacttgggcttgatcatacagcagaaactgaaaagataacttgttcctatctgagtaaaacaaaacaaaatgtaggcagttgcacaggccaagaatggaggcagagtcagtggttaggcagctctcactgtagtatggagaaatgatgcaaaactgaagtacacagtggcatgtgacaaatttagacaaaagatgggagattaaatggtagaacagactaaacttgtgacggagcaggtgtgtgtgggcctgtgggtctgatgtaagaggaaaaagaacagatggatctagtttctccaaagatcccaaatggattggtctccattaagcaagacgaggaatgaataaggacgagcaggtggggattgctttgtgcagagggtggaatacagatcagagttcagcttaaatcagtattttctaagattttgctaggtgccagatactgagataaagtccttgtcttcatgtttggaaccaggtgcctaaggaagcacagaggagagccacctccaaaatggataccctctccaagggtttgtagtgaaagaggcacagctcttggcctggagttggtgggggctgcgataagtgcaagatacttggtgacaggaatcgcgagcatactcttgtgttgtacggattctcagggtcggccctgcagaggaaagagctcagtcaccgcgaggtcctgcacaacatgccaaagtcccggatatgtgtccggggtctacacctaagccccgacccctctgaacttcccagaagcgcgcaggaggcatggtgcgcatgcgtgtagccacctcaaaggcggcgggaagttggttttctgagtagcaactgagcagcttgaagacggattggaagtagcagaccaataaacaaacgtctcattggcttagagtgcttagagtcccaattcttcagcttcccattgggcctttcaagcgagcaggggcgtgactccgggggctccgccccgagccttggcccagtcttggggtccaaggctgagggagcgggacggaagtgagcgggtcccgccccttccccttctcgtctccgttggagtcgtctctgccgcggcttcctcggctgccagctctccggcgagccggagtcctagtgccgtaccgtcagtccccggccgcgcggagccgggatgcactgttcctgctgtgggtcctcatcat

SEQ ID NO: 34174 - DNA, 2300 bp, Homo sapien
tgacacgtctcttcagtctcctttaatctgaaactcttccttactttttcttcagtactttcttttattaagcatctagttagatactgttggtaacacaaagataacaggctctgcccacgaggaattcagattatacaatttacttttagcataatttccaattatgcagattcatatgactagctatgtatacttatttctgatttttgaggcattattcaaagagcagagctaaagaaaataactataaaactagaattaagaaacatataaaaattactttttaaacctttttctgttgttttttttttgagatggagtttcgctcttgttgcccaggctggagtgtaatagcatgatctcggctcactgcaacctccatttcctggggttcaagtgattctcctgtctcagccttccgagtagctgggattacaggcatgcgccaccccgcctggctaattttgtatttttagtagagacggagtttctccatgttggtcaggctggtctctaactcctgacctggtgattagcctgccttggcctccccttagtgctgggattacaggcgtgagccatcgcacccagcctttttttttttttttttaaagacagggtcttgctctgtcatctagactggagtgcactgggatggtgatcacggttcactgtagcctggaactcctttgatcaagtgatcctctcaccccagcctactgagtaactagaaaaacaggcgtgcggccgggcatggtggctcatacctataatcctagcactttgggaggccaaggcgggtggatcacctgaggtcaggagtttgagaccagcctggccaacatggtgaaaccctgtctctactaaaaatacaaaaattagctgggcatggtgacaggcagctgtaatcccagctgctcaggaggctgaggcaggagaattgcttgaaactgggaggcagaggttgcactgagccaggagcccaccattgcactccagcccgggcaacaagagcgaaactccatctcaaaaaaaaaaaaaaaaaaaaagaagaagaaaaacaggggtataccaccatgccaggctaatttttatctacatttttttgtatagatggagtcccactgttgcctagaatggtctcgaacacctgggctcaagtgatcctccctctttggcctcccaaagtactgagattgcaggtgtgagccactgtgcccagtcctgtttttttgaagtgcaattactggtctcgaacacctgggctcaagtgatcctccctctgtggcctcccaaagtactgagattgcaggtgtgagccactgtgcccagtcctatttttttgaagtgcaattacttgtctaatacacacacacacacacacacacacacccacacaccctacctgagtttttaatatattcttgatcttaatggtgtctttgaagacagttgcacatattgataggtaaacttttaagtaaaccagccttaattgttaaaattataaatccaagccatcgagattaatttattaatcaaaaacattattaagctctatctcaagcagtagattagaccttagtttcgaaggaaaggaaaaccaaagcatctggacttttactctgattggaatgctcagacagcttgcatgagtcagttccacatcattgatgatttaattaccttaccttctgtatataaatgttaagatttggagagtgggaaatcttgaaacctctatcactagccttcagaattttattctgggaaagatatatagtttgtgtgtgtttgaatgtcagcaatcaggtctacagtggactggttctctatataccataccacctgtggatacagtattagaaacaatagggcacaagaactttttttacatctcatatgcatttctgtaccagcctgtcatttctagaaatagtaaatacaagtcatgtcccctttttctgagtttttgtcttgggaataaattttaatgaactagaggcctaagaactaaaatgaaaatttcatccaaatttgttgtttccaggtctttgaagaaactggttttgatatcaaagactatatttgtaaggatgattacattgaacttcgaatcaatgaccagcttgctcgtttgtacatcattccaggaattccaaaagacacaaaatttaacccaaaaactagaagagaaattcgggtatgtaacaagagtattttcaggttactggacagtatcccaaatgaataagtagggaaatccttttataagctccttgataaaaattaactaa

SEQ ID NO: 34175 - DNA, 2300 bp, Homo sapien
tccttacccaaccatttgtgaatctagtgttctaggtaggtggtagaagagatgactgtgccattgttaatgatgggaaactgagtcaaggaaaagcaagacatttcttaagcgcataggaatccacaggcagctgagtcagctgcattatatccttgcaattctgtgcttagaaatgtaaacaaaggcctcttagataagtatatttcctgctattgtcttaacatgaacatacttgctcactaagggtcccattttgagtgatacagctgtaatcaatggcgtggttaaatgcttaatctaggtaaattgatagaaaaatgaagcaaatatttttatccttgtcttagcaaaatgttaaatttccccaaggagagattgaattatgtcagctttttgtttgtatatatatatattttttgcagggcaatttaagaggtaaagtgaagcagttatctttctgtcaaaggcttttcttagcaccagtgttggtagtgtgtgggccctttgatttaaaaagcacggatctatgaattacctggaaggtaacatgcatggaagttagggatatagctcaggtcacatggaatttggcattggaatttttgtttctcaactttctaagtggaaaagttatcttattctttgcttcatctagtatgctaaaaaagttaaatgggcctcacatcagaaaacatgaagcatttctgtgtcccattgtgtgggatacagggagttaggtagggaatgcagtgggtgcaaaggggacgacacattgttatcttgggtacctaggttttttattctaaaggacgttagcccttggggactaggctgagtgctttatttttctttattttgtatggttctcttttttcctaaaaacttgaatgaatttgatgtgtgccccagtaaactttggaattctatcagtgaaaggcttagtccagccaccgaagtcagcacaggtacatgggcattcccccacattctgttgcacgctttagtgaatatagcccatgtttggacaccctggcgtggatgacctaaagatgaacagccgtattattcattactgacttagaactattacattcctaaccacctaagaaaggttaagttgaaaatgctaaagaaggaatctttgtctcgaataagtcataaacatttttcctagtccaaaagtggtaaaagagttagatctagatctacctcctgtaggtacccttttctttagcatcctacaccctgttgtaaatgaaagaaagtaatgttaaacagttcagctcttcccacctctttccctgaaacattttcttattctctcttccttctttgggaaagtttacagttaagcttcttgtattatgtccgtttcaaaattgcagaaatgtaattatactttagaaaaaatatgcagttatgttgggtgctgaactcagtgtactctgttgccttatctctgaatgaaatcttgcagtggtgagagaaaaataaaagcagtctgtcagtggggttttcgctgtcacccttctagtaatcatctttattgccatttgtttcccctgattgctgctctgacatttccatgaacattaccaagggcagctgaactaggtaaattaggccctttctgaccaaataaaaaactattgacattttggcagtgctaaactcattaacagtattaaccaggagtcctgcttttagcaaagctccatcctgagcatgtgactgtaggttggggaagataaagaccttacagctcctaattagcaagtgtaataatggcaaacagtttgtgggagagtctgaataacattaatcagatttagaaggctaccacaatttaatcatttgttttggtgtcaccttgggggagataaaacccacattattctagagatatgaaggaagtgtttttttgatgtgtcctcattgcagtagcttaattcaagagacaggaatttagccacataagcattctttatcagttaaggtatcattgaaaaaggtatcattgaaaaagagttcattggcctctggttccctgcagtagagtctgttgaagtcaaaaggcccagtccccacctggagagagattgcggggccctgacgccagggagggaacttgcctgctggtgttccatgggtttggtaagcagagaattattctgccttgtctccctccaggttgcaaggctggtctgacttttatttccttcatccctgtcttctccatcaaatattcacccacccatctgtttgtgctgctgccttcttagtttctaacttttgct

SEQ ID NO: 34176 - DNA, 2300 bp, Homo sapien
ccttatattgtctataaagtagaatctacagacactgcttctcagtaagttcaacactgctagtttttcctctacttttggaacagattacttttcttttggttgaacaccagatgaagtcatctgcttggttttaggggtagagtcgtatgaaaaatatgtatctttaaacaccagaatcacattcaacactagcctatttgagttcatattagttactcatgagtgtgatttaaatctactggaatatctaaaagcacagctctgatctccattatttctatgctaaaaaacctttagtggctctccattgcctattgagaaggcccatttttttaacatggcacttaaaactgttcactgtctgacaccaacccccctttctcacccagcttatgctccagaatggaatgcctgtgatccccatgcccgctctgcacattccagtctccatccatactttctctcacagtggcctggaacgctttccccttacttcccatctctgctgggctcagccattcttcacaggtcaactcacatgctgcctcttctaagattccttcacagaatcttctctccagaccctgtccagccaaaatcgtatttccctcctctgaactgcagtcgctcctcatttgtactgtgtttatggcaagtatcattttctatctagaattgtcatttctgttcatgttttacaagtctataaacaccttcagggcaggggcagtgcttgaatcttcttcatagttatgtatataccaccatttccagcttcaaacatgcagttttcaacagatttcaatgaaaagataaattaaataatgtagcttcccatctcctccccatgcagaatgtgctctagtttggcagtgcccaaggacttgggacccagtgctctagaaagagcagcaaactcttcctaatcccagcagcacctccatcaggcaatgaatgaactcaacaagaagggggatgggtaaaacgttatatgcaaatagttgcactctgccccttcttaaagagcaaaataaacatgattttttaaaaagaccatggaagttgacaatacaatggctttttcacagaaggcttcaggatatgccaagttctgttattggggatggagacattttgtccccattgtgtagaaagagactgatgaggtctcttaagcaatctcgcagacctactgttttgaagcatcagaacatttttctgtgcatctcaaattcattggaactttaagtttgtggagagaaaaatcctagttcccctcttcccccatctcatctctctcccaatagacacaggatgttttacctcgggaactcaaagttgaaggggagctcagatcccaggggtgtactgggtataacagccccttgaatcttttctgaatcatactccacactccataaatacaactctacctccgctcaattaaggaaggtctgggggttggggagcctatctgacatctttcaagggatgggggttgaggagcctatctgacatctttcaagggatgggggttggggagcctatcgacatctttcaagggatggggcctctatcttcattatggacatgcagaaaatgtactctgccccagtgacagacagagggagtttgacattgaatttacacccgtagcgttgactttagactgattagggaaaatgactgccctgcacccttgtaaaatcttaatgttccgtgagaagtgcaccgtgctgtctgatgtacagtgtttaggtttgtcttgaccttattaaatcatggaaagcggctcctatgagggaagttttttttctttttcttttctttttttttttttaatttcctgcacgattattcaggtggcttttcctgtttctactccccctcctggactcgggtccttaattactattgcagagaactggaaggatgcctgctctgctctcccagcacggtctcctctgctcggcctccaggctactcgcccccacccttttctccctctagccccgcctcctccgcgcaccccgtggccagcagctagacagctgtgttcaatcagaaaccacttacaactccagacgattcgaaggggaaacttcggcgtgaagtgcagctccgctccggctccctctagctttctttccttctctggaatccgaggcgcggatcttcctcgccccaccgccctagttttttcgggagctcgccggtgccctctagggtgtcggctcgtgctgggaagtgccctccatcctggtaatggggggcggcgaggcaccgtaggagtggcg

SEQ ID NO: 34177 - DNA, 2300 bp, Homo sapien
caaatatttccaatagcatagcctacactttcttagttgacacaattgtttgttctaattttctaaaggtacatttttatgtaaaaggaaaagcataggcatgaaacaatattccactacacacttgtggttcagtaatcattttgctgttttagtgaaatatcctcagagcaactgaaaatgctaaatataaaggaatgaaaacagaaacaaggataataagcaatttctatttctactgaaatctgaaaatatagaatttctgtttttaatttgaagtctagaaataaaaccaaaatatatcttttctatagctgagtctaaaaaccaagttttctttgtaaaataaataggaaaactttttttttaataaggaaaagcattattctccaggttataccattttaatacatctgaccccaatttttagatcttggtttctggaacctgaagcaactggttctctgctgattgctaatttgagggaggaaaatgatcaggaaggaggtaaaatctaagtcagagctcggccttctggatctgagaggaaatgcataaaccaggcaagtgcggagcccacattaggaaactcccaagggggatggtgatgttctgtagttaaaacttaaagtcttctcaattagagaattgagagatagcttctcaattagaaacacctcagttctaagaagatgctgtcttttattcctgaacttgactgcataaaagcaaatgctccctatttctccagttcacaagccttcttcaaatgcaaagcctgggttaagcaccaaagagcaatgtttctcaaactttagagtgaatacaaatcccagagagctggttaaaatgcagattttgattcactaggtccggggtgatgcccatgatttgtatttctttatttttattttttatttttgagatgaagtctcgctgtgttgcccaggctggagtgcaatggtgccatcttggctcactgcaacctccacctcccgggttcaagcaattctcctgcctcagcctcccaagtagctaggattacaggtgcacaccaccatgcctggctagtttttctatttttactagagacggagtttcaccttattggtcaggctggtctcaaactcctgacctcaggtgatccacctgcctcgggctcccaaagtgctgggattacaggcatgagccaccgcacctggcccatgatttgtatttctaacaagctccaaggtggtgtggatgctactgatttgtggaccacacttactaccaaggacatagagaatacacacctgtggcttccttgactttaccatctggtggggaaagtctataagtaaatatgtaaccattgcagtttgactgcacacttttcctacttactgattatctaatatggctgtactataattttattttatttctgcatgaaaacttcttttcatgaatatattgaaacataattgtataaaatcatacagaaaaagaagaaaagacatatctgttatgaagttttactttaaaaaagaaatcaattatgagaaaacaaaaattacacattacaatttcttgactgaaataaatgcaagtgtttcattaaataaagagaaaatcaactccccctacaaacatccaattattcaattaaactttcttgggtaaagtcaacatcaaccagtaatgttgattttatacctatttctacctcctgttttaaagaatcagctatcaaaagataagagtttcctacttattccataaatatttactgagcatcaactatatattaggcactgggctgggtacagaggatagcgagttaatgaatgagggaagccaaacaagaaacaagtaagcaatgaattggtaatagttagaaaactaagtgatcaagatgaagaaccagcctccaagatagcctacaatgatccccatctcccagtattcatttccttgtacagacctcttccaagctaaataggactgacctgtgtaaccaataggatactgcataaatgacagtgcgtgacttctgaggctaggtcataaaagacattgtagctctgccttgctctcttggctcttttgctctgagggaagccagctgccctgtcatgacggtatgcatgcagccccatggagaggcccacatcatgaggaactaaccaagcactaacttgcctggtgtttcaataggccactttggaggcagattctccagccttggtcaggccttcagatgactgcagccctggctgatgacttgactgccacctcatgagagaccttgagccaga

SEQ ID NO: 34178 - DNA, 2300 bp, Homo sapien
gttaaatcagcttctatttcttcttgtctttcctcccattttctccagttgccatgctactcctgaggatctaggataatactgaaagaagcacatatggggcacaagatttctagcactttaaagcttaatgctttaaaagtatgttttgaggcttctttaaaagtttatggatcttgcccagagctggagtcggagcccccgaggctgccgccgagagtgcccgcgagcccgtggcccagccgaagctctttcccgccgcctctccgcgcctcgtccccgtccagccccacccaacccccaacccagcctggtcccctgaccctcagtctggcccggtctggcctcccagcagggtcacgcaactgccccggggacgatgaaaggaggataaatggtgcccaaggtggacagcggtgccttcctgctgctcttcctgctcttgctgtcactgagccgttgcggccagtggggaccctctgctgagacaggctctgtgtccagcacctgctccgggtcacgctctgggggagtaggagtcgcacgactgtctcagccttggatttgactttggcctcatccacctaggggccacgggagaaccatgtgggttaccaagttcaaggggagagagaagaagctgatgaaaatagaggctcatctgggactgccttccttctctggctccacccttgacttcttcagagcttgggctttaagccgtgagctccatctcattccctgggccgcaagaagctcactgggcccgcgtctctggaggctgttgggggggcccttcctctgtctccatagtcgacggcttgctggggaaacccaggatctccgactgcctggacatttgcattgctgtcccctcgggttttgtctcaggctgtgcctggggctgtgcctctccctcaggctccagcttggtggcagacttcttgtcagagccaggttcgggggtccacaagggttcagttccccgggaactctccccctccttgttgatggccacagagggagatccccgtgccttgggctgcatccagcagtggctgaggatctcgtcgatgtggagccgccggttgacgtcgggctgcagcatgtggtagatgaggtccttgcactcgcctgtcaggtgcttggagcgtgggaagttgacgcggtgctccttctggatacgcagcatcttcttgatgttggagtcgtcgtagggcatggagccgcagaccatgatgtagaggatcacgcctaggctccagatgtcgtacaccttgggctggtagggaatgccctgcagcacctctggggccgcatacgctggtgacccacagaaggtcttgcttaatgccattcgaccactgtcatcccgcaggcagcgcttggagaagctgaagtcggacagcttgatgttgaagtccttgtcaaggagaaggttgtcacacttgaggtcccggtggacgacgtccaggtcgtggcagtacttgatggccaaggaaagctggtggaacttcttgcgagcttcgtcctcatgcagggctccccgggttttgattaactcgaggaggtcgccctggaccgcgagctccatgacgatgtagaccttgccatgtgatgtctcaaagatctcgtaggtcttaatgatggagcagtggtttaacatggccagaatctcaatttcccggggaaggaatttctccaagaagtctgcgggggccttcttgcggtcgatgatcttgatcgccacattgaacttcaggcgctcagagtaagcagattttacttttgcataggagccctctcctaaatttatccccaggaggtagcctcgtcgcttgaggacagcagcgtcatccatggtgccaggaatgcccagtgcctctgaggctgccctctacagccccgaggcgcatgggccagcagtgtgctcatttacatcctggatagagagtcctttgggctggccaggcctgctgttcctgcctcctagaggccaagactctggagtggaacatttggcactgtctcccagatgacttcagcgagtgaagtcacaaaggaggagtgccctgggggaatgagaccctggcctgaggcacttggacttggaatcctggaaggctggccagtaggctggagcagacaagatgagcagaaagtggcctcgtgtcttgctgggacctgaggtagaaggggactgtgtgggacacatgggcctgcccatgcttccaaacccagagccaggcatacttgtgcagaattgaggccaattcttgcaaaccagggcatctgaggag

SEQ ID NO: 34179 - DNA, 2300 bp, Homo sapien
tttttgaagagatttcttctgagccaatatgtgactaatggcccaggacagccccagaagatcctgacaacaagtgcccaaagggatagggctgcaacttggttttatacattttagggaggcacgagacatcaatcagtgtatgtaaggtatacattggttcagtcagaaaaggagggacaacttgaaagtgggaggcgggcttctgggtcatgtggattcaaagattttctgattggcaattggctcagagagtttatctaaagacctggaatcaatagaagggactgtctctggggtaagaggttgtagagaccaaggttcttaggcagatgaagcctccaggtatcaggcttcagaaaaaacacactgttaaatgtttcttatcagactctagttaattatctcaggagaaaagagctagaaagggaaggggattcttcacagaatgtagattttcctcataagagacagctttgcagagctatttcaaaatatgtcaaagaaatctgtttgatagtaaaatacttcagtttctttcagagcctgctgtatcttactgccagagtctgttgtcagtcttcaggtctctgtgtcgatgttactgctgctcagctgtgcctgaaacctgaagggaggagggatgatgaggcctgcctgacccctactttctatcatggcctgaactagtttttcagattaattttggaatggccttggctgagaagaggggtccattcagatggctggggagattagaattttatttttggtttccaagagacagcacttggggtttccccagcaggaaggagaaggaggctgtctggaggaaggagcaccaaccacgcacaaaggactggcagtgggcagtcagagttggggaacaaggtgaaggagcagagaaaagggagaagggccacagctggtggtgacccaacccagcctgagcgacatccagctctactaactcactcctgaagggcccagggttccacctggctcatgtgaggaaggagttctcactccctctaggtggatgaggccaaagtcaaatccaaggctaggacagtcatgcaactccttcttcctgacggtgtggcccagagcaggtgctggacacagaaccagtcacagcagaggctccactgccagaagaaatgatggttgctgtccagtgcttcccctgctgcttgtaatgtcctcagagcagctgccagtgctcagggtggcatccaggccccaccttcagcccccagccccagatatgccctgggagcccagccagggccgtgagctgggcaggtccccaggagggagctcacagccaagagcagaactcctgccagctgtcctcctacagagctgctgtaagaagccagcaaaggctcagacaagggaagagatgtatagggaggcggcagaatccaggcatctcaaactgcgtgactccggggccaggaagctgtctaccttcttgacacaccactcttcttggccctgctctgcactcctgagggtcacctgtgtggacagcatcaagggctgaaggggagaaaaagaagtcagggatgggacttcctcccatcccctgccagcctgtagggtcactgaggctggctttttctcccctgaaggccactgcctctctcaaggtggtcctgtctacactactctttctgggttccagggaccattcccacccttttctatgcaggccaggggtctgctactatcttggggtaattgtgtgaccctcagggttccctacactctgctcccacctttattaattgtccctttattaaatcctcctcagatgccctggtttgcaagaattggcctcaattctgcacaagtatgcctggctctgggtttggaagcatgggcaggcccatgtgtcccacacagtccccttctacctcaggtcccagcaagacacgaggccactttctgctcatcttgtctgctccagcctactggccagccttccaggattccaagtccaagtgcctcaggccagggtctcattcccccagggcactcctcctttgtgacttcactcgctgaagtcatctgggagacagtgccaaatgttccactccagagtcttggcctctaggaggcaggaacagcaggcctggccagcccaaaggactctctatccaggatgtaaatgagcacactgctggcccatgcgcctcggggctgtagagggcagcctcagaggcactgggcattcctggcaccatggatgacgctgctgtcctcaagcgacgaggctacctcctggggataaa

SEQ ID NO: 34180 - DNA, 2300 bp, Homo sapien
gttaaaagtagccatgctgcagcctgaatgctttactgcttagatatttctttggccagataccccagtttctctctctcaagttcagccttccagaaagccctcaggcatagaacagttcagctaagttctttgccaatttataacaaggatggtctttactccattttcttgtaccttgttcctcagttccatctgagaccttgtcagaatggcctttactgtccatagttccatcagcattctgattatgaccatttaaccaatttctaaggagttccaaactttccctgttcttcctgtcttctcagccctcactagaacctaggctttttctagactgctgcttcattcttgtagcctctgctcattatccagtttcaaagctgcttctccattttcaggtattcgttttcgttaacaccccactcccggtactaatttctggtcttgtcaattttctgttgcttagaacagactacctgaaactagggtgatttataaagaaatgaatttatttcttacagttctggagaatgaaaagtccaaggtcaatgggccaccctgctggtggggactctgtgcagagtcccaaaacagtgcagggcatcacatggcaagggggctgagcctgctaactcaggtctctccttctcttcttataaagtcactagtcccactcccatgataacccattaactcattaactcatgaatctatgattttagtgccctgaaatactgggaacttagagaataataaagaagtaaagtaggaataggtagatggggtggagaggaggagaaagagagcagagattccttccttctgacctagcagacattcccaagacatatggacttgttccagttatatattgctgcataacaaatcacctcaaaacttaatggcttaaaacaacaatttttaattattatcttcacagctctgggggttggttagccagttttgctcagggtctccaatgcagttgcagcatctagagctagcatcatctctcactcatgtctggcacctagtctgggaagattctaagatccagggctagaacagctgtagctctttggtcatctccttttttctttacatggtctttctgcatggtttctccagcttcagggtagccaaacttcttttcaggcagctcaaggcttcaaaggtaagtgtcccaagggagagagccaagtgcaatctgcattgccttttctaacctagtctcagaagtcaaggcagtcacaagtccaatccaggtttaggggaagcaacagactccacctcttgatgaggggtgcaccaaagaatctgtggacatattttaaaaccaccagagaacttcacacgcctctctggcagaaaatccaggacagaataatgagtcattcacgaaaccacaaattgcttcactgtggtttccctttggctatgggggaatagtgcagtgtttaaaggctcctgctctggagttaggctgcccgggcttgcctctgccctaacacttactaaacctggaaccttgagcaggtcttggtacctcagttttcttacctgtaaattgggaacaatgagagctaacagttgttgagcacttactaggtgtcagacattgtcctaactgcattatgtctgctctccttttatatgtaagataactctatgaggtacttatctattaatacttcctaagtcgtaggattgataataaaagaggcatcttccaggtctgtagtgtggatcaaatgagaccatctattatgttcgctcttggcattattaaagctgttgggggaaattctagtgatgcctggccagtagagtgagccgtttccagaaattgacccaacgtacacaatgccacacagcgtgcagactcttcccagtacagagtgggagccaagatgagggctgcgagggccaggtttcttgacaggtgtcaaaatttcataaaaaggccagtcattccggttctcattggtggctatgggtacagaacccggaacaatcctggagagtgggattacaagcaccgttttgagtttgcagaaggagagtgtttatatagcttctctggaaaaggaagccatgactccgggcggtcggagaaggtctgccgggagtacacctgccctctgcctgaagcgtccccaagtgtcccgggcccgcgtcgttgccggatgcacaatgctgacacccttcccgggggcttccagtgtattctgcctcctcttgtgttcccgttgccacccttagctccctgactcttccagccaccttcccctcct

SEQ ID NO: 34181 - DNA, 2300 bp, Homo sapien
ctcccacaccattcagggtttttgttttgttctccccaagagaagcagggctcaggatcctttttggcaacttactggtgtattactatgtgactttttccagttccagagaaccgaaaccaacttaagacaatatttccccaaataataacccctaaatgacctggctgaacaagagagaaagggatggagggctggcaaagtaggggtgatgagggggcaaagggtgggaggaaatatccctagcatcaataataaaatcatgttggttatattttaagactttattactctaccaggtcaattttatagatgagaagagagcagtctccagaccactgtgctgtggcatgctcgtatgccacaagttgtttacaggcatatcaagatgttgatgaccccagttcttaggcaactgggtacaaactggaacgggtgaagctagttctttcagcctagtcacttatgcccaagatcagccttatcattgtacaaatatattagtcagaataagctaactctttgtatcagttatctactgctgtgtaagaaacccaacctaaaacttagtggcttacagcaatattcattttatttgtttatgtgttctgtgggtcaacagtttggactatgtttagctaggtggttttgctaatcttgctttgggttgcttacagagttgtggtcatccagcagcttttctaagactagactttccattatggcctttttcacgtcttgcccttggtgctggtggatgattgggccatagttgtcagtgggctagcctaagcttctttactttgtggaagaagaattctcagcagcaaaacaggctaagccttaatgcacaaacacctttcaagcccctgcttatctcgtatttgctgatgtcccaatggccaaagcaagttacatagccaaagacagagtccatgtgggaaggaagaatacaagggtgtgaacagaggaatgtgtgattcatcaaaggccatacctttgatgaattcaacaatttaccataatgttacaaaaaaaaatcttcccaaatctcagcagtttaccacaactaagaattatttcttacccatgtcatattccaatgtgggttggtgaggacactctatcacactcgttcagggaatcgggaacctgttatctatctagtggttccaccgttgtctaagaacttccagaagaccaggaaagacagagaagggaagattcaaggaaggtgttatagaccaatcctggaagtggtatacatcagttccagcaacattccaatggccggaactcagccatgtggcccccagctaactgcaggagagttgggaaatataatgcctaggaagaaaagatacttcttgtcaccaaatattccgcccccttcttaccacacacagaatacacatataccctccccagacacctggaattctatctagtcactgcatccaggatctgttgttgatacacagtcctctttattagatccagatgtatatcctcattgccaggtaactcatgaactatgtaaatatgtactacatacctgcccccactcagctaccctgtgtagcgtgatagagcaagggtggcatacttgcattaaaatctcccattcagaaaagggaagaatgcaagacacacaacagtggctcattctttagtatatgtattttttatgatatttttccaaatattgcatgggaaatatatacactaaaaattattcgtttatctgaaatgcaaattattaagcattctgtatttttatttgctaaatctggcaaccctcctcccactaaaatataaactccatgaaggtaggaaccttggctctctggttctccaatgtacatcgaaggcgtggcataatgccaggtccacagtagaagcccatacatgcttactgcaggaattaatgaaggactaaacgaagtagcaagtgagtgaataagaagatgaggagcgacccttggtgggcggcgcgggaagagaaccgcaccatagctccgcagacagcctcctttaggcgcgcagcggcggccgcgctgaggtcacgggcgccggccctggtgacgtcattacgcccgcgctcctcgcctggccgtgatatcaatggcgcaggcttcacttctgctgtggcggtgactgaggcctttctggtgacctcagcccaacacaggccgtctccggagcttcccggtagtggccccggattcccacggtctttgtcattggctgtcagctagcaggcctggccgctcccgtgcggagagaccatctcttcaggg

SEQ ID NO: 34182 - DNA, 2300 bp, Homo sapien
cagtcagtctcttggtttggtctctaaaagtaaagggtaagctggtagcttttcttattttttttaaaaaagattatttgcccaaaaaagggagaaacgtttctgagtacatttaagtacttattactgttttaacttcacattcttaattgtatcatatgtagataaaagattcaggtctgtaccaaattcaactctttcctcttccctctgtctacctcttccccccttttttgttttgttttgtttttccctaggaaaatgctttttcttctacccagcttaggttccttggctgggaccctgcaaattagactgataaaagacatattaacaagagaaaaacataagcttattaagacatgcatcatgcatacataggggagaactcgatagtaactcaaacatggggcttatgtggcatcttaataaagaacaatgaatttatttaaaaaatgacaagacaaaggaaaaggactttgaacttgtaggtgcagtaaattgtgggaaggtatatgtggggaaactaatggaagatatgtgttcttttagcaaggttggttatgtaggttcccctggtgctgtctctattaagagtctagagtggtttctcttgttaagaatagtccttccctttctggtaaagcaggggaaggcggagtttttcttatgtctgcttcttctcgattgccttcagctcaaaataatccttatggcagagtgacatatttttgggtggcataccgtgaactctttcaaaggtaaattttaagatgtaagaaaaaaatagtttaaaagttgaagttgattgcttgagaaaaatatttttattttttgatagaaatctcatttgaaaaatggatgtacaaaagatagttgcaattatttatggaacttacttcttttactgttactgcaatataataataagctttagagcatatgttcattgttttctttcctaccaagtcaaggatctgatgattagaaatgattttaaaaagtggtacaggaggaaattgttttgttttgttgggaggatcacagagttacattgagggaaaagtcatttgagccatccaaattgaaaaactctaaaattctgtggcgctatttcattttgttaataaggatggtgggatcaatgtaaaggaagctttctcactgttggtgctattgacattttggactggataattctttattctgttttgtgtactgtagggtgtttaacagcatccatagccattactactacatgccactaacactcctaaccccagttgtgacaaccagagatgcttctagaggttgccaaatgtcctctggagagcaaaattgctcaggttgagaactactgacatagagggaagaaaaggataaaatttcagcttaccggtatgtttttaggttaggaagagggaaaacaaaactttattaagtaaatatattaataaatattcagatggtcccaaagtgaaagcagctgatgtaggaatgtcttgcatatgactgcctactacagtgataaattactgagacacgggatttagtttaggtgaatgtgcgttttgaacatcactaaggccagtgctggaacagtggttagattcctgaatgtgcccatcttatagtccactaggtaggtaaaaatactgcacctgaaaataaaaatatagttcagtgccacaatactttatccagaaacacttgggctaaatatatttgagattcagattttttagactttagaaaggtatttgggtatatttgcaatatgttgtataatctacctaataaaatatggccatcacctttagtcacatttatatttttgctggaaattctatgaatattcacactgagactattaataacctcatgtcagtttaatcacgtgatcacatttgatgtcaaatgaggttactgcaaacttaaaagtttccagtttttggcactgtttgggtttactagttgcaggtaagaggttttgggcctgtgcttggaaacacatgttataaatgtacagttctgtagctacatcatttctatggttacatgggtcttgcattctaaacagctaacttagaaaagcagtccattagagtagacttcctgtccttctcttcagtagcatagtcatgtaagagctgatctggaatgaatagatatcttgggaaggagaattcaagaaggaagttatggagacaaaaatggggaatgcggaaacattgaagagccagagaaagaagaaaaaggaaagagatgctaagggaagcaaggcaatcctgcctatttat

SEQ ID NO: 34183 - DNA, 2300 bp, Homo sapien
ttctggtaaggtgaaagaggtatgtatgggtaagttgtagttttacttaaatgaagaagattaagttctacttcaacaaatacttttatttattatttagttgtttttcttttaattttacctctactcaagacagcttggaccagcgcatgcttttataagcagaatttacgaaaaatgtctggttctagataaatttaacatactaaatattgattttactaaatattctgccttaaataattcagtatatagaatcaatttttgttattttaacaaagtatacaaaaatgtagctctgctcaccaaatactaggaagaaagtaaagggtttggttagttatagtgaaaatgttgtcacacagtatgggaatttgattacatattttttatgttttccttctacatatgcacatggattatgtctttgttcactgttaaatctttagtgcctcacctatagcaggtgttcaaaagatactcagttcaagagaaccatgctgaaagaaagcaaagaaatagataaaccatgggataaccagcagctaaattggacttaacacttgcttttgtaaaaaaaaagtttcattggaactcagctagtctacttttaccttttctctatggttgctgccttcatactgcaaggcagattggagtatttgtaacagagaccctctcaaagcctaaaatatttactatttgaaagtccttttcaaaaacagccaacctttgttataaaaaaaaaaaagccatttatttccttttagtactggaatgcccagcagttgtccatgttcctaacttttggtagataacattcgctgaaaaaatgaaagtggtaaagataattgatttttcaagggaagacatattactcatgtgtggaaagcaaattatatctatttagtggataaaaatgatcgtttttaatgtgaaaaaagtaattgccttatgttttcaatgtaattttaaggaatattttatagaaaataaaattttattataaaaattggccatatgctttataattgaataaaggtgggataaattttatttttatataatagtacattaatgagtattatcactaaaaatcttaatggtgagccaatgaaaattcagattttattgccctaaaattacctaaagtggataaagtgggttttgaatattttagaaagttcctttaggtgttacttatttattaagtaactgaaatttaaaacatgggtagtgtcaaaagttatttaacatacaaaattgacaaatgtaatgtcatattaaaaaccaaataagctgttttctaaaaattttataaactattatgcaaacatttttatttgctctatgcagttattttatgaaagggaaagtataagtaccgagtgactgaaatacatgttctagttaggcttgtatttctttaaaatatttctctacaataaattttcactgtaggttatttgaataagtatgtggataacaatggttcttttttactttcttcattgtaacgttcgggaaaggctaactttgttagtagctcagcaggaagtaaagtggaagtggttaaaaatatttctctttgggataagattattgattgttattcttactccacaaggttaggtccctgaaaagtatttcagaaaatgtctttccttgatcttcttattctgcacagtgatgcaaatctgataggaaagtgacctcaagggaatagatccgttctctccaatcttgatgtcttatgagaactggctgccattatccagctgtggcagagagcaacaaatagctcagcagagcacagaatggagaagttttacgctcttctgagtttagtttttaaatccttttttcttagtatgtttgtaaccagaaaatcagggtttattaaaaatcagtactgctgttttaattatttaatcaagagaggactttgaattaaacttttggcatgttaaaatatgttgataacattcttgctattaccttttaaataccttttatattctaacataaagatggtttaaatattacagaaatcctttgatgctctgaattttgttacaatgttaaaaatggtatggatttccaaagctagtgccatacagcggaaaggcaggtaatgtatatttaatgtatattcattcaattgcctgtaaaatggaaacgtttttatatgcattacacatttatcatatattccatgttcaataaaatagtagttttcatgttaaaatttttatattatttttgcaaagcaagccattttgatacttccttaaaagttg

SEQ ID NO: 34184 - DNA, 2300 bp, Homo sapien
cacacacaaaaaattaaaattaacatgtgtccaaagaacatcataaaatgaattattcattccatggcattgaaagcgcacacacgcacactctgaaaagcagataccaggtaagcaactttagggcagctgccgagtagaatatcaagaaattggatccagctgagaattccaattacctaatgacctaatgagggtgatccgctttcactctaattgctaggtctaactcgttgtaatagtctttatcatgaaaagcaggctttaaaataatttaaaatggaaacaaatattcaacgggccaatttctttcaccttctttagggggagacgggaatttgaattcacaaagaaatgcaaatgtaaagacttaagatggagcagaaacaaagaacataaggatcacctagtgcattgtgttggtacatctcttagaagaagacagcacagggaatttgtgagacaccaaatgcaatttttgttagtttattagagagtaaataaataaataatgataccgaactccaacaaaactccagcactgtccgtgggcagcgactattcagcccaagctatcattcttaatttccctgccaggctgcgactaccggggtgaatcagcccgcgccaggcccctttcccacccgccgctgcagttaggacttggcaaagatgctcgatatttgcgtatttgtgaccggtctttgctttgtgtctgcgctgcaggtgaggaggaggaagagaagcagaagagcagctggaggccggcggtggctgagcagcccccacacctttgagcgagccgcctgcctctccaccggcaaggaagccctgggacctccggattcgggctgccggagggcctgagcgccagagcccaggacccggcggccgggggcgccatcccctcatgttctggagaaggcgcaaatgtgagctggcggtagcggggaaagccctccgcccccgccaggggggacccgggaagcccggccggctctgtcggcagactgcggggatcccctcctccggccccgcccccacccacccccggccggggtgccgaggcggttaaccctacccgcgccgcagcgcacttgggctagagcgccgcgcacccaatccagattccagagcctgccggctgggaaagatccggtctcggggtcggctatgatcccgcagcggccaaggcagggctcaggccccgggattctccccacacgctgctgcactggcgcagccggtcgccaaactttttctccccaaagccagtgcccccgcagttacttggcgggcagccggcagcccactctcggcgggatgatctgggagaagcgggcgtgggacgagggggctgctgttttgcagccctgcgaggcgtgcagtcggagaagtggtcggggttccacaccgtccctgagcctgcccccggccaaggtggcccgacgtgctgcagtggctggcgcaggtgatccgggcagcgcgtccggcactagtcaagggggcagcggcacgggagggaggggcgcctttctcttttctcctccccctgcagcccagctgcactgcgtgggggctctccatctccacgcaatcagcaggcggaatccctgccctggagcgccctggctctggactgcacccccctagggtttgtcctgcagattcccctccccatctttctctgccacacacgcttccctaagccgcgcgcgccgcaaactcagtctcggtccccgcaggtgatgtcatgcccattgttttggtgcgcccaaccaatcggactcgccgcctggattctaccggagccggcatgggcccttcctcgcaccagcagcaggagtccccgctcccgaccataacgcattgcgcagggtgcaccaccgcttggtctccctgcagctttaacagccctgacatggaaaccccattgcagttccagcgcggcttcttcccagagcagccgccgccgccgccgcgctcctcacacctgcattgccagcagcagcaacagagccaggacaagccgtgcccgcccttcgcgcccctcccgcaccctcaccaccacccgcacctcgcgcaccagcagccggccagcggcggcagcagcccatgcctccggtgcaacagctgcgcctcctccggtgccccggcggcgggggcgggagataacctgtccctgctgctccgcacctcctcgcccggcggcgccttccggacccgcacctcctcgccgctgtcgggctcgtcctgctgctgctgctgctgctcgtcgcgccggggcagccagctcaatg

SEQ ID NO: 34185 - DNA, 2300 bp, Homo sapien
gatgccccctctttcatttctgatgtttgtaatttttgtcttttttccttcatttgcttgtcatgaaatttatcaattttattaatcttttcaaagaactagcttttgatttttctgattttctccattgacttactgttttccacttcattgatatctgctctaattttttaattcttttccttttgcttatcttggggttaaacttctctttttctcattttctaaggtggaagcttgaatgactgattttaaaacttccttcttttctaatatatgtgttcagtgctataaatttccttccaagtactgcttttggtgtatctcacaaattttgatacattgtattttcaatttcatttactttaaaatatttttaaatttctcttgagaattgttctgggacccatgtactatttcagagtttattgtttagtgtccaggtatttgagattttccagttatctttgtgtttttgatttctagtttaattccattttggtctgagagcacatattgtatgatttctattccttaaaaaattttaagttatctttcagggcccagaatatgtctattttagtgaatatgtgtgcttaagaaagtgtattctgctgttgttgtgtaaagtattctataaatgtcagctagatccagttgattgatggtggtcctcaattcaactacgttgttactgattttctgcctgttggatctatgaattactaacagagagatgttgaaatctccaactatgatagtggatttgttcttttctccttgcagttctatcagcttttgctttatatattttgatgctctgttgttaggcccacacccaataaggattgttatgtctccttggaagattgaccttttaacattatgtaatgcccctctttatctctaatcggctcttttgctttgaagtttgctttgtctgaaattaatatagctactccaactttcttttgattagtattaccatggtatatcattctctgttgccttacttttaattcatatgtgtctttattattaaagtgggtttcttgtggacaacacatggttgagaggtgacagcgtgctggcagtcctcacagccctcgctcgctctcggcgcctcctctgcctgggctcccactttggtggcacttgaggagcccttcagcccaccgctgcactgtgggagcccctttctgggctggccaaggccagagccggctccctcagcttgcagggaggtgtagagggagaggcgcgagcgggaaccggggctgtgcgcggcacttgtgggccagctggagttccgggtgggcgtgggcttggcaggccgcgcacgccgagcagccggccagccctgccggcccgggcaatgaggggcttagcacctgggccagcggctgcggtggttgtactgggtcccccagcagtgccagctcaccagcgctgcgcttgatttctcactgggccttagctgccttcccgcggggcatggctggggacctgcagcccgccatgcctgaacctcccaccccctccatgggctcctgtgcggccggagcctccctgatgagcgccaccccctgctccacggtgcccagtcccatcgaccacccaagggctgagtagtgcgggcgcacagcacgggactggcaggcagctccacctgcagcccctgtgcaggatccactgggtgaagccagctgggctcctgagtctggtggggccttggagaacctttatgtctagcccagggattgtaaatacaccaattggcattctgtatctagctcaaggtttgtaaatacaccaatcagcaccctgtgtctagctcagggtttgtgaatgcaccaatcgacactgtatctagctactctggtggggccttggagaacctttgtgtggacactctgtatctgtctaatctggtggggacgtggagaacctttgtgtctagctcagggattgtaaacacaccaatcagtgccctgtcaaaacagaccactcggctctaccaatcagcaggatgtgggtggggccagataagagaataaaagcaggctactggagccagcagtggcaacccgctcgggtcctcttcaacactgtggaagctttgttctttcgctcttttgcaataaatcttgctactgctcactctttgggtccacactgcctttatgagctgtaacactcaccgcgaaaggtctgcagcttcactcctgaagccagcgagcccacgagcccacagggaggaatgaacaactccagatgcaccgccttaagagctgtaacac

SEQ ID NO: 34186 - DNA, 2300 bp, Homo sapien
acataccatctcacaccagttagaatggcaatcattaaaaagtcaggaaacaagtgctggagggatgtggagaaataagaacacttttacactgttggtggaactgtaaactagttcaaccatcgtagaagtcaatgtggcaattccttagggatctagaactagaaataccatttgacccagcaatcccattactgggtatatacccaaaggatcataaaacatgctgctataaagacacatgcacacgttatgtttattgcggcactattcacaatagcaaagacttggaaccaacccaaatgtccaacaatgacagactggattaagaaaatgtggcacatatacaccatggaatactatgcagccataaaaaagggtgagttcatgtcctttgtagggacatggatgaagctggaaaccatcattctcagcaaactattgcaaggacaaaataccaaacactgcatgttctcactcataggtgggaactgaacaatgagaacacatggacacaggaaggggaacatcacacaccggggcctgttgcagggtggcaggagggggagggatagcattaggagacatacttaatgataaatgatgagttaatgggtgcagcacaccaacatggcacatgtatacatatgtaactaacctgcatgttgtgcacatgtaccctaaaacttaaagtatagtaataaaaaaaagaaaacctcatattgagagcacaatatgttcattcatctatttatcctacaaacattttttagaatttaattttcattgccaagctctgtactgtctctaaggacaaagcaataaagaagattaaccctgtcaccagccctaatgctgacattttaagaaacacaaattacctcccctccctcaagctgttttactgccacccacctgaaaagtgttgtgaaaaatacacaaatctaagataactacaaatgtgaatggttaccctggagttctgcagtgcctaaagatcacaaaatcctagggaccacgatgtaattttgccgtgtctccgctcaaatctcatcttaaattgtagttcccagaatcccaatgtgttgtgtgagggacctggtgggaggtccctcatgtgggcggttacctacatgctgttcccatgataatgagtgagtgctcacaagatctgcaagatctgatggtttataaggggcttttccccagcctcgctctgcacttctccttgctgccaccatgtgaagaaggtcacgtttgcttccccttccaccatggttataagttgcctgaggcctccctagccctgtagaactgtgagtcaattaaagctctttcctttataaattacccagtcttgggtatgtccttatagcagcatgagaacaaactaatacagactgggaatacagagatagtaaacatatcggatcatttcaatatcactatattatctaagtcagaggtatgtatcagggactagggtgaccaaaggagggcctggttagaaagtttgacaaatgttttcttgaagagatgatggccaaaccatgtctgggccaaatttttcaggtgtgatatgcttttatctgaatgtgaagaaaaggtggatctttgatagatcctgaccaaggcagtgaaagatccttgtagtgggtctttaggtagataaatgagagagagagttaccatcaaatcaccaagatgttattttctccagtttaaagaaaaagactcagccacttcttcctctctgttctctttcatagcgattctcagctctttggaggctaccttgtgaagactcccctgatctaaattattaagaccatcttctttgggaatgacgagagaagaggaagaagaaagcagtgtgcaaagaatgagaattctatgtgcctccaaagagaaaaaactgcaactacacatcagcgttatgcaaatgacctctattcttaaaagttggctgaaaatgaggaaatccattgcattcacagagatattctgtgggagcaaaaagggagagaacaacagtactactttaaaaagaaatgtactatgtaattttccctagcattatccaaatcaaacatttttgaagcaacaagcctctatccagagctcagaaactgaaaaaaatatattacatttttcttatacaggcataccttggatatattggaaggtaagttgcagattatggcagttatgcaaaataccctattaagcaagtcataccataatttttggtttaccagtgcatataaaagttatgtttatattgtagtcttttcagtgtg

SEQ ID NO: 34187 - DNA, 2300 bp, Homo sapien
gacagatgctacaacgtggatgaaccaaaggacattatgctaagtgaaataagcagaaacattaaattcttacatgaggaatctagaaacgttaaactcatagaagcagaaagtagaatggtggctaccagggcctgaggactgggggaaatggggaaatgttggccaaaagatatcatgtttcagttgaataagatgaataagttctggaggtctaatgtatagtgtggtgactatagttaatgatactacattgtatatttgacatttgcaaaaggagtagacattaaatgctctcattctctccacagaaaacatggtaactctgtgaggtgctagatatcttaattagctcgataggggtaattattttataaagtacatatataatatatatcaaaatatcacattgtataccttaaatatatacagtttaaaaatgtatgtatacaatttttatttgtcaattatacttcaatacaactggaaaaaaataaaccaaggatattgtgtcctaattccagaactccaattaataaagagtggggtttcggttgaatattgcattttaaaatgtttcctgtgattcatcatgtgttatagcacggaagagtctcaacctacaagacacttggcatatatcggcttttgggaagtctgttttcttagtggttatatttagcaactttgagagcctggcaattttagttttgagaatttacttttgtataatttgggtagtttttctcctaggattagaaaaaagagcattttattttgcttttacaaaattacatgaattaatgaatctgaagtttcttgtgaaaatttaatgggggttggcaccatgattgttcatgaaaaagatgggaaatgcagtatagtgaactcaaatgacatagtactcccattttaatgttcacagagacataactccaataatttttattttgttattcacagattttactttcccttggtgtaactccggcattctaagaaaagccacttatgttaaaggtgacattgctttctcttttggaacatgcacttggcaacgaattcgttagccagacaggtgtttgtgtcactgtcaaattgcaattgctaattttttttgtttctccctatgggaataacgcaagctattagatgttaataagcagcaactaactttctataaccttttctaagtttaggggtctgaaagaaaccacaaatattatttcaagagttccttactattgtgttctctctacaaatttaaaatgtcatgagaccacaggtagcctgagatgaatatgcttaggatactggttgaaaccctttattaaaagtttaaccaatgcaagaggtacttgggagcctctcatcagaaggaaaacatcaaataacacatgaaggagttgattgttgttgtataactgtataaagtgttgggaagaaaaaaggtaagagggctaaattagcaagaaaattggagaagtttgtatacaagtaaaaacgacatggatggaggctgaaacaatggaggtagagggatatgttagaacttggcattgttaggctagttatccagacaaaacaaaaacaaaatcaaagatgtctccaaggttaagacattagggaacaaagtggaaataccagccactatagggaagaaaagaaaaggaataattagggaataagctatttctcactttaaatggcagcaaaacattggagcggaaaacctggacagctggagctggcaagaagcctcgtaatcattcagactgctcatcccagagatgaggagactggagcacatacatttcaatgaattgcctagtcagtgacacttctggaactactatctatatctcttgggttgtgttttataccaagttgccttgtcaatgccttatagacaatgaatgaaacagaagggatatactagtgttgtgggtacccctggagctagaagtcaggattcaggattatacttacagggtggagaaccaaggtttgagtatgaagcggagttctggaacttctcctttgtaacctggtgtataactatggagacataatggaaaggacattcaggaaagaccacttagccaaaagttccaacagcagtattgtgcaactgcaggatgttagatgtgtgggagttcctggggagctcaagccagaggtgggatgcacaagttctggggctaatcttgagggtgtttcatgtagttgtaatatacctaaaaattttaaagtgatcctctgggaagcccaagtatggctaatatgggccatacttatga

SEQ ID NO: 34188 - DNA, 2300 bp, Homo sapien
attctcgacatttacttagtgatgatggtgacactgtcttttttatctgtaattttacttggctgaaaaaaatctatctataatgatatttctgagttggatgttgtgatttgtcagtgaaatactatcaaaatgtcactaccttctgctccttctcttttaaaaatatgtggctgtcggggttaggaaacaggagatctggaaaaaatttcctttcattataggtgttggctgaaagccaatggataatgcacagtacgcttctgccatatattgtcagcttttaagaatgttcttagccaggcttaatggctcacgcctgtaatctcagcactttgggaggccgaggcgggcggatcacaaggtcaggagttcgagaccagcctggccaacatggtaaaacccggtctgtactaaagatacaaaaaaattagcctggcctggtggtgcacacctgtaatcccagctactcgggaggctgaggcaggagaattgcttgaacccgggaggcagaggttgcagtgagccaagatcactccattgcactctagcctaggtgatagggcaagactccgtttcaaaaaaaaagaaaaaaaaaaagctgggtgcagtggctcacacctgtaatcccagcactttgagaggccgaggcaggcagatcatgaggtcaggagatcaagaccatcctggctaacacggtgaaaccccatctctactaaaaatacaaaaaaaaatttagtagggtgtggtggcgggcgcccgtagtcccagctactcgggaggctgaggcaggagaatggcgtgaaccttggaggcggagcttgcagtgagccgagatcgcgccactgcactacagcctgggcgacagagcgagactctgtctcaaaaaaaaagaatgttcttgaagactttttttctgttggctgctgtctgtgagtctgttataataagtgcttaggagtgtttgccagtcttctcaaaatcatgagctctgattttataggaattcagaatgtttaacaaacactagggtcattttatgacagtttgtatgaatgtttatttacagtatgtgacactgtggtatatactttatgtaaataaccttttaaaatctcttcacaaaaacctaaatggtttttcttatcccctattttcagaagagaaaaaacagaaagagaagtgaaatgattagcatatggtcacacagctaagtcaggatttaattataattatattaaagtgaagaggatacttttatttttatatcttagtaaagaatgtcatattttagagttttgtggctaaaaacttttttaggccaggcgcggtggctcatgcttgtaatcccaacactttgggaggccgaggcgggttgatcatgatgtcaggagatcaagaccatcctagctaacactgcgaaaccccatctctactaaaaatattgaaaaaaagctgggcgtggtggcatgtgcctgtagtcccagctacttgggaggctgaggcaggagaatcacctgaacccagaaggcggaggttacagtgagccaagatcgcaccactgcactccagtctgtgcgacagagcgagactctgtctcaaaaaaacaaaaacaactttttaaaaagttggagtagcgtagaaagggtgaaaacatttctgaatttgaaatgaattcaaagttctggaattgtgttttcctgtttttgtttaaatcagttcatttctccttcatattcctttatataccactgaaagattattctcttatttaattgactaaattgtttattgccagactttggagatgaaaagcttaaggaagtacaatattataaaattacaaagtaaatctgaataaaagttgtcagttgttctttgctaagtgtatttgatgccaaaatattgttctgaaaatttcagagttagataaaacttttttctttataatatctaggttggttttatcaaattttgataatgctgtcatcacatagatgaaatgtaattatgtagaactttgtggaaagccatttgggtttagcagaagaggctattctttgttttatcttagtgtaatggagatactgttttttcttagtgtaatggagagagggctaaagaagaagcaattacacattttgaaaagctctttgaagttctggaagagaggaaatcatctgttttgaaagcaattgactcctctaagaaactaagattagacaaatttcagactcaaatggaagagtaccagggacttctagagaacaatggacttgtgggatatgctcaagaagtgc

SEQ ID NO: 34189 - DNA, 2300 bp, Homo sapien
gcatagaatttcagaagaaatttcaatgtggtcttcatttttatatgcctatcttctttgaaaggtctttaatgctccagagtgttcttcacacaacgacaataaagagtggtaaataccaccaggcattggtgtaaataaatgctcaggacccaacttatgttctctaaaactcttgcctccaccactttcttggtcttgggtaggaatctaggcaactgataaggatattttgtctggagtattttctagtagcaagtgatcaggtggacagcccttttttaagagcgatcttttcagggaggagaatggcagctaatgcggccagatggcaaagggatcctcagatcagagattttagggttaagaacaggaaggggttagagaccatttagtcaacaccagtcattttatagaagagaaaactgaagctctgaaagttgaatggacttactcaaggttaatagaaactaacaactttctacccgatatctgtctcctcttcttccttactaacaaatccttgattttgtttagagtggcaatgttcccagaacaaaataatcacctccccagccttccttggagctaggggatgcatattacccatttctcacaaaggtgtaagtggaggtcactggatggggctgggggaagctttttaaggggaaacaaatgtcttgtgtgctcttgtctctaccttcctccttcctgcttgtaatgcagacataagattagctgttcagctctaacactgtggtttttaatcaggtgccagaatccattctgggtgtgaaaaaatgttcacttttagagcaatatctctttctggtaatccatcaagtgttgctaatagtaggcaagaacccatttatggatgctacagaccttagttgaattctactagttttcctatggacgcaaagagtatacatgaagttctacagaacttaagagggacaagaagcttctagctgtatatccaagaagcattatgattgtgtcttgcctcctacagagccctaattgtgaacatcagcatgttaacttttgctgcttgttctaagaggttttcagcaccagctcataaagtaaagtaacacaccgaagaagcaaagttctggtagaacaacagttacagagcaacactgttggagctttacggagaggtgtgctgaaaaaagaaagaaatgtgtatgcttctggatttctggaccaaagtggagaaattagaaaatgacaaaaggaagaggcaaaaaagaaaaacccccacgtctcattaagcctgcaaaactcttttacacctgtaaaataggtcatttcgacacaccaccctgcccactggtgctgagcgcaacgcaaactctgccaacttgcttaaggaaagtagtttcacgaactttgtagtaaatcttattcgtgtctaatctaattattgctggcagcttttttcttttctttttaaagaaaaaacatcaagcctttaatcgcaaagactccttagagcagagtgatagactgggactgattttgttcagccaagttttcttttgaagagaagcaaagattgtcaggtatggtctgaggccatttcagctgtagcctcctagggaagctgctgttataaaaagaagtatagaaatgtgagaagcctgcactgaatgctttaactcaaccaacgaaacaaataattagaaaagtggacttgtggtaactaacggtcagagtgtccaggaacctggctggcaatattttttttcttttctttcctcttctttttttttctttctttctttcttttttttttttttttgttgtcgttgttaaaggaaagttgagtatcaaaaggatatggagatacaacagaccttacacagagtgtttaaaatacaatccctgtatttgttctcatctccgaagcgcggggcttggtctttattacctattggatttcaggaaggctgacttgagatgcgccgttgccatttcctggccttcacttatgtatttatttatttattttccggcgctggcagccagcccctttgttgcgcctcctctgtattcgtttctgtctgccctcgcacctccagacagtgagatggggcttttttccagatcttcgcgccgagagccggggacggccaacctgccggcatgcgataaaggccggggaatgtctagctggggccgcgctgagccgagtgcggacccgctttgtgtgcgcgtttgtttgtctccgctgcggtccgaaccgctgccgcgacccccgaggaggcggggcctccgcgcgcccggct

SEQ ID NO: 34190 - DNA, 2300 bp, Homo sapien
cttttaagattaaataatcccattcttgcttaaacaattgcagagactaggaaaagaatcttgaacctcaaagtgccaaaaaaagaaaaaaaacaaataaagaaaaactcctgaattcattttataaaatgaatgtaatagcattgattcaaaaacctgacaaagatggtaccaaaaagaaaatatagagcaatctcatgaatattaataaaaagttttaatgataacattagcaaacaatccaacagcactttcaaaaggtaatcatgactaagttgggtttattgtaagaatgcaagggtagttcaatactagataatctgttactattcatattaagagttaaaaaatatcttcatctttgcagaaaagacatgatagaattgagcactcacttatgttaactatactaagtagaaattgatgaataatctattaacattgtacctctacctaaaagccagcatcttaaatttcaaagcaaaggagactttccagctgaagtcaggaacaagacatgcccactaactcctctgctacttaacaatgtgttgagagttatagccaatgaagttagacaaaataaagacgtgaattggaaaggaagaggtaaaactatttgcagatatgaatatgtatctagaaagcccaaaggaacttgttgaaaaactaaacaataaaagaacttagtaaagtagctattaaatacaatttacataaaaatatcagtaggcttcaccagacacaagtgcatactttgattccatttcggtgaagttcaaaacagacagcatctatgtatggtgtcagaaatcagcaccctctttcagtcactacctctcttcccaaaggtaagtgctgtcaaaattaccatcaattagttttgtctgtttttgaattttatatgagtggaaccatatagtatacattatttttcaactggctttaactcagtaggactgaaagagggtacaagggagactctgcggtgctggtaatgttctgtttcatgatctaggtgctggttacgtaggtgcattcaccttatgaatatttatcaagctgtatatgatttgtgcacttttctgtatgtataattatagctcagtaaaaatgtttactaaaaagagtaacaagactatatatatatatatatatatatatatgtatgtatatgcaaacctaaactagttagaagatacttgaagagaagaccacctttgtgatagcaaaagtaaaaagaaaacttaatgtgtaaatttaagacacatctaaaatctgtatgaggaaaactaaaaaaactcttgagaggcaaaaatgtagattccaccaaatggaaagatacatgatattcttagatagacaacatcaaaacatgtctttccccacttaggttcatttataaattcagtgccattccaataaaaattatattgttatttgagagaacatactagaataaccatggaaactgaaaagaattagaggggaccagccatatccgacactaaaacatactctaaatcctccatggcagaagctatcagaattttttaaagtgtgcacactttttggcccagatactctctatctatagatttagcataaagaaacatgcaaataggcaatgatacattttcaaggatctcacagccacatttttgtaattgtgaaaaataagacacattatgatacatttatgtaactcaatactatgcaactgttaaagtatggatattggaaggcattcgtaatgttgaataaatgaaaagttttgtattggcacataaataggaagtccaatggaacagaagaggaattccagaaatagactcagtggcatttagaatacagtaaaggcagcatctcaagttagtgagaaaatgaacttttaagtaagtgctattgagattactggtgcttaattattcagatatttacaattttaaaaaatatatagcttatttcactttgaacctttttttaaaatggtcatttagttttataatttaaagaaaaatgatagttctctccccatcccagcctatactatacccacagcctatacttcctggaggtaaacaccactgttgcatacatctttcagacctttaatctctgtatatagagatatagaaatagagaatattctttaaatatctgaacatttaagtattactcatcccaatacaatatatacttatacaaatagatatatgtatgtatactatacataaagatctgaggtactaaatattccatggttttttttcattcaacaatgtattatgaatgccttt

SEQ ID NO: 34191 - DNA, 2300 bp, Homo sapien
gcgcgggtcatccctgcgcccaggagcactggcatcgtctcggcccccatggccaagaagctgctgctgatggcagctatcaatgactgctacacctcagccaggggctgcactgccatcctgggcaacttcgtcatggtcattttttatgccatctctaaggtctacagcaggctgaaccctgacctctggaaggagactgtattcaccaagtctccctatcaggaattcactgaccacctcctcaagacccacaccagagtctccgtgcagaggacccaggctccagcggtggctacaacatcgggttgtacaagaaaaataaaatgaagtaagcctggaaacaaaaaaactacattaataagaaacatagaaaaaacactaaagaagaaatgttataaagtacccataattccagggtaactttttcaaaaaacatacctacatatttttaaattgttacagtcatacagtacatattaattactatgctataattgcattacacattttcgtacatttctacctaattcaaacattatcatgtaatggctaaataacactcaattatatagatgttctatcattcccattctgttatgcacatgccaaaaatcttgtagggataaaatcactcatggaaagccttttaccgacctaggaggcattctgtattatctctgaatgagtcccacattgcaaatttttcctctagatttggatcagattgctagtccttgagctgagaatcagatgaaacatttggcttccctaacttaagggccatgtttattagaattaattttctgagaatgtatagagtgtccatagctgattccagtaagttaaatgtgtataagactccactttaaaaatcttcaggcatttgggggtatgtgtgctaagtgagagatcttaattttaataacagtggaaactccagactgggcacacctgaagggcaaggactgtgagctccgtatttgtagggaagtaccgaggacagcctagaatccgtctgtggctgttaaatgcggcattttgtaaagacatgcaggaatacctgtgaataagtagttaatagtaccaaaaattattcagagcactttggattgttgaataagtgtaagattaccccagcccatagagtataagaattacattttctaagaaagctaacaaaattaaacccaaaattttattagctaagttgatcacagggaacctagtttagttatattattgggtggatccccccacccgctactcaggaatgcctcatgaaagtttaaagggcatagtataccggctaaacaacttaaatccctatttttggaaaaaagaactagaagcatgtttaaattttttagaatgcaggtaattggagaagatattgagcttattttgctgttgcagattgatgcaccattgattcttgataacacgtcgactcaagcaaagtaaaatctgtaagatttgtaaaagaatgacgcaagcagtcatatataggtatgaatatgcatgttgtatatgtttgggggcattatacacagatttttaagtgattcctggtatccagaaaggattaagattaggaaagtctctgagcttttgtagtgtcaataaacatttatctccactggtttgtttttctgtttccctaaccgttcggcttaaaactggccctccaaaaatgaatctgttagcaagtttatactgatccatcctcgttttcagatataccatcctcaggttctacagagccagaattgtctcaaagcgtacttgatgcttttgaccttgcgcttcccaagataaaaattctgacggagggatttgtggacttgattttcacaaggcctgcgaggtgtttacaagcctcgagggctttgagtagaaaaggtagggtcatgcgctagctagggagatatcggagagaggaagtgctgcacaggacccagatgatagcggtttcaaatactggcttagtctgcggcgggcgcaggtcccctcacccggcaccctgtggttcagcacaggagggttctttctctccgcgggcactgattccgggtcgcggcggacgtcgcttccggagcagcatggcggccactgaggatgagaggctagcagggagcggtgagggagagcggctggatttcttacgggatcggcacgtgcgatttttccagcgctgcctccaggttttgccggagcgctattcttcactcgagacaagcaggtaactcgtggcacagtcagccaggctggcacaaggcccgggctccagcggaaaggcg

SEQ ID NO: 34192 - DNA, 2300 bp, Homo sapien
ttcttctttgccttcttcttctcctccattcttcttccttcttcttcttctcccctcttcttcttctctttttttttttttttttttttttttttttttttttttttttttttttgttgagacgaagtctcactctgtcaccaggctggagtgcaatgacacgatcttggctcactgcaacctccgactccctggttcaagcaattctcctgcctcagcctcccgagtagctgggactacagacaggcgccaccacgcccagctaatttttgtatttttagtagagatggggtttcaccatgttggccaggatggtctccatctcctgacctcgtgatccgcccacctcggcctcccaaagtgctgggattacaggcgtaagccaccacgtccggcctcttctgcaaaaacttccctccacagacttccggttttcctcccttctcacagatctctccatattggtccccttctcctcttgtccgtggtcaccttctcggagtggcctaggcttagttctcagacttcaatttatactcaccctgggtgagctcattcagtcttatttcaaatattttctataggaagatcaaattcgtatctttagctctctctctcctgggctccagaggcgtttatcccgctgcctgtttaatacctctaccaggatggtctctggagtcaggctgtctagataggtatcctaccctctacctgtgtggccatgtgatccttaactttatcactgaaatggagatgataatagtacctacttcatgaagttatttgtgaagattaaatgcaaaagtgcatataaagcacttataacagccctggcataaaggaattgctcaataaatacctatttgtttacttgttaaaggtgaaggaaccttacctatgtgtctaattcaacaatgaattcccaaggcctagaacagtgcctgacatatgctaggagctccatattgactgactgaatgaatcgatttctataaagggggaaaaggtagtacctacagaaatcagctcagttgccacaggttgtcttgactggaagcgtcatctgtggcttttttccaacttcccagcactgtatttttggaatctgtcttctcattgaccaagtcctaggaatgtaactgtggcattcctgcctctgatatctggttctgtggagcaagctgggtttttttctttaaaaatctaaaatatgatttattgttagaatccattgataatgttttttcatttagactcagtctcagcagcgctaagtagaaacctagaaagcggatgtatattaggtaaaaatatgtatatattgactataacacgaataaaatttaaggacgatgtaagacaatgaattttcttgacaggtatgggactgggctggcacagtcggttaagtgcccaaagggtatataaacccgcgacagggcagagcgcagcccccgccccgccccgccccgcccccacacccgcccgccccagaaccccagacccgcccctcccctgcatcccggctccgcccggcaccttgcccctccctcgccccgcccctccccgcctgaatcccggcccccgcctcgcatttcggccccgccctgcaccccagtcccgcccctcccgcacccccgcacccctgcacccccgcatctcagccccgccctgcatcccgaccccgccctacatctcggccccgccctgcatcccggccaagcccgcagcgcagggagctgtctgcagaggccagggtgcgcctgccacgaatccccaggcaccggtggccgccgcggcccgagtagctcggcgggtaaacatggccgcactgacgacggttgtggtagcggctgcggccaccgcggtagccggggctgtggcaggggcgggcgcggccaccgggaccggcgtgggagcgacgccagcgcctcaacaggtaaatccgggagaaccgagagctgctctggcggcaggcgaggggctgcaggccctggctgaacaggtgccctctgcagcgccggcgggaggcgcggcgttcgcctcccctgctcggggcctggcacgcgctgggcgttgctctttgttggcttgtgcgtttaacagcttttgcagagccgcctccatgtggtttcggagtcgaggaagacctgggtgggaacccggctctgccgcttcctagccgcgtgataagaacatatgctgtcggcgactcactttcttctctaaaaattgggaatagtaacatgcacctcccgagctttggactaacgttatgtctggggagcccctggcac

SEQ ID NO: 34193 - DNA, 2300 bp, Homo sapien
ccacttcatttctctgatcacctgcaccataaaatcgatcaaaatcatagcgaaaaacagtttctacctcgtcacctccattatctcctcaatgcagtcagccaggctttggtctacctaccccataaacccacggcctccctgttgccaaatgcaaccatcatttctttgttaccccttcactcagcctctaggcagtgaaccacacagctgaccattttctcctcctcctccttctttctttttcttcttatttcttctccttcttcttctcttcctcctcctccttctcctcctcctccttctcctcctcctcctccttctcctcctcctcctgctcctccttctcctcctcctcctgctcctccttctcctcctccttctcccttctcccttctccttcttctctcttctccttctccttcttcttctttgccttcttcttctcctccattcttcttccttcttcttcttctcccctcttcttcttctctttttttttttttttttttttttttttttttttttttttttttttttgttgagacgaagtctcactctgtcaccaggctggagtgcaatgacacgatcttggctcactgcaacctccgactccctggttcaagcaattctcctgcctcagcctcccgagtagctgggactacagacaggcgccaccacgcccagctaatttttgtatttttagtagagatggggtttcaccatgttggccaggatggtctccatctcctgacctcgtgatccgcccacctcggcctcccaaagtgctgggattacaggcgtaagccaccacgtccggcctcttctgcaaaaacttccctccacagacttccggttttcctcccttctcacagatctctccatattggtccccttctcctcttgtccgtggtcaccttctcggagtggcctaggcttagttctcagacttcaatttatactcaccctgggtgagctcattcagtcttatttcaaatattttctataggaagatcaaattcgtatctttagctctctctctcctgggctccagaggcgtttatcccgctgcctgtttaatacctctaccaggatggtctctggagtcaggctgtctagataggtatcctaccctctacctgtgtggccatgtgatccttaactttatcactgaaatggagatgataatagtacctacttcatgaagttatttgtgaagattaaatgcaaaagtgcatataaagcacttataacagccctggcataaaggaattgctcaataaatacctatttgtttacttgttaaaggtgaaggaaccttacctatgtgtctaattcaacaatgaattcccaaggcctagaacagtgcctgacatatgctaggagctccatattgactgactgaatgaatcgatttctataaagggggaaaaggtagtacctacagaaatcagctcagttgccacaggttgtcttgactggaagcgtcatctgtggcttttttccaacttcccagcactgtatttttggaatctgtcttctcattgaccaagtcctaggaatgtaactgtggcattcctgcctctgatatctggttctgtggagcaagctgggtttttttctttaaaaatctaaaatatgatttattgttagaatccattgataatgttttttcatttagactcagtctcagcagcgctaagtagaaacctagaaagcggatgtatattaggtaaaaatatgtatatattgactataacacgaataaaatttaaggacgatgtaagacaatgaattttcttgacaggtatgggactgggctggcacagtcggttaagtgcccaaagggtatataaacccgcgacagggcagagcgcagcccccgccccgccccgccccgcccccacacccgcccgccccagaaccccagacccgcccctcccctgcatcccggctccgcccggcaccttgcccctccctcgccccgcccctccccgcctgaatcccggcccccgcctcgcatttcggccccgccctgcaccccagtcccgcccctcccgcacccccgcacccctgcacccccgcatctcagccccgccctgcatcccgaccccgccctacatctcggccccgccctgcatcccggccaagcccgcagcgcagggagctgtctgcagaggccagggtgcgcctgccacgaatccccaggcaccggtggccgccgcggcccgagtagctcggcgggtaaacatggccgcactgacgacggttgtggtagcggctgcggccaccgcggtagc

SEQ ID NO: 34194 - DNA, 2300 bp, Homo sapien
atattcctttaccagcagatcaattttaggaaagaacgtaggtgtaaattgaagattcagaaactggtagcctttttttttttttttttttgacagagtttccttctgtggcccaggctgcagcacagtggtgtgatcatggctcactatagccttgatctccccagctcagctcaggtgatcctgccacctcagcctcctgcatgccatgcctgactaattttttgtgtgtgtgtgcgtgtgcgtgcatgtgtgtgtgcgtgtgtgtggagttgggatttcaccatgttgtccaggctggtctcgacctcttgggttcaagcaatctgcctgtctcagcctccgaaagttctgggattacaggtgtgagccacagcagaaattggtagcctttaaactaagtgtccgtctatcccttaacaatcccatgagggatacagagctcagtttgaagatggctgatgtgaatgtttacatcttattgaattaggtgagagagacaggtcagctcaggttaggccttggttgggacactgtacactgttatctgtaccctgggagagtatagaactgtgacatatgctggggataaaacagccagtcctcttggctggttaatttttatggatggtcaatcttatcctttatactctattcttttatattttcttctcagtggcaattaccttaacttcagttttgggaatctgatgttgagtgtagtctgatactgactacctaagggaaatactatgctatacttaaaaattattaagactgtaaaaacataagaaacgtttagagtatagaaaggaaaagcaaaatatatagttgtatgaaaattatttcaattatgcaaaactacataaacttctgaacaacactacaatatacaaaaatgaagttgtgattttttataaatgtttttagtgctgcatgacttctaacataacgttatggattacatatgctgagggtcagactgcctactgtaatattctatttctcctagtggtactaaggaattatgtgagcttaagttccctcaaacaaagtgattgaaggtccattttcaaaaattctgttttctcatcaggattcattatgggcgttatttcccaaacacatttaaactttttcatcctagtttaatgcaacgtaggttttagcatcaaattccagaggtttatcaactactatatgaagaagtaattcttttcattcatatatataaccttttaagctttagttcccgatttattactcagagctcaagaacctgacctcattgactttacattgctcttagggtttaccattcctcgtagcctttatgctttttagaggctactttagaaagagagtcagtttgacagcctccaaaactaatcacattttctgaaatttcagtttcctccgtgtgtgttctgaggtgtaattacgagcttggtaatttccagggcccaccaaagtaaggacggaagactagtccgagagacttcacgtgtgtgagggtaatactggtccgcacccaaatttgaattttagctcccatgattcccacatattgtgggagggacctagtgggagataattgaatcaagaaggctgtttcccccatgctgctctggtggtagtgagtacgtctcaggagagctgattgttttatatggggtttccctttttccttggctctgattttcctctcttgcctgctgccatgtaagacgtgcctttccccttctggcttgattgtgaggcctccccagccacgtggaactctgagtgcattaaatctttttatctttataaattacccaatctcgggtatgtctttatcagcagcgtgaaaacgcactaatacacttcccttctggggtctctgagatgggaccgaaagattccctaagggagcaccccgaaaatccgagaggagaagagccagcgagatctcagaactcgagctgcctcgggccgcttcgatgggcacagatccgccccctcgcagcgccccgccccccagcgcgttgcacgcaggcacgtcctcccagtagttcaggccccgccccctccccgtcgccccaccccggccgcgacgccccgccccgcgcctaggctgttgctggccgcggccgccgccctcccccggcccaatggcgtggcggcacagtcagtgatgtgacgctcaggcttgtccggcccccggctcgcagcccattacaccatccgtcgcagcagtcgctgcagccgctgcagtccgagccgactaagggcgggaggcagctcgggtggcggggcgt

SEQ ID NO: 34195 - DNA, 2300 bp, Homo sapien
agattagactataaaatctccatgagaactaggactgtgtctcctgttcgcacaatatccctaatgtctagcacatagaatatattctaaacatatgtggcgtaagtgattgatgcattttcttgaacatttggagagaaaatgttaagcaattaaacttgtaaccaatttaagattttttttagtacatgtgactgtattatgaagaacaatgcaaaatttggagcaatttacaagaagatggaacagttcaagtaaatttgcccatgacactagtgacttcaggctcttttatgtatgcaacctaagtgatgaatagggaagtacgtgtttatggaatctgtcattggtggtatttcagtgggaaaatgtgaaaagctctgattttgaagggttgccagagaaagaggaacaggcagaggaaactgaaagaagaattttttttttttttttttttttttgagacggagtctcactctgtggcccaggctggagtgcagtggcgcgatctcggctcactgcaagctccgcctcccgggttcaagccattctcctgcctcaccctcccaagtagctgggactacaggcagctgccaccactcccggctaattttttgtattttttagtagagacggggtttcaccgtgttagccaggatggtctcgatctcctgacctcgtgattcacccgcctcggcctcccaacaggcctgaaagaattttaacaagcaggatgagcataaaggcaaagtggggttgtcaacatcaaggaaacagagtgttgggaaacaatggtcgactttgtcaatcgccaaagagactcccaggaaaaatgagggcaacaaaagtatcagttggatttaggaggccactgcttacccaaagagttcaggtagaattgttgggaggtgcagtggttggagaatcaactccgtgaataatgaattgtgttgacacggtacataatacggtatttctgactacattggcggcatttcactaagtaattactacctgaagtgcctaccttcagtaaggcatcctgttgttggatggggaaagagaaggaggaaataactcttagctttacctgtactgtgcttctgagacccaggtatggaccttcactcccaatttactatccatggtctcatccgatgttcagtaactgggttctcctttggcagggagtagggattgcctgagaattaaaaggggaggggagatttctgaactggacctcttaggttatgactagattgggtgcctgaggcagcaatggggctttataaggcttctttacgcttcatttaactaattgcttttttgttctctcttattcagtggagttccaatctgttcggttgtggagaacgaacctgagaaaaaggatctttcgcagggtagtttttgggggcagaggctgatgtgctgcaccccctaatcaggggtatggttggctgcagtagtcaagtgagagggccgcaaagggaaaggaaaagtcgagactatcttagggaaccaggagagtcgctgtacctctgaaagatctacggtttgtctggtctgtaaggagcaaacacggtggaattcctttccagatttttctgggcctcgacctctggcttttggggtacatgccaaaaaaaaaaaaaaaaaaaaaagcgcagggagagtccactagcctcggtgacagttccccattgcggtttcccctcctccacccttctttgcgagctccttccctctgcagagagttatcccgccacattaacccctgactcacagctggaccgccccggcccgcagcgccacgtcccgggtggggcctgccacggcaaagcagcagtccggcctcgagcggcccctcgggggcggcggggtgggcgccaacagcagtcaggcctgacaagcggcgacctccaagggtgaggcctctgcgggcccccgactcacgcgcgtccgggctctgcaagcgcggtggggagcaggctgctgtggtcgcggggactgggttgcggcgcgccgcgtacgggacggccccaaactctcgacgcccggggcaagacgcccaccccctgggcgctctcgctgggccagaaaggaagacagaaaagccgcgggctgactgtggtggcgctcgcctgcaggcaagtaccgggcgctagggcgggggccgccgccgggggcgcggggtgggctggggccaggccgccaggggcgcggggtggtctgggggccaggccgcctgcgctacctccccagcctacccgacccgacggcgcgggtgctggcgctgt

SEQ ID NO: 34196 - DNA, 2300 bp, Homo sapien
atgggcaatccttggtgttccttgacttgtgaacatatcattcattccaatctgtatctttgtcttcagtatgccattcccctcccccaaccctgcccctgtatctttgtgtctgtgcatctcaaatcttccctcctcttataaggtgtgttagtccatgttcatactgctatgaagaaatacccaagacagggtaatttacaaagaataagttaaatgaattgatagttccacatggctggggaggcctcacaatcatggtggagggtgaaggcacagcaaaagcacgtcttacatggcagcaggcaagagagcgtgttcaggggaactgccctttataaaaccatgagatctcatgtagctaactacctgttataaaacatgaacaatgtttataaacatgaataatgcattatacgtgcattatatgtttataaacacaaataatgcattataaacacaatactgctttatgggaaacataaatgaatgggaagaacccgcccccatgattcagttacctcccaccaggtccctcccatgacacatggggattatgggaactacaataaaaccatcagatctcatgagacttattcactatcaccagaacagcatgggaaaaatctgcctccatgattcaattacctcccaccgggtcccttccgtgacatgtggggattatgggaactacaattcaagatgatatttgggtggagacacagccaaaccataccataaggataacagtctttagatttagggcccaccctaagtcccaggatgacctcatcttgagggccttaacttaattacatctgcaaaagccctatttccaaataaaatcatattcacaggggtggaggggttgaaacttggacatgtattttttagggggacacaattcaactcactgcacacatttacataaataacacatcttttaataaaaatattttcgaaataaaaatttagcaagaagagtgaccttatttttgtaaatctttcatatctagatttaaggaagaagctgggtgctcatttcctttgatattcaatctgttatgctgttttggttgaaatatataatgaaaatccagcttcatacagatcattacataccctctgaaagggtttcaggaggcttctggggacttcagagcaacacttgagaaccactgctctaaagcatatactccataaatatatgtaaaatggaatttccaggctgtggctacatattccaggctatatatatatatatatatatacatatatacacacacacacacacacactgtatataggtgtgtgtgttctgtgtgtgtatacatatattctactttattagataatggcacattgttttccaacttgattaaccaatttactttttcactagcagtgtataagaggttttgtggctctataagtcgaccaatatctgttattgttacacttaaaatttttgcctatcttgtggtatgtaatgtattgattgcactgtgacgtttaatttaacaaaagttcatctagtgcttgctatgtaccaaccacttctaggtactttttccaaatattggtactttgtaataattctctatggtaggtgctattatctccattctacagatacacactgaggcagagaatttaagcaagtggccggacgtcacacagccagtacgtggcaaagcagggattaagcactcctgcagtctgctcttagaattcgcgctccttgcccagctgcttcccccaaatatttattattacttatgagaaaactccgcaaattgcaaagcgctctaccaccaacgattagcaccctagggcaaaatgagccctttaccactccctagatgctccccagcgctaagttcccagcggaggttgcagtgagcgcagatcgcgccactgcactccagcctgggtgacagggcgagactcttgtctcaaaaaaaaaaaaaaaaaaacaacaaaaaaagccagtgattggagcgtaattaccctcgccaaccgcctgtaaccacggcggccgccacgccccgtttcctggtctcgcccctctccgcccacgactctggccccgcccctcgtcccaggctgcaacggaggcagagccaacgcctcgcgggcttccacgtacgcactccaacgcgtgttcccggagaagaacgcatccgggtcacgggagccggtgtctcaggctccgccccttcaccccccgaaaggctaatccccacttccgaccctctcaggccttttccgcttctcttttacctccccaggtccgcccg

SEQ ID NO: 34197 - DNA, 2300 bp, Homo sapien
gagaacaaaaggcttgctgccatcctgggagcggtggccaccatcttgggagctctaagaacaaagacctgcccataagaattagagatatagaaaatgaagaacacaatgcaatatcagcacacctctatttggccaaaattggtaaaactgacaatacctggcgaggatgcggggcaactagaactcatacatcactgttgagaatgtgaaatggcacagaccctttgcaaattagtatgtcaatttcttgcaaatttaaacatgcactgactaaatggcccagcaatctcactcctaggtatttactcaggtgaaatgaaaatttctattcacccgaaaaaacatttgttgaataaattaatgaatgaataataaacgaatggagctatcataatgtaaaatgactagataatatctaaaattgctgaaacaaaaaaaaatataagcctatttttggaaaaaggaagtaactaccacaaggaatagttagaagagttaagagactgactctttaagcacaggacagatggtcaggaatggttaaaagggcctgctgcttttcattgaccttccagtactattgattttttttaactacgtgaatatattactttcataaaaatgtaaaaagaaaaagaggagtcagagaaagaaaatgaattgtcagaaaaatttagaagttttatcaactgaaatgcagaaaagataaattgtgcttgcatttcatttttgttgttcattccaaacatttatggattagactagctgaaatgaagtaattaagagactcaatagaaaacattgccaagaataaaaaataatttgaggaaaccatgaaaagtttacaggttactctgtcacaaaatactttgttaattcactaccccgcagcaacacacatcaccaaggctggcttctggaatgctttctacttgtagccatttttgaacaataggtgattccgcttttaacaacactgttagaatataatgtagcgagttttaccagagatgtttaagactacctggcacaagtaaatttcattgtatacatgtatatacacgagggagggtgatcatagtctagaaaaaaacaggtcttcagaagtctagaactttaataaccttaaatccaaattattccctgcgtccatccataatgagaaggaagaaatctacacttgcatttcttccacctttcacatctttctcatttaaatcctactgtacttgatttgtgttgttcccaacgtactaggtgctatgcatgacgtagaaacgtgtttccttatatgtatgtactagcaggctccttcaagcacatgcctaaggttgaaagattcaaatataattatagcctcttaaattattgcgtcagagcccgccctatcccctcagaaaaagcccccttttacaccatcaaatgaaatatcaggttatttgcactggatattttttaaaagaaaatatttgattttaaaatcaaagagttcttggttttccatcatttcactaattgtcttactagagacccgagtctcctttgtcaaaatatatttcagtacgcattttaaaaaatatgtgtgtgtgtatacttaaatatatatatatataaagtcttggacttattttcacctagcctggggcatatcgtggatagtttcaatcgacaaaacaggcactctctggcctaggagtggaatccatcctcaattttcgcaggctcctcacaattctctatttggaagaagtgtccctctccttcccttttcttttcctcctttactcagcgtcagtccccgcagccatctcctccgaccctttttgtctacgtcccagcgtcgcgaaccacagcggcggaggtggagcggggagaggcgttaggccgggcggctaaaacgcgccgttaaagtgggggagagattgcgcggagcccacgcgatccctgggacgccggagacaacggggctcttgggaaggcgcggagcccggggaagccggggatgtgcgcgtgagccgtgcccgcagggtctccccgcctccgccacctttcttgggtggctctccgcctcgtcctccctccgagggccgttggtacattcctagtgactccaagcgcttaaaaggggcccgggaggatgaaccccacagatctgaacctgatttgtgtgtgcaccgcgtctccagcgatcccggatccactgcgctgccaggggcctgggggtgggtctcttgctgtctctgcgacgacatccttacgtttcggcactctaatgctgggtttgtgcgtgtgtgtct

SEQ ID NO: 34198 - DNA, 2300 bp, Homo sapien
gcgctcagtcgctacttccgctctcgagtgtctccaagcaagatggcggaggagccgcagtctgtgttgcagcttcctacttcaattgctgctggaggggaaggacttacggatgtctccccagaaacaaccaccccggagcccccgtcttccgctgcagtttccccgggaacagaggaacctgctggcgacaccaagaaaaaaagtaactgaatttatttccgggcagagaggcgggaggttcagattgcatccgagtaggggtggcggccagtaaagaagcaaaatttagaggagcgcctgtcctagacctgcattttgaccagtcatcagaagaaaagaagtgtactttttgatttttaaggcctttaagttgagtgttaaaataccatctctgtctatcggtgtagggcctgatacttggctgccacacttatttttatactgtatttttttgagttggccagactgcgagctctttgaaggagggagggagctgagtggggcggggggaggggggtctcggtaattccaggtacttaacacaggagctaattatttgagtaatgttttatggtggtaggggtggtcattggcaaagcctggattagaattcatgccttccaacttaactcgcttttgcttttttccccctcccagttggttgtgaattcactccttaaaccaaaaaccaaattcttatgcagaatgaagactgctaagggaaagctaaaggcatagatgttacctttttaagaaacacattttggaacctttgtgagttatttcattgcttgagtcagctatcctcaaccctttattgcttgagaatgtttccctttgtaaaagagattgctaaaattacgtgttctaaagcactctgtttagagttagagttgcctatgggaaaagcagcatataagcatcctcgattcagagaggctgatttcgtccttagacgttttccccgttctgtcttaagatgacagtggtctctggccgggcgcggtggctcactcctgtaatcccagcactttggtaggctgaggcgggtggatcacctgaggtcaagagttcgagaccagcctggccaacatggtaagactccatctctactaaaaatataaaagttagatgggtgtggtggcgcgcgcctgtaatcccagctactcgggaggctgaggcaggagaatcgcttgaacccgcgaggcggaggtggcagtgggcggaggtctcgccattgcactccagcctggacaacaagagcgaaactccgcctcaaaaaaaaaaaaaaaaaagacattggtctcattgctttttcttcaacttctgctactgtggaggataattctctcccaagactgccccccttcccactttaaatcagactcccatttccacctgatgcactataagtatttccatggatagccactggaatctttcttcaaaagaattccgcaggttttacagtgttttgttgcattttttcttccaatttactataggcaagagcggacgttcggagattcgttttaaggtctaacagtcttagtcaaaacttgttacttgactctgatgatagctgtgcaaaacaaaagctaaaaaaaatggcttacaatctaaatattgcccgagggcatattttcttggtctggacagtatttttttgcaaattgaactgtcatttaaggatgagatttttattttctggctcttgttagcatttgagtttgcctctccaatataaaacttagtttctaactattcctaccttgtgcttgtcattatttgttgaggataatatgatgaaagcagcttaactgttttgtatcctcagcctttgttaatctacagaagaaagattgttgaaacagaccaaggttttggcactggaggtatgttaggtttcctggggagtaagtgtttccctagttgattctaatgtgtatccgggttcagaactacaagcaaatcacctttaaaattaaaaagagagggcagctataattaaattattttccttctctggtttctcactgtcttacacttcatccttggtagcataactcatgatatttcctgcttcactttctggaaatgtttaattgaattaatcgatttattgatagccccaggggatttgagggagcagtgaaaggaggtatgaaagataggctaactaaaatcccacgttatctccaaattcattcctattcctaagataactggacctaggataattaagtagttctttagtaggaagataaagatcatgtgttctagatgcgttcattcca

SEQ ID NO: 34199 - DNA, 2300 bp, Homo sapien
aagtgtaagacagtgagaaaccagagaaggaaaataatttaattatagctgccctctctttttaattttaaaggtgatttgcttgtagttctgaacccggatacacattagaatcaactagggaaacacttactccccaggaaacctaacatacctccagtgccaaaaccttggtctgtttcaacaatctttcttctgtagattaacaaaggctgaggatacaaaacagttaagctgctttcatcatattatcctcaacaaataatgacaagcacaaggtaggaatagttagaaactaagttttatattggagaggcaaactcaaatgctaacaagagccagaaaataaaaatctcatccttaaatgacagttcaatttgcaaaaaaatactgtccagaccaagaaaatatgccctcgggcaatatttagattgtaagccattttttttagcttttgttttgcacagctatcatcagagtcaagtaacaagttttgactaagactgttagaccttaaaacgaatctccgaacgtccgctcttgcctatagtaaattggaagaaaaaatgcaacaaaacactgtaaaacctgcggaattcttttgaagaaagattccagtggctatccatggaaatacttatagtgcatcaggtggaaatgggagtctgatttaaagtgggaaggggggcagtcttgggagagaattatcctccacagtagcagaagttgaagaaaaagcaatgagaccaatgtcttttttttttttttttttgaggcggagtttcgctcttgttgtccaggctggagtgcaatggcgagacctccgcccactgccacctccgcctcgcgggttcaagcgattctcctgcctcagcctcccgagtagctgggattacaggcgcgcgccaccacacccatctaacttttatatttttagtagagatggagtcttaccatgttggccaggctggtctcgaactcttgacctcaggtgatccacccgcctcagcctaccaaagtgctgggattacaggagtgagccaccgcgcccggccagagaccactgtcatcttaagacagaacggggaaaacgtctaaggacgaaatcagcctctctgaatcgaggatgcttatatgctgcttttcccataggcaactctaactctaaacagagtgctttagaacacgtaattttagcaatctcttttacaaagggaaacattctcaagcaataaagggttgaggatagctgactcaagcaatgaaataactcacaaaggttccaaaatgtgtttcttaaaaaggtaacatctatgcctttagctttcccttagcagtcttcattctgcataagaatttggtttttggtttaaggagtgaattcacaaccaactgggagggggaaaaaagcaaaagcgagttaagttggaaggcatgaattctaatccaggctttgccaatgaccacccctaccaccataaaacattactcaaataattagctcctgtgttaagtacctggaattaccgagacccccctccccccgccccactcagctccctccctccttcaaagagctcgcagtctggccaactcaaaaaaatacagtataaaaataagtgtggcagccaagtatcaggccctacaccgatagacagagatggtattttaacactcaacttaaaggccttaaaaatcaaaaagtacacttcttttcttctgatgactggtcaaaatgcaggtctaggacaggcgctcctctaaattttgcttctttactggccgccacccctactcggatgcaatctgaacctcccgcctctctgcccggaaataaattcagttactttttttcttggtgtcgccagcaggttcctctgttcccggggaaactgcagcggaagacgggggctccggggtggttgtttctggggagacatccgtaagtccttcccctccagcagcaattgaagtaggaagctgcaacacagactgcggctcctccgccatcttgcttggagacactcgagagcggaagtagcgactgagcgcgtgcagtgggcgtgcttttctccagggagcgtcgcaaaggaggcgccggagtagggggacgcaattacacagtgaaacttggtgttcccggctagtcattcaaatcgaagctgtcgcagacctctgaacgttagtaacgcaacatgtgtttctccgcgactacagacctcgggagaggagcggtgggcaacgtgtctgtgctcggtcgaatgcgcacactccagttaggccgctggctcggacctaga

SEQ ID NO: 34200 - DNA, 2300 bp, Homo sapien
ctcctgccaaaactgccacttcccacattaaccgtcactgctacctagtaagtgatggtaaacaatacttctgttcccacttttggacaagggaaagacagatttctgagtttctaaattaaatgcatttttcaatagatagttaaattatacactatacgagtagtatacaccgattacatggattagccaggaaacccactatttttaatattgcttaagtttagatatggaaaaataattttttgaattgttttactattgcaacataccttttttacactgcaaatggatgacactggcaaaatggttatgacaaagactccttcaataaaggctggtactatattttaacaaacaggtaaagttaatggcattttttcccattcgggaggatcaactagaatttaatctggattaaagaatgatgtagaatttttaaacagaccattagtattgaagttatactaaattaaaaccacacacgagtagcagaaaatattctttatagctagcaaaagcaaaacaactgaaaaaaatgaagaataagctcaagatttctcacttcaactaacacctccagactgcattatcattttaggcaaactgacattttcacatttactttgtaatggcaagattgatttccatctgggacttatctgcataaaagtgttagccttggcacaatttcaaaattgaattgaaagctcatttcttgctataagcaaagtgccacaataccacacaacagttatacctcacattaatcctaccactgggagtccaattttatgtgtttcagctagcgaattctgccctcaggtaagcacataactctataaaacccttcctcgatcatcaacaaatcacttatctctactaccttaatgcctcctgcacttgtccatactaaacagtatttacacgttaaaagagaagttctacaaatgctactattcttcataaatagaaaaaaactataaatgagggcaaattcccatacgtggaaaaatgccaaaccagaagctgaaatcataacttttaggtatagaaccacagctccaatcagtcaactacaaacgtcgccggttacttcgagggtaaataatttgcagccagctggtaaaaagcctgataaaaatattaggtcctcacatatcttccttttcaataaggagacacctgaaagtcacactgggcagtctgtcacgtatcgaaacatgcagaagagagactgtacagaacgtgcagttatcaaacgcaggaagccaaagttcctgtgctatgagaggaccacagtgaaaaacggtagcccatctgtccaaagaacagaaagaagtccacctggaaaggatgggagtcggcggaggggggcgagaagaacgagttccacgccgtcttcctcctcccgggctaactgcagccgcgggcggcaggaaggcagccgcgcggggtgggctcttggggactgggcgcagggctccgcggcgcggctgggctgcggctgcccgatcggcgagggccgggccccgggaagtctccagggcctcgcccgcgcagccaggaaagcatgcagcccaccgacgggcggaggaaccgcccgggcaaagccacgtcggtggctgaccgcgcggcagggaggtgggcaccctgtccacacccaccaggaggctgacagctggcgagcgccaggcggccgggacgggacaagggccgcagcgcgccggagggggtcgctctgagaaagccgcgctgggcgctgcccgtcgccaacgactccccctcgcccggatcagcggcggctggatactcacgtagggctggtagaacttggagagccgcggcttcccgtggttgttgaagattaggatcgccttgatcatggctgtgccgggccgaccgggtgggcactgggggccagggcgggggcgggcgcgcgagcctcgcctcgtaatctcgcctgcgatccttccccacccgccccctcccgcacgcgaccgcgcgcgctcccgagccgtcgggcggggcccaaggggcggggcctgggcggggcaggcactaaggaaagcggaaacatttctaggtccgagccagcggcctaactggagtgtgcgcattcgaccgagcacagacacgttgcccaccgctcctctcccgaggtctgtagtcgcggagaaacacatgttgcgttactaacgttcagaggtctgcgacagcttcgatttgaatgactagccgggaacaccaagtttcactgtgtaattgcgtccccctactccggcgcctcctttgcgacg

SEQ ID NO: 34201 - DNA, 2300 bp, Homo sapien
catgccaaagtataaacataaacaacaaaaataaatagcagcacaagatacaaagctgaagttctacctgggtagcatgtaaaaaactgggattgttgctttagttcaggatttctgaacagcagcactaatgacatttttggcaggatacttctttgttgtggcaggatacttctttgttgtggcaggatacttctttgttgtggcaggctgtccagtgcattgttggaggacagcttgcctctacccacttaataccagtagtacttgcttccttgagttgtgacaaccaaaaatatgtccaaacattgtcaaatgaggtgctggtcatggcaagggcacaaaaattatgcccagttgagaatcaccgcttccattgctctgaataagcagattttctgagcagctctagaaaatgttttcctagcaactggtctatattcccgaactactttttcattgagatgtcaaatatttcatataatacttttccagttctttattattaaaatcttgactcagccagtatgttattttgcaacgtctttggagtgacattaatgatttatcagaaatattttccctttaataagatacttaaattgctgaatcatttggtgtgactttattactttgaaactttttgtgtggaagccaatctctgtttctttaatcatattagaaaaatggaattaaatgctagtgtccatatatgtacttaactgaggggaggaatacctttaatatgtttgaaataatcatgttactgacttcctttcatttttacctttccttgagtgtctggaaatccttcgaaatccttcaagaaattgcccacgggttgttaaggccagtaattagttaattagtgccacagctgtcccaatcccaagctgaatatgacctaaactgagatgcccctgctagcgcagtagctcaaattctgacagcacaacttgtggtaggtatatggaaatagacagagcttctccctcagctctatctatgatcttctgagagtgatgcatgtggtcataattatttttaaatataatccttaagtttctgaacaaagcaaatccagaaaaataagtcatatggtcttaatgtggactggttcacagattatagcacaactatctgcgtgagcttaatatatctccttccactttcctgtcttattccagagggtgatggtggtggtgttcatttgattcacttcagttcaaggaacaagaaagcactcatttcccaggagaatcaccgtggtctaccccatctctgaacccaggcgaaagggtttcctcattgcaagtgagatacagccaaagcagtagtaaagcgaacaccgttttatagctgctatggaaaaattattatattttcgctgtaacacacacacacacacacacacacacacacacacacgcgcgcgagtctcaagacgggatagtttaaaatcttcagcctgcagtgggatctaactaccttcccttccgtccccagtgcctcctgatgcttgcaatctcattcccaattcaccagcgtgcgtgaatgcagactccagatccagcgcagacgccaagaattcgctcaggggcaccagctaaatagcaaacagatgccatgtcaaacatgtgaaagcctcagcgactagggtaccgccgggaaaaccagttccagcccaggaatttctgggtggaaacactggccgccgaattgttttattctctttgcttgattcgagtcggttctgaaagcaggtgtcccctctcccccggcttcaggaagggaaaccccggccccaggcagttgcagagctaagaaaaaccatcccgccaggccccttcttgtggtaacgcggtcctaaccctgctctgccccacaaccccatttcacccgggagacgcagacgccaggctccctagcactttgtcgcctcttcctccagcctggcttcctgagctctggaaaagttccgggcctccggacgttgtttccatcttcgccttcgctgcctgggccgcatgcctcctgggcttatttaggaagcgaagttagcgccacacatttggctccagaaatttgttctgacggcgcggccgacgccctgcagggtcatttctgaacgcattcccaaatatcctggtcctcaagcccttaccaccccctagcacacgaagccccagctggcggtggagcaggtgtgttgctggtagctcatcgctggcttggagatagaggtgcttggtacctgtcccctttccgacaacacctgaaaccgtatcggggcacacccc

SEQ ID NO: 34202 - DNA, 2300 bp, Homo sapien
gtctttggagtgacattaatgatttatcagaaatattttccctttaataagatacttaaattgctgaatcatttggtgtgactttattactttgaaactttttgtgtggaagccaatctctgtttctttaatcatattagaaaaatggaattaaatgctagtgtccatatatgtacttaactgaggggaggaatacctttaatatgtttgaaataatcatgttactgacttcctttcatttttacctttccttgagtgtctggaaatccttcgaaatccttcaagaaattgcccacgggttgttaaggccagtaattagttaattagtgccacagctgtcccaatcccaagctgaatatgacctaaactgagatgcccctgctagcgcagtagctcaaattctgacagcacaacttgtggtaggtatatggaaatagacagagcttctccctcagctctatctatgatcttctgagagtgatgcatgtggtcataattatttttaaatataatccttaagtttctgaacaaagcaaatccagaaaaataagtcatatggtcttaatgtggactggttcacagattatagcacaactatctgcgtgagcttaatatatctccttccactttcctgtcttattccagagggtgatggtggtggtgttcatttgattcacttcagttcaaggaacaagaaagcactcatttcccaggagaatcaccgtggtctaccccatctctgaacccaggcgaaagggtttcctcattgcaagtgagatacagccaaagcagtagtaaagcgaacaccgttttatagctgctatggaaaaattattatattttcgctgtaacacacacacacacacacacacacacacacacacacgcgcgcgagtctcaagacgggatagtttaaaatcttcagcctgcagtgggatctaactaccttcccttccgtccccagtgcctcctgatgcttgcaatctcattcccaattcaccagcgtgcgtgaatgcagactccagatccagcgcagacgccaagaattcgctcaggggcaccagctaaatagcaaacagatgccatgtcaaacatgtgaaagcctcagcgactagggtaccgccgggaaaaccagttccagcccaggaatttctgggtggaaacactggccgccgaattgttttattctctttgcttgattcgagtcggttctgaaagcaggtgtcccctctcccccggcttcaggaagggaaaccccggccccaggcagttgcagagctaagaaaaaccatcccgccaggccccttcttgtggtaacgcggtcctaaccctgctctgccccacaaccccatttcacccgggagacgcagacgccaggctccctagcactttgtcgcctcttcctccagcctggcttcctgagctctggaaaagttccgggcctccggacgttgtttccatcttcgccttcgctgcctgggccgcatgcctcctgggcttatttaggaagcgaagttagcgccacacatttggctccagaaatttgttctgacggcgcggccgacgccctgcagggtcatttctgaacgcattcccaaatatcctggtcctcaagcccttaccaccccctagcacacgaagccccagctggcggtggagcaggtgtgttgctggtagctcatcgctggcttggagatagaggtgcttggtacctgtcccctttccgacaacacctgaaaccgtatcggggcacacccctcatccaaatatccacgtttaaggtgtccggattcgtttggcttgaccaccccctccccgcgccaaccctggaggcatcttccgtggggtctgtctcttcgaacccaaaggggtacgcgtctgggtgagccaggtccgcctcttccctggcgctggccgggggcgggggtgggtaggctgggacctgtgtctgattagctgggagggggaagccatggtcccaaccgctgtctgctgagctccagtccgtccaggctcttccaggaggaagaggcacgatacaagagaggaggggcaggggtcgcagcactgaacaccctggccggggttttgacagctgccacagtctctgagctccagcctcgcgcctgaacccggtccctgccatggggcccccttccagctcaggcttctatgtgagccgcgcagtggccctgctgctggctgggctggtagccgccctcctgctggcgctggccgtactcgccgccttgtacggccactgcgagcgcgtcccaccgtcggagctgcctggactcagg

SEQ ID NO: 34203 - DNA, 2300 bp, Homo sapien
gaacattcacattgttgtcaacctatctccagaactcttatcaccttacaaaactaaaatctatacccattaagcaataactccccactccccagcttctgccttcttctcctctgggaatcttcttagactcatatataccaggaacttggcaggttctgcgtttagataacaaggaagctgatcataatgataatccaacctaaggatagcagttaccactatccaggctgtatgtgtcactgtgtactccctttttcatttaattctcacagtactctaatagttgacagttattatatctattccgtgaatgaggaaacagactcagagaggttaagagactagctcaattcacacagctcaggttcaaactcaggcctgctgggctcccagaatctggcgtaccacaagccatccttctgttgcaggttcttcatgaccctggcttcaagcttaaccttaggtgtcttttccttgtggtttcagaagcagagacccaaagggtaacaactcttccaaaacatcacaattttggagctctaccttggtttatgaacatctgtagaactttattaagatttcttcttgcttgaattttaatgttctgaaaatatggtttctagttaacactagagttagcaacacaatagaaaaattgaacgggacttccctttcccacatttgcaagcttgactgggccacagccccactgaaacaggaccaaggaagaggtaggtgaacagaggaggatttactgacctacagcaagaaaaaaaaaaaagtcagatatgtaggtgaagtgtttctattttttcctctgaaatattttgcaccctgacctacacagtaatttcaaaagatttcttcacaagttgagtaacacatcatctaaataagaaaatttcaaaactattttttcaagcattgatgtattttttaaagaaaaaccaagcacgctgcccttaaaaacaaaagttacagattatacatccactagagcaactctttaaacttatttagaaacctttgaaattttgaaagtagtgcaggagatggtgcagggtgtaatttagtgggattctttccctcagagaacatctgagaacattttctctaataataaagggcaaagtacatgcagttgtgtacggcgcaaatgctccaccagtgtgtgagtggacaaagagatcgccggttggaaaaaaaataaattttgatatctcccacttaagctatttccctggagttcgccggaggacagtattgtggtctcagagcgtggaaagagacaattcttgtgcaggggcaggaaacattccgtgtaggagatattatctcaaatgagtgtaaaaagaacacatgtctgcatttctaacaagcgcccaggttacagctgctgctggcccaaggaccaacctttgaggggcaagcggtttgttgaatggggtgaagaaatttccggctagagaggaaaggtgctttctgaagagaacgataagcttcaggggtaccagcgacctaaaaaggggcagcaatagaaacaaacgggatgagcagatacagggttgaaaactggccagaggaaggaccgcggtctccgccgtctctttattcggagcaaggttataggaaaagggagaaaggaggcgctcgcactctgtctggctttgaaagaaaacgtcgcggtgtgtgatgttccccttcctgtgtccaagtgttctcattgttcaattcctacctatgggtgagaacatgcgctgtttggttttttgtccttgcgatagtttgcattgggagatatacctaatgggtatatttcttaatgggtgcagcacaccaatatggcacacgtatacatatgtaacaaacctgcacgttgtgcacatgtaccctagaacttaaagtataataaaataaataaataaaaagaaaaaagaaaacgtcgcaaggggattctttggaaagggcagcagacgcgcacctggacacggtagtcagctggacccgcagcctgcaccgggacgcaggggcgggggccgagaggggccccgggctgtacagcccttacctgcgctcgccctggtcggtgtagacgttgaggaagagtccctccctgaggtcttccttcaccaggcccgagaagctaagctgcagctcgtagctgctaccaggtttcaggggctcactgagctccagcaccatgtattccgtgtccagcgcgaaccacacgtcgtccacgggcacgcggcccactgtggcgttcccagtgcccggggaaaggggtccccgcacctcgg

SEQ ID NO: 34204 - DNA, 2300 bp, Homo sapien
tattttggattttagccattctagtaggtgtgtggtaatatctcattgttttaatttaaaattctctaatgacaattgatgttgagcatcttttcatatgtgtatttgccatttatatatcttctttagtgaggtgtatgttcagatcttttgtccattttgtagttgggttgtctgtttctttactgctaagttgtaagcattctttgtgtatttgaatacaagtcctttatcaagaatattttatgttaacatagtgaaaataatttatttgctggcttttgtctttggcattagtctttaaaaagccttctctccgttcaggttataaatattcccttgaattttttggtaattttatgatttcattttgagatatttaaaaaatcccattttttggaaaagattattttattttctcctccatttaaatccacttagatataattgccttgcctagttttgacaaccatgcaatggaaaactggggactaatgatatttgatgaatcaggattgttgttggaaccaaaagatcaactgacagaaaaaaagactctgatctcctatgttgtctcccacgagattggacaccaggcatgtggtaaaatgttctttttatttcacttgaagttattctccaggtgcgctaccaaaatagcataaaaaccccagtaagaccctgccatataccatattttaaaaagaaaaacatctcaaagtatgacagtgagtaaaaatggggaagactcagattcagggtggatttgagctactggtgacagatcatagggaggagaccgtacagtttggctgagggctgggtatttacatctaacaattaagtttgctccacaaagtcctcttcaggaaaagttaaaccatgcagacacaggagtattttattttcatttcacctaaaataagggctattcaaaaggatcactgaaagatacccacatttcatcagcagattgttataaatttctagttgttgttgctgttgttggagagaggttaaatggatacaggtaatagattagcaaggtggcaataattaacccttgagctgcattcccaatggttgtgtaaatgacaattcatttaatcagatctatttgcttttgcattgggattttagaagtttagctgtttaatttgatgaagattttcatatctgcatttcagtgtctgcaccattaatacaagtctgttaagaaagaaataatttcaacgatgttatcttcgtaatgtggctccataagaagttttggaaaagagcagtttactaggattgattaataccctggtgcacagtaaaacaaacacaatcacaagttttattaagtcacccgaagtgtcattttctattatagcctaagttacacattgttttgcaatacaggctattagtaattatagctgttataagaatttggtgaaataccagggcttgcgtttgttagtttggaaatcattgtttttctttcctaattctgttcatcatccatttgacactgtttttttttttctgttcagttcaaacagaaaataattaacagctgagccatattgcataacgtatgattacttgagtgatttgtacatggcacagatcaaattattttcttaaaatataaacaactgcttaaagtaaaatccagttgcagcctacttagagtataaggtgctagaattagtaggtggcaagtcagcattcagggcttctgttttatggaactaaaaacaacttttgggccaagtggacagtttaagaaatgctattctagctgaccttatgtttaaacattgcagttttaaaacaaaaattgcttttaataattgaacatggaatatttctgagaaatgcatgactaatatctatttatgtgaaaacaacaacttgcttttttggtgtcctgtcttcaagttttgttattgatggcaaataaattttaattatgtcttttgaccttacatttacttaacatgcaattacaacgaatataacttaaaaattaaatttaagaaagctctttttttcttctcatttccaaaagtggtttggaaacttggttaccatgaattggtggaacaatatctggctcaacgagggttttgcatcttattttgagtttgaagtaattaactactttaatcctaaactcccaagagtaagtatgtttactaagtttatttaacatttttctcctaattataaaagtaatgcatattcattcttgaaaatgtataaaatacaagaaaatacaagaaataataaattacctataataccaaaaa

SEQ ID NO: 34205 - DNA, 2300 bp, Homo sapien
tgatttgtacatggcacagatcaaattattttcttaaaatataaacaactgcttaaagtaaaatccagttgcagcctacttagagtataaggtgctagaattagtaggtggcaagtcagcattcagggcttctgttttatggaactaaaaacaacttttgggccaagtggacagtttaagaaatgctattctagctgaccttatgtttaaacattgcagttttaaaacaaaaattgcttttaataattgaacatggaatatttctgagaaatgcatgactaatatctatttatgtgaaaacaacaacttgcttttttggtgtcctgtcttcaagttttgttattgatggcaaataaattttaattatgtcttttgaccttacatttacttaacatgcaattacaacgaatataacttaaaaattaaatttaagaaagctctttttttcttctcatttccaaaagtggtttggaaacttggttaccatgaattggtggaacaatatctggctcaacgagggttttgcatcttattttgagtttgaagtaattaactactttaatcctaaactcccaagagtaagtatgtttactaagtttatttaacatttttctcctaattataaaagtaatgcatattcattcttgaaaatgtataaaatacaagaaaatacaagaaataataaattacctataataccaaaaataatttgtgttagctttttgatatttttttttaattccaggctttttatctattgtaaatgtttttgaaggtgggaattacataaaattttgtattgctttttttacttcatattcaacttcatatttctacatattcatatttctacttcataatcctgagtatttctacaaatcattagatctttttaaaaaagattttaaatgactgcctaagattattttcacttattcctactacatatatttcttagtcctgctatatagactatatatatatagtctaggtcttgctctgtcacctaggctggagacatggtctcgctctgtcacccaaactggagtgtggtggcatgatcttgactcaatgcagtctcgacctcctgggctcaagcagtcctcccacctcagccttccaaatagctgggactacaggcatgtgccaccatgcctagatcatttttgtattgtttgtagagacggggtttcgccatgttgcccagactggtctcaaactcctggactcaagggatccaccagcctcggcctcccaaagtgctgggattacaggcgtgagctaccgcgcccaacctagactgtattttaaagcaactgtaacagcagtgtgtgacttttatgataagtaatatgctacttcatatttaattaatattattgctgatattgttttgctaatttgagtaaataataatattgaaagataaatacatcaatgtgaaaatctaattctttcaactgtaggttttacttctgatatttaatttatttagagtaattatgtagtgcttttagaatgccatgataaaaccaaattgatttgatttagatatctaaatgtttagacttaatgttatcttttgatataaaccttacttctgttataaaccagaggttctttcttggtttgcatcttcttcccctcctctcttctgtctcctgtaacctctctggtcctcaggattgctccttcctgcctctctttgctggtccccgtctcatctcagctcccagttgttccaaggctggattactgacctcttttctcctccctaccttcactcattcaaaggatttattaatattgaaatgctatctctacttgctggatcttctttacaggctaaatctattcattctgaaggagattctaagatgatattcgtcctattattttggaagtaagctttcctttttttatgaaaattgataatcgatggtaggtagatggtacttgttttggtcgatagtttggcaggaaaaaaaagttgacaagcctatcttagtgccacagaaaccttttaaaaaatctctttttatctgtttgtgacatcacagcatctggcaagcactgatgtagtgcacgcttttaacacccgagttccatgccacctccccgccctttacagacatgctataaggtccccagcccagtcactccgcagtgcctctctcttcctccccatggactatacacaggccctgcttgtcctggaggaaagtttggacgtcattatatagatcaggagactgaagtactgaaaggttaaatgacttgccaaaggtaatttgcccaac

SEQ ID NO: 34206 - DNA, 2300 bp, Homo sapien
gatgtattaatgtataatgatgcatattcaccattgtagcatcatacagaatactttcatccttccctctgcccatagtcagttgcttttttatgaaaatgtttgaataatctacttcttattccagaagatttcattttatttttgtttttgctttttaatgtgtagagtttttggttgctagtttggtcttggctgtgggagccagaatcatcatcatgagtacgagcagaggggctttgcgcccctcccataaggtggtatcttgctgggatcttgtgctccatttctacagggtgagagacagactggcagaggcagcttgcctaaatgcaaaaacaaacaaataccatctcaggtccagcttggccctgggcatgaagtgaccagtgctgtggttttgagtacatctctcccttgtctcagagcattcatgggcatatgtctcacagtgacatgcaggcaagctcacagacatcgtctccacaccaaggcacatgttggagttgagtacatcgccaatagcagtgcaggaaccgctgctcctttcagccaggcccagaattcttcctagaaagcctaatctggaaatacattttggaatatttgattaaataaaacaacttttggcttggtcttggtcttgcccctcactctcatgtacagggcattatactggttggtgtgggaaaatttagttaattattgggccaaagatgatctcttgaatactcattccaatgagaaagactccattggtcataaagctactttcaagttacagaaaagtcagtaggtacacatagctatgaataggtcctatgaaagcatgtgaatagtgatgaagcaatagtatttttgtgactttccactggatgtggtagaagcattatttgttccgttatcatctctgttaaatgggcttcacagcatacagaaaaaccacttttatttgaatatagaatacagagcatgatcagttttaaactcaacctgtccaaaatgaatcttaccctcttcactaagcacttgattttttttctccacatgttattatatagcctaaagtcttaagcttaaaaacttggaattgttttcacttctacttggttgtatttcatgatggggaacacagccaaaaaggctaaacaggagcacaagcaaagtgagaagttatcagagtggagggtccaagcactggggggcctgttcccatggcatggatcaggctggatgccttggtgttcccatgctggcctcgtgggcatccttgccagaaggaatctgacatggcagaggacatgaagggaggggtaatgtgagaagaaggagaggcagaaaggtgagccagactggagtacccaaatcactgttcccacactaacgttagatgttatcaactttttagaaaggattactatattgagtcgtattggcttttgacttcatattaattagaatgtatttgaacaccggtgggggtaaactattcgtaatgcaattttgttgagtaatatttgaaagagattgctctctcaacaagaatgataaatcatctctgtttcaaaaataacccctgttgaagttgacaagagcaggaagggatgaagtttgccaggtaatctaataggtgcttccatatacattttctcatttatgcaccagaacaatgcttctaagtatctgttattctccatttttacaatttataaattgcccaaggtaatgtcaaatccagccctgcctcctcgggtaaactttctcctgtgtctggcagaaattcacacatttagcaccataggtaggtttcctctgttttccatttttatttttaaggttggaatttgggttctttggaactcaaatttcttgagtcattttatagatttttgctgcctagctggccagttaaaatagagaactaagaaatgtttcttctttcttcatagaaacagtttcgcttgcctcaattatatgcagagttatattgtccttcacgttgctcaggtagacccagtgtaagttacagctagaaagttagaaaaacagcagcactattttccctcacctttattagtatattatgccagagttaactcttatcatttttaatttcaagtacatatttttgaagtaaatcaattgtatatattaactattcaactgtctcttggtcagtccattataataaccctattttaatttttctttcctttttaatgcacccaaagtcttttatttacttttttaactacagccacactttgagcaggtaagtgtctgctgttttttcatagcaa

SEQ ID NO: 34207 - DNA, 2300 bp, Homo sapien
agtcgcctctgtgtccactggagacttgcttttgtgaacacctaagaggtctgggttttgttttctaaggagggtagaatgtttcttttacatacgtaccacattatttaaatctcattaagatccaagggagcagacattattctcatccccattacagattgggaatgagaaacttgttgaggttaagtactttgtccaaggttacatggatttgggatttgagccatcttgatgctcttttgctcaaaattctggctatatatttttaaggcaatcagagggtgaacttcattagggatttgaaacagttttagttggttagtggttctacttcaggtaaggaatcaagacaaaagggaaatgattcaaagaatgagggaactgggacccttttaagttgcagatgaggtcatctgtgtttggatcagagacctataatttatgtagattcacatacatctttttcagatatgcatacattggggactgtagagtgttgtggaactaaatgtatttgtatgtgttcaacacactgtataattgactcaattatccatgtggagattattcagatttaatgtgcaatctggtttctcctttcagttaggttgttcttgggctgctccaggaactccaactaatttaaataataatttaagtaaaacataattaggaaggaaaattaaattcaattttttggcagctcttgaatattctactgctgaaacgtaactaatccatccactatcttttaattcaccaatgcctttttagtaccacaggattttactgctttctatagattattgcagtagtttccaggtagctctcctgcttacctctttccatttcaatcatcattctgctgacagcaaccttcaaaaatccaactcccactgcaaaatttctttggttcaaaacatttaatggatagaaaaaacatttaatgcttacccatttctcaccagattaagtgcacatgccacaaccagtcattaaaggctttttctagtctaaattcctgttcttcaaacgtcaaaccgcccttctactctactgacctgaaacacacagcctcaccctccacatctctgcagacccaccgcatttgccacctgccctagggagcttttcctgatcttacctcggatgcctttcactgctcccacatctgaattcctttaactcactccatgtttttctcaaaggcagaccaaggtatttatgcaaacatggtgtctccctagtcttgggtgaggtctttgacatcactcactgcagcgattcatctcccctactctgcactgtcagactctaaagaagggtgcaacaaatacttgtccatttagactgccggcaaaccctgagggcaggaattttggccttttgtatctccagtgcctagaacagtgcttggtacacagtaggcactcattcattgaacgttgctgaaggaattgaacgtacatactacaagccctgcagatgcagatacaggaggggttgacggcacagtgcttagggtggaactggaggcaccacctctcctgaggggtgatgcgccgcttcctgggcaggctcgggggagctcgctcaaatgcctgcctctctgtagcccaaacgctggaaaaaaaaatactcacaaatcacctatccaagtatgtacacacaggctcacttaaacccgccctattaaaaaaatatacacacgcacacaccatttatccaagtatgtatacacgggcttgcttaaacctgccctattaaaaataataatgtatatatttatgcacgaacatacacacatatatctatacaggtctgtacatagacttgcttaaacctgccctattaaatacagacacacacccctatccaggtatgtacatacatatataatatataaatataaagacatatatatgcacagacttaactccaacacgattggagtgtcgggagggcaactgggctgccctctccgccctccaggactgcgggacaagtctcccggcgcccgggtcgcaggagacccggagccctaaaacggcccctgcgcggcttgggccttccggctttccgtccgccgcggccgccattggctgggttcggcgcagctaacagacggcggcagtgcgagaaagccgaagatggcggtccccgcggcgctgatcctacgggagagccccaggtagctgatccgttaagctcttgcggtagccgcgcccaggaaggcccagatcgggctcgcacaaggctgtccttgctgcctgccgcctgggcgccgcggcgggccc

SEQ ID NO: 34208 - DNA, 2300 bp, Homo sapien
cagtgggaagcacaaggagtcaatggtgactgggagtgagagaggggacgtcatgctgagtgtaggtgttccatcttaatagtgagcacatgagtgaagatcttctagaatctccggccatggctgctagagcccctgccccctgctcccttgaatcctcttctagtttcaggtgacccagctataccttgctttctgttctaggatttccaggagcctctggcctttttcattgctccacatccatctcaacatgaattcccctttacttaacctagcttgaaaaggcctctgtcccttccctgaaaacaagcctggaaaaacaataacagacatcttaaggagacttgcttcccggggcctaacaagaaaagagtgattacattaagaatacatttaattgttgatgttctatttgattaaaggaaggaagacaaaagctctgatttatgagacaatcaccgggcacagagaggaggatacagggagctagagaggcagtgcctttctacagactgaggaacctgattgcctgtgagggagaaaaacaggtgtccgatccctcccactggaactgctgtccatatggaaacttgagaagctgaagtaatgccaggcagctctcaggtctcctgggcagggccagcaacactgggcaccacagcagacccggtctgggaagaggtcaaaatccttttctgcctgattccgtcagcctctcagaacctgacaaaagatgagagcatgctggagagtcagggagattcatattctaggctaggtgtcagtctcttaggtgttttatctttttcctgtttgatttacgatggacatggcctcggctaaagagaatgcacagtatttttataaatatcaaaaagtctatgtcaataaatattctttgcaacttgtctgaggaggctggtaggacaaagattgagcagtccatatactgtgaaaagacctcaactaatcagaaggatttaacaaacccatacctctcaattaaccagatattttactttctacttttataaacacaaaaaaatcaaatgacaactcaattaaaaatgtcaaactaggttataacttataagctgcacacagagacctctaggatgatgaccttgaggtattgtgcaccttgaataatgtgaaaatgttatgctcattaaactctacttactaaggcatggatgtggctgcacatttttggaaagatttgcaacaagagaagtttctgttttattttcatggaagcagggaactaggtgtttcaacgcccacctatgagacactaatcattttttaagcctacacaacagcccgaacatcatattctcttctgagaagagagactatgaggatggatttgcccaatgtccctgagctaggcgagagcatcaagcacacaaaggcatgagtgagccattggacataagcaactgttgggatttggacaagggagttaaagagacatgggttcaagtcccagacctgtcactcaaggaatgaccctggaaaagccaagcccccacatctcagtatcctcagttgtaaaatgaacaaaataaagagattgcatttatcaaatcatctgtctctaaagattagctcacttccaaaatgctgcaccatgatttggagagaaaacttagaggctgcttgtcttcatgtttagccctgaactccaggcaagttgtagaagtggatatatttgactgaatcccatgttctgcattacaattttgccctgtgggggaaactgcacctgacatcatattcctgcgtggctagttctagctcacaaagcttttcctttagccacagaaagaactgaaggttccacccagtcagtcagagttggcctttaaaaatatattctacccacagtggggggcccctgaccagactcgaaattatacagcccccaaatcattttctatctttcagacccttaattccaagccaaacaaacccaggagttcttccaaatccatttggaggtgaggaagtgggaggctccatttggggaaatgatgaggttcttccttcctcttggggctgagtgagctccctcttcaggactcccacggcctcagaggccaaggttcaagagcctgagaaacagggcagaatcaggtttccctttagaccacagaccacaagtactccatccagtgtaacaggtacgtgtaatgtaacgttgtattagtcagggtgctctagagggacagaactagtaggatacatgtgtgtgtgtgtgtatatatatatatatgtatatgtatatgtatata

SEQ ID NO: 34209 - DNA, 2300 bp, Homo sapien
tccaactttaatgttccctcatctatgattgaaaccagaatattgaacaccaaagactagaagaaaaattgctcagaaggcaaatgtcacctagttgagactgccttgaggaaaaaaccgcacttagcatctgcttttttccaatatgatactttgcgatcatttcctataattgaatagtcttcatcagattttgagaaattaagatcttgaaacgaattgaaccagcaacctccccagcattcatcaatcataccaagaccaattttaactcccaggtaatttcttaaatagacagaataattaaactatgagatactcttatgaacaaaaatcactacctaagctatgttctctcttatttcctttacaaaaggaaaggtacttacttattaatgcttccgtgttaacactttaagggatgatgctcattcattttcaggtcttgaggcaactaaagaagaggtggaatttttctttcagctaatgatcctatccatttcaggctaaatctattcagtgtgaagcagttagatgattaattgaccatcaaaatgagagctggttcagacagtacttacaaaaatattggcaactttttaaaataaaccattgcaagggatgttaattttggagttaataaacccagaatagatttcactaattcattcggcaaatacttgttgagcaactactgtgtcctaggcactgtactgggcactgtatttgtagcatcgaaagaagaaacaaattgctaattgtatgagcatggatatagacaagaaagccaattccaaagtaaaaagtgcatgcacactgtttctagctgtatcctctgcatgtcctgcactctgtggctgagtgtaggctcatagagccaactacaaaaccagaactgcccaacccaggaaaagggatcatttcaataaacgatgcagagtttctgcttgtcaaaagctctgtatcacaccagttacatatgcaagaatcccttttagtgaattgggccctgattattttccttctctcttcctctcttgtattgatttagtgtctctgttttgtgtctaattgtctacaaacattgttaataggttagagtagtatgaagggtatctaacctctggaattacaatgacttgtagatatagagaaacaatatgatgcattaacgttaactttcaaaatatacctatttatttgtattttatgagaatgataaagcataagctccattgattaaaaggtgacctttcttattggactgataagacaaaaatatagattccaaatctattgacatatgatatcacatccacaaatgtttgcctatttttgtagcattattttggttgcaaagtctcttagggaatgcacaaaaataatacaaccttaaaaatcagactagaagatggaatataagtggtttccttgtaatttttttttaagcttggagaggtaataacacatctttgaattcaaactgaggactgctgcttaatggtgcttttacagggtggttctaaaatttttgagagtcaggtattgctttctctgactgtttaattcaccactggcacgtgtttcctatcctcaagcataagtttaaaagattacaaacctcatgctgctcagttttttctttccagtaaatcagatgcatggtttctctagatttacatatagaaaatcgagatgtggtgggtattagactaacacttcagtgataggaagaagagactgatttctcatatttgtgtaaaacattctcttacctaactaccatctggtccacattaatttcctctcatagccatagctttccattaccaatgagttttccatgtattcacagcatatgggccaggaaatctttctacagagaatgtgtcccttaggcatatatttcccctagattaccgtattaagaaatgttctccctaaaccatacttatggcattaccataaaattgcctcttgaacacagttaaattgaaagtgctcaaaatgcgtatcaattcaggtaaaagaaatcttgctacttggaggggaggtattttttattcttccccactttctctttctaactccctacaaagctatttctaattatttgcttatgctgggcactgaattttctcttaggctgaccatatattttattaaagtagtcttgaattcaggagtggaaaaaaaaaagttatgttttagacctcaatgtaagctgaaaggaaataaaggaacttctatatttccatttctcaggctgattttccttcccctgttctcttatctgtatc

SEQ ID NO: 34210 - DNA, 2300 bp, Homo sapien
gaaacaaaaccaaaatgttctctgagcgagccccaggtaatgaaacatgattacacggagtcttgctggcacataccctggtgagttttggagagtcttttctttctacacttgcgaaaacgtcaacctaattctttccctctgtagagtaaatgcatgaggaatctctagcagcctttttggataagtaaaaccatccccgagatatgtgcaaaccacactcactcacttgtttcaagctccatcactgtttactgaggtttgtttgtgcttctgggaggaagccagcctgcccccagctgaggctgaactgtgctggctgaggctcctcagaaatgaggaggcggctcagaggaaatctcagcatattgtgcttggtggcattctgcattgttcaacttcctcctctcaggctgcagtacattctcctccattccagatgcttagagaagcagttcattcaaagaatttgccataaggcagaaaataagctccctccttcctcaccctttgtttcattttaggccaggttgctgtgctggctcatcctccttagaaagatatgcaacctccaatgagttccctgatgataccctgaacttcatcaagacgcacccgctcatggatgaggcagtgccctccatcttcaacaggccatggttcctgagaacaatggtcaggtgggtgtcaaacaaaccgtgtcctgatggatttcctaacttcatctcatgtcggagaaccaatcagtggatcatgctttgaaatgccacaaacatcttctgctatcctgggcattcattcagctgtgaaatggtggccgattggttggataccactaaacccctatacacacattcccagggagaagagttccaatattttcaggctagttggacacatgccagcaattagaggaaggaaatacctttccttctggattagcccattgatccaatctgtgcaaaaatagaggagcagtgaaggagaaccagtgaatggatgtggatacctgattggttggaaatgattacaaaacttgcagcagattccacctgagcatggctcatggattgtttgctgtcacacagagcacagataccacatttgctggtgtgaaggattcatagtttaatattctttttctgaactggtggccaacagcgaagggacagccaattagagatctgtggtagtattaaaaaactcttccttgtatttattcagagcttatttccaagcagttcaacaggctttcccaagtaccatcccactgtggtagccatcaaacaaaatgttaattaactttaccactatttttatactatgactttattaaaacatattaaagcactgtaatagctctggcacacaaaatggaaaccatggtatataacttgcaggagggtctatgttttctggttccagctatggtgcttaggacaactaggtccccatggagtgtcaaatgtccaagggatttcagagaaagcaaattgctagtaggacttatcccaggtatgcccttcacctttagctttaaatggatattgtttggcttgcaggtccttacagtttttagtagtgccattagcaccctacctcctcatccttcagaaagctttccaatcaaacattttgttgatgaaggccttgtatctcagaggaagagtatggagaaatcgcagtcattgcttttcaatgttaaattaaaggttaaatgaatttcttattacttcttaccctcctcataggagacattagtcttttccttgttcatgaaggggattattgctaagtggtttcaggtggttttggctattatagtacttggcctgcaaacacacacacacacacacacacacacacacacactctctcacacctccttcctcccctttggagccacactagtgctctgcaaatggaaataaagggccagaaccacttgagaacattatttatatgcatatatttttcttgaggttattactagaaggctatgtcgcagctgtttgaagtggaacagggaacactttaatgatagaccaacaaagagataagaaatgtggtcctgtcattttagataccgccttaccaaaattgcagtggacacagctgctgggccatatcagaatcacactgtggtttttctgggatcagagaagggaatcatcttgaagtttttggccagaataggaaatagtggttttctaaatgacagccttttcctggaggagatgagtgtttacaactctgaaaagtaagtggaatatttggttctttcttagtaattatttgtt

SEQ ID NO: 34211 - DNA, 2300 bp, Homo sapien
atgaacatcctatgaactgcgcaccagtgccttccatgccagccaagcagattgccttcatctcattaaccaaaacccaaagttaccttctcatatactcaaaccaatgttcctctagtcttctgcttaacctccatatatgttatttatccaacgtaacactacaatggtggaaaccatctgaggtgtcactggcttatagttgggaaaactgaggcctggagaggtaaagggtattgtacaagttcaatagcgggggttgggggtggtgatttccgctgcttctttatgcttcctttcaattttatagagacccatgtctttaaacccaaataaaatatgaaatataaatagtgttttccggatttgtgaccaagctggatcagagctcagtctaggactctagaccgagggtgagaagaatccagcgggtacagtggaccattaagatgtctctggtctgccaggttttggtctgttttgggtccaaatacagtgcagtgtcctcctccccaaatcatggcttagaattcttttcatgggatactatggtccagaggcaacccagagacctctcagtcctatgtagtctcttcccaaacaggctaattcatcctaactgggacaggagggaagtccccgctaagccctttgcgtgcctctcttctgtggcacgcactcacacctccattgcagcatttgcactccaagtttcatagaaacaacccatggtgtctgtcttccccaggagttgtgtgcctctggaaggaagcccaatgtcttactaatttttttgtttttcaactctcttccgcaacctccagtcctccccacaacatacctagccaagtacacttacatgaactaacttagataatacgaaccacttaaacccagaggagaaactcatccatcttcattacctgaattatctggcatgttgatattctgttacttatggagagcagactaggtgtgaaaagcacaccccagcaacctcagacagatagtcttaagtcattgcctgggattgttaactaccttctagatagttctagatagttccttctagcaggaaggggagttcagcctgagggatcaggtttcagtaagttcttatgtaataccctctccttggtatgtaaagatggtgtcactcaaccaataccagcacacatactttaagtgattttctactaatggcagtgagtttaattaaacatccttccacatgcctgcctcgtccctcttgcagcagtcaggatgctctacggggctggctgggttagtgccttgagacagtgtggacataggagtggttcatgctggtgtcgtgagggtccaatctcctcttctgcaccacccaggcaaaccaggtgtctggacaagatgggtttcagtgtttccctaatctgactttgctgggatgacccttgactcctgaaaccatagaatttcttgtagaagcaaatttttatggtcgtcattcaatgacaagaaatgacctttcaggaaagaatctgatataattggcttttcatacctgccaaaatcaaacaaaaataaaaacaacaataagaaacaaaaccaaaatgttctctgagcgagccccaggtaatgaaacatgattacacggagtcttgctggcacataccctggtgagttttggagagtcttttctttctacacttgcgaaaacgtcaacctaattctttccctctgtagagtaaatgcatgaggaatctctagcagcctttttggataagtaaaaccatccccgagatatgtgcaaaccacactcactcacttgtttcaagctccatcactgtttactgaggtttgtttgtgcttctgggaggaagccagcctgcccccagctgaggctgaactgtgctggctgaggctcctcagaaatgaggaggcggctcagaggaaatctcagcatattgtgcttggtggcattctgcattgttcaacttcctcctctcaggctgcagtacattctcctccattccagatgcttagagaagcagttcattcaaagaatttgccataaggcagaaaataagctccctccttcctcaccctttgtttcattttaggccaggttgctgtgctggctcatcctccttagaaagatatgcaacctccaatgagttccctgatgataccctgaacttcatcaagacgcacccgctcatggatgaggcagtgccctccatcttcaacaggccatggttcctgagaacaatggtcaggtgggtgtcaaacaaaccgtgtcctgatggatttcctaactt

SEQ ID NO: 34212 - DNA, 2300 bp, Homo sapien
aaaatggttgaaaggtgaacaaacaattaaaagaaggagggtcggaggggaggggaatacacatcttgtgggagatttagagtctggagggaccagactgtatcttcatttgagtaatggcttctgacagacagaaacatgtaaattgcatctttggcttcaactgatttatttacctcccttttttccttcccctgagtttctggagtattaacaaaactaccaatgccacaacaatagaatacattacattcatgttttcttgcttcaagctctcatttctgagttctgcatgaaaagaactgaacaatgtattcatggaaggggacaggggcttggaggtggtggagaagaggagaaaagctattcacaaccctgtatgagtcagggtgacaaggcaatgtatacaaaatcttctctgtaataggggcattccattgtggaaaataaaattacagagatatgcaaaattccatatttcttcattgttgattgcaaagcttctgaaagagataatgtgtaagtgtgaatgccttgtgaaatcaccagcacttgcatgtgtgaagtcatttgaaatggttagtgttaaccaaatgtctaatggtgctacacttttaattaataacatgtctttggctacacttgattgaaattctgttaactctgtttgacatgttcccaattaaagtgcctgtttgtctacagaaccatactttgttcaagccgtggattacggagattatatctacttcttcttcagggaaatagcagtggagtataacaccatgggaaaggtaagaggggatgctgtccttggctcagtttgtaacattttcagaaacccacacctttggtcaaatgttgttataaatgatcttgaaatgagagccataaatctaataacagagtgcggtctggaggccctatctgctgtttcagaacagtaacgaaatcgcaggaaatttcttaagtatttctatggaaaatttatgtttggttggtttcatgctgagattcaagtatcttttttttctttttgagacggagtcttactcagttgcccaggctggagtgcagtggtacaatctcggctctctgcaacctctacctcccgggttcaagtgattctcctgcctcagcctcccgagtagctgggattacaggcatgcgccaccgtgcccagctaatttttttatttttagtagagacagggtttcgccatgttggcagggtggtctcgaactcctgacctcaagtaatttcacctgctgcagcctcccaaaatgctgggattacagacatgagcctccgcacctggcccgagattcaagtgtcttgagatgtggtttccaggtatactcaacagttttgttttttttttcttaattgagttgctccacagagactgtaactatgcagtatctttaatcaaattgagttttgatttttgtctttattgcaaaaagcaatatacaacacttaggggatgtccattttagttctttttaccagagagtagatcaaggtccctaagttggagggtaacatagaatgccagggtggcttgcacagattcagggcccagaggcagctagtgaggatggcagagattgtgcatacaaagtgtgcttttgtttgaggaaataaaaagctaagcagtctgtatggaaatgactttatgtggctcggagctgattccctgaaggatttatgactctgtattaaatgccacagccttatcttttaaaacatgctactctaatgctgagttttcctctttttttcttttctttcttttttttttttgttactgattttagaaacagtattaagcaccttgttgttttgtttctgttttcaaggaatgcagattctactaagatctccttgcaaaatgaatgcatttaattttccctatgtgtttttcctctgcaggtagttttcccaagagtggctcaggtttgtaagaatgatatgggaggatctcaaagagtcctggagaaacagtggacgtcgttcctgaaggcgcgcttgaactgctcagttcctggagactctcatttttatttcaacattctccaggcagttacagatgtgattcgtatcaacgggcgtgatgttgtcctggcaacgttttctacaccttataacaggtaatcatgccctagctgtgttgacctcatcaattcttcctggcttccttctcccagggggttctcttctaataaaccatatttgcaactgactgaaaattgcattcattgtgtgtagctaagaagcacttaacacttagttttcat

SEQ ID NO: 34213 - DNA, 2300 bp, Homo sapien
ttttttttggacttagaagttacatagttaatagactttggtaaagagaaattaatttatagaggacccattttaactgtttataactttcctttggtctctgcttcattgtcaggagtagatactaacatgattaagaattcagctgtctcctcaaaagaggagagtcctgcctatgtgttggatggaacattcaatttaccacttttttttcatgcccttcaaaaggcttaagtattttattacagtaaaaatgtaagagagcatttttttcctaaatatctcttttcatagtaatgaccccaaaacaaacactgagtgagccatacaaaggtgtctaacattaatatgcaatactaaggagatccaaatatgcccagtgttcagctgttctttctgggttggaagaaaatgaggtagcaaaactgacacacaaaacaattagagtccagagtcaaagggcattattaagaccaaatgtgtagttcaagttcatcattcctgaaatagcagagtccacctaactcaaggttccaaacttaataaacatttatttatttccatttgaggtaagttttctgtcttggatgcccgagtatagaagggactccagggcagggcgcggtggcttacgcctgtaatcccagcactttgggaggccgaggtgggcggatcatgaggtcagaggatggagaccatcctggccaacatggtgaaaactgtctctactaaaatacaaaagaaaaaaaaatcagctgggcatggtggtgcatgcctgtagttccagctacaggaggctgaggcagcggaataccttgaactggggaggcggagagtgtagtaagccgagatcacaccactgcactccagccttatgacagagcgagactctgtctcaaaaaaaaaaaaagaagggactccagcccaaatggactactgtaagccacccttcagtgatcactcaaatccatgatcgtagagacatttgagttgttttagcaatctccttgatgaatgggtacatgaaatttcaaagcagtggaagggaaagcacaagattgtcttataccaagctcccttgtaaataaaatatagtaaggctcctgataagatacccactgtgagtaatggtcagatactacaagggtgtaaagtgagggtcgaagcataaatctgtgaatggttttctagtcatcatttacacccccacccctctccagaaaacaagtgccttttaaatgtggctcatctttctttcctcctgagtttgtctggaggctcgccagtgctctggagatcgtaggtgtaaaggcagagatgttgagatgtaggtatttttaaaggccagatctcaatacagattggccactctcagccaaagagaagtgtaggaaaagagaaatatgctcattgactcaccaagtcagggaaaatttcagatcacctgactggctacactcagtttgaccctgtcctgtcaaagcccacatctctgtgaaattgttagccaattgcttaactcaagggtgaacttcccacagttcctagaatgccaaccaacctctcaggggctgccttcaatagtggattattccaactggacgcctgtggagactgtatttttcttctggctcctggacaagggctctcgcctccagaccacattgcatttgtggtgattgatgggaaggctgctttgaaatagttttgtcccgagacaagatctttggcagactgccccctcaggcttagctctacagaagatgaaaagaaaactgtggaagaaaagagcaccttcatgcaaagggttcactagcgagttgagccctgagaaagagagacaaatcaaaaattgtgacacttagaaatataaatccaggcttataattatctagaaatgaaagtgtaacttgatgaaccttaaggagcactcttctatcatatttcctaaaataacagactcatatggaaatggaaaatggtggcatggtctgacttaaacacgggtttcttttgtgacctgtctccctcccctccctaccctgtcaattcctggcttgatttgcttttcctttcttgccccatctcctcttttcacagatacaaaacagtatccggtgtttgtgggccacaagccaggacggaacaccacacagaggcacaggctggacatccagatgattatgatcatgaacggaaccctctacattgctgctaggtaaggggccttttccccatgtctgccttgagagtgtccaaaagcccaaggtcctaaatttaccagctatgcattattttta

SEQ ID NO: 34214 - DNA, 2300 bp, Homo sapien
ttcttcactgtgaaaagtagactccaattctttaactctcgtattctataattttaaattaggtaaatttaatcgctcgcttcttggctcagcgttactacaaattaaacatgcaagtattaatattgaatataatgtccctttaaacaatatcctgaaactcgttgtggggcatttccaatatatccataaagcaaataaaacaacttaattgtttgtttctctaagggaaggagctaaacccgaaattaatttagttcggcctgtgaaacaattcgtttgctctgcctaattctgccaatttaagaacttttcccagacacaattagcatgtaaatcggcggcggggagcgaagaaggagcctcggcgaccccggttgggtggagcgcgggacaaaaaaccccggaggccgaagggtccggagcttcgaaggggctgcagtaccgcgcctggggcgcacggacgagccaggggaccagctcacactgaccctgcagtcatcagccaaaatctgggtgttaaatagcgcagccggggatccagccgtcttggccgccagatccttctcctaaccccgcgggattctgaggagacgtcctggagccggcccccacccaacccgcgggaaagcgcaatcctacccaccgccccacactccccaaccccctcccgaggctggctcttgaagccgcgggggctgcgcgcgcacctagggccgcgccccccactaccccaggtctatagaggcctttgcccgagaaaggtggggatagcggcccctgctgacagctctggagaacagcaggggtactgattttttctttttttcctaccattctccctaccttttccaggtggtggtagtggtgcggggggaatgggtgttgacccatgtgcatttattcttcgtgaagcctcttaagcagatgtctgtacttagagaagcgaccaaagagggaacgtggacttattagtggtcttagtcccaattagggaacaggtacagtttccaatataaagaaactcggcctaagtgggactgagaccccgatctccgcacttgcttttctcagccaactccatgactagtaaatatctctccgagaactgctgggccgcccgatgttactttgtttaaaggttgcgactaggatccgtaccatctgcgaagcccccttggggagcaagagccgcggcgcgcagttgatttcggggcgcagcggcagggggaggggaacgtggtgtggcccgacgagttggcacaagcctgtaactgcaagactttgtagctattgaaagttcaagtggtgaaagaaggctgtgcctgccattcttcatgtgatcataacaatagcgccttggaagtggttgcgattttcttcttccataaaccttttgggttctcactggaattgtatgcgtgttatttctgaagtttacttatttctaagaccagtccacaaaatgtgaacttcattaagttttaaaatagatcgccgtcgttaaaaacgccattctctgcactgtagtttatttgcttacttcacatgctttattaacgtgtgtatgtgcgtaattaatagctgtgttcttatcttccaagtgtatttttaaccgcaccggcttctatccaattcatctaactacgtagagcgtccatcgcttctggaatctacctcttgataacagtaatcagaatcagaaaagctcgccgttcacttaccctcatcctttaaaacttttccatttaagaaaatcgatgaacaaaacctttcttgtaactcgctcctgcactacgtctatttttatttatttttctgatttggcaggactcagcaatgctgtccgggattttttttttctttttttttttcctagctagagcagatgtgggggtgggggaggtgagggctgggctccagccagagtcgcccccgctgagcctccgcctagcgcgcggtggggccaggaatcctggtggaaggaagcggcgctggccagttggtccaaggctccacctgcagccacaccgcgtagtttctccgcctctgcctcgctcactcgcactcacatacaccacagctctcctttgggtcggaggagacgccagccaaagtaggcggagttgcggaaggagagtccgatctgcgcaatccagtccgggacttggctccgcccgggagcggcggcctctccggtgacagaggagtagtgagcggcacggggtgaggctgcagccaactccgctccccgcgcactcggctgcccaggcgctcggaacccagcagcggcgctcctc

SEQ ID NO: 34215 - DNA, 2300 bp, Homo sapien
tttatgtctcaactgttaattcattgctcctcggcaccatttagttctgcaaaatatgcagtgttttagaatactccctggatgaaattttaccttttctgttagggttatcagtcaaaacttaagagctatatatatgacacatcttggggacatgcaacacaaaaagaaaatatatccatgttcattttataaaagtttctgataacctcagtgatagtttgcagggcctgaaaatcagatgggtgctttttataaagctaaatgtgatcatggagttcacaaagttgagcacctattattttacactttgaattctaatttgttcttttcattaaaaagaatgcgaacgtgtaagtcactttaacaggttgatatacgggctcatgacagtttcttacgggacttgccacctagagatactctaatgggatgtcatctacacttgccaaatcatattatatgacttagccatagctgtgaaaaaagcgatctgagtgcctcttttaccctattgaagaatttaaataaagttcctgtagccttggccaatcaggcatattaccctccaataatagaattgcagtcactcgatgttccatttaaagacagcattaaaaattttcttgtcaggagactcccatggctggaaagaagggtctttgatgttgaatggaaaggaaatatttttctgagacagtttggaaatcaagttccagatgacggcatccatagtatcacataaagattttgccagaagcaagatatatttgacttagttgctccttgttagcctgagaaggggatgagaaatttcatgacagcagaactacttttgaaattttgtgcaccatttcttctttcagatgtgttggatttctaagaaaatcatatttctttgaggaaatacagttattttgcttgtagctactcactaaaaagggcaattgaaattaacaacaacaacaacaaccaaccaagagtgaatgtaaagcaaagtagttagcatagttagcactagagagctccaatagaccttcaaaatttgtcacatttctttctaccactacgaagtgagaatatgctatcagagactggtgagaattaaggacatttcaacggaccttatttccaaagaagtaagactttctctgttctaaaggagatagttaaagatcagaagtgaagaaagatgtgtcacttttggataatctctgcttttcataaagtttcactaaggaatggggtgtcccaatgaacatttactatttgaagagctaagaaaatagaagtattattaaaataataattttattgaaaatgtgggaaaatactgacttccttatacaatattgcaaatccaaaactgatttgggaaacaataggattagccatccaaataatttaacactttagcttttgcttagtaaatcatgttttaatataacaattcttttgggtaatgtggaagtcattaatatggctcatcagatgttctcatctttttgcctattaggcactccctggccctcttatgagagggatagacatgtgactgaatgtggctggccaatgagttctgaacaggaatgatgtgtgtgacttctgagccataatatttgacagctgagacagaatattcttttgattactgatctagagttatctgtgtctctgacaatatacccagtcatggctgctatatctgcttggctccaggatatgaacaatgctttgttgtgaacaatgcataccagaattcttagccatccaagatagacacaaagcagagatttaaaataagccataccatttcaaatcatggagattctgacgtggtttgaacaaccacaatctagccaatcatgacttgataaaagaaagtttttgaatttctaaaaatatttttctttacaaattaaagggctatggtctaaaattggtaaactatttgagaattttagagttgttaggaacttctgtattaagcagcccattcagtagcctggcatttaagctaagttctacggaatcctgtatgctgatgcaattgtttttgagagagttaggtccagaatgttgcttagtttctattctgaaagcatctctgccaactctagagagtttagatatctacttatttatatctacatctatctatatttatattaaacaaaagtgacaggacatggtaatagatgcaatgtataggtgaattagagagaggtatcaagcttgactcccaggtttctgatagaatggctgaattgatggcaatacctttcactgagaggaaacat

SEQ ID NO: 34216 - DNA, 2300 bp, Homo sapien
tgacttttagaaaatattttttactttttaagtcgtcactcttcatgttgagatttttctctgttgatgaattaacatgtttatataaggctggactgttttatattccccatacctcaaggtgaaaggaaccaataactgttttcaggcaaacacaagtacttcctaaggagaaagatagttattcttgatgcaaggaggttgacagtcttgtctgttacaagccaaaacccagttatctcttgcctctcatgcataatccttgtaaacatagacaaaaagtgacagattgaagggccagccatatttcattcattttctttttccctctgaactttccacctcgatttgaaatgtcacttttaatataactgtattcttatatgtatctggatatgtttatgatgacactattttatttgtccattctagtttaattctgcatatttagaatatattttggaatttggtaaattagatcttccttcatttttcttattaaaatatgtttggggtttgcttacacattaattacttcaaacaaatttcataaacacaaaccagaaaatttttcttagtattttctaaatgaaaacaatcaattcatctccttacaaatatccatctcccatttatttaggtatttgtttatatcatatagtacagcttttaatatcatatttcatcaaatctagtacaatgttaatattaaatgatcattattttatatacaatttaaagagagaaaccactgtttaattatgagataatataaattatatctattttaatttcaaagatgataaaatttaaaataagtgcatcataaaatcaatgaaatacggtaattcttgtcttcatgatgatctaatttataaggacttttttttgtgcctaaacttgccatcagttaatttcttacatatttagtggcttgctttgtttagatttgactaatagtgaatatttaattgaagaaccataggtacacaaacatgcaaaatttctaactgcacaacacaatgaactatcacaaactgaacaccccatataaaaagcacccaaatcaaggatcagaacattaccgatacttcagaaactctctttgtgcctcctactattcactattcttctcctaaggcaaattcctatgctgattgctaacagccaaagattagttttgccaggttttgaccttgtataaatggaagtgtataccatacacatttgtatactgtgtactcgttagtatctagctttgtttactcaacattacatttgtgagattcattcttttgttgtagatatagagcttcattctaattgtgatgtgatattccacagcataataaatattccactgtataataacatatttatccattgcactattattgggcatttgagtttacatattctatttataaagtactaattttctttgaaaataactctagaaataaattgttacctcattgtatgcttaagaaataaaacatgcctctccctctcacctctcccctctcctctctcccctgtctccctctccccacgggctccctctccctctctttgcacggtctccctctgatgcccagccgaagctggactgtactggccgccatctctgctcactgcaacctccctccctgattctcctgcctcaacctgccgaatgcctgcgattgcaggcgcacaccgccacgcctgactggtcttcgtatttttttggtggagacggggtttcactgtgttggccgggctagtctccagctcctaaccgcgagtgatctgccagcctcggcctcccgaggtgccgggattgcagatggagtctcgttcactcagtgctcaatgttgcccaggctggagtgcagtggcgtgatctcggctcgctacaacctccacctcccagccgcctgccttggcctcccaaagtgccgagattgcagtctctgcccggccgccaccccgtctgggaagtgagaagcgtctctgcctggccgcccatcgtctgggatgtgaggagcccctctgcccggctgcccagtctgggaagtgaggagcgcctcctcccggccaccatcccgtccaggaagtgaggagcgtctctgcccggccgcccatcgtctgagatgtggggagctcctctgccccgccgccctgtctgggatgtgaggagcgcctctgcccggccgcgaccccgtctgggaactgatgagtgtctctgcccgatcgccaccccatctgggaggtgaggagcgtctctgcccagccgccccgtctgagaagtgaggagc

SEQ ID NO: 34217 - DNA, 2300 bp, Homo sapien
cacctggaatggcagcttccttcctacctcctttatgccacgctgcatcccctgtcagtcatacagatgcctctcacaaacctgcctgcaccttacaagtgaaccacaagcattaagatggcttcttgaggctgggtgtggtggcttccgcctgtaatcctagcactttgggaggccaaggtgggtggatcactcgagcctaggagtccaagaatagcctgggcaatatggcaaaatctcagctcaaccaaaaaaaaaaaaaaaaaaaaaattagccaggcgtattggtgtgtacctgtagtcccaggtacctcgaggctgaggcagcagaattgcttgagactgggaggcggaggttgcagtgagcccagatgaaaacactgctctccagcctgggtaaaaaaataaataaataaaaataaaaataaatggcttcttcaactgtgttgtagctctggcatgtaaagaaatctaacacatggtagtgaccatataatagtgaggatgttttttaaaactaattttccaaaatttacatgcaaatgattcttggcctctttaaggaatgataatacatgggaggcgttagtcagaggctacccaccaatattctggcctttctcctgccaaaaacctggcacggttctactcctccaacactgtggaagttgggtatgccatgtgactttatttaactaatggaatgtgagcagacgtgacttgtgtcactcccaggagaaagctttaaaagatccacttacactgccaccaccatcatggaagcaaatgttgagatggggcttgtgtcagcctagacctgtgcgatatcacaaggagtagagtccttgtgataatccatgtgaaaaatacagcaggggtgagaaattgattttttttttttttgcattgtatcactgagattttgcagtcttttgttcatggtctgcctagattaacataggagattatacacctatttcaacaattctgtttttgcttaaaacattgaagtgattcttctggtggtattgctgtcaggggcagcatttgacaaccacactctcagtgtaaagccatacttgctttctgccctatagtagtattgccaggcttgaccctctgttttattcattagatttgactctgcatctggtgaaaagaatagattggacatcattgagcctattgggatgaatacacccttcagaaacagtggcaggcagaggctgggcagcgggggatatgaaggcagtttacccagggtgcaggcaataagaagatatattgtctatagaaatgtttaaagaaatagaactgattaagatacagtgtcttttgtattaccatcacaagtctataattctaaacaattttagggagaaaatactcctcccttccccactcctgttttcccccctccttgcgcaactactcagaaagcagttacaatgagattcaaaacttgaaaaacagaactgtgaattagaatgtgttgccttattatggcaagtgttttgaaatagatagctttcacgtggaatatttatttaaaagaaaaaataaaaattattctattttagggttgttcttggtacattaatttggacattggcttaggaatttgtagctagtcatatgaacgtttatgtaaatctttctgtctaaattgttatatccgtgagggcggggctgggcctcattcatccttaggtgttcatggggtctggccagtactgtagtccggtacacataattgccccccatatatatatatatgagtctatatatatatatatatatatatatatatatagtatatatatatatatatatatatactatatatatatatatatatatatatatatatagactcaaactaggctggcagtgaaatgatatttttcttttgcttttttttcagttatgtgtatgagaagcagggcgatatctccggcccacttctttgacaggttctcttgttgctgatgctgagaaactccaggagcctgctatttgtagagagaagtgtgttccagctgctggtgctaacaaagatctgaggttatacacacatgacctatcacccacacccacccgattgggaggggttgcctctccctgtgtccacacatatgccttgagttgctcttcagtgaatatcacttttcctttcatgttttttctacatgctattatctgtatgaaatgaagaccaagaaaggatgggaagaaggagaagaaaaattttgatttatctcagaaactatactccgaagtgagagtcctggttgcaggta

SEQ ID NO: 34218 - DNA, 2300 bp, Homo sapien
tagaaaatctaggagaaatggataaattcctagacacatacaccctgccaagacgaaccaggaagaaattgagtacttgaatagaccaacaatgagttctgaaaccaaggcagtaattaaatagcctatcagcccaaaaagaaagcccaggaaaggatgaatttacagctgaattctaccagaggtacaaagacgagctggtaccatttctactgaaactattccaaacagttgaaaagaaggaactcctcccaaactcattttatgaagccagcatcatcctgataccaaaacctggtagagatacaaaaacataaaaaattgccctccaatatccctgatgaacatcaacacaaaaatcctcaataaaatactggcaaactgattccagcagcacatcaaaaagcttatctgtcatgatcaagttggcttcatccctgggatccaaggttggttcaacatacgtgaatccataagtgtaattcaccgcataaacaaaactaaagacaaaaaccacatgattctaaggccttgcttttgaatctgggtgcccctgtattgggtgcatatatatttaggatagttagctcttcttgttgctttgatccctttgccattatgtaatgcccttctttgtcttttttttatctttgttggtttacagtctgttttatcagaaacttacagtctgttttatcagaaactaggattgcaacccccttttttttttttttttttggctttccatttgcttggtaaatcttcctccattttgagcctatgtgtgtctttgcacgtgagatgggtcttctgaatacaacacaccaatgggtcttgactctttatccaatttgccagtctgtgtcttttaattggggcatttaacccatttacattgaaggttaacgttgttacgtatgaatatgatcctgtcattatgatgttagctggttattttgccccttagttgatgcagtttcttcatagcgtcgatggtcttcacaatttggtatgtttttgcagtggctggtacttgtttttcctttccgtatttagtgcttccttgaggagctcttgtaaggcaggcctggtggtgacaaaatctctcagcatttgcttatctgtaaaggattttattgctccttcacttatgaagcttagtttggctggagatgaaattctaggttaaaaattcttttattcccactggctgctctgaaaagccatctttgcattgttcctcgtccgcctccttgctcgcggcagcctccttgctcgcggcagcctccttgctcgcggcagcctccttgctcgccgcagccgcctccgccacgcgcctcctccgccgccgcggactccggcagctttatcgccagagtccctgaactctcgctttctttttaatcgcctgcatcggatcaccggcgtgccccaccatgtcagacgcagccgtagacaccagctccgaaatcaccaccaaggacttacaggagaagaaggaagttgtggaagaggcagaaaatggaagagacgcccctgctaacgggaatgctaatgaggaaaatggggagcaggaggctgacaatgaggtagatgaagaagaggaagaaggtggggaggaagaggaggaggaagaaggtgatggtgaggaagaggatggagatgaagatgaggaagctgagacagctacgggcaagcgggcagctgaagatgatgaggatgacgatgtcgataccaagaagcagaagaccgacgaggatgactagacagcaaaaaaggaaaagttaaactaaaaaaaaaggccgccttgacctattcaccctccacttcccgtctcagaatctaaacgtggtcaccttcgagtagagaggcccgcccgcccaccgtggacagtgccacccgcagatgacacgcgctctccaccacccaacccaaaccatgagaatttgcaacaggggaggaaaaaagaaccaaaacttccaaggccctgctttttttcttaaaagtactttaaaaaggaaatttgtttgtattttttatttacattttatatttttgtacatattgttagagtcagccatttttaatgatctccgatgaccaaaccagccttcggagcgttctctgtcctacttctgactttacttgtggtgtgaccatgttcattataatctcaaaggagaaaaaaaaccttgtaaaaaaagcaaaaatgacaacagaaaaacaatcttattccgagcattccagtaacttttttgtgtatgtacttagctgtactataagtagttggtttgtatgag

SEQ ID NO: 34219 - DNA, 2300 bp, Homo sapien
gtttatttgggccaacgttgaggactgtagcctaggtcgtacttccaggttgctgtggagagtgctctggagaacaaaatgggctggagtttttaaagaaaagagaacgaatcagcagaggggggcattacaaaagctatgtctcaggaagtgtcatttatttacagaaataacattggttagtgattggctatacatattgttgaactatagggtatacggcgttttatggctactcggtgtcagtctagggcctgcatagcaagtgccttcaagaggtaattatttagctcaagggagagtgagacatgactgctcgcattccttagataaaaagtttttttttttttccttatcatctgtcttctcacaccacacaattgggagtctcaagggaccttagaggacttgagcacatttcacctcttgaaattaaagatgagcagcttcctttcgtttaaagataagtcacatgagaatttaattttggcagttaaagaattggttccccaacctaaatctacagacaagatgaattttctgattcatctcctttcctacagtttctggattttgtttatcctccgattccaaatggcataattgctagttctttctcccactctacgtccatcaccaggtgggtgtttcagcctttttctatccctcacataggacgctccaaaggaaaagagaggtgctgtttccggggggaaagaacgtaggatagttgaaaacagcacggtattttattcacaaacttgattttaagatgactgaaaaatctaatgtgaaataaacattttaagaaatacagtatttgctctattactgtgttgtctactttgcctcacatttaatctattacaactatagagttaagacaactgtgattcctaagcttaattcacatgattgatcaaaaccaagcttaattctgttttaatgttgtgtattgctggaagtaacacaaagcattaataaacaaaaggaattcgatacccattttgggtaaatagtatttctgccttcattctaacatagatttcattttggcttttaaaaaacagctgctgtgctatataccgccgtatccagtagttgttaaatacctgggcaacgttacctttctagggcttgtttcctcatacataaaacctattggtaccccgggccagctctcctattgcttcctgatcggggacgatctaaaaatctaatttaacaaatatctggtgtccagtgtaaaatagcatgcttgatgtcttattagcacaagacatagaagagcaggaaattcacataaggaaacggaccagctgtgagtagttcccagtggatataacctctcctttgttggcctttaaataataagtgcatcagctgccgcacctgcgatgcatgcacgcgtggaaatcctgcaaattcttaaactgccatcccaaggcggaaaatgcagaattccattttattttaacttttaaaggagttaaattcgggcttggtactggggtcctctcggggaggtttcccttacctctcccaatgacgctacttaacctcaccagcactccaacactgcccacacttgcctacccagttctaggtgaacggtcccactgggcacggaccaatgggctcgttccttcccagcggcagggtgggacctccagcctgggcttcggagacccgccccccgtacgtggcgtgcgggcattgcgctacgcggcgcgggccggtttctacagcgcgtggcgccccccggcggcagccgggcttcaatgccacggcctgaccggagtgtccgccatggagtcgcagaaagaggcacgaacactccaggagcccgttgcgcggccttctggggcctcaagctctcagacgccgaacgacaaggagcggcgggagggcggcgcagtgccggcggcggctgccctgggcgcagaggcggacgacgacagtgcggacgggctgtgggagctgccggtggagccggccgagcggaggcctgagtgcacccgctgcaggtgaccgcggggctgggggcggggactgcagccggcagcggccttcggaggagggtgcggcgccccctgccggggagtcggcggctcgggcagctctgcgattagggcggcggagttggcgggtgcacgttggaaatctcggaaatgccaggcacagctacctagtaagaagccctttttccaggttcatgattatctaaccttacttcctgcaatatgctgagcgtatcatgggatgagcagacatcagttctgtttccaagaaacttaagc

SEQ ID NO: 34220 - DNA, 2300 bp, Homo sapien
gctctcctttctcaactctgtgtcttgcctggatggaagctttctttgattttggtcagcctctgagacaatggacttgtaggggattttcttcataaggagcggagatggagcaggagaccacttaggtctttggcaatattctatgcaagagatgacgggggcttgaaccagggcagaagtagtaggtgagataaatgtttggattttgaatactttgaagggtaaagccaataatctgatatggggtgttaaaaggaagccccaagtaagtaggctcacatcaacctaaaaggaaggagcagaggcaaaattaatatagagagtttatttgggccaacgttgaggactgtagcctaggtcgtacttccaggttgctgtggagagtgctctggagaacaaaatgggctggagtttttaaagaaaagagaacgaatcagcagaggggggcattacaaaagctatgtctcaggaagtgtcatttatttacagaaataacattggttagtgattggctatacatattgttgaactatagggtatacggcgttttatggctactcggtgtcagtctagggcctgcatagcaagtgccttcaagaggtaattatttagctcaagggagagtgagacatgactgctcgcattccttagataaaaagtttttttttttttccttatcatctgtcttctcacaccacacaattgggagtctcaagggaccttagaggacttgagcacatttcacctcttgaaattaaagatgagcagcttcctttcgtttaaagataagtcacatgagaatttaattttggcagttaaagaattggttccccaacctaaatctacagacaagatgaattttctgattcatctcctttcctacagtttctggattttgtttatcctccgattccaaatggcataattgctagttctttctcccactctacgtccatcaccaggtgggtgtttcagcctttttctatccctcacataggacgctccaaaggaaaagagaggtgctgtttccggggggaaagaacgtaggatagttgaaaacagcacggtattttattcacaaacttgattttaagatgactgaaaaatctaatgtgaaataaacattttaagaaatacagtatttgctctattactgtgttgtctactttgcctcacatttaatctattacaactatagagttaagacaactgtgattcctaagcttaattcacatgattgatcaaaaccaagcttaattctgttttaatgttgtgtattgctggaagtaacacaaagcattaataaacaaaaggaattcgatacccattttgggtaaatagtatttctgccttcattctaacatagatttcattttggcttttaaaaaacagctgctgtgctatataccgccgtatccagtagttgttaaatacctgggcaacgttacctttctagggcttgtttcctcatacataaaacctattggtaccccgggccagctctcctattgcttcctgatcggggacgatctaaaaatctaatttaacaaatatctggtgtccagtgtaaaatagcatgcttgatgtcttattagcacaagacatagaagagcaggaaattcacataaggaaacggaccagctgtgagtagttcccagtggatataacctctcctttgttggcctttaaataataagtgcatcagctgccgcacctgcgatgcatgcacgcgtggaaatcctgcaaattcttaaactgccatcccaaggcggaaaatgcagaattccattttattttaacttttaaaggagttaaattcgggcttggtactggggtcctctcggggaggtttcccttacctctcccaatgacgctacttaacctcaccagcactccaacactgcccacacttgcctacccagttctaggtgaacggtcccactgggcacggaccaatgggctcgttccttcccagcggcagggtgggacctccagcctgggcttcggagacccgccccccgtacgtggcgtgcgggcattgcgctacgcggcgcgggccggtttctacagcgcgtggcgccccccggcggcagccgggcttcaatgccacggcctgaccggagtgtccgccatggagtcgcagaaagaggcacgaacactccaggagcccgttgcgcggccttctggggcctcaagctctcagacgccgaacgacaaggagcggcgggagggcggcgcagtgccggcggcggctgccctgggcgcagaggcggacgacgacagtgcggacgggctgt

SEQ ID NO: 34221 - DNA, 2300 bp, Homo sapien
atttttagtagagatgggattttactacgttggccaggctggtctagaactcctgacctcaggtgatccacccgccttggcctcccaaagtgctgggattacaggcatgagccaccgcacccggccaattttttctattttttgtagagacagggatttcaatacgttccccagcctagtctggaactgctagactcaagtgattctcctgtatcagcatccgaaagtgctgtgattacaggtatgtgtcaccacacccagcccagtatcccttcttttatctctacatctccctgcactttaaaagcaatcatggtaggttgggcgcggtaactcacgtctgtaatcccagcactttgggaggccaaggtgggtggatcacctgaggtcagaagttggagactagcctggccaacatagtgaaacccctgtctctactaaaaatacagaaattagccaggcgtggtgacgggtgcctgtaatcccagctaccggggaggctgagacaggagaatcgtttgagcccaggaggcagaggttgcagtgagcggagatggcgccactgcactccagcctgggcaacaaagaacaaaactccatctaaataaataaataaataaataaataaataaataagtaaataaataaatgcaagcaataaacggctaggcatggtggctcacacctgtaatcccagcacttttggaggccaaggctggtggatcacctgaggtcaggaattcaagaccagcctagcaaacatggtgaaaccctgtctctactaaaagtacaataattagctgggcatggtggtgggcacctgtaatcccagctacttgggaggctgaggcaggagaattgattgaaccccagaggtggaggtgagccaagatcgtgccattgcactccagcctgggcgacaagagcgaaacacagtctcaaaaaaaaaaaaaaaaaaaaaaaagcaataaccttttccttagcctagctcctctatcctgccagcatttgcattttacacgtttttagagttgcccagtgggtctattcctgtttacgtcacttctctgttcttctttcctgttttgcagccgattaaggtcccagcatacaaacacagagcataaagaattaattccagagtagtcacgttggatattttggtgtttgggaacaaaacttttatatagcgctttccattcagtataatttgttgaaccatgtaaactgccttacgattcatgggtaatttgtttggatatgggaattggttcataaaatagaaacttaaattgtacaggtatttagtgaaattggactttccttgatgatacaggtctgtcttagactctaccaaggaaaattactcgtgaggtgatcctgaagaaaggtacatggtcccactcacaatgagttccctactggggccctgcaaagggtattaatggtgaagatataaggtaaggtattgtcctcagggtacctattgggtccacaataagattcctttctctttttttgagtcggagtttcgctattgtcgcccaggctggagtgcaatggcgcgatctcacctcactgcaacctccgcctcctgggttcaagcgattctccagcctcggcctctggagtagctgggattacaggcaccaccaccccgcccggctaatttttgtattttcagtagagacagggtttcaccacgttggtcaggttggtctcaaattcctgacctcaggtgatcctcctgcgtcggcctccgaaagtgctgggattacaggcgtgagcccccgcgcctagccaagattcctttctaatgagggcttttgggtatttcatgtagttaataccattttgctggattcaacaaggacttaccttacattatgttacatgtactcttagggcaaggtcccagagttttattagttctgtcactataaatttatactaacagaacatgtactaactaaaaagaacaaggttttcatttttcattatcaaatactgtaaccaggcaaccaggaatttgattagaatctgctgtttgcttggcacacaatcttactgacctcataggcctccaccaacaaggttagagattcctgtgccaacatcatactgttctagaattactggatctcttatggtaacgtatctttttcccagtgggctttagatcaagtttttttctacttattcactttttaaaaccacactgctttaaatgggttgtctgaaatacgtctcttactagcacaatcttacatttcataatttgaaaacaagggtatctgggc

SEQ ID NO: 34222 - DNA, 2300 bp, Homo sapien
aatataaaattaaaaagcacttgaagtataatttgaaataataaaagacaaactgtaggtatgttagacctcaaaaaataagtatattttaaaaaaagacaaattaagttttgtcccttatcttatgaaaagcctggaatacataatgaaattcattttttaaataagtttcgggttttttttttttccccacatcagatgggtaatgtgcagatgatggcgcaacaaggtttgagggagggacgtctcacacaagtgtgaacacacaatcatcccacttatgaactaaaaagtatctcgtaagtagctttttattgtcagacaaagtaaatgtacattgcaaaaaatgtagtaaaaataaaaggaaataaatttactagtactcgtcccaccctagtattattatagtttgaagtcttcatactacaacaaaagggggagtttctttattttcttttctctcttttttttttttttttttgactttctctcttgttgcccaagctggagtgcaatgacacgatcttggctcactgcaacctccgtctcccaggttcaagcgattctctcgcctcagcttcccagtagctgggattacaggcgcgtgccaccatgccaggctaattttttaatttttagtagaaactgggtttcacaatgttagccaggctggtctcgaactcccaacctcaggtgatccccccgcccccacctcgacttaccaaagtgctgggattacaggcgtgagccatcgtgcctggcctattggagagttttgagggttgtttgttttgagacgggatctcactctgtcacccaggctggagtgcaacgggggtcttggctcactacaacctctgcctcccgggttcaagtgattctcctgcctcaacctcccgagtagctgggattacaggtgggagccaccacgcccggctaatttttgtatttttagtagagaagggggtttcactatgttggccaggctggtctcgaactcctgacctcgtgattcaccctcctcggcctcccaaagttctggaataataggcgtgagtcaccgtgcctggcctatttggagagtttctatacacattcatgcaacatttacagaacaccctgaatgggtgggactggtgcggtgctagacattaaggacagacttgtgtcctgttcctctgtattccaaagaggcttacggtatacagggggagacatataaacagatgtttgtcaattataatacaaaacttgtgtcaaaatacaatgagagttgaatctcagtttgtagctgtgactctgatcattctggaattcctaggttcttttccaaaacaaacgctcaatgcagggctggtgtgttgttattaccagcactatttcaaatcacgtgttaagataacttaggctaagaaaataccactttcctacttgtcaagtgttcgagcctttcaaaaaccatcccgtttagggacttggaaacacgcgcaaggctggagaaaccattaagctgctaacgtagacgtttcaagggtcacatttactcaagagacactcaggtcgcccgggggagcggtgcatattgggacttgtagtcctaccagaaccgaggaaactgcaactccctttaggatgcacttctcccctttaaattttctggcccaacagttagatgacgccctaacctaaagcacaacttaccacatctcactcattctgggttcatcaggcttctgccaggcttatcaggttcaagctcaaacgcacggcgttctcctgtagaagcctcaaagagattggcttattctcggtggtgggcggagccctaggtggaccgggggtcgggattggccagtttctgactagaagaggcgtttttatgttcacttgctgatacgcacgctgtggtaaaaaagtgaattctttaccacagtagcagctgccccgagcgaagtctcgcgatatttcggccgcagggatccagaggcgcgtagtgagtggcggaggactgtgggggtggcgggcaccggagccgggaagggacaggtcaggcggggagtgcgagcgcgtactgcttgcgccactcgggctgggtcaggagcggctgcccgaggtccagaggaagtgtgtggacagcgcggccttcctggccggtgagtcggccccgggtcgtggccggtgaggggaccctgagcttcacctgggctagcgcggggagtgacaggtgcgcgaaggagcgcggcgctccgccctctcgccgacccgccccctccgggcctcgccctccggggctcgggatg

SEQ ID NO: 34223 - DNA, 2300 bp, Homo sapien
ccaaagtgctgagattacaggcttgagccactgcacccagccaactttttaaatatgtacattttcttttctgtggattatgcttaaattaatgaaattttacaaacccaaattaacctgtagtgtaactggttgcttataccttgatattatcataatgggtttttttttttttttgtcatttagtttagtgctagtaataaatatcagtctgatgatatggggaacttgtttctttcattgggtaagttttgttactaaaaagttcaggtgaactgaacagtagatgcagtgatgtagtcaattctttttgtctcctggactggtaacgaagagttcagaactgacatttggtatgtgaaccacattttgagtagcattgaactagtctgaaagcaagctttgtacagtttttgaagttggaggaaacactgaagatatttcagttgaagaaataaattgaatggcttcacaatagacaagtaagcaaaaagcaagattgacatctaacctttctaccttaaaggaaaattacatatatatctcattgtctctcaatttaagcaccaattttaagtggaaactgtatatgctgttatttactatttgcctcattttgtaaatatattcaaatcgaccaagtcaggaaatagtatgtagtgttcttgctgacttagaagacttttgacctgagtaccttggtgtaatattgaaatttagacaaacatgaatgtatttcatttgtttatttgatctttttttaaaaaaattgacatatttgattaatcttagaaaaatcttatttttctactgccgatatatttgggtatttgggaaatgaagtagttctgaaaacaatacaaaaaaactattgagccattagattgtctagttgattcaggaatagactcattaaagaaatagagtagtatagtcaagccagagtacgtaaacatagcaaataataagtataactacacattttaaaatttctgttattctttggagtttcatgatatctcaagaaaattttaaaattatttttattgtaattattttaatcaggagcatgaatatgaatgttggactaacagttttgtgactatcagtaagctgaatattttctctgaattttgtttttttaatgcacaatgactataatagcccttactttgcaatgttttgataaatagatttaacttatttaaaccttgacacaattaatggtagttattaaaagtttgttgttattgctttgttgttttattcttgatagtgatactcttaaaatagtgtctttttgatagagaatatgaaaagaaaaatgttacatagtaaagcatagatttgaatggaattaaatagaatatagagtttgtgtgaaattaatctttaccggaaaggttactagcctatttttagtattaacaaaatcaccttccatctcttatttttctaaaatgatgattatgcttaaatattttagtcaaagtcactgtgattttccagatggttaggagatacatatatgacaggccctgtattttggatggcaggtgatgggagagtattctgagaactgctctttctttatttctttatgtgtttgaaaatgaaattttacagtttcttcatctgaccctaaaatcctggttttctcagatcttttcttttcctgtttggtaaagtttactggtacctgtgttttaaaatagaatgtcctccctttgtatttaaatagaaagtacagacaactgcaattagattaagtcattcttaataaaaaattgggacttgacaactcccatcattgttcccaattcctttttctgtttttttttgttttgttttgtttgagtttctgagaagaactaaaagtcttggaacaactctttctttaacaagtactactattcccttttaagaagtgtatgtgcttcccagcaatttattgactatttctggcttcatcagtggaagagaattagatacatgtagaaattgaaattttctaatcaagagattttcctgaaggttcagatgtggagataagacaaagcagcgagtaagagaataattcgactttgttcatagtactctgacaccagtagctctgattattttaatataaagtattttggtttcaatcgtgctttaatgtcaacatttcgaaattgagtaaaaacttcttagggttagaataaaatttatagtggtagttaatgagttctgagggattaagttttgctcatttcctaaccatgcaccctcacacatgcttcttataaggtgtatgaaat

SEQ ID NO: 34224 - DNA, 2300 bp, Homo sapien
cagtactgctccttgtgaagcagggctagttcagaggcagtgcacccacagccagcccaaactgcctctttttgctcctaatatgttattagccctttacaaaataattaaagagtaaatcagtcttctttttgtcttcagggccatgctgcaccaaaaattactctcacagactctaactgatggttcaccttgccttttctttcccctcagcctccctcacacattaaattctcctcacacattccttttatcattgtgtgctgcaaccttttttgtctaccatgtttatcacatggctctattttcatttcacaaaagtagttttatgtagttgtgaaacaaaattttgagagcttgtttcttaatactaattagcaacattcttagctccttagtgggaaattaagggaacttagtacagatgcctgtataattctattgtacttttagttgtattctctatcaatgtgctttttgtgcatttcaacttgggttgtcagttttatattgctcctaactaatctctatacctgaacccttatctctctaatgcatcttgccaacagtattatataacaaaaaacatagctacatgattacaatataggtgagatcacattattatttttttcaagaacccttcaaggctcctcatgtcaacttctttaacaagtatttaagaccttctataatgtgactatttttcagctttaacactcactacagccttctgcataggctattttaaggcacaaaaaactgcttgtctttgcctgcacaagtatctttgaccggcagtcaacttactattcattcaccttagccttgacgaagtctaatagcacagcccctaagcatgctatctcttctagtagggaagcctcttaaggtaaatggaagagataactcacactgtatcacagtaattctgatgaattggatattcaattatgaatagaaatacagtgccaaaagccagtgaatatttcagaaaaactaagtgtctggaaaggggtattaagcagaataaataataaataacctatgaggactaattcctcagagattcaagaatatattacatttatacaacaagaacatgctagcattaaacaaggacagtaggaaaacagaaaagagttattggaaattaaaaatacgattcccaaaaatgtggtcagtgggggaactacttattagaaaagctgaacagcagaatggaaatagttgaaaatcaggtttgttgctgggaagcacaaattaagaaactatcccataatgatgataatttaggaaatatttcagaagaaaaaaatggaggaaaaacaatattcaaaggaataatagatacttccccaaagcaaagaatagaatattggaagagaaagggcctaccaagtattgagaagcaacacgtacctgcacacatcctgtttgtgtaacttttggtttttagagttaaagagagaatcctataaggttctaaaaaggagtgagaatgaaaaaggttatttacaacccacatcccaccctgccactaaatgtcgttggcctgtcacaaatagataggagaacaatatccacagaattctgatggacaaggaatgggaactgagtcgatgtgcatccaaactatcattcaaatttgctagcaaaataaacatatttttaggtatacagagacttaacacattccatgtgtataccctttctgaagaacatacctagatctactccagaaaatgtaagataaactagaaaaaggaatagacctgggaaaatattattaacaaatataaaaacagtaggttaatattcataatattagtcatatcagttaaattttttaaaagacaaatagtagagaaatagataaaacatcttaacagtttaccaagaaactttgcctggccagtagccttctaccttcactaataattgaagaagtgcaaataaattgagacttattcttgtctgcataaaattaacaagtattttagattttaaaaataccccatgttaactaaagtgtaagaaaaatggctgtatcaatttatattaccacataggatttaattttggcatagtctattaattttaagtgatgctctttaacaaaactttcccatttctagatgtctatcctacataattatgcaaaggtatatgtatatataggaatgttcaaagcagccctttttatattacagaaaattgaaaacggtatggggaaagttttaaattgtaataccactgtacagtgtaatactacacacagcacaagaatgatctaaatt

SEQ ID NO: 34225 - DNA, 2300 bp, Homo sapien
attactttacagttctgtaggccataaatcagtattagtctcaccaggataaaattaaggtgtcagtagagctcaatcactttctgaagactctaagggaggatccatttccttgctcatttaggttattggcagaattcagtttctgctgttgtaggactgtggaagaaaaacaagtctagaccagataaagaaagtgaattttttgttggctgtcagctaaggtcctttcccagctcctggaggttatccacagtccttggttcgtggttcaggttgagtccctctcacactttgaatctctttgacccactcttcttccattttaggggattcatgtgattagattgggctcactgaaataatccaggataatcccccatctcaatggcatcaatcttaatcacacctgcaaaatttctttattcttttttttcccatgaccgaatgagaaggtaacacctgcaaaaattcttttgccatgtaagataacatatttacaggttccagggattaagaagtggacctctttctgtaactctactcattctgcctactgaagtatctcaccgacatatttcaatatttcctaagcaagtttcttggttctgggatcttctatgtttccagattaaactttctagaaccacacctgacatatctcctgtgcttaaaacccttctggcttcctaccaatcaaaggtcaaattaatgttgtttagtttctataggaaaacagcccttgagtttggtcctgttttactgttttagctttattccggccaccattccacttctcctccatccttattcaggcttgaaaaagtttactgtgattcttcttcacttataagctgcctttgaagctcccatttcttcttccaaacccagctcagacatcacctacaccaggaagatctccctgacgcccttccccaaagttataaccacaggacaaggtcctcttttaaaaacctccgtaccttgtgtatgtttctatcttttgcattaaacccaaatgtgttgtgattttgtctatttcacctatcaagagtttactttcctctctccaagccaaactcagccatttcccaaacgtgtaactttctttgggaaggctatttacttcacgatgtctccctttccctttgtaaaacagggatagcgacaggatctatatcatagattgttgtaaggagtagaacggtgacctacacatattaagttttactagtattattaatatttccagccctctgccccccgctgccatgtactaggtgcttaatggatgtttattgtatggatggattcatcgtactcccaccaaggtccctcgcccttgaaaatggctaccccgggccagggctcctcaacagactgaaggtccagatcctactccatcctggcggtctcgggtggcccctgaggagggcaagccttctgctccacaggcaaggacagtcacagctaagtccgcggggggcggcagagagcgagggctttccaggagccaatgagtctttaactccaagaggaagccctgcattctccgcaaatggaaaccaggaatcgggagcgcgtcagctatcgtagggtagacttaaggcccgcagaaaattaaaagcaaaagagcaggcggaattcaggggctttcacggatcatcatcataatagtcaataatgatggcagcagacactaacattcacgcgttcttgttaagtgcaaggcacagtgcaaatgtgtatggccccatttaaccatctcaacacactacgaggttggcgtctcatttttacaacggaagaaactgagaggctcaggaataccgtatcctatgcacatctcccaagagggtcctgttctccagcgcccagcgatctgggcctcgcggtccgagtccggctcccgggccgccgcccagcccttctccgcgctctcctgcgcctgggccacttccgactcctgctgtccggtccccagctcctcctcacccactccgccccgccatgccccgccccagccgctcggctcctccttccctgcacgctccgcccccgacctcccggctcctccccggcctgcccgccacacccttggtccctcctgcaagttccgcccctggcctctgcctccttttctcccgccggctctaacccgcgcttggctaaggtccgcgggaacccgtgagccaccgagagagcagagaactcggcgccgccaaacagcccagctcgcgcttcagcgtcccggcgccgtcgcgccactcctccgagtaagtggctcctgggcgcgcccg

SEQ ID NO: 34226 - DNA, 2300 bp, Homo sapien
gctgtgagcaaaaggcctaaaagtcaggcctttaaaaaaaactctttgaacagctttatttaaggcataatttggaaagagatttttctgctgccctgtgataaagttcagtcgagagttggtgttaataaaccttccttagaaccaaggtgacttggaaagttgagttctttaggtctgtggtcaaattaacaaaattatgtcaataagccccaggtgagtagggtcaatttacatatgacacacacaaatatttgattatacctcaatgaatgaataaaccttcagaatcttagctaccattttcattcttccatcttgacacaaaaggtgggagttccattattagacacttgcaggagttcaacatagtatttaaatttaagtacagtttgttattaaatgagaagtgttgctaacttagttgcaattttgtatcaggcgggcggtaatagtttgttggtatgacttccatacatgttgccatgtgaaggatgtttggggtgtttcttaaacatacaagaatcaacaagtcccacctacaggagataacaaatcattatgatgtactggaccattattcactggggctaagaagtaaattatccccttttgaataaaagcacagcaaaatcaaaatgacctagtacatatctgagagcagcagaaggccaaggggagccctagagaatcagctgccctttgtcaccatgttgcagggtaggggtatggggcaatgcagcctgcccagagcagatggctttgaggttatacgggagactgaggaatgtacttattcacataaagccttttaaaataagctgagcattcattgctcttgagctaaaacagagcattcttccccaaggtgactgcttgcttgcatttaaatacaaaagaagtttctctccaggcttcctgaggccgatggtgaatgttcaaagatcaacgaagctaacatgaatctaaaatgaattataaggctgacggagcgcttgaactattcattcagcagttgtaaaacaagtagcacattaaaggacatgtattttaacatatcttatgtggtttgtccccagttggacttgcaaaatgacatttaataaatatttcttgtaagggtactttctaaaagaagagagtgaaagtaattctgctgtaggcagattgggcctgaaatttgggttgtctggatttgcataatcatcaccttgaaaaggtgttgctttaccccaattatagatcagtggaagctctcttgtgtagcacacggccctggtgagatcccttaagatctcttgtggactatctgtggacatctgggttgcagtgaggaagggcaaggatagatggtatagggagagaggggcagaatgttgacttgggcaggacaggaaaagccacttgtgactggtgagggagcatttctttgggttcagaatcatcctcatctcagtgtatctccccataagtctgagattactgagtgcaaggtatacatatcagcagctcctgactcaggatgtgtggcagaggggaccatgaagttaactgtgactttcggaagggtgcagtctgttaccctttcggtggcgaggtcagtttccgggaggctctgcaacactgatattttccagatgtttctcctcttctcccttctctggctggctatatcttcctcccttcatcctgctctttcagtgaaattgagataacatgttagaatcttaggcaggttagaatctctcagcagtaggatgtgatttaatatctagacctcttacattaatatttataatagccttcactgcttgtgaatagcataagcactcttttctgttcaaagtcaatactgaaataaaacccaagagtatgttttataaaaatttacttttaatggtgcaatggtaataatctatgtagtccttatggttttcaaatccctttgtgcttatattaccttatttaatacagacataaatctgtgaagtaaataatactatttttatcttcattttacaaatgaggaactggaggctcagagaggttaatttgcataaggtcatacaaatgatagatggcagaactggatttaagttcagactccttaaatccatgtcttttgtacgttcttttcactaaatttgccatagtgtttctattggtttttgcctatataaaatcggaaacgaagaaaaagaaacgaactggaaaataaatttgtcaaaagagtatatttttttctcataatttccaagcggatctttcagatatgttatttgaggactttttgcctcaga

SEQ ID NO: 34227 - DNA, 2300 bp, Homo sapien
gacttgcaaaatgacatttaataaatatttcttgtaagggtactttctaaaagaagagagtgaaagtaattctgctgtaggcagattgggcctgaaatttgggttgtctggatttgcataatcatcaccttgaaaaggtgttgctttaccccaattatagatcagtggaagctctcttgtgtagcacacggccctggtgagatcccttaagatctcttgtggactatctgtggacatctgggttgcagtgaggaagggcaaggatagatggtatagggagagaggggcagaatgttgacttgggcaggacaggaaaagccacttgtgactggtgagggagcatttctttgggttcagaatcatcctcatctcagtgtatctccccataagtctgagattactgagtgcaaggtatacatatcagcagctcctgactcaggatgtgtggcagaggggaccatgaagttaactgtgactttcggaagggtgcagtctgttaccctttcggtggcgaggtcagtttccgggaggctctgcaacactgatattttccagatgtttctcctcttctcccttctctggctggctatatcttcctcccttcatcctgctctttcagtgaaattgagataacatgttagaatcttaggcaggttagaatctctcagcagtaggatgtgatttaatatctagacctcttacattaatatttataatagccttcactgcttgtgaatagcataagcactcttttctgttcaaagtcaatactgaaataaaacccaagagtatgttttataaaaatttacttttaatggtgcaatggtaataatctatgtagtccttatggttttcaaatccctttgtgcttatattaccttatttaatacagacataaatctgtgaagtaaataatactatttttatcttcattttacaaatgaggaactggaggctcagagaggttaatttgcataaggtcatacaaatgatagatggcagaactggatttaagttcagactccttaaatccatgtcttttgtacgttcttttcactaaatttgccatagtgtttctattggtttttgcctatataaaatcggaaacgaagaaaaagaaacgaactggaaaataaatttgtcaaaagagtatatttttttctcataatttccaagcggatctttcagatatgttatttgaggactttttgcctcagactggcgataaaacaagtgttctacaaaatacctccgtaagacaggcctatcagtggcagctcttgtccccgctttgcagaagggaaaaccaaggctccacagagctaaggggacttcctctcagccaatttgtaggggcctgtgggccagacccgggggcagaattgagatctgttgtgaaggctgtccggcttctttattctatcagcatttcaaatcctgaaaacctcccctttggcattttgaaggaattcatccccagtttttgctggtagccgggagggaaccgtgctctccccctgaggaaggccctttggagtaactgcagcaatgagtgcccgggctgtgcttggagtaccagtgctcgcccggggctatactgaatgagtaagcagccccgtctgcttttgctgtgcaaaggtaagggtggaggccgctccactttcttcaaaaggccccgctctgggacttgtgaaattgtgctctcttaagctggtccttgcaaccccatggacgatatccatgcgactttcctacaaaaataacataccaaagccgctttaaaatccgtaatttttgggttgcaagactccaagacaaagtcaaatgggcatcaaaaaatgtaatccaaaaatacagaggcattggttctaccctatatgcatttgctatttatgtaaaactacagtgtgctctgagatgagactttttttttctttttatacctttttttccgcccgtctggtgcgtttgccgacggttcttctcggccctgtgtctcgggagagtcggctgccgtctgggcctgtgccccacctgcgtgcgcccgggccgagccagccccgccaggtcgcctccgcccggctgccggcccgagcgcgcggctccgggggcggactcccgccgcccagctgacacgcgattcgtcactcttgcagaactttccccctgaaaatccctgcaccagaacccgctctcccgccccggggaggttttgattttagtggctttcttccttttattttccgtcgtgtgcggatttcgctgcagagcgaacttgcggctcgtccgagtacatgtga

SEQ ID NO: 34228 - DNA, 2300 bp, Homo sapien
aacatttcctctgccttacttctggtttccataatttcccccaaatcttttctatgttctccttgcccacctctaattattgggggaacctgcccccaatatttcaacataggttctttctattttccataagtgtcagtcagctgagaaatagagaaagagtacaaagggaggaattttacagctgggctgccgggggtgacatcacatatcagtaggaccgtgatgcccacctgagcctcaaaccagcaagttttttattaagggttgcaaaagggaagggggtgtaagaacagagagtaggtacaaacatcacatgcttcaaagggcaaaaagcagaacaaagatcatatgcttctgagggaacaggacaaagggcaaaagcagaactactaataagggtccaacaaagatcacaagacaaagggcaaaagcagagctactgataagggtctatgttcagcagtgcatgtattatcttgataaacatcttaaacaacagaaacagggttcgagagcagacaactggtctgaccacaaatttaccagggccgggtttttccccaccgtagtaagcctgagggtactgcaggagaccagggcatatctcagtccttatctcaaccacataagacagagcagccgtttatagacctccccccaggaatgcattcctttaccagggtattaatattaatattccttgctaggaaaagaatttagtgatatcttccctacttgcacgtccgtttataggctctctgcaagaagaaaaatatggctgtttttgcccaaccccgcaggcagtcagcccatatggttgacttcccttgttccctaaaaattgctgttattctgttctttttcaaggtgcactgatttcatattgttcaaacacacatgttttacaatcaatttgtacagttaacacaattatcacagtggtcctgaggtgacgtacaccttcagcttacgaagataacaggattaagagattaaagtaaagacaggcataagaaattataaaagtattatttgggaactgataaatgtccgtgaaatcttcacaatttatgttcctctgctgcggctctagcaggtccctctgtttggggtccatgacttcccgcaacatccaatcaatcctccataatgggcaaagtgatctttccatagtgtaaatgtgttcccaccactctctggagtaatcctacttaaaaccgttttcagcacaaaattcaaacatctaaacatgatcttgctggctttgcttttgtggctttaccctctttctccccaaacctagctagtgtttgtgctgcctgtaatgcccttctttctttgcaggggtcgccactttaggtcctggtcctccttcagaaagtttttcctctttctccccagcggggatagggtctgtttattttgacaccattagctcacttacacacattggtcacaagtctaggctgcaccgttattgaaagtttaccatctgactctgagtagcttgaggatcctatcaaaactcaggagatgctcagtaaatgttgattgaactatgactgttctcaacatacaaacgcaagatcatttaggaacacttgtcaaaatgtttttgccccttgagattctattttgggaggtaagcagtgggggtccaggactctgcattttgacagtcccctgatgtttgcatgtagaagtgcagggattattacactgacaaatctttaccatccctaagggggactttccttcccaggggctatctctggaagcccctcaaggataggggccgcatgctgtttctctaggtcagcaactaaacccagaaaacgtttattgagtgaatgatgaaacgacaggtgaatagatgaacgcaaggtgtcgagttaactattcttctacacaagtcctagcagctcccattgcttccagccgcagaaatggcccctggaaggcaagtcttccagcgagtggagtcactcttaactacatttcccaggattccaagggagccgcgcgctctgcgctcatcttcctaccagaaatcggcaagtcactgaccctcgtcccgcccccgccattccccgcctcctcctgtcccgcagtcggcgtccagcggctctgcttgttcgtgtgtgtgtcgttgcaggccttattcatgggctcaccgctgaggttcgacgggcgggtggtactggtcaccggcgcgggggcaggtgagcatgcgaaggttggaggccgcgccccttgctgaggcgcagctggctgctcttttcgggccggcatacgcg

SEQ ID NO: 34229 - DNA, 2300 bp, Homo sapien
accagcaagttttttattaagggttgcaaaagggaagggggtgtaagaacagagagtaggtacaaacatcacatgcttcaaagggcaaaaagcagaacaaagatcatatgcttctgagggaacaggacaaagggcaaaagcagaactactaataagggtccaacaaagatcacaagacaaagggcaaaagcagagctactgataagggtctatgttcagcagtgcatgtattatcttgataaacatcttaaacaacagaaacagggttcgagagcagacaactggtctgaccacaaatttaccagggccgggtttttccccaccgtagtaagcctgagggtactgcaggagaccagggcatatctcagtccttatctcaaccacataagacagagcagccgtttatagacctccccccaggaatgcattcctttaccagggtattaatattaatattccttgctaggaaaagaatttagtgatatcttccctacttgcacgtccgtttataggctctctgcaagaagaaaaatatggctgtttttgcccaaccccgcaggcagtcagcccatatggttgacttcccttgttccctaaaaattgctgttattctgttctttttcaaggtgcactgatttcatattgttcaaacacacatgttttacaatcaatttgtacagttaacacaattatcacagtggtcctgaggtgacgtacaccttcagcttacgaagataacaggattaagagattaaagtaaagacaggcataagaaattataaaagtattatttgggaactgataaatgtccgtgaaatcttcacaatttatgttcctctgctgcggctctagcaggtccctctgtttggggtccatgacttcccgcaacatccaatcaatcctccataatgggcaaagtgatctttccatagtgtaaatgtgttcccaccactctctggagtaatcctacttaaaaccgttttcagcacaaaattcaaacatctaaacatgatcttgctggctttgcttttgtggctttaccctctttctccccaaacctagctagtgtttgtgctgcctgtaatgcccttctttctttgcaggggtcgccactttaggtcctggtcctccttcagaaagtttttcctctttctccccagcggggatagggtctgtttattttgacaccattagctcacttacacacattggtcacaagtctaggctgcaccgttattgaaagtttaccatctgactctgagtagcttgaggatcctatcaaaactcaggagatgctcagtaaatgttgattgaactatgactgttctcaacatacaaacgcaagatcatttaggaacacttgtcaaaatgtttttgccccttgagattctattttgggaggtaagcagtgggggtccaggactctgcattttgacagtcccctgatgtttgcatgtagaagtgcagggattattacactgacaaatctttaccatccctaagggggactttccttcccaggggctatctctggaagcccctcaaggataggggccgcatgctgtttctctaggtcagcaactaaacccagaaaacgtttattgagtgaatgatgaaacgacaggtgaatagatgaacgcaaggtgtcgagttaactattcttctacacaagtcctagcagctcccattgcttccagccgcagaaatggcccctggaaggcaagtcttccagcgagtggagtcactcttaactacatttcccaggattccaagggagccgcgcgctctgcgctcatcttcctaccagaaatcggcaagtcactgaccctcgtcccgcccccgccattccccgcctcctcctgtcccgcagtcggcgtccagcggctctgcttgttcgtgtgtgtgtcgttgcaggccttattcatgggctcaccgctgaggttcgacgggcgggtggtactggtcaccggcgcgggggcaggtgagcatgcgaaggttggaggccgcgccccttgctgaggcgcagctggctgctcttttcgggccggcatacgcgcgcagccgcagctgaggtcaccccgctgaggtggtggggaggggaatggttattcttgaggcaccgcatctcttgaggaggaaagagccggaaacacctggtctctcaagcaggtacagcccgcttctccccagcaccccggtgtgggcttcccaaggtcctgcctgagaggagaggccaggctgggctgctgattgcaaaactgggtgaaagttctccctgacccttatctgtgggcatcgat

SEQ ID NO: 34230 - DNA, 2300 bp, Homo sapien
attaaccatttccaaactgtggaaaattctagaagataaattactcagttttttccaacaggtgaatgccttaaaaagggagggagaactgttatagactaaaagatgtatcaaccaatcacaatgtgtggactttgtttggatcttgatctcaacaatacagttatacaaagatattttagcatatttggaggaaattgagtatggcttggttatgaaattatataaaagaattatgattaaattcatttggtgagataatgatatttctgttatgctttttaaaagttcatatctttgtaggtacatactgctgcattcaaggagaaatgacataatgtctggaatttgctttaaaatacagcaagtcccccactcctctatctcaaacacctaaataaaaagaaatgaacaaaagactaaaagtctgtgtgtgtggtggttggaacaagaatggcagaatactgataactgttgaaactggattatgtgtacatgaaactgcattcctattatacaattctctctactttagtctgaaaatttctaccacccaaaaaaatgctctttggcccctcttttttagggattctttaagaaactggagatttaatctcatcagcaaatttttacaaggctacatttgccctatcttcattctccttctgcctggggacagtctgcagtgccctttcaaatttgggcccatcttggtcctctgggtatttctactgcttttttaatgcagtgatttctgggagtccccctcatacttgtcaactaatagtcccactggactggggccactgccccaaataaggtgtctctaattttagattggaatcaggaagatccagatgggttgccacttataactggtatacatttcagcccatgagcagagatgtgcaggaaatagtatgcaattttcttatgtaactccatttaatttgtaatttaagccttggttctgttgatgtcctctttggatttccacccctccctatttggaaatcatacagggctgaggttttgagggtggggtgagagcatagtctctggttattggagcatacagctgaagtttagatgcccatcagctcagctgccagggagtctttaggtggtgtggctcctatgccatgtgtgagataggtcgccatgattctgcctgtacgcataatacaggcagcccttcttgaagtttttgccacatgtacctcttcagccacattttagagggctcctctcctccatagtttgaagatccctctctctctctgacctaatcagtacctctcaacactatagtagagcaagaagggggcatgcctagttaaaaaaaatcctgcttccgttatgtttctgctaactttcctctttcctacagagtttgagattttagaaataaaagtcaggtggggtgtggtggctcatgcctacaatcctagcactttgggagcctgaggcaggaggatagcttgaggctaggagttcaagaccaacctgggcaacatactgagaccctgtttctcaaaaaaaaaaaaaaaaaaaaaaattagccgggtgtggtgcctcgtgtctggtgcctgttgtcccagctactcgggaggctgaagtgtgatgatcacttgagcctaggggctgaagtgaccctatgatcacaccactgcaatccagcctgggcaacagagagagaccctgtctctgaacaaacaaaacaaaataaaaacaacaaaaaaaaaaaaaagaaagaaaagtcaagatgattaacatgctattgctgctttcagccctgccatacccctcctctgagcaatgaacacaaagcctgctacctgcttgagtccagaagggaaagggtgaaaaaaaaagaagaaaagaaaaaaattaaacagaacatgttaacatctcaaaatattctgccacatttgaaatacgggagagttgaattcattagaggacttctattggaaaaaaggaattgtttttgaaaatgatgtctctgcagttgcacagactgtgttggacctaggtccgtagaacgccgtgatgtcatcattgatgtcagagaatctgcgatgggcctggtgacctttgaaccttaacagccctgcagtgtagtgggcactgggcagtgctgctccttcactaagcggtctgagttctttagctatctcggagattcaactacgtttactcgtactgaatctttttaatgaatttcctgagagccaagaagggccaatctacaggaaaaagtgggaggtggacattaagcatcttctagaaactcttct

SEQ ID NO: 34231 - DNA, 2300 bp, Homo sapien
ctcaccagctcattgtttactgcccctctaactcctgccttctaacataagaccccacagtatttctttttcctgggctcccatcataccaggagagatcctccttggtcaaggtccttttagtccttttgagatggctctagtctggctaccttttaagcattcacttggcccatgagaaaccttacaccttttcccagctaaagaaaataaataaaagttgttccaaaggtaggcatgcttctttccctgaaatcagaggaggctacagccaacctctttcctttagacttctgtgaaagtcaggcatcattttctctgaccaacaaactgcaggggatacgtgtctcattgtcttaataatttcttcctactccctttcagtagcaaattagaaaaggtctatattcttgagcactttggtggcattcatgcaggaaaaaaatattcctagctggaaagccacttccaaaatctctgatgagctctttggccactcctgcttttccacttgaggggagaaagctctctctcctcatttctacccaaaataaagaacagagaggcataacagtgttcttattgcacaaatttccattaaaagatctccctctctatccaatgtctaggctttacctacatgggctgaagatgagtgatacgactaagatctcagggttggttatggttttgatgagatttccacatgttttttttcaagtgtttccttttaaaggtagaaggaattattacccattattcttagctataaggaaaaatatagccaaaattctgaaacaatctcgtatagtttatataaaattcatggtgaagacctacaaaggctgttattttatgagcaagtcttggaaataacaattttctttgaaatacaatttgttatgagaaaatactatataaattactcctatgtttagcctttgtgcaaagaaaacatgtgtctgaaacatacaaaatggtactgtacttctttttcctggatgatatgtttatgtgtatctctgtttaagagaacatggaaactattttatgtcttcatcacttctatttttagaaatagaaattttgctaaactctcctacttagttctcaagtgtacatatgaattatattgcagccaaataaataaaactgatgttgaatgatcaatgtgacgtttatttaggatatggaatatgtggcaattccattttatcctgcttcctattatagtggcaatcatgtacctttgagctcatggtaatcactggttattagaattaatcatatcatcctcaccataatattacatttatttttattagcttcttttacacaagggagctgtgtaggttattgtgtaagcatagaaaactgacatgtgctgtccttcagggtttcccatttgaagccaagcaattcaaataacagtctcattggaatgaagaccattttatagtcataattatctccataatcaccatcatcatcatgaatgactacaatgtgctgagtttataccaggtgctttaattataatatctataattgtcaagtaacactattgctgtggtgtctctcaattttctctttttacaacatgtgagggtttcactaactaatggagtagttgggaaattcggcctcactacgcttagagactaattcttctcttgtgcttcctgagtaggggttcactggtgttattagactctccattgactgacagagcttagaacagaatgggtggagagttgtgtagatgtctgttaggcctgcttgctcccaagctgagttcaagtcttaaatatccttgttaattttctttctcgttgttctgtctaatattgacagtgggttgttggagtctcccaccattattgtgtgtggggaaaagcaagagagatcagattgttactgtgtctgtgtagaaagaagtagacataggagactccattttgttatgtactaagaaaaattcttctgccttgagattctgttaatctataaccttacccccaaccccgtgctctctgaaacatgtgctgtgtcaactcagagttaaatggattaagggcggtgcaagatgtgctttgttaaacagatgcttgaaggcagcatgctccttaagagtcatcaccactccctaatctcaagtacccagggacacaaaaactgcggaaggccgcagggacctctgcctaggaaagccaggtattgtccaaggtttctccccatgtgatagtctgaaatatggcctcgtgggaagggaaagacctgaccgtcccccagcccgacac

SEQ ID NO: 34232 - DNA, 2300 bp, Homo sapien
gtgatgggaggagctgctgtgaagacctctgacatgtcccagagacattttccccattgtcttggggattaacatgcggctccttgttacttatgcaaatttttgcagccagcttgaatttctccttagaaaatgggattttcttttctatcacattgtcaggctgcaaattttctgaacttttatgtttagtttaccttttaaaactgaatgcctttaacagcacataagttacctctttactgctttgctgcttagaaatttcttcctgcagataccctaaatcatctctctcaagttgaaagttccacaaatctctagggcaggggcaaaatgccaccagtctctctgataaaacataacaagagtcatcattgctccagttcccaacaagttcctcacctccatctgagactatctcagcctggatttaattgtccatatcattatcagccttttggttaaagctattcaacaagtctctaagaagttccaaactttcctgcattttcctgtcatcttctgaaccctccaaactgttccaacctctgcctgttacccagctccaaagtggcttctacattttcaggtatcttttcagtggtgccccactctactggtactcatttactgtattagtccattttcatgctgctaataaagacatacccaaggctgggcaatttacaaagaaaagaggtttattggatttacagtttcacatggctggggaggcctcacaatcatggcagaatgtgaaaggcacctctcatatggcagcagataagataaaagagagcttgtgtacagaaactgccccttatagaactatcagatctcatgaggcttagtcactatcacaagaatagcacaggaaagacctacccctatgattcaattacctcccactgagttcctctcacaacatgggggaattcaagatgagatttgggtggctacacagccaaaccatatcaattagcaatagtgggttcttttttatgtaaataagaatagaatgttgataaaaatttggaaaggtttttcttgaaatgagtacagtctgggagaaactttgtcctatctcagtgttcatccagctgctgaggatatggtcagtaatcaacaaaataaaccactttactgatatcaattagcctttcttacacaaccatctcagattttgcttgagttcattaacgaagtagctattgcaggaggaatgaaggtaatgcatagatgcaaaaacatgagctggcctgacagatacaggggttaatgatacctatccaagatatactgattaaatgtttctgaagccaaaaatgggattatatgaaacctaaataagataatgtatgcaaacttttatagtcagtgtgattcactggcccaattaaaaaaaaacccacacatttattattagaaactgtgagtacaaatctggacagtagttgcatgactcatcaagattttccagagccttagttttctcatattgctttagtttcctttcagagttgaggggatgtaaatgcagatcttgcttgtgaaagagctgaattgtgaatttcaattatttgcaaggactatgacttccatatttggatatactcagcatctaccatgatatctgacacatagtgttaataaataaatattaataaataaaactggtcaaattgcaaagtttttgtaccatgaacatgttaattattcatattaataaatttagcctttcaaaataccttaataatattcattaatttatttataaggatctggatgtagaaaaaaaaattttctgtgtgtgtgtatagtaacaaaataccaatagttttattgaggtaaaacatgataaacttggaatctgctatgatttgaatgtcccctccaaaactcatgttgaaatttaattgccagtatgatggtatttggaggtggggtctttaaaaagtgattaagtcatgagggcttcaccctcatgaatagactaatgttaccacaagagtgggttggttatcatatggcagggtagttataaaagtgaggccagcccctgatgttctgctctcttgcatatgcttgctctcccttctgctcttttgccacgggatattgcagcatgaaagctctcaccagatataagcaccgtgcttttggaattctcagcccccaaaatggtaagaaatatacttattttctttacaaattatccagtctatagaattctgttatagcaacacaagacagactaagagagaagctatatgtccagggctatgggtggcactgtagta

SEQ ID NO: 34233 - DNA, 2300 bp, Homo sapien
agctcactgcaagctccacctcccgggttcaagcaattctctgcctcagcctcctgagtagctgggattacaggctcctgccaccatgcccagctaatttttgtatttttaatagagatggggttttgccatcttggccagggtggtcttgaactcctgaccttgtgatccacccatctcggcctcccagagtgctgggattacaggcatgagccactgtgcctagcctgttttgtttttttttttttaatctttagtgaatgagattcagagtagcatggacatcttcttatattgtgggaggattattttgtcactgtgagggaaatcacaatttcctttcctcctctcccatatccttgtctaaagtcacttaactttgagtttggcggctttcttacacacttgcctactattaagagtcaaaaataattccaatctagaagaatagtactttctcttttcccctaccattagcttttgctagttttgacaattttggggagtctgtaaacctgatataattattttaatgttatattttttataaaataaagaatttgaggagaaaaaggatgttttaaaaatctaattctccctacctcagagaactcaagcatattacttatttcacacttttaatcatttcttctctttttcttttctccagtttgcatgctgcagacttgttcttataatctcttcttaagtctttccagcagcatctgcttttcaccttttctcatttcttcccctgatttttcaatgcagttttcaatggttttcttttgacaccactttcaaatttcaattttttcttctgttctctttcttcctctatattccacatatgacttccaaaggttttgtaaagatgaattgtccaggattaagagagtgattgattaagagcctacagaactgggaagaggagagctgccaagcttttctttatgtgtagcacagtggagctacccagagtgtgagaagcaagaaacagagagccttgctaaggcacgacgaaaaggggaagcctattaaaagaatgatctggaggagtgtgcagtgaagaaaataaagtagagccagcctgctgggtcagtagctaatagcccatgggtttacaactaaggaagttaaaattctagctaatgagaattgtagacacctactgagagtgaaccgaaggcttcctattaacttcccttcttgggtctttttgacagaacagtcagaaagttgtttcctatttgtttagtagcaaaagagttgaaatggaggtttaaaaaatgatgaaagagaagttggaggcaatctcttactcagctccttcacgaggtccaaatacgatgtctcccccactccactcaaaatgtaaatcagcataggtcacaaaaagaggaaggacagttaaaaaaaaaaaaaagagttgggccaaataagacatacagccaagatgactgagacaatcagagaggatttggggtgtggggacttcaaattaataaatccggtattagctttgtggaattagcaggattagggtacctctttcaagaacactggttgaatttcatggtttcaatagatgaccattagctgttatgtgcaccccccccccccttttttcttgcagaagttaagaagtctgcttaactcgcaggtcaccaagagattgattaaaggcctctggacatcatttgggtttggataaatctgtagggccactttacagactgtctccaactcctgatcccactgtggttctttctgaattgatccaggtccctgctagcaagtgaagcagaaagaatccaggctagttgtgagatgacatacagcaagcaggctgagatgatggggacatttcagaaccaagaggagggggcgggcaggacacggacttgtctcccccaccttgatgccaaggtggcatctgggagatatctcgaagggcaacgtcgaggggactgcaagcgtcaaccctggcgcggcagcacggcgcccctctccgcgggcggggagcgagcgcgtgtgcgcgagagcgccgggcggcggcgggaggaggcgcaggcgcgctgctcgcccgtctgcagccccgagccgagcgccgcgtctcgggagttgatggcagcaccactgtgcggccgcccggccgagcgcggagcgcagccactcgccgctgcccagggagcgcccaagatgtggggggaccggggcggcagcggccgtagcagcgccagggacgggggcacgcagcagcctccgctcgcccgcctgtcctgacctgcctcgcttgc

SEQ ID NO: 34234 - DNA, 2300 bp, Homo sapien
gaacctctgtcagtaaagattctgacatgcattgttacttccctattctgttgactgtataacggaaaaaaaaatagcaaacatttgtaagcacttatgtgcttttaaaagtgtgaaattctttccatatattaacttagttaactctcacattaaccctatgaagctagtacattttttagccctcttttcaaagataaggaaacagaagtacagagaaatagcccccaagtaccttgcctgggattacatagctaatgagtctgattatagaaaccacacttctaccaccattctttagtgtctcgatatgaagaacacagttcaagaggaaaatctatattctcttctataggcccttaggccactttctatggatttctttttctttcttttcttttttttttttttttttgataaaattttttttttgggagagtggaggtggatacagagatatgtaatttccttctgaagtattaaaatagagaaaatagtgtttgccattttttgcttttctgcttcagcattataattttatgaatgtctaatttttttaataatgtcaggagtattcgttgtagatttaaagtgaaatatgattagaaaatttgacagtttttgtttttgattgttggtcttgttaaatgttttaaccataaaattaatactgtatgataattaaataatgcctgcatactctattcattagattattatttttaattagtattttgcagtcaaatgttataatttagttataatttaacagaagtgttttctgtcatccatgtgtatataattaatatgtaggtgagaattctgggcgttttattcattgtcacgttcccagtaaccaggagggttcctagcacatactcagttcccagtgagagtttattgactatattcatgtgtggatgaatgatgaagttaaactccttgagcttattcaaatgtataattttgcttttctttactaaatattcaagttattgttgatgaagaaagtcaataacataagaagcagcaagaagctgagaataacgtgccctttctcaacccccaccccaaactgactcttttgagctccttgaggaagagtactttttcactcatttctgcattcctagtactgacacagcgtagtgctctacaagtagctaacaaagaatgagtcagtaattgagcaagctggatgatctaagttcttactcttttattcatacctcgtttgaacaagtctcaaatgcagaaactgtagtgttttgggagcatgttaccaaagtgtaaggtgggaatgaggggccacacattccggcggcaacaatcttgcatttctgaattgagtgcagcctcacaggccaagctccaactgccctctggaacttagaatccttatagtatcaacatcaagagatcacttagcctctgctttaatacctcctttgtcatgtagatttagtgtagtctttagttcccatgaccccagagtatgtttccctgaggttggctcagcccattcacattttgttcagcaagcttaggtttcctgatgcaaggtatccctttaaatattggaggatagccttcatttccagaggctactctatactaccacattagttgcgtgtttatatccgtttctgtgatatgcttgactgtctcttcctgatgactgtccttagagctggtcctaatatgtctatattaataactcattgggctgcaagacaaaaacaatattgaatgatgagtcagtggtaacctacaaagcatccagtgatttgctatggtatactgttttcagaaagaatatgtactcagtaaatgttcttgaagacttgattgattgactgatcaatactcatacttcttatgttttcactcacaatacgtggtctttcacatgcacttccttcctagacatgttctgtgttcactcttctcttccatccatgtgtaatttccatcagtatatcctattccttcatgacgaatgcctccccatccattcataacctcctgcaccatgtccagtccagtgttttttggaaagtctaaagtaaatgaactattttttaaagttttctaatttttttaacagaagctccattacctactcccacctccccacatgatgaaacagggaaacagtgctgcaggcatacagtgacaacaggacatcaggaaatgcccaagaaggtcagccccaccttaacatgatgtttgcaggaatttggacagcacataccaacatttctaagaaacatgcaaaccaatatatcatttgtaattca

SEQ ID NO: 34235 - DNA, 2300 bp, Homo sapien
aaggcaactaacctagaaagataatctgagctgaccaaggagataagggaaagtaatatagacacagtaatatacagataacataaagaagacctaaacagaagcagtgctaatatcaaagacagataataaccataagaatcaaacaaccataacaaaaacaaatagctcaatatatgaatggacaaagatttgaatatacacttcaccaagaatatgtggttgacagaaggcaggtgcaaacatacttcaatgcaaattaaaaacacattgaaacaccagcacacagtcattagaaatttttaaattttaattaaaattaaatgactgacaataccatgtgtaagcataaaatgtgaaggaacttgaactcttaacactctgctgatgggaatgtaaaatgccataatcaccttggaaaacagtttggaaatttctttaaaaagtaaacatatacctatcatgtaatccggcttttcctacaaggtattttatcaagagaaatgagagcatctgaccacagaaagacttgtacaggaatgtctataacgacttcattttaatagccaaaaactataacaacaaaaatgtccatcatcagatgaaaggataaacgaattgtggtatatccatacaatggaatactactcagcaataaaaggaactactgaaacaagatacagtgtggatggaacctaaaataattacactgactaaaagaaagcaagtaaaaaggagcacatactgttgactctattcacatgaactatccgcaactgcagtttattgtatgtcaattatatatctctatataaagctgttttatatgtctgtattcgcttttgtgggtctgtaatacacgtttttcatttttttaaacctctgagcattaccatcaacattttaacaatagtaatctcggcagaagacgaattagggttgttttgaactttcttctgcgtgcttacccttttttcttcagtaccctgcaacaattacataaatactattttaacactaaatgctatttaaagtttaatttttaaagagctattttaagaggatataatctctgcactaagaaaagatgggaaagtaacatattttgagttcagaggcattttattcctcctagggtttctacggtatctcatttctcattctttctttcttttttctttttttttttttttttgagacggagtcttgctctgtcgcccaggctggagtgcagtggctcgatctcggctcactgcaagctccgccccccgggttcacgccattctcctgcctcagccttccaagtagctgggactacagcagcctgccaccacgcccggctaattttttgtgtttttagtagagacggggtttcaccgtgttagccaggatagtctcgatctcctaaccttgtgatccgcccgcctcggcctcccaaaggcgtgagccacggcacccggcctacagtatctcatttctttacaatgaagatacattttatgtttaaaaataaactatgcatgtattttaaaagaaacagagtcttaaaaattttcccactatgctggcaattgtttccacacttacatgttaaataaccagttaatttatgtacacttgctttggatgtggacctttattctcacaggtaaattggtgacttttggttcacccttttcactgtgttgccagtccaactcttggtccttatgaaaaggtcagagaagaagggggagtacagcttggtcccttctttgggaagtcccagggcctactctcctgacagcctttttaacgcaggtgaaatcagtgacaatcgccaaagagcagaaatctcacgtcgtcggtgggggcgaatgctcacggaatcgtgactgggcatctgcgctggcctccgcctagactgcgccccacgcgggtccccagagcccccggcggcgcttccccagcgccctccgcgtggaaccccgcgcctctggaacagaaggggcgtgtgacgcagtcaccgttgcctagggccacgttctgatcagatctgacgcctccagcgcccgaccccacgccaagagggccgggcctcagtttccccacttccaaggaggcggcgctatgctgtcctgcttcaggctcctctccaggcacatcagcccttcgctggcgtctctgcgcccggtgcgctgctgcttcgcgctcccgctgcgttgggccccggggcgccccttggaccccaggcagatcgccccccgccgccccctggccgcagccgcctcctcccgggaccctaccgggcccgccgccgg

SEQ ID NO: 34236 - DNA, 2300 bp, Homo sapien
tttatatgcaaagtgtacactacccacctggagctgaaaaagctcctacactccaggagttcagctttaatgacagaaggtagacaaaggaaacaattacaattcagcgtactatttagtagtggcaaatctaccttcatgtaacactggtccaacaggaagtcatctgttaaatccatttgtgtccaaataatgcaccaaactaaaagaatgccaatttcttttaccaagtcagagctattctaagcggagttcagttttatgagataacagcatgggttctggacaaggctggtttcttcggcaaaggctcagaagtgggccttggttaactaagctttgggcacagtcttgaaattattagtgatttcctttttgaatttgagttttgtaagtgaagtctagtgggataatggaacatgtgccaaggccttgttgtctcaggtcatgtgtggtcctgtccccaaaagctcctcaggtggattctctggtttcctgctctcctgtctccacccagcaactgctgccaccttgctccagtgtatacactcctacctgagtcttggggcaggggtctcaggcacctttgagggtctgccctgacaacctaatgtctctgtgctttagggagcatcgtattaaatagtaaattaacaaacaccatgatgagtcaagagacgctatggaagaaacttttttttttttttgagacgaagtttcactcttgttgcccagtctggagtgatcttggctcacggcaacctccgcctcccaggttcaagtgattctcctgcctcagcctcccgagtagctgggattacaagcatgcgtcaccacggtcggctaattttgtatttttagtagagacggggtttctccacgttggtcaggctggtctcgaactcccgacctcaggtgatccgcccgcctaggcttcctaaagtactgggattacaggcatgagccaccaccctccgccggaagaaacgtttttcctgcattttgaataaaggggcctggattttcattttgcactgtaccccaggtattatgtagctggacttgaagtcctgtagcagtggacagtcccaggcaagtgactctgggcgaggcacttggtgcctctgaagtcactttccacatctgtaaaataatagttcagagcagagtagggtggctcactcctgtagtcctagttatttggaaggctgaggtgagaggatggcttgagcccaagagtttgaggctgcagtgagctatgactgtgccactgcacaccagcctggatgacaaagagagactgggtctctaacaaaataatattaataaaaggaaaataatttctatcttgttggatttctgtggagatttggagctaatttatgtaaagctcttggaccaccatttgacacattttaatggtcaatactagaaggtgttgacaattatatattacctaattcaaacacactcccttacgtctcctatgcttgccggctaataaacagccattcccacaggcagtaccaaatgtgtatcctggttttgcttcaaatgtttattccctaaatttaaacccttctatagtgtgcaggaaaaaaatgtccgcacctcagctataatgtcaggttgtaacaaaaaactgcgaggatttaaaaaggtgtgcttgttagaaaagcagaaatcttcacaaatactagatttaaaaaaatggaagcaaaaaatcgttcattcaagtgatcatttcagaagagctctttcaccgccgttcagcgcccccctagccattagagagaaaaaccaaggccggtacaatgcgagcgcagtgtaccaagggaacacacacacacacacacacacacacacacacacacacacacacacacaaaccgaatcttgaaaaactagacgttgcccagctaccagcccccgtctggtttccataggaacgcgcaattccgttgcgtagccctctgcgccggtagttgttctgtctcagttccggttttcccttccaagcgtcaatgtttcttgttcccaggcggcagctagagcagaaggcggatgagttttggacagaagaggcttccgttgaggggcgtggcgacgcagccgcggtctgagagaccggttcacgtgcaggcagcggcggatcatattccttcatctaccatggctcagccgggaactctgaacctcaataacgaggtgagcgccgaggaacctatggggctgactttaagggtcctcaaaaccagctcttttgagacgcgtggtcggaggcgggcatagagggtgcg

SEQ ID NO: 34237 - DNA, 2300 bp, Homo sapien
aaaacatctacactgccatgcagtggtaagtgatgtgaagtaaatagtgatgggaagtgttgtgctagttgagatgacatttaagcagagacctgaatacagtgagatgatcagccgtgtatatatttgggagtagagtattccaggtaaagaagagattgcaatggtatgggctaagcatcagaaagcaataaagcttaaagaagaacagatatggaaatagcatgatttgattacatttttaaaaatcaccgtggctgttgtgtggaaaattgactgttgagagagcaagttgcaaaggagagtgaccaggcataagtttaattatgttggtccaggtgagaggtgttggtgatttagtcaaaggtagtaagaatagaaatggtgagaagcgactggttctggatatattttacatttggaaccacagggtgtattgtgagttttgagggaaagacaaatagtgggaaagaatccttagagttttaggcctgagcaaccagaacaatggaaattacatacaataagatggaaaagctacaggagaagcagatttgtgaggaaaaatcaaagaattctgttttgacaatgtcaaatagatgtcaggttaggtggtttgatgtatcagcttagagctcaggttggagctggaggtcgaaatttagatgttgtcagccttcatacggcatttcaagtcattagccggcattatgatttttccaaatttataaatatattgaatactgtatataatgttcccattcagtctaggccctgagaacgtgtcagtgatagtagacatttaaaatagaaatatagagcgttagataatttctaggtctctgttaaatggaacttcaagtattacagtagtctcacccagtttagcactaatatgttatttgattctttgatattaatttagtcttcttaattagattgttcaagctctttgatagtaaaaactatgttctttttttgatgttacacatggtgcttatcacaattctgagaatattaagtatcgtatccaaagaatatttattaatgattaagtgataattttagttgttcaaaggcagtaatatttttgtcaggatgatctttgtctttagcatggattgattatacagatatcttatctaaggagaatattaactagttctattctccaactctaattttaaagactatgatagattttattttattcactttcaatagtgtcatttttatttcattcccatacgtttattatatttttaaatttgcagccagattctactgcaactgaaagagcaattgccagactagcagtacatcctcttctgaagaaaaagatagatgtgctaaaaggtatgaattaaatgacttttaagccatgtacttaatgtatttgtagactttggataatggctattcacttattttaactcttgaggttctattataaatataagtttctttcaaatatttaccagtgtggaaggtgtctgaaaatacagaaagtgtgatctctgaagaaaaaccaaatctgtattgtttagtaaattctaatatgtgaacgtataatacgtaatatatatctttttatatataatatatacaagataaagttgaatagtttttttaaaatattgacataactcattagttttggtttcgccacttaggaacataattttatatatgtttattataaaatatatctataaaatgaaatttttttgtcacatgatactgaattttatgtctgaaagcacagtttataataatgcattattattatataaattaaagttgccattcccttttatttgtattctgtgatgtttttactgttcttcataactccaagacatgaagaaaacattttcttttcattttcacaatttaaaatgaatacgtctgagcatatcttatgtttggtttttaagaagtcgaaagatttctttgtgaattcagaccgagtatatgtatttaatatcaattccaactgccctcttaaatcttttcaaataattttttaaaatactgtcctaaaacagtcatgttttatatgtttcagtgctaaaatgagtgatgcactgtttctcttgcagctgctgtacaagcctttaaagaagcaagacaaaatgttgctgaagttgagtcatcaaagaatgcttcagaggacaatcattctgagaatactttgtattcaaatgataatggaagtaatttacagcgtgaagcaactgtcatcagtgagcaaaaagtcaaagaaaccaaaatattggcgaagaaaccaatacataatt

SEQ ID NO: 34238 - DNA, 2300 bp, Homo sapien
gtggaaaacaacagaaattgactctgaccatgttcagtcacaaaggaatgtatgggggggatgggggggtgggtcggggagtaagaaagaaagaaggaaatgctgaagaaccaggtcttagaatgtactcacctaaagtagcttgggtgacggggcaggggacggatccatgtagcaagacataatgggcactttttcatttgtttgtttgttttttagatggagtctcactctgttgcccaagttggagtgcagtggtggatctccgctcactgtaacctctgcctcctgggcttaaggaattctccgggctcaagcaattctccagcctcagcctccagagtagtttgggattacagacatgtgccaccatgcccagctaattttttgtttgtttgtttgtttgtttgtatttttagtagagatggggttttgccatgttggccaggctggtctcgaactcctgacctcgaatgataatgatccgcccgccttggcctcccaaagtgctaggattacaggtgtgagccactgcgccaggcctgggcactttctttagtagtttgaggagcaacatttttgacagtgtccttctgctcaagattcagatcccagataaaattaaaccatctagagagatggcttgattggccaaacctggatctcatgaccacttcttgaagtgggtaagtctcataaatgctcagtccttccactatgcaactgagtggggtgggtgggaagcccctcaaaggaaaatccggttgttcttactagaaagaaaaggaaaatggatgtgaggcagtcaaaatcagcagaggtccaccacaccaccaaaatgtggtgattaaatatggagagacagagactaacagaggtatgtgaatattgaagtatgtctggacaatagcccaatgatgagaccaataaaatggttaccaaaatctggttttgagtagtagtgttaaatcagaccatttagtaaccattttttgttgcaaagtttctagcactgcccaaaccctgagtggtatatgaataactcgtccattatgtatctctttccagtcagcataatttatcccccacctatattcttttctgaccactcctacttccttctctttaccaaaatctaaactctaaggctgtttcttcagcaacttctttgtttagattggaagataaattaaacagcatgcgatgttttactgactttcagtatttaacagaggtgatttaatttttttttaaatccaaagtcaaacttctttataagatgaaggagaaaaatgtcttataaaatgcatatgtgaagatgccttctgagtgctttctcatgcagacttgttctagtctttaatgaatcttccttgtagacactgtggagatgaaagatggttctccacttctactcaaagtacaaatcaggccggcattttgaaaaagagacaggtttattcatagctgcagcgttagctggctttgttccctgtacaatttcacttttggttattaaaatattcactgtaggaaataaatttgtaacccatttctcatattacctacacacagaaaaacaaaatttgatatcctggggtttatttgctgagggcgcttcccataaaagcgagagagtgtgcgttgggaaatgtgtctggttaactcttttatggataaactttagtcacaatcctcccccgcccccctctcacccccagcaccctcccaacctcccgacttcccgcctctcaagggctggtgacctaatagcatttttcttcgtgcatattttggcgtcgccccatggcctggctgccttcgcctgtctgagttttttgaaattcctgcatgttcgccccagattaagccagtgtgtctcaggatgtgtgttccgttttgttctttccccttaacgctccctgtgcaacgtgtctggggggaggagggcagggacgggagagagggaggggcagaggcgaggagctgtccgccttgcacgtttccaatcgcattacgtgaacaaatagctgaggggcggccgggccagaacggcttgtgtaactttgcaaacgtgccagaaagtttaaaatctctcctccttccttcactccagacactgcccgctctccgggactgccgcgccgctccccgttgccttccaggactgagaaaggggaaagggaagggtgccacgtccgagcagccgccttgactggggaagggtctgaatcccacccttggcattgcttggtggagactgagatacccgtgctccgctcgcctccttggttgaagat

SEQ ID NO: 34239 - DNA, 2300 bp, Homo sapien
ataaaacatgcagtttgtgtaaagtgaaaagtgtgttaactaggggcctacaggtcagtaaaaggcaacaggtaaaacagggttttcttgccgccatctcaacatttactcactgatattatatcagctctatgtcattgtatgcatgtattattatttgtatatgtatcgtatgatttcagaagcatcttaattagaaatattttatatcataaattagatatctagaatagttagagcgttattgcaagttaggatgtgaaacgttactgtcccttgggatctctagactgtgtggcctgaagagtcacttcagcagaattaagagtcctgtgaattacctccatatcccaattacattatctggggacaaggagcagggctggggaatattagaggtcaagtttttgttctttttttttttttttttgctaaccagtaaggaacattcagtaaaaatgttccttaatctcaccactcataggtagccactgttaacactgggatgtatattctttgagttaattgtgtgtttgtgtgcacatgagcacacacaaagaatttgatgagattatactatttattctgttttgtagcttctctttttcatttagcaatatattgtaaactttttcccaggtcaataaactgttgcctcataagctttaatgcttgcagaatatttaattgtagaattgtactacaattatcttaatatctcagagtattttgaaatacgaatcttgaaaacactgcttcagatatatttttaaatactggccttagtttttaaaatattttctatgttttaggacatgttagaaaaatagattaagcatagcttctacatcttgtggttgcttgccttttagaccaaaacatagaacatgctttgagagccatggagactatccatcttccctgttttagaggagaccaagctcttcttcttcttctttttttttttttttttttttttttttgagatggagtttcgctcttgttgctcaggctggagtgcaacggcgctatcttggctcactgcaacctacacctctcgagttcaagcgattatcctgcctcagcctcccaagtagctcggattacaggtgtgtgccaccatgcccggctaatttttgtattgttagtacagactgggtttcaccatgttgaccacgctggtcttgaactcctgacctcaggtgatccacccgcctcagcttcccaaagtgttgggattacaggtgtgagccactgcgactggcccaagctcttctatatagatggtattagtattagtcagggttctctagagggacagaactaatagaatagatgtgtatatgatgggaagtttattaaaatgtattgactcacatgatcacagggtaaagttccacaataggccatctgcaagctgaggagtagggaagcccaaaacctcaaaagtagggaagccgacagtgcagccttcagtctgtgtccaaaggcctgagagcccctggcaaaccactggtgtaagtccgagagtccaaaagctgaagacctggagtccaatgctctaaggcaggaagcatccagcatgggagaaagctgaagaccagaagactcagcaagtcaagtccttccacattttcctgctttattctggccacactggcagctgattagatggtgcccacccagattgagggtgggtctgcctttcccagtccactgactggaatgttaatctcctttggcaacaccctcacagacacacccaggaacaatactttgcatccttcaatccaatcaagttgacactcaatattaaccgttacagtattttttaaagtccctagaaaagatcaataagataatcagtaaatattgttttcttttcttctttaaaataaaacgctgtgtttctacatcaagaagagcctgtgacttaaatttatctgtccctgttggttgctcagtccatcggtaaagttcctggagtcaatttaaaagaaagctgaaatccatacctactttgctctgtttcccatcagttactagagaactcagtcccgtcccttttgttgacaggttgccaggatacatccaggcaacaaagactgcggttcctgttactcagcagcctcaaaaactcacaccagctcctgcaaggaatgtgaatcttggagctcccagctattctgttcctgtttctgtcagctccttccctgaaaactcagaggtgctcagcatgccatgctaaaaggcaaaataaaaaggtaaagaacaaatgtcacaaggtgaggctctcgcag

SEQ ID NO: 34240 - DNA, 2300 bp, Homo sapien
acacctggctcgaccagagctaatgaatatttaggacagttggaaggagatgaccatttacaattcttcaataaatgattccttcaataaattaaaatctgattttcagaaaacagagtgtcaaaatatttaagagaatagaaatgaagtatgttctctgtagatcatgtcaagggtgacaccaatcccatccatatctactggatgaaagcaagatgtgcttttctcgaagtttacactaggcaaaaaaaaaaggcagttttattttaaccagatgtgaacaaattaaacccaatattttcaagtatttttagtgccacatgatgtcatccaattttatattttctactgggggataatgtgtatttttaaaattgtgaagccactttccatgtatgtacttaagacttacacacgataaattacaataaacaaattacaacaccgccggacatgctcttggctgtttatgtcaaaagccgagaaagaaatttaggttttcagtaggacatggaattagacgcatgtgaaatgtcttctgctggcattcaagttagtcctcatttcaatgacgatggtcctggtccgaacaggtccagggcaagcattactccggctatgccctcctagtacactgtggactccacaaagactgcaggcagtcttaggctagttacccaggaaaccccagctttaaacaaccagagccttcctttttttgttgtaacaagatcacacatccccattgccactactcagatagtgccgggtgtcctaggatcttggcgtcgctcttgtcctctggaacaggcatgggaatgaggatgcctctaaactgaccaagacttacttcctcatgcttttctctggggcagcatcaggcaagcagccataccctggaacaagagtgtggtcctcaatggctttgctgagtgaacttctccaagtcatctcgcctgggaaagagatttctcaaagaccatttaaagctttccagagggcaacagcgagacagtcgcgagccaaggttaccataaatgcttccacaacccctgatttcatttcggaaataaggaaagaagtagtcaccactgcaggcgttgcttacgcctcatccagcagcctcccacccccaatccctcaacaattaagagacaataaaagtaaagataatattactgtagggccattggtacactgaaacgtcgttgaattaaaaagtctttatttcagcctaacatcttctccatccacccacacttgagcacagaacattccaggcaggcaaagccacccttgccctcctctccttggccacgtcctcaggggtgggcgagcttcggggggaggggtgggggtgaagactccgtgccaacgcaaaatactctgccaaaaggcttctcagacatgagtttcccagggcaatgcccaccttccgttccccgccttcccgagtctcttctcccagtttatgctggaaccctggaatggtctggggaccaatgagatggcagcggttaacgcttggatcacggtgagggggcgatttccagggggagaggccaagaagcaaggaagggggtggggggcaggaggagaaaagtgggaagcgcggacaaaaagtaggcggggaggagaggagagccccagctggggaaaagcaacggcagtcgaggtaaaaagagcgaaaggtaaagaaagagcaggttcgtggacaggagccggcgggcaggccgggggatccctggtgaggaagcggcgagggaggggcgtgggccgagccgggggcgccgcggggagggtcgctgtcagtcaggccgagcggggctcgctggcctgggggcggccgcaggggcgcagcgcagcctgagggcgcggcggccccggcagcctccgcagtggcagtggtggccgcgcccccgtccccggccgggcgcccgcgctgcgttccttgtcccccagcgccggcttcgggccgcggccgcccaggctgcccccgcccgcgcgcgcccgttggggggcccggggagcggcgcccgcggccgggccgcattgtgacgtagcggggccgcggcagcgcctccaccgcccgcctacttcggctgaggctgttctgctcctgccgctgcggtccgtcggtcggtcagtcagtcccttcgcgctcctgagccgccggcgcgccgggcgccccgggtgagtccaggtcccaagcggacgccgcggggaggcgggaggcgggcagccagcggctcagcctttccaagtttgcaccaggcgaccccggcgggtgtcgccccgtg

SEQ ID NO: 34241 - DNA, 2300 bp, Homo sapien
aagcctgctctacaggaagttctgagagctcatcatccaacatggcaccattttgtgttctttctcccgtgaaaagccctcacttgagaaaagcatcagctgtcatccacgaccagcacaagctgtccactgaagaaaccgagatctcacctcctctggttaaatgtggctctgcatatgagcctgaaaaccagagtaaagacttcctaaacaagacatttagtgatcctcatggtcgaaaagttgagaagacaacaccagactgccagctcagggccttccacctacaatcctcagcagcagaatccaaaccagaagagcaggtcagtggcctaaaccggaccagctcccaaggcccagaagaaaggagtgagtatctgaaaaaagtgaaaagcatcttgaacattgttaaagaaggacagatctctctcctggtaagtataatctagttcagtatacatgtcaatagactggagactcctttttaataaactgcattcgttagtaacagaacgatgctgcatttgttttggtttttacttaatctttacttgtggctttagttgggagatgtgaccttttgagttttaaaataagaagttatgaagttaatacagggaaaacaaataactatagagggagtgttatttcattttaactttgcatgaattcaactgaagactcttaatctcaaagagagcccggcactttctttaacttgaatctcaatgtctttctttttgcttttcaaatggttcccagtgctctcacgcagctatttgtgaggatgtcaattcttggctgatggtggacctgccagacatgtaaacagagggtcttctgttttgtcctgatcattattcagaagaattggaccaggttgtttgaaaagcatttgtagatagaagcttacccaagggcttcattgccctctgacccaggtggagtttttacttacttccagctctgcatgtctagggagcatgaagaagcttttccaaagactctagacacagagtaacatgatgtaagaaaagtctgttctgctttggcttagagagagctaaacttaaatagcactccatctgcctacattgttcttttctggcttccagacttggatcaaacagtagcaagcctgggctcgtactatgatgctaattaaagtctcattcaagaaaatcatcacatcttggcaatgtgattctacttagtataaagccatgcatacttaagtacaatgtacttgctctattatcacaaatactattgtgatagggtaatataattgaataattttatgaaataaagtagtattttttctcctgaaaatgtcttttccattttcctggctcttccccctaattctctttggttcattcctttcttttgtccttctcatgttttcatgtttcccaaatgctaaaaacacctcttagctcacccaacaatctctatcaacgagttcatagtcaagggacaaaaacttcactagagatgagaaaccaaagccatgtagcctccagatacccccaggagtttgtttgatgacagtgtctagaggtacctatgagagcactagtagcagcagtcatcatgttgtttgccatagccagttctctacaattcaaggcaaaataaacaggtagagacaaatagctcattcattcaacaaacatagaacagggaataaaacccagccccagccctcaaggacttcacaatcaagtaggggagacagacagggaacctgacaattactgtaaatgtaattatagttctttagaaagccaacttgaagcctccacacctcattggccctagccctgttgccatgtctcgtatgaagatctgtctctcgagaactcattttctaaagcatattgtaacaaagaataatagcaagaaactgatttattagatccccaaggctgccaccagagcttctataagctcatttcttctttccagtgcccagagaaaaactcctacagggtcttgctctgatttattgacttgggttttctaatcttactatttatacagccacacctagctgcagacaatctagacaaaattcacgacgaaaatggaaacaatctattacatattgcggcgtcacagggacacgcagagtgtctacagcacctcacttctttgatgggagaagactgcctcaatgagcgcaacactgagaagttgactccagcaggcctggccattaaggtgactggttgggggctggaacctccacagctagaagctggatttctattttttaagattccttgtgagctaaa

SEQ ID NO: 34242 - DNA, 2300 bp, Homo sapien
aatatgttatggtatataacatgtaatacactttctacctttaagaaagcagtactcttttttttttttttttttttttggcttacacgtgtgttattttcctatgttgcaaactcagtgtgctcagttattcaacaggtacttactgaggccctcctgggtgcaagatagatggtatccaaaacagaaaactgagaggtgagaaccagttgctcaggaaggtagaggagacttgggaaatgacaggagaatatatggggaaactataaatataaaaggcaagagatttatgaaaacaaaaagcagagataatagcagaaatctctctagagtgcctactcacatgaaactgctgtttggagaactcacttgataggaaatagtccggagagctgaaagtttttctattattgttggcaaagtgtgcatcttctaatttaaggcatcaagtttttaaaagagtgatatgaaattggagagtataggagagaaatttaaattcttaacaggttctgcagaaatattaaaggagtagcatttttttgtaaaggaaatatgattgaataaacattgaaaaatatgcttttctatttaacaaaacactctaatatttaatagtcttgaaacaaacttttaagcagctaagaaatgactaaagccaaagaaagccagctgatatcactacgtgagattttagttatttttctttttaatatgtgaagagagacagtctttgcttttagagcgttcatcactccacttacacacaaatgatatttttggcactgggtaccatggaagtggaaacttggataatcttggaaggggatctgtccactgggtgtgaaatttaaagaaaaaaaaagataagagaccgagagtgagcaagggaccctatgaggtgaggaggggactgagtaaggaaaacaatggaaagaaaactgcagaggtcagggccaagggggagtaataacagtgtgtgtttatatagcatctcttcaagagccctgagagctcaatactgacatggtctctgtgacactcctgtgaggtaggtggcaatggctttgtggtgagttgacctttcatggtgagtgatcataaaccaaaaggaaaacgaagctccttactgacctctcagtctaagtagtctaaaaatttaaatactacaactattgcttaggggaaaacactgtctactacccagattaatccaggtttgcagtctcatcatgatattgtcaaagaatctatcagattgtagtggttgattaatattgatgtaataactttttgtggaatctaataatatcacagtatggacacaaaatagtttggatttttttaaattattaatttcaaccatgttccatcaaatttctctctctccacaactaatgataccttggccagattccgtaactttctcctttcttatgactattaaaatttactccaagcctctttaaaatctcagtcttacttctgattcaaagcattctccttcccacccagactagactcaagattcaagggacttggaatgggagtgagacatgcctttttacacaccactttagctcctatccccctatctcttctgggctgcagtgtcaaggacaagaaggaggtatgaagagaaaaagtccggtatctctttgcttaactgggaaaggcatgcaacctccctgaaagttgtccctgcttctttggctggctgtggtcactgatgccctctgtgccaaccttcagatgctgactctccagtgagtgccatggttggggtcttcagagggccctctggagccttcccctcctcccccatacagttctctccacctctggggcagcctattgccaattgtagccatagaaccctctcctcattaaagaggtgataagaagctcacacaaagctttcttctacaaagcctgctcaatccacagacatgtcctcaccatagcccattgtgggagggtgggagctgcttcacagcctccccactctcagccatgtcatttctttccagttctttttattcctgatcaggttggcgcagcaacaaataaacaggtgttatttcaaaaccaattaccagagaccaaatccagttactagagcccaagcaaatgagaacaggtaagattccagtctccccctcttacaggcatctctgactatgagtgattctcttggagcccaaccatgacaagagacagaactccccaccacaaagactgcactgcatatctcataaaggagagcacactatggacagcctcctcctctccttcccagc

SEQ ID NO: 34243 - DNA, 2300 bp, Homo sapien
ttgggtaagggtatcctctttcaagatagtttcctatttcattctgattttttctcggcctgagactacattttttatatgtttagttgaattcatttttttgcaaagttgccacttgtttgatttcttctaagcctttttatttgttggtgaatggtttttgcagaaaattctttctattgaatattcatattgaatcaagtagagacaaaatatttatatattatattcattgcttcttgaaggttgattattattatttttttccaggagtgacgtagtctgtgagctgcatcagcccacaggtgtggctatttggtcgtcatagtgataaaaaatattaaactgccaacacctaaaatttgaggaatatcacatatagcatttggattttcaggctatcttggaacactgagaatctgacaatactgagccagcattcctacatgataagaattagtagaaatagaaaaattactcctgcttagataggatatgttctctcatattgccatagttatcagtctgccaatgtcactcaattaggacacagcctgactcttctaagcatttggattcacaatccccaattttgcaggatagaacttattagaagatgaatgctagtcatgtatatgcaatccctgatttaatattccaaaccatgagacaatgttctctacatgcaggtatgaacatttcccattgtccatgactggcattctgttatggctcctgccccttccttctccaagaaattctagacctccatttggtaacctattagatttatagttccaaaaggaaacttgactcttttgaggtacgaaacagagatgtccttctctgtactttaatcaacatgagtcattcaaggcaaacattcattatcactagaactatgcaaacagcatgtatccatataatgtctcccagattttttaggtctcagttttagggtacactgaagttacagctcttacccttcaggagtttttaattcatgatacagttaaatatataagttgggatcatattcatcacgtgggttgttttccatctattcctctaccctaccaagcctaagggaattctctatttaccagatcaatttctagatcctttttcttcctgtaagtagggattcttttctgctaggagagaggtaaggtcagtctgaataataaagtgatatagaaaagagagggtaaagacagacagaaaatagaataaagtgttgagacaagttatggggaatcatgaattgtaatgtgttggattggcagcaagtttgcgggggaagggtagaagacgaaaggggttttaataaatattggtatggtctttgaatgtagatcccctttatggttcttaagaaacataagtgaagggtttcagttgttttgaaattacttttggctgtgggcagctgtttcttgactgcaaacctgctctgagattgagctgtgtccatcccaggtttataaaagttatgcagacttatgaataggttttccttgttcatatacttcttattttgtgctatgattatagtcatttgctgttgatgatagtaagaactgagcacctgtttaaacagatttaagattgtttcttctggcctagggttttggtgtgtaccctctttaaaaaaattaaatatctagacaattgagatatatatttctgttctacttttctgtttatatttctcattctatggtttttccgaggtggggagtccacattaaaggttatactgcttctggctctaagatttgatttcttaaacacatcccaggtcaactagagtgctagagtttattacttttcaaaaaccaaacccctgccaagtgaaaggagagaagggcatatttagatgaaagtgcttgatgttcaaattctgcagtttgttgacattttattgctcaatgcaatttctcctacccttcagggcattttgcttaatggtttcccaagaacagtatgatgaggcttcaaagcaagcggcaagttttagcaacaatgctgttattccagtttatatgagtcacatgtccaaaaccttgtataaatctgaagtttttcccataaacacttatgcccagaaaatatggtaagctatgttaacaagccatattagatatcaagcattaatatggaaataaaccaggtaactcctgtgtaattgatctttgtggggacttggaggaggggaggtgaatctaaactaggtttagtgtgtgctaaacttaattaatggttaactaaattcattcaaagatatctgtaacttgtgg

SEQ ID NO: 34244 - DNA, 2300 bp, Homo sapien
aataaatagacatcagaaatgaatactaagttgtatttattaccagaaatacatagaaaaactcagaatactcaggggaaaataggacactgtggtcatgtgctggttgaaaaaccacattgtctgcctaagacattcctgaaatatttaaattatgaaatgtttaaattatttagcccatgactgagctggaaagaaattgtgttgtctgggtaagcactcacagcactctgtatggagctgaggattttgcatgcgacagggacttagtaagcccagggagctggctgtctctcatttcaggacaccctgtacatccatctatttcatgaagttttcccattgaaaatgacatgacaaaaacacaacttcccacaatccccctttcattacgcacctaacattcacgtttcttttcctcttaattaaacatagttaatctcttcccgatttggccaacatcctgcactttttcagtattggtttgagtgtgtatcttgctgagacatggctaatttctgctggaacataagcagctaggggttccactgctgtctagctctgtccaggacagcattctctaaagataagtgccaaacaccataattactttataaactttggcagtcactggctcttacctttgccctatagtaggactagagattctaaagtgccatccgtgagcctcgtcctttccccagattggttccatgcttgtaactgggaccagcaaatggcaaaataaaggacagatacggagtacttctatactgcggcaaaatttagcttgctatcttgaaaatagtcatactattttgggattttatagtaaacaaaatccagacagcagaccacaggggccatttatgagttataaaattgcctgggtaagataaggcaactcataaatgattcagtgaagctcacaggataaatcttattcctcatacgcacgaatccaaggaagattctgtgatgctcttagcccttgataatgtaagagaggaacacatgtcacattaagaacctgacatggcattagagtgctataaaatgttcaattaaacatggcaactgcaggacaaatggtacccaggatacagttctttgtttgcctttaagaactttaatgtgtcttatttattgagggcaaagaacataagatagtaaagtgacagcctccaacccatctgaaaatacttgtgttagtgtcaagacaaataataaatggggctgcctcaggatcttagccttttcataagatggacagagttgtgtttggtggattgcaccttatggaattagagccaacttaaggaaaactgctccagcatctgtcttctttcaagcagattgtcaagaggcaaaaagactaggggagggggaataagtggagtgggggagaagaggagggagagtgaaaggtgcggaggaggagagagaagcaagtagggacagcttgcatgttttaaaccttcaagataagctgtcgcttagaaccttgacggctccagaacttgacacatgcgtttgctctctgggggccttttcttgctgctctgtgagctgatcacggccactgagctgtgacgccccggcacttgcctgacctgacataatgggcagctatttactgcaaacaaggtagatggaagaacataggcttaaatgatgctctggtgtaagcaggaatccactgggatcccttgcaaaccagtccatcttctgggtttttttttttttttccacctcctctcccctccctcttcttctaggctgggactatttatttctttccctcaggactaaacacagatgtctgactcggagcaatgctcttcttccatccaacccccttcccttcccactcaagatcaatacagtgggttagagaagcaattacatgacaataaataaaatagaaaactaagtttggatactaccacttccaaaatgactgtttctgggttgtttttatccattgctaaggagaaaaaaagaacagccccaggaggctttctggttatgctgtcagatcgcttcaatgagaaacccaatcagacttgatttgtgaagtgtcaaaagctgcagtgaatcatgtacacatcgtcgtctattacgtgaggctgttgctttgcaaactgaaggctcctcatgcgtgtttctgaagctgaagctggtggatgtttatttttcctgcatctaagaacacacatttgcactctccattttctggtcaaggggaatgatcaaaatgggagccttggtagtgaatgtgagtgaatgcacaacaaggg

SEQ ID NO: 34245 - DNA, 2300 bp, Homo sapien
cactacaatgtccggctaatttttttgtatttttcttttttagtagagacagggattcaccatcttgaccaggctactcttgagctcctgacctcgtgatccacccgccttggcctcccaaagtgctgggcttacaggcgtgagccaccatgcctggcccatttattgaacattttctagggacaaagctttatatactcataacatacaagctgttagggttataagtgaaaagaatgagaatgtaatacccagtgttcatgcaaagcggccagtaagtttcattttatgagcagactttgattgattgattgatagggacttccaggagtgctctatggagaataaacttaggatcatattaaggtcagctggcgtgacttccaccatcaaaataatatcgtccatgatctagagagtgggaattggtagtaaattgcaaattttaacctaaaaattatgagaaaatgtaggagaaaaggtcattatttctaaattgcttcagagagaaagtagctatgaatcaggctttggaaaaggagaatttagatattagagaatgaagaggggaagggacattccaggcactaggaattgggaagatcaagatatagaagtaagcaatccagataagccaatggatgaggctacagcaaagtctgcatggatggatgttgtgggagacaaagttgaaaaaaacacacagagaatgaaagagaacaaaatcattatctcattaggtatcaaagtggctgggctgaatattttttatacttgcatatcagaccatcttataaacctaaatgactttacttctcatttacacatatacaaacaatactcaaaatgtcttttactactcttgtgcactattggaatgtaaattagtttagccattatggaagacagtatgaggttttctcaaataactaaaaatagaactatccatatgatcccagcaatcccactactgggtatttatctgaaggaaataaaatcagtatatgaaagagatgcctgcacttccatgtttattgtagcacaattcacagtagcaaagatctggaatcagcctaagggtccaggatggacaaatggataaagaaaatgtgatgatacacacatatatatatatatgatatatatgtgatgatatatattatatatactatggaatactattctgccataataagaataaaatcctgtcatttgcagcaacatggatggcactggaagtcactatgttaagtgaaataagccaggcacagaaagacaaataccatgttctcactcacacgcaggagctaaaaaatttgatcttgtggagggagagataatgataattatcagaggctgggaagggtgtgtgtgtgtggcaaggggagatgaagagaggttggttaacggatacaaacctacagttagatagaaggaataatttctaatgttagttagcagagtagggtgactagttatcaacaatgtattgcatatctcaaaatagctagaagagaggtcttgaaatgttctcaacacatagaaatcataaatgctcgaagtaatggatatcctaaatattctgacattctatgcttataatgaaatagcacatataccccgtaaatttataaaatatcatgtaacaataaaaaaagtctcgtactaacatctgataccagtttattatagtggacactattgcctaacaaacattcacactttctaatacattaaatttcccttgggaaactaccccgctatgttctgccatatttgtatgcgtgtgactgtttcctcagtgtccgggagaaactgggagaaccaattagcatatcccattcttctggttaagtaatggggttgatgatgggcatctaacccaatcagagacagggagacatggggagaccttggctgggctcctgagtaagaagagcattcacatttccacagaatccagtgatgtaaggacatgaggcttgacactgctactgtcacaatgggagacagcctcaggatgaagccaacactcagagaatgacaaaatcaaaacttggagattaactgacctcatatagcattgcataagcccctgaatcaagttatgcctgaagcttagtccttgagccttcaactacatgaaccaatatatttctctaattaaccaggcaagtttgagttggattttccatcatttactacagagtgctaactggtagagttattttataccttcacagttttcttttctttttttttttttttttggagcccaacagaataatttgtatccttat

SEQ ID NO: 34246 - DNA, 2300 bp, Homo sapien
tatacacaacaactggtgggagcacaaagagaagataatttcaatcgtacttgaaagtgaagtgattcactcagtgattttattttgtcattgaatgaggaggctaaatcatttgatgaaaatgaagagaaaaagatggtggtatacttgaggagaaaatgactttttagcacctatgctgggaagaatagttgaaggaattggaaacgaaacaactaatgatatttaggcagtgtagaactcagaattggaaataatggacttataggatcttcaatctgaggttgggattcattatgcaaatactttagcaatctggatataagattagagaaattgatggctgaatttgggatttcagagaagatgaaacagaaaatcaaggaaccaaggaagaagatgagctgagaaaaatagcaagacaattattgcagttctggctcatagagtttaggctgactaaggaaagaaagacaatcaaagcttctgagagtttagggaaaaggcacttgattctgatcccccacaaatcactgagactaaggagttgatgctgtatttggtttaaacctaggtgatgtattccctccctgaggtggagaaaactcacagctgagaagaaagttcaggtatgctaccatgaaaaccatgaatgcactagcagagaccactagttccctactttcttctagggtaagtgaacccctaatttttagcggtagaaataacaacttcatttcctaatgtcttctgtagctagacatggccatgtagctaacgagctggtcaaaggaatgtggacaaaagtggtgtgtgcaacttctgaactgtgcccttaaaaggaaggtgacattattgttttcctttcactctttttctgctggctggaatgtgatgtaactgcggtggtgagctgacttgaaccatgaggaagagactacatcctagggagggcagaacaacagaaggggcccatgtccctgaatgatctcatagaaccttcacaccagccctagtcctacataagggacaattaattaaacttgttcatttttcaaaccacttttaatgtgggtctctgtaacaagcatcaggacctatatttcacctatttcaggtgtccactaaaaaagataagctgggaatatatatgaccatagcataagacagaaagtagtaagcaataaatagagacacatgtaaaaattaaggatgtgtataataatcacctcaagtcaagctgggagctttcataagaggttgaagtttttgatccatgacagactccagactttccataaggtggtggatttgcaggccagggaatgtgactatgtgctcttaagaatcatccattgattttcctatcatttttctagaccttttgacttattgagaaaagaattatgtggcttatgataaaattggagtgaatcgcagacgagaaattattcagagtcctttcgttatctagagctgcaatcactaaataggtaaccactggccacatgtggctaattagatttaaattaattaaaattaaataaaattttaaaactcagttccacacaccggccacatttcaagtgttcaggggtcacaggttgccagtagctactgtattggacagcacagatagggaacatttccatcatgtcagaaaattctattggacagttctagagagatctaagagacagtacgtgtctctcgctcaccaatactccatctcgcctcagcctgcgtgcaatccaagcccagagactggtgcccaggctctaccacttcctacagaagatttaaaaactggtagtgccaacagaaattatttagcctagtcccgccaagaaggtgatgtggtaataaagtccaagattctgccacataagtcgggtcagcaagtcggtggcgaaaagagggccacgtcccagactttctgggaggaggcgggacaaaggggcggggcgagcgcagcgccctccgggtgggcgccgtcaagaggccgggggcggggccgagcgcggctgggcggggccttgagaggccggccgggggcggggaggctggcgggtcggcgcgggcccagccgtgcgtgctcacgtgacgggtccgcgaggcccagctcgcgcagtcgttcgggtgagcgaagatggcggccgagagggaacctcctccgctgggggacgggaagcccaccgactttgaggatctggaggacggagaggacctgttcaccagcactgtctccaccctagaggtgagaccgcgtcgctgcgggtgctgcgctgcgtagctgccgc

SEQ ID NO: 34247 - DNA, 2300 bp, Homo sapien
ccatctataataactgaaatcgtaacaattaccatttatggctgggctaatagaccctcaagaacacacccacacattgatagtttgtatacattttcagcaagggaaaagtaaattatacacagctattagtggaatacagcaaatggatatcatttggaccatttatcagaccttcatggaatcacacatttctgcctaagtccaacaggtaaatgggtgagccatgccattaccaaaatatatattttaggctactaacaggttgtaggatattatggaaagcatattaaaaacttgattcttgggaggctgaggtgggaggcccttgaaactcatgttgtgtcttatcataacgcttcctcatgtgactggttttttgttttgtttttgttttttgagacagggtcttgctctgtcacccaagctggagtgcagtggcgtgatctcggcttactgcagcctccgcctcatgggttcaagcaattctcccactcagcctctcaagtagctgggattacaggggtgagtaaccaccctgtaatctggctaatttttgcatttttagtagagacagggtttcatcatgttggccaggctgatctcaaactcttgacttcaggtgatacacccacctcggcctcccaaagtgctgggatgacaggcatgagccaccgcgcccggccatgtgattgttatagagatgaaatgagacattatgtgataccgaacatagtacctgctgcattccactagttttgtaaagacgagtacttacgtaagttacgtgctgggtactatgccaaccacgagatgacgagtttttaaaagcatgcttgccctaaaacctagtaggtagggtagataaataaatcatacatacagtgtatagtcaccagaggcttaaggtaacctacaagctgggctctgaactcagatagcttatcgtccgcagagctggttagttacctcaggaggtgctggccagaagtgaaagaaaggtgtgtagtcacagggcacagctaaggcacagttttgagagaagggcacatcctggagctgcaaatgtgtgagtgctgggttaggaggacggatcttcagatgagactaatgtagaggggtccacatcaggtaagttcctaaaacgagaagctgccttatccctctgttgcacggctcagggtcccatcataaagtctagagtttgctaagctgaaatgtcctctgcactcaaggacaaacggagttaagtgcaattgtttacagtccaagaaagctcgctggctggttttttcctggatggctgaggtcacttctcagtgacctacaagtcacgtccacgtttctattctgctcggtgcgctaacctaaagaagaaacccaacgtttacttgactaacttgataatcaagcctcccccgccgggacacttaatcttttaggtaccttcagcctactagaccctggtccgaggcacgggttcagtcctttttttttccgtattctatttttccctcacagttaaaaagtacttcacagttaaaggcggcattttagaactgcagcgtgaagccagagcgtttgtcttagtgaccggccaactttcgggctcactttcgagctctgtggtacaccaccattctcagattcgacgtctaactcaggagacgctgaccttcgaatcgaagggaattcggagagtcttggtataagccggctggttcaccgctgttaatgccagccgagagggaaaaaaaaaattcaaccaaccaaaacaaaagttaaaagcgccactctttctattctttgctgtctggcaatctcttaatggtggcgtctagcaaactgcaaatcaagctccagccggagtccgcagggcagggagcgccgggtgcggcccagtccccgcgcccagcgcgttggcgcgcacaccccgtttctgcagactcaggttttctggccccgcctctttcgggcccagctgatctccaccgcccgttaggcccgaaacccaggcgcctggagccctgcgccctctgcttccggcccccggcacgcccagggcgcgggagcggccgggtcagcccgcagacctgagtccggcccgcagcctcggggccccgcgggcgcagcggggcgggaggcggggcggcccggccgtgggcggagcggcggccgcggccgtgagcctgcccccaactcgccctcagccggctggccggcgcggccatggaggtctacatcccgtcctttcgctatgaagagagcgacctggagcggggatacacggtaggcgcggg

SEQ ID NO: 34248 - DNA, 2300 bp, Homo sapien
caaataggccaatgggacagatagggtgcccacaaacacacctatgcatacatgggcacttgctctgtgacagaagaacagtatggagcggtgagttaaaggggagaattttcaataaactgtactgaaataaatgaatattcttatgaaaaaaatgaatttgcttcctactttgtattagccaccaaaatagttatatgcaaaaatatagatgaatttcacaaaaatttaagcaaaaagaaatacatacggtaataccctattcaaataaaattaaaacaaaattaaactatagtacaagaaaagtcaggattgcagttaatttgggcagaaaaaagtgtttgtaactggcagagggtataagaggagtttctagggagctgggaaagatttcatttctttgcctagagggtgagatggtggtagcataaaaagtagttggacacattcattcattcaacaaatagttattgagaaatcactatatatcaggcattgcactagatctgggtcatcaaaggggaataaatataggcctgatccctgccctggccctgcttacttctgatagcagacagacaaaaacaattaatgaacacagataaatatatacaatcacctcacagtcacctcgtagggtaagtgctctgagagatacccttgtcttgctacacaagggggactctttccttattgggggtggggatgaagaggaaagccattaggtctttcactggactgaatcataaaaatagctcagaattgcatttctcctttttctcaccccaaagaagtagtggttactccttttatctctaatggttccaatgtcattttagatctacacttaggtacacctaggaatcccatctgacatttagaaattccatctcttaatccgaggaaaatcttggcttgaaagtaatggcaccagccccttaaaatggcacctatgtgcgaataccactaatttttagttaattttagggctgttactctaaaacaaaaaagttcttttgaaattctaattcaaaaagcaatgagttttaaaataaccctttccatgttataaaatacttatatgctcattgtagaacatctgggaaatcagaaaactgtaaaaaaaatttttttaaaccctcaaaaatccataagtctatcaatagctatcaattctatctatagctactgtaaacgttgtggtacatctctttcaatatttaagtgccttgatatatttattttcacggttgagatcagaatttgtggttttgcaacccgaattttccatttaaaaatataataagaacttacttccccagtcattaatcttcctaaacataattcttaagtttgtaaaaaatccatcctacagatacacctaaaagtcagtttatttactttgtttccccaggaaagaatcctacatgaccatggttctgggcctgtgtaagtgctgccttgtgaacagtgtagataagatcacagaatcatcctccaaataaagtacttaaagccaatgtaaaagtttttcgaaggcaaaggggcactgtgaatccagcattttccagtgttccctagacgtgaatcatctcaaagagaggccattattcgagtgcaacagggctccacgcctccagcgatgtcaaagttctgctaagcgtccaaaacctagcaaaaggttccaatgggccattggaactcggcggccgcggcggaggctgctcccaaggcggcagcaatcacaccgggaccggctgcagagttcccagtcccgcggagcgctagctgccgggcggacgcggaagcccgagagtcctggtcttcccgtccaagtttaatccgcgcctacgcggtaaattcctggaggtgctcccagcctagcccgctgcgcccggctccgcgcctgggcaacccgggctccctcccgtccctggcgccctccgcacccgcctaaggcgcggcggtcgagccctggctgcgccctgtgggcgcgctcctccgaatcccaagttcgggtcgcgagtctgaacttgggaggaacgcgccccgggtccccgcccttcccggactgcccgatccccatcccccgcaaccgggagcgcgcaggcgcagccggccggcagtcccgtcagctgtcccagagcctgtgtcgcgcccgtgccggtagcgcccgtgccggtagcgccgctgccaccgctcaccatgggcccgggtcctcggctgctgctacctctcgtgctttgcgtggggctcggcgcacttgtgttttcttcgggggccgagggcttccgcaagcg

SEQ ID NO: 34249 - DNA, 2300 bp, Homo sapien
tttgaatccgtctccattactcattaatggcgtgaccttaggcaacccatctaaactttccgaacctcagcggtccccatctacaatatgggggttaatgataatgccttctccgcatgtaggtggattaaatggacataaagcgcctacccccgcccggcacgtccaaaactctcattaacaggtcagctaatcttattacgagaggaaccctccctcctccgcttcccagagtgtgggcggcatgaggccacggaagcagctgctgcaactagcatttcaaaatccagagactttctaatggtggcagggggtgaaagggtaggggggaggcagggttgggacaggtagaggtaggttcttggggacttccagtcttggggaccaagcgcttggaactagctgggtttgggcagaaacaagaaggcaaatgacgggaccgccgccggagtccggacttccatccctggagttcactgtctctcccagggaacagaggagtgtcctggtttctcagcaatgaaccaggagagtgtgagaaagagcatttgtttcttctcccgtggcccgacaagccactcttcggcagttctgcgagcagattaattgaaacgggcctggaacttcatcctctcctcccgatggagttgctggaggtctgcggacactgcctggttagcctccgggaccacagcgccgtgggctttccctcgtggtgtctgccttaaacttgggtgctatcaatctatccaacaatgacggatgaccttgtcataacgacgccagtcaaaacattttcggtctaactctcttccaaccaacatcgaagcatcctgaatgagacccggatgaagtctgaacagcacgtttcccaggttcagaaaacttgagtggtgggaagagaaaaagaaacaagcagaaatcaggaaagaatggctattaattgctcagattggcaagtgctaaataagttaggttgtttggaaaaagataaatgccgtttcttctctttacggtatggccagaaccccggcgatgggaaagtacctcctgagtcggtcaatttcacacaccctgcctgtgccctctaccatctactaccgaaaatgccaggaagagctggggggcaagtgcctccttcgtgggtgcgagactgcatcgaagggctgccctggcacaaagtctggggagaggacatggtggaggtggggctgcactcccaccctgcccctctaacaccaggttttgggtagagaaacctatgcgtgacctcctgcggcagccgcaggcagctgaccgcaaacagcctcgcccgtgtcccggagcagttgtgccaccagacgtaacactggatacttgtctccgggccccaagaaggagagggaaagagccctccagaagacaacccgagaaggggtcagcagagcgctgggtggagtgcagactccattgcagccgcctcccagccccacggccaagcttgagtccctccaggaccagctgctctcggtctcaggaccctcggtcctacgcctccctgcaccgacaagcctccctcctgggctgcagacagagggtttcactgcagcgcgcaacccgtcccgctccgcccccaacttttctccccggaggatttatgttagaggttgcgtggcgggcgagtggactctggcacccagaagcacttcaggaaaaactgagccgggcaaaagcgcaaacccggtcctggcggcgcgggcttgctccagcgcggacaccacagcgtgtgcggagatgcattcccgttgccgcatttccactgctttcaagatcagggcactgagctgggacccagaaaagacatatcatgggcagaaagagacaacaggctagcggcagacgtcacgccaaaaaaacaggggatgggagggcggaggagtttgtgcgggaaaggcgctctggcgatgtgggtcgggccgaattagaacttccttcttccctctcccctccccttcttctggcctgcctcccctcccccctccgttctctctctctctctctctctctctctctctctctctctctctctctctcacacacacacacacacacacacacacacacacacacacacacacacacacacacacacacacactcactctattttgtgctgtcgtaaaacccacgtgtccagccgggaagctgccagagcgtggaaccaaggagccaggacgcggcagcggccaagcgcagcagcccacggcggttgagtcgggcgcccaggtccgtccgcactctcgcgccctccgcgggcctcc

SEQ ID NO: 34250 - DNA, 2300 bp, Homo sapien
tattttacagcatgattgcttatttattattcattcaaatactaagtttgctaaggcttcaatatagtaagggaaaacaagttatataacatttatctggaagagtctttttttttgtacttgtcaaaaggtgataatattgaatttttaattagctatcagtgattaacagtatactccactccagagatattcttttacttactgttaagcactctttttaatatgaggtctgaaaagcaagaaaagagaaatattcaagatatcttatgggtgaaaaaaacaaaactatttgaggtttttaaattccaaatcaggattgatccactgacttattttttgaaactgtgtttaaattaatggtaaaatggaaaaagaaaaatgttgaggtatttctttgttttttttgtttaaattcatgcattaattttgttatagtaaaatattaaagtagctcaccaaagagacagaaaaagaagcaataacatatgattatgtaataccgaaagaagaaatgaaaaaggtaatagctattattgagtttttagtaaactttgtgttttatcaccagttttaacagttatgtgtgagaattcattacttcgtcacttgaggtcaatgaggtataacctgcataatattttctttccatgcatcattttacaacttcttattaagtttatgatatttaggagaaaggagaaagtataaagccctattttgatttttccctttcatattagattcacctctgctgtggagaccagtcacttggaagtacagaaatacctttaactggattacttaaaaagggcagtacagaaatcaaccagcacccagtcacagtcgaaggtgcttttacccttgaccctccaaacagagccaaacagaagcttgcacctattcctgtggagctagccccaactgtgggagtgtctgtggctctgcagagagaaggcatagactcccaggcaagtagtggccctccttcattcccctggcttcactagtcccatgcatgattacttacaaaagttgaatttcagaagagttaccttcataaggatatatttattaatcttaattagtgacctttgttatatgatacctcctttctgaaaagtgctgtgacttctgttatggtttataagtgattctacccagagccctcttagcctttgagacagtctttttgtgtagtggaaacccacttatggtctcccccacccccaactccagaaaaggaactccagtgaaagagaacatttttagacctagtttctgggaatctgcattactgatatctttttggttaatgcaacctgagccaaaataaaatccttggttccttagtgctttgtagtcctcatactctctttagtcagttttcatgacacagatgatcatttatttggccgtgtattttttttattgtatctattcccagaaatcaactttatcttgttctttcaaaaagctgatctttatgcaggttgtgaattaaagatagaagaaccgaaatgagtgtttaaaagatacatatacatatatttttagtggggagtggaataaaggagagaaggaaagtcatactagacatgtgttttttctctttaggagtatagttctccattgtactgccttggtaggaataaccattcccggggacacctatgcctgacttcttttctcaaatatcccttcttacccattaggatgcattttggtattcagctctggatatcatatttcctctgttcatcttcctttttctggtcctagatgctataaggaaatttgcaaattacgaagaaaaatagactaggaatatccaaactgggaaaggaagcttatatttttaaaaaacaatgccaagttttttgcttaattatgaaggaaagttctttgcaaattatactttatttaaaaattgtttttagtctttaattgaattaaagacccagaatgaacatgagccagagcattcaaagaagaaagttttaacccccataaaggagaagacacttactgggccaaaatcaccaacagtgtcccctgttccatctcacaaccagtcacctccaacaaaagatgatgcaacagaaagtgaagtggaaagtttacagtatgataaggacaccaaaccaaatccaaaaggtaaggttttttgttgtttgtttatagatctttgaggtattgcattttgcagccatctaaaaaatgactatgagaactttcatgagttataagtaaaaattgtgggtttgttaagaaccaataaggctgggcacggtggctca

SEQ ID NO: 34251 - DNA, 2300 bp, Homo sapien
gattacaattcaaaatgagattttggtgggggcacaaagcctaaccatatacattaaaaaagacaagagacataccaaccattgtattttggaacttgtttggatcctgatttgaaaaaaccgactgcaaacaaattattagacaatcagagaaatttgaacagtatatatttaatgggattaagaaatttttgttaattattaagtgtaataatgggattgtggttaaatacttaatattttaagattctttaagaagtcgttatctttttttttttttttttttttgagactgagtctttctctgtggcccaggctggagcgctgtggcatgataccggctcactgcaacctctgcctcatgatttcaagcgattctcgtgcctcagccttctcgtgcttcagcctcccaagtagctgggatttctggcttgcgctaccacgtctggctaatttttgtatttttagtagagacggagttctgctatgttggccaggttggtctcgaactcctgactcaagtgatccgcccacctcagcctcccaaagtgctgggattacagatgtgagccactaccacacctggccaaaaagtcttcatcttttagaagtacgtatccaaaaagatgaattgatgtgatgttggggatttctttaaaaataacacaacagatgaagatgattggtcttaagttgataatcgttgaagctggggtctgggtaactgggggttcattatatcattctgctttctttaaagtatgtttgacatcttccacaaaaataatgcattgttcaatgatgaatccaaagtagatcattactttgattttacattgaatagtgcttcattttaagaatgcctgtgataggacctgaaagggccttagaagtaattagtccaatctctacatattcctccttttcttttgggcagaaagcaaagaaggaagaataaagaagaggaagaagaaaacaatagtgatattatattatttgctctcaaaataacttctaaatttccaaaacaaggaagcaatagaagaaaaagaaaacagcgagatattatatttgctctcaaaacaacttctcaatttacaaaaccagaaagtaataggagaagccgcacttatgtccactacctagtgctatctctgcagctttattttattatgatttacttttgttttccgaagcagaatttttcccaaacttaatagtgtccacgatcgctccaaccaattcggttatttaagtttcaagctagataacctccaaaagaactttgcctttgacttgaatacatgcttcttgcaatttgagtagtgtttaggaggccgttccctttacaagtcttgaaccgtttcttaaatctgaatttgggagacgttaaggggaaagggtcggcagacagcacctcaatgccttgtttatttttggttttgagtttgctaataactttgtcatcgggggtggaagaacctttatatttcattgcccacgtgacagtgtttttgttttaggggtaatttctaagggacaggaaattctcggggagtttacgtcagctttaacaagtacagtaattaccgtattgaagctacttgttttcaaaggtcggaaatttgaggtgccgcgtgagcacgatttagggactttagagtttagatttaagtcattatttttttgtgatttaattttttaagcagtgttgacactgggtacgtcaactaagctaggtttttttgtttttttaatccccactaatataactctcaggttgtggctgaagcataaagcaggtaatacgctacactcacgctccttaaaggctacgcagcttcaggaagcgtttacagcagtagtgcgcttgcgcagctggtcccacaccaagtcgcccgcctctcctcgtccggctagcagagggcgctgtgaggtaatgaaggcgtcctccttagggctctggaacagagcgtaaaagggcgggaggcgaagctcgctgacgggcgttctagccttgactgctctgtctctatcacccgttgtcctccaacctcccctgggcactgggcctgcgggcctggttgctaggcggaagctgggcgcggcggcggccgctgcggccgcccgggcgtttgaaaagcggctacgcaggcggcaaaaggtcctcgggtggcgggcttgtctctgcttgcagactggcagggctgcagcgtggctttttccttgagtcggggcacagttaggatctgggctggcggcccgaggcagaggagccgggcgcgctgcagcagacggcg

SEQ ID NO: 34252 - DNA, 2300 bp, Homo sapien
agttcagcatggctagggaggcctcaggaaacttatggtcatggcagaaggcaaaggggaagcaaggcaccttcctcacaaggcagcaagaaggagaagagtgagtgagtaaagggggaagagcgcttaataaaaccgtcagatctcctgagaactcactgactatcaggagaatagcatggaggaaaccacccccatgattcaattacctccatctggtcccttccttgacacttgggggttgtggggattacaattcaaaatgagattttggtgggggcacaaagcctaaccatatacattaaaaaagacaagagacataccaaccattgtattttggaacttgtttggatcctgatttgaaaaaaccgactgcaaacaaattattagacaatcagagaaatttgaacagtatatatttaatgggattaagaaatttttgttaattattaagtgtaataatgggattgtggttaaatacttaatattttaagattctttaagaagtcgttatctttttttttttttttttttttgagactgagtctttctctgtggcccaggctggagcgctgtggcatgataccggctcactgcaacctctgcctcatgatttcaagcgattctcgtgcctcagccttctcgtgcttcagcctcccaagtagctgggatttctggcttgcgctaccacgtctggctaatttttgtatttttagtagagacggagttctgctatgttggccaggttggtctcgaactcctgactcaagtgatccgcccacctcagcctcccaaagtgctgggattacagatgtgagccactaccacacctggccaaaaagtcttcatcttttagaagtacgtatccaaaaagatgaattgatgtgatgttggggatttctttaaaaataacacaacagatgaagatgattggtcttaagttgataatcgttgaagctggggtctgggtaactgggggttcattatatcattctgctttctttaaagtatgtttgacatcttccacaaaaataatgcattgttcaatgatgaatccaaagtagatcattactttgattttacattgaatagtgcttcattttaagaatgcctgtgataggacctgaaagggccttagaagtaattagtccaatctctacatattcctccttttcttttgggcagaaagcaaagaaggaagaataaagaagaggaagaagaaaacaatagtgatattatattatttgctctcaaaataacttctaaatttccaaaacaaggaagcaatagaagaaaaagaaaacagcgagatattatatttgctctcaaaacaacttctcaatttacaaaaccagaaagtaataggagaagccgcacttatgtccactacctagtgctatctctgcagctttattttattatgatttacttttgttttccgaagcagaatttttcccaaacttaatagtgtccacgatcgctccaaccaattcggttatttaagtttcaagctagataacctccaaaagaactttgcctttgacttgaatacatgcttcttgcaatttgagtagtgtttaggaggccgttccctttacaagtcttgaaccgtttcttaaatctgaatttgggagacgttaaggggaaagggtcggcagacagcacctcaatgccttgtttatttttggttttgagtttgctaataactttgtcatcgggggtggaagaacctttatatttcattgcccacgtgacagtgtttttgttttaggggtaatttctaagggacaggaaattctcggggagtttacgtcagctttaacaagtacagtaattaccgtattgaagctacttgttttcaaaggtcggaaatttgaggtgccgcgtgagcacgatttagggactttagagtttagatttaagtcattatttttttgtgatttaattttttaagcagtgttgacactgggtacgtcaactaagctaggtttttttgtttttttaatccccactaatataactctcaggttgtggctgaagcataaagcaggtaatacgctacactcacgctccttaaaggctacgcagcttcaggaagcgtttacagcagtagtgcgcttgcgcagctggtcccacaccaagtcgcccgcctctcctcgtccggctagcagagggcgctgtgaggtaatgaaggcgtcctccttagggctctggaacagagcgtaaaagggcgggaggcgaagctcgctgacgggcgttctagccttgactgctctgtctctatcacccgttgtcctcca

SEQ ID NO: 34253 - DNA, 2300 bp, Homo sapien
gagcttataggccaaattttaaccaaaagtcttccctgcagtgttaaaaatgtaaacatttattcccatacgtttctaatataatttaataaatactagtcaagtgaaacagtgggagtggagaaggaacaaagaaatctgtaactggttgtgagcaattcgttgtaagtaccaccgtacttagaccagcccatttttaatttaaaaatgtgttttgatcatatatttatacacttgactttctcaaccatttatgaaaacttagaagagtgggtgttctttatcaaaactgagttttttgaggtagagagaataaaatggtttgttgggagttgaggacaatatttagagtttcctgtgttgcagacacttctcttctattgagtgagatgttgttaactttgtttcttgtctattagtgggtcctgggagagatcagaaattctgggatatgtcatctgccctaggcaagtcattcacaattctgagcatgcatacatcttagctgcttttgagtctcctacagaatgatggtgtggtaagcatggagcaaagctcttatcactacccttctaaggctggtgatgctagtcacttcttaacttccagtttggggaagaagtgagaagagaggtttaaaaaaaaggcactgttgtattacaaaccaaaatcaaaaacagatttctatactaactacccttccaaaggtaacacattagctataccgttaatctagcaaagcagggaggaaaatgaaggagtgcatttgtttcattagtcttttcgttttgagaggtagacaggagagatagagatacacaagactcaagtttcttgatacagtaagtatattaagaatataaacgggtttgataaaatgaacatttaaaaaacatggcaccaggctgattcttcttcctgcacaccttaatgcctaacttttgaaaggacttgagacataagaatcacaattttaaaaaattatagtttccatgccttcatggtggatcaatttccatagaagtctaccaaaatgacttatctccatcccagggaagcaactgcaagagggaaaatgaaaggaatgcagtctttctatgtaggcagagtggacttaagtgtgagtcagaaacaccgatttcagtttgtgcgctgcaacttgataacttgggtgatgtttggcttctcagaactttgggaggtgaatttgaaaaacaggtaatgccacactatatagttcagaggattacctcagcttacaaacagcaaatgagacgcaaatgtgagccataattcacatttctaagcagttggagccctgatatggcactggggttacaaacaagcggggaaaaatgtcaacccagtgatgtcatactcctaggccgggccctaagatttttttggaacctggcgggctgagcacaacagggaaagcctcagcaccctgacttggcacaatggtacccttaaggctctttgctcactcagttcttagtagctctcctaaagcatggtggtgttctcttccagttctctgcgtagactttgctatgcttctccgcccactgcttcatccagagaaacactcgtatccacagcctctccccactttccctcacgcacggctctagaaagacggggatagggcgcggcttaggctttatacaccttgccagccaatgaccgcgccgtctcctttccggtcggcgatccgaccaatccaagaaggttggtgcaatcttcggctctactcggctgttttcgctgatgcgggcagcttgggggccgccgccgctaaacagacgctttcctttttaattttttttccatgtgttcacttccgggtccggcgtcgatccggatgcccgaggcagaaggatgtttgacctccggataagcgaggcgctgctgtgcattcattccgggctgcatcggtggcgacagcagaggctcgggcggcgactctccggccagcggcggcggtaggaggcaccagcggcagtgcagggaccgaatccgagcagcgctgcgttacctctctctctcgctccttcccccctacctcgctcgctcgctcgctcgctccctgcgtggctcgctttcctcctccggccgccggcgggtgtgatgtgccgccgccgctgcccccgccggcgctgacggactgggggcgccgcccgcgcccgggaccgacccctctgctcgcggccgcgcctttgaggtaaagccccctgcgcgtaggtgctccgctgccagccccggcccggcggctgcctcggcgcggccgcggcgccctc

SEQ ID NO: 34254 - DNA, 2300 bp, Homo sapien
atttttgatactgtgtactacaaattccatttacttcaacagctgcaaattctgatctgtgatcactgtgtgttgcctgagcctcacctctttgtgctgtggtcaggaaattgctcctagccagagagcttggatgaaggtgcgactcaccttttgtgttttttctaagggatcacagtctgtgctgccttttatttgatgcttaaaaacaggtgcttcatatgttttgtccagctttctacttgtttacaacaggcagagatgttcagtatagttactctgtcatggctagaagcagagtaaacaggaactcagtttcatctgcaaataagaatatggcaaataaaacaagaaacttcataaatagattgggtgttaggactaatggtggaatcctaattagggaaaaggagtcaggctggtgggagcaggggagcataaaaagaaaaaacagataaactgtaagtctgcctttcttcacagtccaggacacatagccctcctgtgcaaaaatctcacagtcctcctgtgcaaaaaactcacagtcttcctatacgcaacttatcaccagaccctctgctaatagaaaagtgcaggttagctcactgcaaccttggcgttaccagtactgcacatagccctctccagcacaagaacgatcctataaaatccccaccaagccttagtctcttttcagtcagctcctctcttgctcatctgcccattgctttcttgcaaagtgttttcctactttttctaataagcctgcctttctttaccaactgtcttggtaaattcccttattgcctacaccaccggccccagttagtcactacttgtaacagtaattgtatatttgggggttgctgaaaattaatcagaaaatactgtccgtttcaaccctttttatggttgcattatataattagaaaatttttgtaataggaataagtatttgatatcaatccttgtttcttcattagtgactatattttgaatttataacttctttaatagcaacgaatgatagcccactcaatttgttcaaacaaaagtagggaaatcctgtaaaggtgcagaattaccacagaattaaggtacatttgatcactgcaattcccagagactatgaatggggcagactcttccaaaagccttgaaaaatattttgagctttaatgtttttatctgcatgttagaaatttaatacctaatttctgcatctgataaggttgatgcctgtcaacatttcacagtcttgtgaaattacatttatgtttttaaggcccacgttaaatgttatataagaattaattgttttctttgaggggtgggaagaatgttcttgatattgtcagttctatgctccaatcccatgtgtaattataaggtaatacttgaataaatgaaaatcatatgataatatatatttaaaaaagactttgaaaattattaagtatatgaacatggggaatatatttttattaaggtattttatttttataattcattctctttctacttttaaattgaaaatcttatgttgacttactggaattttttgagtactttttgtctaattgaggtaattttaagttgggaggtttatattagtgaatgtatgttgatttatgaaacagtataattttgttcctttaatttttaagaagtaattgaatccctgatatctttgtttcgtatctttgttattaaggtatataaataaagggtagtggttaatttaaaagtatactgtggtttgatttcaatgggcatcaatagatagcagtaattcttgcctaagcttttgttatgttatctaatttcccagacatatattttaaaattcttagttgactaatttccttttcttaatattctagctctctatcaatatcagctcacatcattgaaaagataattttgaagacatgttttgctgaaaagacactaagaaaaattttacgaatgggatgaacatgctccagttaattgactacctactgcaatttgaatgttaacattacccatctggtacagttacctagtgatgtacctattttcacaataccctgtttcagtgtgcttgtcttgattaaagaattcaaagtggagtaccgcaaacttgatatggaaaataaaaagaaagacaaggacaaatcagatgatagaatggcacgacctagtggtcgatcgggacacaacactcgaggaactgggtcttcatcgtctggagttttaatggttggacctaactttagagttggaaaaaaaattggatgtggcaattttggagaatt

SEQ ID NO: 34255 - DNA, 2300 bp, Homo sapien
tagaaaaagggagggatggtgggaagctttggtgaaattacttgttctgatttctgcatgccttttaagttgctcttttcccatggaaatcatgggagtaatgtgatcaggtttaacacttttataacctcattcgagggttcttcacagcccttcactgctgcgacttcactaaatgggagaattgagaaagagaaacatgttttaagccataggattgatatgagggaatcttcaccttgtagttcattagttgagcatgtattatttgtcccatctttgtcatctcatagtaggtgggtggtggcaccatctttacaacttgctagaataccacagattgcatggctttaaacaacaggaatttattttctcacagttctggaggctggaagttcaagatcagggtgccagtacagccagcgtctgctcaggcctctcttcctggcttgtgtgcagctgctgtcttgctgtgcgctcatatgacctcttctttgtgcatgagctggtgggtggggaaggggcaggggggagccctcgtgtgctttcttataaggacactaatcatgccctattagggtcccacccatatgacctgatttaaccttaattacctccttataagccccatctccaaatctaatcacattgtggattagagcttcaacatattttgaggagacataatttagtctattgcacttgccaagttgcctcttatgctactgtgtgaatagaaagtaagataatatgtttgaaggtgtttccaaaactgggaagtgatatacaaatgtgaaggggtcatttttatttattcaggtctttttagttgatgtcatctagtagtgttaaaagagagctttcctatttcttaaacaatttgtattgagtgtaataagaacttggaagagaaagaggttttatttctagtctaacacattatatctatatataaataaagtatatatgagaagaaaacaattgtctcttttaagataatattattgttattgtactgtcttaagttacctctgggaaaagaaaatatatccaaataaaagacctagaaggagacagtaatcttccctaggtttgcatttgtttactctatttttccccaggactgtcttctatagaatttaaaagaattctctgttaggcaacatcatgccatttggagctattacagtctctgactgctacctttgtcttgcagggtgaaagttaagagcatttctaagtttgatttactgattctgtgtatcttatgggatgcattgtgttcagtcactggggaaaatgttaaagtgataacaattattatgaaagtattgtattctaggcaaatagcatgccgcttctgtaattcactgtgacttttgattcctgttgttacctggtatctgttatttctcctgagcttcctattcagggaatgcatgcaaaccatttagcaccatgcagagccggagagatggaatgctgtatctccttcgaatagctattaagaaaactgcagagtattcaagaaaggatagatagcagatagaccaaatggtttgtactgtgtccttgctgcatgaaacagttcatgtgtgtgtttaggagaggacaccatgctgctactaggtctgcggcccttctccactgggcctgtatctactcttatccttctaaagatcacagacactctacattttttccccattaggcttgacctctgctgcccttgttgcctctcagcaggtggctgcccaggcatctgcatctggaatgtttcctggacaaagaaggtaaatatcctctacatttttaattagttgtagatagaaatatcttaatggttgggaggaagcaagtacaggatttttagaccaaaaacttaactccttgggttttatatcattgtaatgaatgtgtttattatgccaatataagttgcttcacatgcaacttaaattccatgaacctcattctgtaagggttacatagattagtaattaactgattagttttttagacagttgaaattttcttgggttatccttacggcatttctaaaataattcaccatgactccctttgttttattatgtttaaagataaagtcgcaaatggagacatttattttcataatgctaaaggtaatgtttgttctttgatattttaaattattccctaagttttatgaaggaaaatgatttaaaggaattaaattattaatattataaaattaatatttttcacaatgtatatcattactttatgtttattcactttctctggaattgaattccaca

SEQ ID NO: 34256 - DNA, 2300 bp, Homo sapien
gggagagagcagtctgagacttgtattatacatgtctgggcttgatctggttagacttctgacacaggaaagaaacccatattagttttttcctctgctcttgaaaaatatcttaagattctcaggagttactatgtagctctaaaatgtacattatcagtattttcttgtcatggtgtatagtaaaaggaactgtggatgggtgctttgcagatttgtgtttcatgccactaacttgctctgtgactctgatgaggtccattaatttctttttttaaattttttaaattttttgagacggaatctctctctgtcacccaggctggagtgcagtggtgcaatcttggctctctgcaacctccgcctccgttcaagcgattctcctgcgtcagcctcctgagtagctgggactacaggcacgtgccaccatgcccggctaattttttgtatttttagtagagatggggtttcaccgtgttagcgagatggtctcgatctcctgacctcatgatccgcccaccctggcctcccaaagtgctgggattacaggcgtgagccaccgcgcctggccaggatcccttaatttcttagtccaaggcgagggctttccacaatggggctgctgaattctcttctaactctgagattctgagtcttatctctgaaatatttattttccattttcaaatttctactagcatcttctttgaagataataaaaactgggtccctgaattcacatttcccattaatctttttaatagaatttggggcccaaatttctttcacatggggtcagagatgcctagatttcagtcttactccctatattaagtaccccaaaactcagagctcagtgctgaatgtttgtgaggagggtgaggaggtttgggtggcaggcctcaacagctgtcccagagccccatgggtcagtcagcttgagaacacctgaaaattggtcaccacgaaaccacaaatgtactagcaccttctgtcatggttcagacatcctgacccactgcaaccccgtgagcattaatcctggttatttcccagcactgcacatccccactcccaccctcacccccatgcttagataatccctggtgcattagagcaagaaccaccagcccccaccaccgccacccacacacacacatttacttaggcacaactttgcatgttctctgagaacctgaatccccagtgggtttatatcatgaatgggatggggatcacaaaggccatttaggattctcagtttccccacttacagaggcataaatcaggctgtcaattcacagggctgcagaagatttatataattttgggggtttatagatagatggctttgttttccaatagagaagccataacgtgtgctattaatttgaaattttgttttgattaagatgttaacacgtaatgagaagtgagccaatatattaagcctcagctgcagtagatgaggaaaatgtattaggaaaccaagagtttttcctcctaagtgatgttaatagctatagcaattacttaaatttactattattagcttgagttggagtttttaacattcttttcacctgtgtgagatattaaaaggcaaacgaagacagaattaaatatgtctgaggatgttatttagtgttgagaaatgacattaagggcccagctctgaatttcagcagacctgagtttgaagcccagctccacgactgggcagcagcatgaccttgatgttgcctgaactttaaacactttggttttatcttctgtacaggggatcagtaataatgcctacctgggacattattactttgtaagagaaggaggtaaagcaattagcacagtgtctagcacagaaataaatgtcaacttagcattaaaattaagagtgctagtgctgtcatgattattaacaagttttctttaaaattgaaattttaaaacaaatctgttgggttttttttctttaaaacaaaaaaatcaggacccagattcaagaacatggcatcattatgtataccagcccaaatatctggatcagcaaaagtcagaagaacttgatagagagaagaaattaaaagaggatagtccgaggaaaactcctaataaagagagtggtgtgcccagccttcctgtatcgttaacaagcattaaagaggagcccaaagaggccaagcatcctgattctcaatcaatggaggagagcaagctgaaaaatgatgatcgaaagactcctgtgaactggaaggactctcggggaacaagagtggctgtctcctcacccatgagtcagc

SEQ ID NO: 34257 - DNA, 2300 bp, Homo sapien
agggaaaaactcccgaaaagggtcgccttaaaaaaaaaaaaaaagaaaacaaaaaccttattttgactctaattatcgaattaccacatgactggctgacctgagcgacagaggattccactcccctcgggagctatactaggaactcagttcctttttcttaaaacaacataagacaggaaaacatcacatcctttaggtttcgaagactgagcccattttaaacgccgttattttccccaccccaccgccccaagccccccgccccccgccccgagcgaatgctgttataactggtttatcagctcactgaatcatctgctgtctcctcctccacacctttctttttctcctcttgcccagtttctcatcccaccctttcttctcctcctcctccctctactccccccctccttttctcttaagttagttcaagaaatcaaatctgtcaggacgggcggaaaaatgccacttcccgactaacaggcggaatccagcccagattttcagtcctttcttcttattctttcttccctttcactaatttatcccgatgttagcacattctgtctcgttactagcggacgcctgtaggtttgctacatgggatcattactgatcacggtgactctgaagtctggaactgaaggcggaatgagaagttgggaaaacttttttctctaaactctctgttttttaaaaaactattattctcgatgcttgttaagaggaaaaaaaaacctttggtgcttctgttgtgaatgtgaaacattattttccagctgtacagtgacacattttttttaaggagaaaaggactgattcgtttgccaaaaggggggtggggaggtggaataatgttatcgagtgattattctggctgagatgtgttatttggtttcttccttcttgatcatttggtgtttaagtaaaatgaggcacaggcttgtttgccgagtggagtgggaaaggcattttgatttgctggcctaattaaaaaatgataaaggattaaaaggtaagcaatgtctgtgtgtgtgtatgtgtgtgtgtatgtatatttatttatttttttcttgacaatcaactgttaaaaaggggctgatccctttaaaaaccgttttaactgctctttgtcaaacacactcatttgcggtcattgaggccaccttggcgcagatcacttaaagtgtatgtcttaatcagttttctgtacagtcagtagcaccgtatttaagagagtgagcaattctctgacctaggaatatggtagaattgtttaaatgtatttttttctcaaaaggcaggtatttaactttttatataacactgtcttttctagagagaaatgctcttaaaagacatgcatatttcaaaaaagaaattgtagaagctgtttgggaaaagaggataggagggaggtatgtgtgtgtgttgggggcagttattggttgttttttctgttccttactaggaacaaaaaacagattgcccagacaatttgtaaaaagaagtactgaaacctaaattagaaataaggaaaatttagcaacattctattctgaaaactagcctcagaacttccagggtctggtcttctaaattgcaagatctaggacatgtttagggatgtttaaagctgtgttcttccttcttgtctgagtgttcaggctgtgtttctggggttgagatatcacatgtgccagactgaaatcctaaactttaaaaaagaacacaaaaacctttctggacttgaatcagatccttaagataatttaatgcttttaaaaaggtgattatccttgtgttgttgataaagggattttctttttagctaccgtaagatgcttactgtcataggtttatttttcgggtttggttattttcctttaaacctgatattggactgtgaggacaatacatgagccaccttactctccatccttccctgtcccctttactgattccccaatactaatcgttttttattctggtaacacccagacaagaaatattcgacttttcccccccccttcacaggaaaaggtggacctggactgagggtgtaaaatccctggacacattcgtggggcaggaaaaagaagaggaagattagaagattttttttttctttgagagaaagcccagcggagataaacgaatgtcccctcatctccaaagaaaagttcatcggatttttattctagagagctcatcttcaggatgtcagtgaacatttctactgcaggaaaaggtgtggatccaaatacagttgatacttatgacagtggcgatgattg

SEQ ID NO: 34258 - DNA, 2300 bp, Homo sapien
tgcatttagaacaacaacccaagaagggtgaattttattcagtggagggtgaagcatttgtaacttcacacaaattaagcttgactgggcactcggggtaacttagaggaaattagcttttgggctctaacccaaaggagaataaaagtgacacagttgcatatcctggtctgcagtgtcaattctctagctcaccttactccctccctcttctgtcctagctgggcagacccccctcccaaagcgatccaggaaaatgggggcaagggcagaacaagccgatttctgtctcctgtcagatcccagtgcccgataatttaatattaaacaagggaatagtcactcattacatgtaatggttataattaccattcgccatctccttaaaaaagcaagcaacaaaaataccattaagagaaaaaataaaagccccacccaacccaaacaaacccacaaatagtaacaatggtgtatttattacaggaccaggctggggagcaagcaaaaggtttttctttgtttaatacatgaagtgggggtccctaaaatccaagtagctcggagatacccttctccctcccccaggcgtccccgtccctggccccttgggaaagccgacaaattggagataagttgaggaaaggtttataaagtgtttctttaaaacatctgctttgctcttgtgctcattacatttcgctccttccgaacttcggagatcctagatctccgagaaatgtttcacattcataacttgtagcttcgcccactgcgggggggcggggggaggaggttgggggagtgtgtgcagggggaggggagagactttcagcttttttttttttaaagaccagatcagtattttcttgatacgcttgtcaccatttttgttctcacgacaaccaattgagcccttgatcctcacgtgatgtgaaaggcttgcactgtaacaaaatcgctccttttagatggttggttgttactaactcgcccatccccctctcccagccccgacatttccagcaaagcgactctccacttccaatccatcaacaattcattactgcttttagcttccaaacgccagctaattaaaaatactaagccaagctccggggccatctgactaaacacaggaggggctgggcgaagggagaggagagaaaaaataaataaaagggagacacaccgtttgctgcgagtataagagggaaaaactcccgaaaagggtcgccttaaaaaaaaaaaaaaagaaaacaaaaaccttattttgactctaattatcgaattaccacatgactggctgacctgagcgacagaggattccactcccctcgggagctatactaggaactcagttcctttttcttaaaacaacataagacaggaaaacatcacatcctttaggtttcgaagactgagcccattttaaacgccgttattttccccaccccaccgccccaagccccccgccccccgccccgagcgaatgctgttataactggtttatcagctcactgaatcatctgctgtctcctcctccacacctttctttttctcctcttgcccagtttctcatcccaccctttcttctcctcctcctccctctactccccccctccttttctcttaagttagttcaagaaatcaaatctgtcaggacgggcggaaaaatgccacttcccgactaacaggcggaatccagcccagattttcagtcctttcttcttattctttcttccctttcactaatttatcccgatgttagcacattctgtctcgttactagcggacgcctgtaggtttgctacatgggatcattactgatcacggtgactctgaagtctggaactgaaggcggaatgagaagttgggaaaacttttttctctaaactctctgttttttaaaaaactattattctcgatgcttgttaagaggaaaaaaaaacctttggtgcttctgttgtgaatgtgaaacattattttccagctgtacagtgacacattttttttaaggagaaaaggactgattcgtttgccaaaaggggggtggggaggtggaataatgttatcgagtgattattctggctgagatgtgttatttggtttcttccttcttgatcatttggtgtttaagtaaaatgaggcacaggcttgtttgccgagtggagtgggaaaggcattttgatttgctggcctaattaaaaaatgataaaggattaaaaggtaagcaatgtctgtgtgtgtgtatgtgtgtgtgtatgtatatttatttatttttttcttgacaatcaactgtt

SEQ ID NO: 34259 - DNA, 2300 bp, Homo sapien
cttacgtatattttgttagatttctcacaaagtatttcatattttgatgctactgtaaaaggcactgttttatttaatttgtttctaatttttcattgctagtatattgaaaataattgatttttatatattgactttgtccccagtgatcttttgaaacttacccaccagttctaggagctgttttatacattccttaggatttttaatgcagactgtcatgttatttgtgaatggaggctgttgtatttcttcctttccaatccagatgccttttatttctttttcttacttattgcagtagctagtacctgcattgaacagaagtgaaaacattggccttttttgccctagtactaatcttaaggggaaagcattcagtattttgcccttaagtataatgttagctgcatgtttttaaaatcaatgtatttttagttgaagaagttttcttcaattcatatttgactgagaaaatattttttaaatatcattaacatattcaattttgtcaaatgctttttatgcctctgttgagattatatagtttttttttagcctgttgatatagtaaaatatattgattattttaaaacattgaacctacttggcaatgtatgggatacattccactcggtcctgatatattattttttcctatgtttccaggtttgatttgccggttgttttgttgagaaatcaattaaaaataattgttcatatacaatgtctggtatttaataaaaataactatactcatagaaataattcagcttgaatgaaaactaagaagaattacagacaatgaaaatgcactcaaaaggactcttaaagcattaacagatacataattttaaaatctacacataatatcttcaaaataaatgaaagacaggatttgaaattttggcagagagctgaagggttgtgaatctgtaccagttctcttagctctttacccaatagcttgtttgtgctagcctgctaacattcctctaacacaggcgaggtgagcctgatttatatgaagatgaggctagccaagactattccaaggcaatgcgggaaagagacaacagcagagcttaaaactttgcctctctgacaaatcccctcctatctcctgacttctactcccacgtactctataacatcctgccactatacacataatcaacacaaatagatattagtgtccctaaaagactctgaagattttaagatttggtgttatctttcagtttctgttttatttcccttcagaattggtcttggcagaggcaaaacaagatgagaagtgtaccttttgtagttcctgcattttctgcacatatgggcaggaatactttttgtgctttcactaaaagacaatgtgagatatggatgttttattatcacaatgattcctcctcttttctctttattattatctttcatacttgcaaattgtttgctgagaactttttttttttattttatgaaattcgggttgaatatgcctgattgtaaaaactctgctatttgaatgtttgttcaacttttatttttacatccttgaaaatgggaaaaaaaatctaacatttactgatgaagaagtgtgctgtgtttataaaattccaggaaactgagattgaatacagcacagtaaactaaaaacagaaaaaatagaattgaagaagaaacagtaagaaaaagagcatgcataatgatcaaataattcactaagtaatctagataatcaataatctaataaccagataattagttgtggtgttaatagcagttttaatatcgtgtatactatcagatatagcatttgtaatataccatgtgtaatacactacttatgtatagatgttccactgctactatcagacaaaagggaatttaggctctgtgacagtcaggaagttatgccttccagattttccttcaaaagaacttgctgccaggggaggaggtgagataattgactgctagcctacagctgttgcatcttctgatccctcatgggattcatgccaaggccattcattctgaactgcacccagctaatgcctgagcatggggaaggtattagggcaagactatttctgcccagtatgaaactcctctaatggatgccctggagaacatcacatgaagccatttcatcgataacatcatgctgatcaggtaggatgagcacaaagtggctggtgcgcaggaggccaacttcagaaaatgatattctagttctactgctgtggctctgaatttctcaggtctctttataattctatttctacttcatactttga

SEQ ID NO: 34260 - DNA, 2300 bp, Homo sapien
aacattaaatataaataaactgaactctccaatcaaaatatatagagtaactgaatggctaaaaaaaataagaaccaagtatcttctgcctataagaaatgtacttcacctataaagatgtacacagactgaagataaaggcatagaaaaagttattccaagcaaattgaaacaaaaaaaggtcgtgagtagctatacttacaccagacaaaatatatttcaaggcaaaaattataatgaccttatatctttttaaataatgataaagggaacaattcagcaataggatataataattgtcaatatatatgcacccaacgcttgagcacctaaatatataaagcaaatgttattagagctaaagagagagatagacgccaatacaataatagctggagatagtcaacaccctactttcagcattggatagatgctgttacatgtctgactgaacagtacagtcggaaaatcaaacaccaagcttaatctgcactctaggccaaatggacctcatagatatttatagaacatttcatccaagagctgccaaaataaaacatttttctcagcacatggattattcgcagaggtagaccatatattaggccatgaaagaagacttaaaaatttcaaaaatgttgaaatcatatcaagtctcttttctgtacacaatggaaaaaaataacaatcactaaaaagagaaactttggaaactatataaatgcatggatattaaacaatatgttcctgaatgaccagtgggtcaatgaagaaattaagaaggaaattaaaaatttcttgaaagaaatgaaaatggaaatacaacataccaaaacatatgagatatgagacaagcagtcctaacagccaaatttatagcaataagtgcacacattaaaaaagtagaaaaacttcaaataaacaagttactgatacatcttaaagaactagaaaagcagacagacataaaccaaaattagtaggaaaaaagaaataatatcagagcagaaataaataaaattaaaaataaaaatataaaaaatcagtgaacaaaatgttggttttttaaaaaagataaagtcaacaaacctttagccagactaagaacaaaagagagaagacccaaataaataaaatcagaaatggaaaaagaaacattacaactgatactacagaaaatcaaaggatcattagaaactattatgagaaactatatgccaataaatttgaacatctagaagaaatgaataaatttctagacacatacaaactaccaagattgaaacgaaaagaaattcaaaacccaaatgggccaattaaaaataatgagctccaagtcataataaaaagtcccctatcaaaagaaagctatggacctgctggcttcactgctgagtttcaaaacatttaaagaagaattaaaaccaatcctactcaaactattctgaaaaatagaggataaggcaatatttccaaactcattcatccaggccagtattacccagatatcaaaaccagacaaagaaacactgaaatcagaaagctacaggccaatacctctaatgaacattgatgcaaaaatcctcaacaaaatattacctgactgaattcaacaatgcattaaaaagattatgactcatgaccaagtgggatttgtctcagagacagaaggatggttcaacatatgcagatcaattaatgtgatacatcatatccacagaatgaaggacaaaaaatgatatttcaattgatgctgaaaaaggcatttgataacattcaatatcacttcatgataaaaattctaaaaatcctgattatagaagaaacatacctcaatgcaataaaagctacatgtgacagacccatagctagtatcatattaaatggagaaaaatggaaagcctttcctctaagacaagcttgtccaacccacagcctctgggcctcatgtgggccaggacaactttgaatatggcccaatacaaatctttaaactttcttaaaacattatgatacttttttctgatttttttttttagctcatcagctatttgttagtgtattttatgtgtggcccaagacaattctttttcttccagtgtggcccaggaaagccaaaagattggacacccctgtggtctaagacctggaacaagacaaggatgcccactttcaccactgttattcaacaaagtaatagaagtccagcaatcagacaagagaaaaaagggcattagaaaggaagaagttaaattatccttctttgcaaatgatatgatcttatatttggaaaaacttaa

SEQ ID NO: 34261 - DNA, 2300 bp, Homo sapien
ctgtaatgagaagttggagtgcacctgagatctgagagtcctcatccagagtttgggaaattgacaacctcatctctgttccaaacctatccctattctgaggagggtggggatctagaggtgaaggcatcaggaatgtccccaggaagaggcaactatgggcaccaaggagacagccttcaagctttcaggtcacccagagttttccccatcccacctagcacagctcctatagcaaagcagtcagtggtcaggaaagaaaaagagagagaggcctgactaagccaactcttctggaatttatgtaagctttttcttttacttatttttcaaatgtcacaaacatcaattttggagcaagcaggctacaaaaagatgcttttgttctctcagcctaatgatatatatgtaaaaagagaaggaataagaaaactttggaaagaacttgcacctccaaaatgtttgaagttatttagaaggttaggtgttttacacacacatacaccctacaaactacatacatacatgtacatactatggttgtatagtctttgtaatactcttaaatctaaactttattttaagagaaaaatgaaggacttgcagccccagaacatagttagtcgttttttcccaggcatgtcatgctctactgttgccacttgtaattgttttgaagtcaagtcaggcttccaataataacgtttatattaattattctaattgtcaactactccattgcaaattagaaaaccaccaatacaaatgtcatttgctataacaagtcaatgtttatacaagcttgcccaacctgcagcccagaacagctgtgaatatagcccaatacaaattcataaactgtcttataacatggtgacatttatgcacggattttttttttttttttgagacagggtctcactctgttgcccagactggagtgcagtggtgcatcttggcccaccacaacctccatctcccaggctcaagtgattctcctgcctcagcctcccaaatagctgggattacaagcgcctgcgccacctcacccagctaatttttgtatttttagtagagatggggtttcactaggttggccatgctagtctcgaactcctgacctcaaatgatccacccgcctcggcctcccaaactgctgggattacaggcgtaagccaccgtgcctggcccctgcacagaccttttttaaagctcatcatctatccttagtgttagtatattttatgtgtggcccaagacagttcgtcttcttccaatgtgacccagggaagccaaaagattggacacccctgattgagaacaatgcctggaactttgtagctctcaaaagtttgttcaatgaatgaatgagtgaatgcttccaatacaaaaccttagaacaggcaagtcaaaatgtcaccaaaaggtgggaagaagaggcattcacggtactggttgagtgcatagtaaataaggtacttgcacaactatgggcaacaaagagacggcttgggaattatcaaacaccaattttgattttgatgagaacagtcataacccaatatttgaagattttgatggttgcttcttctttgcccctctaaccaccccccccaccccagaacgatgaagggttaaccaaaacaccaccaaaggcaactacttattacctttgttattcccacataaaaaattgagcagacctattgtttaagcagaagaggcagtccctcaatgaagcaatatcctgtttgaataatttaggatggggcataggccagcccacacagcgcatttgtgtgacagggcgtcccactcagacgtctccatttccggtatctagagccggctgccctctaaaaatccccctgttacagtcgggatagaaaacaaaaagcttaatttaccaggaggctaaacagattgtgccttcttaggcaaatgttccacctgcttggccaattagcttcctctcccgaaagactcgttcaacaggtttcctttttctcttctctgcctcctgggttggggaaagaggctgtcacttcgcttcgaccctccccttccctccctctcggcttttccacagtgggtcggaccaatcgcgcccgctccgacgtgtccaggtccgcggccccgggagcttggcgcggcccggcctggatgcgctgggcggagggtgcaggggagggcacggcgccgcttgcttggcctgcgcacccggacctagaagccgggacgagccggggcagagccaggcgcgcggaagtctgaaggtgccctccagacacggccccgat

SEQ ID NO: 34262 - DNA, 2300 bp, Homo sapien
ggtgtggcggcatgcccagctacttgggaggctgaggcaagagaattgcttgaacccagaggcagaggttgcagtgagctgagattgcactgctgcattccagcctggcaacagagtgagactctgtctcaaaaataaataaacatatgtctaaaattgaggcaaacacatctctcagatctttatgctgggaggagtaaggtaagaatggcatttataggccaggtgtagtggctcatatctgtaatcccaggactttgggaggtcaaggtgggtggatcgctggaagctaggaatgagaccagagcctgggcaacattgtgaaaacctgtctcttaaaacaaaacaaaacaagccaggtgttgtgacacgtgcttgttgtatgagctacttgggaggctgaggatggaggttggcttgaacccagaaattgaggctgcagtgagctatgatagcaccactatattccagcctgggtgactcttgaaaaaagaaagaaagaaaaaaaaatggtgggccggttgcgatggctcaagcctgtaatcccagcactttgggaggctgaggcgggcggatcacccgaggtcaggagttcaagaccagcctggccaatatggcaaaaccccgtctctactaaaaatacaaaaaagagctgggcgtgatggtgcatgcctgtagtcccagctacttgggaagctgagacaggagaatcacttgaacccaggaggcggagatttgcagtgagccgagatcacgccactgcactccagcctgggcaacagagcaagactctgactgaaaaaaaagaatggcattcatggcctgctatataacttttctagaatataggttggcaatgtctgtcaagagtcctaacctaagtaaataatcaacaaatatattcaacactggagaaacagctaaataaaatttggtatgtcatcatgatggaatgctatggagtggtttttcttttcttgacttttaataacttaggggaaaggtgtaagacatcagaaaataaagtaaaatgaaataatataatctcaactagatataaatgcacagaggaaagattggaagacactatcaaattgtaagtagagatttttgtggtggccttatgggccataggtttctttctttctttttaattgtgggggaaagtccacacaacataaaatttacttaaaaatggttaagatggtacacagttgagtagtgtcaagtacattcacatgatcatacagcctatctttagaactttttcgtcttgtaaaactgaaactccataccctataaacactaatccctccttcccactacacccagccttggtagccacccttctacttctttctgtttcattgatttggactactttcatttgagtggggttataagtatttgtcctttagtgactaccttatttcacttaacataatgtctacaaggtacaaccatggagtctcgctctgttgccagactggagtgcagtggtgcaatctcagttcactgtaacctctgcctcttgggttcaagcaattctcctgcctcagcctcctgagtagctgggattacaggcatccgccaccacgcccagctaatttttgtgtttttagtagagacagggtttcaccatgttggccaggatggtcttgatctcttgaccttttgatctgcccacctcggcctcctaaagtgctgggattacaggcatgagccaccacgcccggcccaacgtacaactatcgtgtagcatgtagtaggattttctttttaaggctctataataagccaggtgtggtggctcatgcctgtaatcctagcactttgggaggccaaggcgggaggatctcttgagctcaggagtccgagaccggcctgggcaacatgccaagaccctgtctttgccaaaaaaaaaaaagtacaaaaatgagctgggcatggtggtgcatgcctgttgtcccagctacttgggaggctgagatgggggaattgcttgagcccaggaggttgaggctgcagtaagccatgatcatgctagtacaccccagcctgggcaacagagtcagaccctgtctcaaaaaaaaaaaaaattaataaaaataaaaaaaggctgcatgatatttcactgtattgttataccacatttactaattcatcagatgatgcacatttgggttgctgccaccttttggctattgtgaattatgctactatgaatattggtgtacaaatatctatagagtccctgccttactatgtttggttatatactcagaagtggaattgctcgg

SEQ ID NO: 34263 - DNA, 2300 bp, Homo sapien
agcaatgcaaagatgagtcagagatggtccttgccctaacaggaaaaaactgtagcatttacaaaaggaagcatcattcatgtatgcctagtactaactgcagtttctggtagctgcttgatacatgcagagtgtttgttcaaatcatttgtactataagggtggaagagataaagcttatgtttgaatgcagagatgaaaggggccaggagtggtggctcaagcctgtaatcccagctctttgggaggcgcaaggcagatcccttgagccgaggaggtgcggaccagcctgggcaacatgggggaaccctgtctctacaaaaaatcctcaaaaattagctgggtgtgatggcatgcctgtagtcccagctacttgggaggttgaggtaggaggatcactagagcctcggaggtcgaggcttcagtaagccatgatcctgccactgcactctagcgtgggcaagcatattttaaactcatgttcaaataatgatgattgagatattagtatttccgttttacagggtaggcccagttgttgtgaaatgagatggggcatgcatgaatggaaaggatattgtaggaagacagaaatggagaatgaaagaaattgatcaaaactgtctttattctttaagagtaagagctgggcgtggtggctcacacctgtaatcccagcactttgggaggctgaggtgggcggatcacgaggtcaggaattcgagaccagtctggccaacatagtgaaaccccttctctactcaaaatacaaaaaattggccaagcgtggtggtgggcgcctgtaatcccagctacgcaggaggctgaggcaaggagaatcgcgtgaacccgggaggcggaggttgcagtgagccgagattgcgccactggactccagccctggcaacagtgcgagactacgtctcaaaaaaaaaaaaaaaatgtaagaataggccggacacagtggctcacgcctgtaatcccagcactttgggaggcagaggcgggcagatcacgaggtcaggagttcgagagcagcctggccaacagggagaaaccccgtctctactaaaaatacaaaaattagctggtgtggtggtgtgcacctgtaatcccagctactggggaggctgaggcaggagaatcacttgaacctgggaggttgaagttgcagtgagtggagatcgtgccattgcactccagcctgggcgatagggcgagactccatcttaaaaaaaaaaaagtaagaggccgggcgcagtggctcatgtctctaatcccagcactttcggaggctgaggcgggcagatcatctcaggtcaggagttccagaccagcctgactaacatggtgaaaccccgtttgtcctaaaaatacaaaaaattagccgggtgtggtggtgcacacctgtaatcccagctactcaggaggctgaggcaagagaatccgcttgaacccggtaggcggaggttgcagtgagccgagatcgcgccgttgcactctagcttgggcaagaagagcgaaactccgtttccaaaaaaaaaaaaaaaaaaaaaaagtaagaatatacccaggcaggatatttatagaggaaatgcagcaatctaatatttatcattaattagaaaactttaatttgtaatctaccaaaacagtgaaaacaaccaacccttcccccgccccccaatacaaaccctccgttgcctactccagggacaagaggcgtcaccatcgctgaggagctggttaggaatgtcggctctccgaccctagcccagacttactgaatcagaatgtgcatttaccacgacgaccaggtcattacacgcattttacagtttcagaacccctgctatagcctactgtacttcagcgccaatattttgctgaaaagaattcccagctggaactgtggctcccggagtctttcaccagatggcagcagcccactcctccctgtagcactcccattgttccaggcaggattcagccgcaggctcctccggaagaccaggggcagacggggcggtggcggggtcgtgcccagtgggaggggtcgggtctgcccaatgggttctcccgggcggggggcggggctctatttcagcagctctcagggccttgggctcatcccgagtcccgggctcagtatgtggcgccttcctcgcgcgctgtgtgtgcacgctgcaaagaccagcaagctctctggaccttggagcaggcctgccgccttcatgtccactctcctcatcaatcagccccagtatgcgtggctgaaagagctggggctccgcgaggaa

SEQ ID NO: 34264 - DNA, 2300 bp, Homo sapien
ggtgcatgcctgtaatcccagctactcgggaggctgagggatgagactcgcttgaacccaggaggcagaggctgcagtgagccgagattttgccactgcactgtagcctaggagacagagcaaaactcttgtctcaaaaagaagaaagaatttaatagacaggaggccacccatgccacgtgggagacagagttattactcaaatcaatctcttggagaattcagggactagtgtttttcaaagatagtttggggaagggatggagtggctaagcaatgggttcttgctgcttattggttggggatgcagtcataggggtatgggaaattgtcctcaagcagctcgacaacttctgtgtgggaacccagaagcggttagaggttcaggtggaaccattggtagtcagacatgcaaaatatctgaaaagatatctcaaaacgccaatcttagggtctacaatagtgatattatctggaagagtaatggaaaagttgcataccttgtgacctctgggataatgactggcaacggtttatgtctacaccttagcagaattcagcctcctttatccgtctaccctggtggtctcttactagctttacaaaggcggttggcttttggggaagggttattatcatttaaactataaactaaatgtctcccaaagttacattgacaggcccaagcacaggaataattaagggcagcttgaaggctaaaagcaagataggggttggctagatcagatctctcccactgccataattttctcactgttataattttcgcaaaggcgggttccaagataacccttaaagaatggggtgggttgagggaagggcctctcaggccgagtgaacagcaaatgcagaggcctggcctgaggaacaacaggttcagcgcgccagcggttaggcagggggacacactaggaccagtgaccagatgcccagtccacatgaccttgtttgccatgtggcaaagtaaaacagaggttcctcttcaaaaactttcctccccgtctaattaggaataaatagtaacttctcttaaaagcaaaatttattcaaagatctgtgctaacattcttaaatatctgctagccataataaaaaaaaatgtactttatgttcttagctcccacaatttagcctaaatatttgccctggcatgcttttactagtccaagcaagcattaggtcatagcctgttcctcttccttatttaaaagtgttttcatctttctcagcattccacaagttacttcctccttcctttgttctcctctacctttgcctcttttaaaaagttctaagttgctagccaatcgggacaaatacaaaatgtgaggtccggtccagccaataaaaaccagccacagcagtaaggtaaacacgtcaggttataaatgaccctgtctccttttgttcagtgtactctcctggcaaaactgctggcgagtgtaccctttctgcagaaagtaaaaatggccttattcagtaagttaaatttatgttgctatttctttacgacaccggaaaacaaacatttcaaacaccatgctgagaactcagtccttgttttggggagggatgcacttggaagattcgagctaaggtacaatcctccctaggtatccgcgggtcattgttttcaggacccccacagataccaacatccgccatgctcaagccccttacattatgtgggggtgcacggtgggtccttcccatccgcaggttcggcatccgtggatggggagtggatacagagggcggactatacagcttgaaaggcttccctggaagcaatatgtagagtggattgtggaggagcaagaacagaagcggggaggcttgtccagagcatacaggggaaggatgtacggccaagggaggaatcccagacgaccgcgatacgtgacatatttatgtttgcacgaaaataaagtttggaagaaaagtgttgggggaacaagggattcattttcccggggtagttggaatgcaatgggacgcctcaggccgctgggacaggctggcctccgcgcgggggcgcccgagcagccgagccgccgggccttccggctgccccgccggaagtgctctcctgacccgccgctgtgcagcgcagcgcaccgcgggaagatggcgttggaggtcggcgatatggaagatgggcagctttccgactcggattccgacatgacggtcgcacccagcgacaggccgctgcaattgccagtgagtgtgaaaggagggtgggtgatcgtggctgggcgcgcggagcctgggccccg

SEQ ID NO: 34265 - DNA, 2300 bp, Homo sapien
tcagtttgatgtaatcccatgtgtttatttttgcttttgttggcctgttttgctgaggtcttattttaaaaatccttgggccaggcaaagtggctcacacctgtaatcccagcactttgggaggcttgagtgggtgaatcacataagcataggagttcaagactagcctgggcaacatggcaaaaccccatctctataaaaaatttaaaaattaggctgggcgcggtggctcacgcctgtaattccagcactttgggaggccaaggcggtcagatcatgaggtcaggagatcaaaaccatcctggcccacatggtgaaatgctgtctctactaaaaatacaaaaattagctgggcgttgtggcacatgcctgtaatcccagctactcgggaggctgaggcaggagaatcgcttgaaccagggagtcggaagatgcagtgagctgagatcgcaccgctgcactccagcctggtgacagagtgagactctgtctcaaaaaaaaagaaaatttttaaaattaggcaggcatggtagtgcacacctgtggtcccagctattgggaggctggggtgggaagatcacctgggcccacgattgattgaggttgaggctgcagtgagccgtgattgtgccactgcactcaaccttgagtgacagagtgagaacctccgtctcaaaaaaaaaaaaaaccttgcccagcccaatgttgtagagtatttctgtatgttttctagtagttttgtagtttcaagttacatttaatcctaatccattctgagttgatttttgtgtatggtgagaggtaggggtctagtctcattcttcttcatggggatgttcaatttccccagcactgtttattgaagagactgtcttttccctcgtgtgtgttcttggcacctttgttgaaaatcggttgactgtaggtggcatacgcaatatataaagaggaaaatcagccacggaccaatacagaatgttaatttgaagtgattattttttaattactgaataattgttcagttcaacgtattttctagtatgtgtcaaatttgtgtcacaaacatcttcatttttaattgctcattataagaatgatgttctactcaaaaaggaatttgttttattttgttttgttttgtcttgttttttggagacaaggtattgctttgttgccctgactggagagccgtggtgcaatcacagctcactgcagcttcgatctcctgggttcaagtgatcctcctgcctcagcctttcaaatagctgggaccacaagtacatgtgaccacgcccagcttgcttatttatttatttatttatttatttatttatttatttattgagatggaatcttgctctgtcacccaggctggagtggagtggcatcatctctgtttgccgcaacctctgcccccggattcaagcaattctcctgcctcagcctcccaagtagctgggattacaggcgcacaccaccatgcctggctaatttttgtgtttttagtagagaaggtgttttaccatgttggccaggctggtcttgaactcctgacctcaagtgatccacctgcctcggactcccaaagcgctgggattacaggcatgagccactacacttggccaaatttttttattttttgtagagaccggaatttactatgttgcccaggctggtctcaaattcctgggctcaagtgatcctcctgccacatcctcccaaagtgctaggattacaggcatgagccactgtgccaggccagaagggggattttttttaaagccctgaaaatagctctgagctggacactttttttttttgatttagagtctcactctgtcacccaggttggagtgcagtggcgcagtctcggctcactgcaacctttgcctcctgggttcaagtgattctcctgccttggcctcctgagtagctgggattacaggcacccaccaccacacctgtgagctggacactcttaactgctactgtaactgccgagagttactatgaagttagcaaaacattgttacatcagagcagcgttgtcatcataattagactagtgagttagtgaagttttagatgagtattccatccattgctgtcaggaatggcttcagggaaagatacttgtcctactttgcctaaactcactaacaactgctctgatgagagtctctataaatctgctaataagtaaggatttatgggattctggggttttttgtttgcttgttttgcaacctgggagccacaaagatacggtcaataactttgtgttcccctttggcatctat

SEQ ID NO: 34266 - DNA, 2300 bp, Homo sapien
aacaagcagatttacattccaatcctggttccacagcctgggacccagcactcaccttcttttggtctaatttcctcatcggtaatttattttatttaactttaaaaaattttttttatttttttgcagatagggtcttgctttgacgcctaggcagtgtcgcaatctcagctcactgcaacctctgcctctgaggttcaagcgattctcctgcctcctgcctcagcctccggagtagctgggactacaggcgcgcgccaccacaccccgctaatttttgtattttcagtagaggcggggtttcactatgttgacaggctggtctggaactcccgacctcaagtgatctgcccacctcggcctcccaaagtgctgggattacaggctgagccaccacacccggccggttttctcatcagtaatttagattttaaagttccctttaagattacttgaatacttaaagtctaagcttttcgattctttatttctcaatgaggttaagaaaggaagtatttcatggccaggcgcggtggctcacgcctgtaattctagcactttgggaggccgaggcgggcggattgcctgagatcaggagttcgaggccagcctgggcaacacggtgaagcccagtctctactaaaatacaaaaaattagccgggtatggtggcgttggtcccagctactcaggaggctgaggcaggagaatcgcttgaacccgggaggtggaagttgcagtgagctgagattgtgccattgcactccagcctgggcgacagagcaagactccgtctccctgccatcctcccccccacccccccaccccccaaaaagcaaggaagtattttaggaaaccggacaggaaatagaaccattaataaggagaatgtcatcattcacagagtgccaaaaattcatctgggatgaatatgcagctcccagtgctcttcactaattcttatgtacatgacttgattaacagttaaagaatatcctggtctccatttctgccattttaaaagtaagtaaccattaattacagaagcgttcctaataggtggtaaggtggtcatctagggtatagctaagggccagactcgagtcaattagaatcctgggacctgtcaaacgcagtcctgcggagcagccttcagacagtgaatctataaaatggatggtttctttctttcttttttgagacggggtctccctgtcacccaggctggagtgtaatggtgccatctcggctcactgcaacttcccctttccgggttcaagggattctcccacctcagccttccaagtagctgagattacaggcacccgccatcatgcccggctaatttttgtatttttgtagagacggggtttcaccatgttggtcaggctggtcttgaactcctgagctcaggtgatcctcccccactcggcctcccaaagtgttgggattataggcgtgagccaccgcgcccgcccggatgaattttcaaatagaaacaatccagtttcccacatcacacggagattgtgtggatgggtaatccatgaaaagcctggtgctggcactcagtcccaataaatgttagctaaaaattaggaacttttcaaagggatgaatgtgctttctaatagaagtagctgccagtgacatcttgggagcctctttttaaaagcaaaaaattatttcatcttaaattttcacaagttcagatttttatgtacctgattttaacggagtatgaaacagcttgctctcgtagttactcaccgtcatatgttaatcgtatcatttctgagctgttttttgattttacaaacccttaaattaagaaacggattaggaaccgcccattaacactgttggcaaatgatttaaaatcagggttgctggtttttctgtgataatctatcggcttcaagacgcacagatctcactttcatggaaagaagttgcctgatacagttttccaccggagagaaaaataaaggctggtacttggaacctgcaagccgtgcatttggaacctcggactcaagtgcctattacgtaattccacagcgtcccggcctccaggccgtttcccgagccctccagcggagcgggggataaggttaccacgcccgcggtggccggggacactctgagtttcgcgtgtggcttttagggacgtttatatttgaatttccctgaaccgccgagtgtgggcggtggcgcagatccgtcccggaaacctccgggctccttcccgcctttctcaggcccggcccctccaaggggtccccgcggggcggcgggagg

SEQ ID NO: 34267 - DNA, 2300 bp, Homo sapien
tttcatggccaggcgcggtggctcacgcctgtaattctagcactttgggaggccgaggcgggcggattgcctgagatcaggagttcgaggccagcctgggcaacacggtgaagcccagtctctactaaaatacaaaaaattagccgggtatggtggcgttggtcccagctactcaggaggctgaggcaggagaatcgcttgaacccgggaggtggaagttgcagtgagctgagattgtgccattgcactccagcctgggcgacagagcaagactccgtctccctgccatcctcccccccacccccccaccccccaaaaagcaaggaagtattttaggaaaccggacaggaaatagaaccattaataaggagaatgtcatcattcacagagtgccaaaaattcatctgggatgaatatgcagctcccagtgctcttcactaattcttatgtacatgacttgattaacagttaaagaatatcctggtctccatttctgccattttaaaagtaagtaaccattaattacagaagcgttcctaataggtggtaaggtggtcatctagggtatagctaagggccagactcgagtcaattagaatcctgggacctgtcaaacgcagtcctgcggagcagccttcagacagtgaatctataaaatggatggtttctttctttcttttttgagacggggtctccctgtcacccaggctggagtgtaatggtgccatctcggctcactgcaacttcccctttccgggttcaagggattctcccacctcagccttccaagtagctgagattacaggcacccgccatcatgcccggctaatttttgtatttttgtagagacggggtttcaccatgttggtcaggctggtcttgaactcctgagctcaggtgatcctcccccactcggcctcccaaagtgttgggattataggcgtgagccaccgcgcccgcccggatgaattttcaaatagaaacaatccagtttcccacatcacacggagattgtgtggatgggtaatccatgaaaagcctggtgctggcactcagtcccaataaatgttagctaaaaattaggaacttttcaaagggatgaatgtgctttctaatagaagtagctgccagtgacatcttgggagcctctttttaaaagcaaaaaattatttcatcttaaattttcacaagttcagatttttatgtacctgattttaacggagtatgaaacagcttgctctcgtagttactcaccgtcatatgttaatcgtatcatttctgagctgttttttgattttacaaacccttaaattaagaaacggattaggaaccgcccattaacactgttggcaaatgatttaaaatcagggttgctggtttttctgtgataatctatcggcttcaagacgcacagatctcactttcatggaaagaagttgcctgatacagttttccaccggagagaaaaataaaggctggtacttggaacctgcaagccgtgcatttggaacctcggactcaagtgcctattacgtaattccacagcgtcccggcctccaggccgtttcccgagccctccagcggagcgggggataaggttaccacgcccgcggtggccggggacactctgagtttcgcgtgtggcttttagggacgtttatatttgaatttccctgaaccgccgagtgtgggcggtggcgcagatccgtcccggaaacctccgggctccttcccgcctttctcaggcccggcccctccaaggggtccccgcggggcggcgggagggccctgggcccagagccgcgcgggtgggcagtcccaggcgtccttccttacagccctgagcctggtccgggaaccgcccagccgggagggccgagctgacggttgcccaagggccagattttaaatttacaggcccggcccccgaaccgccgaagcgcgctgcctgctccccattggcccatggtagtcacgtggaggcgccggggcgtgccggccatgttggggagtgcggcgccgcggcccgcgccacctccgccccccgcggcttgcctccagcccgcccctcccggccctcctccccccgcccgccgctccgtgcagcctgagaggaaacaaagtgctgcgagcaggagacggcggcggcgcgaaccctgctgggcctccagtcaccctcgtcttgcattttcccgcgtgcgtgtgtgagtgggtgtgtgtgttttcttacaaagggtatttcgcgatcgatcgattgattcgtagttcccccccgcgcgcctttgccctttgtgctgtaa

SEQ ID NO: 34268 - DNA, 2300 bp, Homo sapien
tcatttggagtaatacacagccaaagtaagtatttaaaaacccaaaatggaacagaagcggcatttctctaaaagcaaacttggctggcatttaaactgagaattccaattcagattggtggaggaagcactcacatcataaatctgggtgaatatgtgttttattgttataaagtaattaagctactgaggcaggctgtgtccctaaattgagaggtgtattttgtctctggagaaatgtcaggagaggacaggatttaccatgctgttaaaagtgaaagaaaatgcattattgtggaagtgaggggtaggaggacgtaggcagtgagggattttacactctgggtcccatgcatggctccagggcaaactggttactgatctgcctctaagattgttctctgtcctcactctgaccctccaggacagcaaagcagcatccatttacagtactgttccctgttaattcctcttcccactcaatactgctaatgtgacgcctctccctgagaacttgaaatatgacttctgtgagttttgcatgtattttgccacgtatttgcctcattttcatcaatctggctctgaatgtccccttcagtaaggcagccaaatagaagaaacacaaaattctaaaaactacttccttcaatacctttttttcatggaatttcccccccctaatttggtagacaaggaaggacagtcagtcccaacttcagaattctgggttttcctgtgtaaacaccacagatactagagccttgcttcagggactcaaaggcttgaaccctaagaaacattcccctctggtggcacctcctaaaattccatgttgttacttcaagcaatggaattaaaaagaaaaaatctgcattttgtttagaagccaatgatccagagggtatggattatttaaagattcttttcaatttttctcattttatcatgtgttttggcaagaaaagaaggggcatccaaataaatttctttgtaatttaagatatgatgaaaaggatgatgggtaagatattgaaacccaagaggaacgtgacttagaatcatatctcttaaaaatatacacagatgcactcatgtatgatagcagattaaaatgacatggacaacccctccttccactacaagattgagaaaatagaacaaaatttgttttaatagagccaagctttaaagaaagaacaagaaatgtccaggtgccacaaagaattcaaaatctggaatataagccttaagggctggtagttgaggacaggaaacagctttagctctttgcaagggagtgaacctagaaacctagaagattgttgaacaaagcacagaaccttccattgctccctgcagcctcacactaccagaatactgcctgtcagcccagagcaaaaacaaactaccggcggggcggggcggggcggcgggagaggcggtgcttttcggcaggatgaggaagctacttgagaaaaacagaacaaccatgcatgtaaaagtgtcacagtagatttgtattaccacgaggtgagaaagtgacccaaaaacggtcctgggactctggcacaggaaacttccaaattcctctgtagcaataccatcaaaaccctgggacacggattgtcaggcctctgagcccaagccaagccatcgcatcccctgtgacttgcacgtataagcccagatggccttaactaactgaagaatcacaaaagaagtgaatatgccctgccccaccttaactgatgacattccaccaaaaaagaagtgtaaatggccggtccttgccttaagtgatgacattaccttgtgaaagtccttttcctggctcatcctggctcagaaagcacccccactgagcaccttgtgacccccactcctgcccgccagagaacaaaccccctttgactgtaattttcctttacctacccaaatcctataaaacggccccacccttatctcccttcgctgactctcttttcggactcagcccgcctgcacccaggtgaaataaacagccgtgttgctcacacaaatcctgtttggtggtctcttcacacagacgtgcatgaaatttggtgccgtgactcggattgggggacctcccttgggagatcaatcccctgtactcctgttctttgctccgtgagaaagatccacctacgacctcaggtcctcagaccgaccagcccaaggaacatctcaccaattttaaatcaggtaagcggcctcttcttactctcttctccaacctctctcactgtccctcaaccactttctcctttccactcttc

SEQ ID NO: 34269 - DNA, 2300 bp, Homo sapien
tgtttcaggatgcactttccctgacatcagggaggtagttaagtgttctgatttaaaactctcctttggggggatagtcacctttaggtaagctaacacaccacccagcaagtaggtgaaagcagtttggaccccagtgatgcaatgtgttactgtatctaggaagtgttgaaaatgacccagagggtatgcaagtacatccaagttatcctgatgggggtagggtggggatgctgtgaataacaggaattattggaactggtgattcagctttgattggaaaggaaataaaataaatgattttttaatgatagagaattcaattatagtcatgggttatgtcccaaatttatactttcccacatagatgggtcttctccatagatagacttcacgtagaaagaataaacagcacattgtttttgcctttgaactaggtctgtgaatggaaaacccttgataagagaagtagttaatgacactaagttgctgtcacttagtgatgtaagtctaaaaaagctaacattcctgcatctcagtttccttatctgtaaattggaactaaagatcctgttacaaagagttgatagtggaataaatgaggccatgtaagatggtcataccaatatagtaggttgtaaagaaataggaatttaaaactaattaacttaaaattttttgatcacgggaattaagatgggaagtaaggtgaggctgtcctgttataaaatggcagggctgttaattattgttggcttaagtaagtctattagcaaaaatagtgccagtcagaattaacatttctcctgggttaagtcaactgagtggttaaacaaggaaggccattgagaacactggaaacaccacattttactcattttattaataaatattaatattaattaaacaaactttttttttttttttgagagacggagtctcactgttgcccaggctagagtgcaatacagcctctgccttccaagttcaagcaattctcctgtctcagcctcccaagtagctgggattacaggtgtgcgccaccattcccagctaatttttgtatttctagtagagatggggtttcaccatattggccaggctggtctctaactcctgacttcaagtgatctgcccaccttggcctcccaaagtgctgggactacaggcatgagccactgtgcctggcccacaacaaacattgattaatcacttactaagttgcatgctgtgcactggcaatacaatggtgagcgaaaagaaatttctgcctgaccctggttggggtgggggtggggggcatcaatcaaatattcacaccgatgtgtagaacaacaactgtggtcaactgctgttataaaaggcaggcaccacacggcacgcttcaggagcactggtcttttatgggaaatggtcattaggaaagaattgtctggtaggaggctgagtttcaaaggtgaagttctcgcctccgcagtcatgacaacagctccaaggttggggacgttaagggggaggttcaaattctttgacttctcgttaagacgatttgagcttattaaaaactggccatgatctctcagagcattagctaagggatacagctggtgatcctgatagggcattttgctctaaccttggaagaatccgtctagactccagccagaacttgattgcagacagaacagtggagaaagaggggccacagtcctgcagcctcagtctgtttccctggtgttcctgagtggtcctgggtactcacaggcacccgaactcaagggtccaggtcagtccagagtgctttcatggaaacggcaggctatgtgtgccgagaatgtcgctcagccaattgcatggaattcagagttcccctgaggttccctgagacttggttctccctgctctgatgggatttgggatagaaagtgggagtgcctggttaatttggagtttgagggcctagtgctttcaaagagagatccccacctgggagaatcataactcacatcctcttccaccctatacctacccggtttggacaagtaaaagcaacacttaaataagtggcaaaatctgcttttttcctgttgcaaattgaatattatatgagggacaatgactattcccagcttgatgctttggaaagtgcgtttggatttttccattttagacaaatgtcagctttcccccgaagtggcctccatcgtgcttgtttgttccaaatcatttttcaatgctgtgatttcccttctctttgctttaaacactcagtcacgtggcttgtctccaccgtgtggagg

SEQ ID NO: 34270 - DNA, 2300 bp, Homo sapien
agaaaataaagaacttaaggctgggcgcagtggctcacgcctctaatcccagcactttgggaggccgaggcgggcggatcacaaggtcaggagatcgagaccatcctgattaacacggtgaaaccccgtctctactgaaaatacgaaaaattagccgggcgtagtggcgggcgcctgtagtcccagctacttgggaggctgaggcaggagaatggcgtgaacccaggaggcggagcttgcagtgagccaagccatagcactccagcctgggcgacagagtgagactctgcctcaaaaaaaaaagaaaagaaaagaaagaacttaaatatggacaatgtttgcattactgagcaatttttcagggtctgcaaagggctatccctgccctagtctcctgcccttctgacaaccttcctatggaccttttcccattgagaaatggagctgaggagacagaattgaaactcaaaccaggccagagctcacctaagaggggccatttcactccttttcagccaccagccctttacattccttctccctggtgacctcatcagaaccttctcatgagaggtcagctatgatgcaagaccttatagaggccagatggcattgaaataacaccttgcagctcccttacatgtgaataattgcccatactgagagactaaaacccttaggacttctgggacctgaatgaggcaatggtctgaagtgggcttgcgctggaagcaagacgtaagtggtgaaggtgagtatcagggcagcaggttgacccctttcttgttatgagcatgcattccttcattcttactaatacgggttaggtgcctacccatggcaagagcagttctaggcagggagaggcccctacccacccacagctgacggtctagggcttgtttacattctaggtttcagcgggaaagcaagaacacccaactccctgcttttgattctatgttagtagctcagcgcgcctgtgcgagcacgtgctgcagccagggtaggggctcagaaactggttgacaagatgagcagtggggtcctagggggttgggcgggaagggcccacaaggccatattccaggctgttcggctgcgagtgacccctgagaggtcgggatctccgagctcgtccgatgtctccatcccagccaggagcttgcgaaggggaaggagggcggaagcagagtgggacagatgtggttcgttctggggcttcctgtccacgaagatggataattctagcgacccgcctgggattttggaatcctggcggacccaaaagacagcagaagtcaccgcagaggatgccaccccgcacggcagcccgcccagagcgacggtctcacaggttccggcgccgtcgagcgcccaagcctcctgttggccgccagctgtgtccgcgacgcgctgggtcgggaggaggagacccgaggcgccggtaagtcccccgctgcaggtggcccggagggcaggggtgaggacggggacgtgtactgaactttgggaggtttgcggggctggagttttgtttcagagatagccagatcgagatcagaacgttttccagagagcccaggtttccacttgtggctgggcgacccggtccggaattcatcctttctcggccctcagcttcctccgggcggggttccgatggggcagctaagttccgcgcctcctgccggtgccagatactggcgtgtcgacccgcgctgcggttggcttcttgctccacagcgctatgcgcgcggcggctccgagggctcctggtctctctcagccaacggccttctggggccgccgcctccctctagagctgctcgggtcccattgcagagagtcccgcagcgcccgccggcagccacggcacttcgcaataaccaacttccccgccgccggcgcgtcccgccagcctgccctcggccgcaggcgactggacggcggttacggggcggtcccagcgccaccacgactggctgtcggctccgccagtcatgggctgatgacgccccggggctggctccgcccctagcggcagccccgcctcccctccagagcctggtcggcttagccctgctttccgcctcactcgttgagcaggtccgtgaattgtcagcgcgctgtgggcgactgtgtggccgcggcggccgccaggcttgccgcactccccctgaggtgcccgccggaaccaatgtgccctggtccactgggccgtgagcagccaccgactgggggcaacttggcacttagaaccgcagcagggacgtcggtttgctatcgggactcggcga

SEQ ID NO: 34271 - DNA, 2300 bp, Homo sapien
gttcattaattttgctatgagtgtccttttttttcttttttggttttgtagacatttttcctggccagactccagatattttcccaagcagagctcccttccccagcactgtaggccctggacctagaggctaaactggtcctctgagctcatggcagtcagccaggcactcccaaagagggtatcaaccatagtgagttctcagggattcctagacattcgacaggactccctctaaccaaaacaataatgtggaggctccaggtcttccgctatcacttacaaacccaagaaattcttactgattaaactcaaattctgaaaatttatgaacttttggctccttagagaaatttactcataaccagtgctaaaagccttcattgttggccttggttgaatccattcttttccttcagtgggtgaaatcaggtttcataagtccaagtgattttataaacctttgttttccaacaataaataagatttggaagctgatctggagttacatttctagtaagcttttctgtcactccacaatatctaagatactcatgccccaccaaggtgtttataactagatcccagattccttctttaaaggtatcctatcagcaactgttaggtggactgtgctttatcaattgacttttttttttccagaaaaactaagtcttatcagagtgcatcaactcaaaaataactataggtagtctgttgacagtcacaaaattccctctttagcctatcagaaaatgctgaagtgacaaagaacttgtaaattctactatcttaatgtggcctctagcgacatcacataatcagtgtggtttgtttaaagaattcattcctgaccttggtttgctttgtatcttttttaaaaccactgagtacacattgaatttatagtggtaagcttaaggcgtcagacagcatgagatggaattccaaatctaccgttttgtaactgtgagaacttgagcaagttattaaacctccattacttcatctgtaaaatggtactagtaatacttaattgcattgttctcaggattaaacagactaatgagtataaagcttttggtgagcaatcaataaatgttagctttgagtattactataattattatccatcattttctcattatttactgtaccaccattcaagccaccacacctagaacctggaatgctcagtagcttcctcacctccctgcttgttctactcttgcctatcctaaacccttcccatctacttcccaaagctaaggggtcctttcagaagggaaaagcaatcagttcaatccccttcccacataaaacagaaatgccccccggctacccttagcacaaacctgaaaggccctgcatggccagactctcgcttaccctctctagcctgtttccacctctcttccccattccctctaagtctcagccatactcgtcagtcttccgcatacaacccatactgcacatcctccaccagacccttcccccagcctgcagagctctgtccccaacccacgcccttcagatcccagccccaaagctacctcttcaacgagatcccactcaggtcttttctcatattccttccctgcaaagcacttagctgaataaacccatggcctatttaataagggataatttcctaatatctgctttctcacacgattttcagtttgcgggagggtacggctgccagttttgctcatcgcattccccataacctagttcagccaagacctagtggaggaggcagtaaatattaaattaacgaaagaatggatgcatgcagagcggttaaaatggctcggactccgcagcctcaaaaagttggctcccgcacctgaggcctcttattaaatggttcccaaacatgcggggtcacttttccgtattttgttttttagtttggccttggtttgtgtgtcactcttcacgagtaaaggttcaggcgcggccacccttgagagcgtagacgggacaccacctgagatagaacgcccagcggcagtgctgccggcgtggggcggaagtgcggggcctggggccggcgcctggtgggtgcgggcggaagtgcccggcgcagggcggaagcagaggcgttggcggcgtgaggctcaggtgggttcccttagtcccgcgccgagggtgagcgctcgcgggtctccgcctctgagctgacgcgcaggctggcgggggttcgctgtgccgcgtgctgcccatttggatagtcgttatacggaatttaattaaaccgggagccataaatccatgaactacttgggggagat

SEQ ID NO: 34272 - DNA, 2300 bp, Homo sapien
ggaatttgaggctgcagtgagttatggtcatgccactgcactggtcacagtagtgtcatgactttatttctgccttatttctttaccataaatgtcatgtggcttcgcaagggggaagtgaacttgtgtgcctggcatgccatcctgaagtgtaagtcttcaaggatccaatgcataagaatctatggtacatccaagaggtcggcaaatagtcaaattatcaattttatttatcttttcttttcttttttttttttttttgagacggagtcttgcagtgttgcccaggctggagtgcagtggcatgatctcggctcactgcaaactccacctcctgggttcacgccattctcctgccttagcctccccaatagctgggactacaggcgcccaccaccacgcccggctaatttttcgtacttttagtagagacggggtttcaccgtgttagcaaggatggtctcgatctcctgaccttgtaatccacccgccttgtcccaaagtgctgggactacaggcgtgagctaccgcgcccggcctggtcctctcctctttcttcttgccaagaacttcacaaaagtatatttctctcggatggccttccttctggtcacagtagtgtcatggctttatttctgccttatttctttaccgtaaatgtcatgtggctttgcaagggggaagtgaacttgtgtgcccagcatgccatcctgaagcgttaagtcttcaaggatccaatgcataagaatctatggtacatccaagaggtcggcaaatagtcaaattatctggatgtatctggatgtcttcttaagtgaaataattattcagaaaaaagaacaagttccatgactcacactcacatcaccatgtactttggctctcttcattcaagttttttttttttcagtaaaataaagtcctaattaaaagaaaaaatgaacagattctcacaggtagtttcaggaagtatcccaaagacacttaggtattgacatcttcgagaagtttagcttagttttttagccattctgtaaatatggcctgatagtaggttacctccccagcttacatatttgtgacatggatggaagctacaatttaatttttagctgcgtggaacctgaatcagggcagcttgacctgggtcataaagaaattcaaaagggactcaagacgttatattaaaacctactaaagtggatataaaaatataaaacacatgcctcacctcaactcccactaattttttgaaagaaattctttagaaaaggaaaattcatttaaaaacaaaactaaaacacccatttatctttccaaggcataaatgaccactatctttcactttggggcttttctttctctctcttaaaaattcaaggggagttggagaggctataaaagtctgtctttgggttggaaaaaaagggaagctttctgtaggcaaaaatctccagcgggtgggctgcagtctcctccccgtgagatcttgcaggtataatattctggcaaaaacgacttttcattccgtgagagggacggaagacagtgaggacatcacagctttcaaacctcttgttgtccaccgtcctggagtgggaaggtggtgaagctcttacattcgcttgccttttgtttcttctgggtcttcgctgtgatctctttccctgtcccccgccggccgcacctggacacagtaaagggccacagtgagggctctcaagctttggagccgctgagtcatctgatcttcatcgcgctaagctcctgacagatgttacacaggtcagggatgtttgggcaaacctctcaccgtggcgttggagtgcagtccagctctgtcactaatgcttaaccttcctatgggctcagttttctcacttgtaaaaaggggtccctaatacttgcgcaccttacaggaagtaacataagccagggtatttgtgagtgcgttttggaaagcataaagccctcttgcaaatgtgagatgttattattgcttcccttaccctggctctagttccagcccggggcctgcccacagaaaccagctgttcctgtttcctctgtgtcccgcggtagcaccgaggaggctggtgcactgggctccgtggttcccgcccgggcccgccgcagccggctctgaggaagcggctctgaggaagcagcgcaccgccagcctcgtcctcgcgccggcgaccctggggcgggtcacctcgccgggtcgaggcctcccgggcaggcctggcggagggaggagcgaggcctgcctgcgggagacccggggaggcgcgtcatgt

SEQ ID NO: 34273 - DNA, 2300 bp, Homo sapien
taagaaaaataataatgtatgtccacaaaaggacttgttaaagattgttcctagcagctttattcataataaccccatattgaaaacatccccaatgtccatcatttggtaaactggcaaacaaattgtggtatatccatacaatggaatactactcagcaataaaaaggaacaaacttcagatacaggcacaacattaatgagtttcaaaaacattgtgtggagtgaaggaagtcagacacaaaggaatatgtaagtgattccattcatatgaaatgttagaaaagacaaatctaatctgtagttacagaaaacagctaagcgggccaaatatgaggtgggatagaagttgactttaaaggggtgcaagacaaccctctgaggtgatggaattgttcattatcttgattgaagcagtggttacatgggtgtgtacattattcaaaactcatgaagctgtataattaatatgagtgtaatatatggaatgtaacttatcccccaataaagttgattaaaaaattaaaaggaaagtggggcaaccaagtttcataaagcaaaatatctttgggtaataagtggcatgaactaacagccaatttccttagaaaacagccatatggattaatcacctctagaattatttgtgcctgtgctgcccagatcaaagttccaactcctggcagagagggcctgaggggcttagctgaggtcagttgctctcttctggacagggaaaagctggaccatcctgactgaccttccacccagactgctgtccttgtggcagggatggtatctcaaagaaaaatggaggtactgttaccagagaaggggcaatgatgactgctaaacaaacaaataaacaaacaccaaaacagtcttcccctgtgtatttccagggagagtaaagaggatggtgaggggcttcaaacatatctatgttcattcattccattcatttattcactcaaacataatatggagtctgtactattttccaggagcgttattgagtagggactcgaacgctcttgaagtctctctaaaaagaaagagttcttattaatgggaggaagagaagcctggtaggagatggttacctggagtggttatggggcttaaacctgtttttgtttttttgtggggagagggggatagaattcaacgacacaagaaagaactttgcagcagtcaaatttgtatcttttggggtcctgtaaaagctggaaaactctttagtctggaagaggaagatggacagtcagagaagcagattccagaattcatgtcctgtctaacccacaaatggaaaagcccgttcatggttttaacattccatcactgggcctcccggggcctcctcggcgagtcggcagagggagccattccccaataaattgccgcgcgaggcctccgaggacctggggggattttcctgcgcgtccggggagttctctctccgcccctccatggtaaagcagactatcccaccctccaccctctgccttcacctccccgccccacctttccatgtactttgctgccacatcacattctctggcacggcttaatcaccatcctttctgggtcccacctttgcgctttctcccctgacaccactgaggacccgccgtccactccagttggccgctcgggcgccggccaccgtcccacaaatccttacagagggtctagaacacctcccagggactctgccgagggacttgcacccaacgtgggttgggaatcaggcgggcacccactctgacaccccttcggtcaccccctgcggtgaccccaacatttgctaacttcgcgaccaggcctttggcggggtcacccaccaggcggtggaagccgctcaggcaggggcgactcacgatcgaggtgcagcagtcaggccgggaagatcctgcatgttgcgctagggactgcgcgcggcgccaagcgacaaccccccagcggccactgccccggcagcagcagctgcagcagcggcaactgctcgaatcccggccccggctcgggttacccgcccccaccccctccagcatctcgggccagacagagaaaaccttgttcaagtttgcagcaagtactttcccggtgcgcaaaactgggcgactgggaacgcgttgagacgttcctctttcccgcttctccacctttacgcctgaaagaagactcccaaagattgctttcttctgggacgctgcttggacgctaaccgcgttgattggaacagattttgtgtcttggctggctttgggtgaagaccggggagaaaaggttgcgct

SEQ ID NO: 34274 - DNA, 2300 bp, Homo sapien
gctggataacataagtgaaaatacttcacattgcctggtacatggtgttcacacaatactgcagtgctacaaacattagctagtatatttaccttgatcacatctcgctcccttccatccggggctgcagtaacaggtcccagtgatgtggtcgcaggtggagttgttcagacaatcacatatctggcgacagccatagccatatgttcctgaagggcactctagagaaggaaagtcaaatgtagctttccaaccttgggaatttggagcaaggctgtctctgactgcaagccctgcacatctagagctgagtcctttcaggggattcctattgaggctgacttgtacccccaagagtgtcccagaactggacagcattcctggaatcatggtggcactcacagtccagactgcacagggctagagacagggctgctcaacattagagctcctgacactttcagctgctacatacttacctctatgatgtgtatatggagagtctgtggaattcccatggaacagatgaagataatcactaagggcaatttgatacaagtccaccaggcaaaactgtaggctggaaggggcctagactgaagagcactaaagatgctttcttgagaacatatatattttactgtaggctcagggatcttcataaacgcacattctcaattgaattagccaggaataggggaagatgcaaacaacaagttttgctgattttctaggtaagaacttcatttgctatggagtgattcaaactctggattttgttgaagtcttgaagacgaaagtaataggattcttactatgcggtcttaataagagttaggcatgaatttcaaaggatagtgtaagcatgttaaatctaaaaatcttcgtgacaaaatattgatatttttcataaagtgagcagcagggggcaatgtgctattattattagaactctctgtcaaacacagggtttctgtttacaaataagcattgggagaagtctccaaaaatagggacactttaatttgctgttgagagtaatcatggaagcacttaagaggttttcttatttaataagaccttaaccagtcatctggcattcaagtaaaattttgagcctattctggtttccatgcatatttagacatttatacacaaacacacaatatttatatgcacaatagagttatgtatgcaactgtgtcactcagtcaggatctgttttcatgactcaatgaaacagtgatgcaaaactaaaattgggctgtctctgttgtgagctgattcctggacgtcacttttgttatatttgctagaaagaggatatgcaaaaataccctagggtttagcacataaaattgaggcaaccaggttcagagtggctctgtgaggtgccagtggagtggggtggggaggggtgctttattgtcagagtcctgctatcctgatcaatctttccaggccacaccactcctatggccataatcttggcagatccttcccaagagtacaacctctggtgaacaggaattgttcttcaccttttcccgcccaaaaggttttatcataagaaagtgggtctgatacagccctaagcccttatttatttatcgtgaatactgaaagaaagtcatagaggaaaggaataataaactaatttgcaatattcaattttattaagactaatgtttttataactctgtgaggggatgcatagctagtggggtggaaataaaaaaataaggatgagtaattccaacggcatattctcccccagtgggacttaaacaaaattttaaggcagtatgttgtctggaaggttgttaagactaagatgagaagttgttaatggaagcagtataaaagtacgatctagagaaggttgttgaaagggtggcaatgtttgcatggatgtgttccctcaccagcaacagggattggccctgggccaccagccctcctccccaccgaatgtactgtcctccaatgtgagacccgggttctgcctctgccatgaagaaagctcgactggatcttttaaggctctgagcagccacattccaaaaataagaaggagaggaagggagagcccaaaagaacagaatggaaaacttgaattctgtcttcattcttgtagtcacacctcctccgcccagagcagtgagtaaccagcgatgatcccagggaggcctgacctctgggaggggaagtcagtcatgctgagaagtaaccagccatcagctcaaacaacctcggagtggtgaattctgccttaatatttcctggcatctaggaaatgt

SEQ ID NO: 34275 - DNA, 2300 bp, Homo sapien
ttgatatcaaatattgtcagttctctgctcaaaaccctccacgtgcttctcatttctctcagagtgtaatcaaaggctttcccatgacctacaaggctagacacgatctggccccactccctgtcctgtcttctttaccattctcacagtcctgcttccctgttgtctgcgcacatgccgagcacactccatccttaagtctttgcatgcccttctttctgtccggataagcacaggcctgctgcattacacgtctctgctcacatctcacctattcagagaagccttgcccattcatcctatctgaagtggtctactccaattactgtcaatattacatcactctttgttgactcctcaaactgcacatcacaaacagtacttactttattttcctgttcctaccctctctcctattataaagaacgctccctaggtatcaagaccttgtctgtcttgttcgttactgcatttccagtaccaatgctcagcacattgcagccactaataaatatttgctgaaaggatggagaaaccaacataccttatagctattaagggtgttgatcagagaggatgaagatggttatctgtctttagcaccaccccaaacagcacgatccggacagtaacctggatctccacctacacacattcttagaggataggagccaccgccaaagaaaaccgcccatggtagttgcacagtgagatctgaagtcagagtattgctacatagtattaacttttcagtgaggtattttggaatgcttacaactgtgaagctcaagagatagattaatgtgaaatctctaagtgagttcctgaaaaaaaattgagaacaacaaaaacaattttttatatatttaatgctaagcaatttaaaaaatgttttcggacaggtgcggtggctcacgcctgtaatcccagcactttaggaggccgaggcgggccgaggtcaggagttcgagaccagcctggccaaaatggtgaaaccctgtctctactaaaagtacaaaaattagctgggtgtggtggcctgtgcctgtaatcccagctactcgggaggctgaggcaggagaatcgtttgaacccgggaggcagaggttgcagtgagccgagatggcgccattgcactccagcctgggcaacagggcaagacaccatctcaaaaagacaaaaagtttaaaaaattttcatatgctctattttatttgagtctgtcacctgcctgatttagggatggtggatagtattattctcagtttgcaggtagaaatatgaagacttatggagactaagtgacctgtacaagggcaggcaactgtacaactggcattagagtagtctcagactcaaatcaagacttctgatttgaagttccttattttcctctatcgcactccattaatttatttaatgtacattattgaacaccaactatttcaggtactgtgttaggtgcagcatataataagaaagttgataatctgtctattttacaattaaaaaaagaatgtgcaatacatgcacttggggaaaaattcagtacagtaactgctactcttctcccctctccctcttctcctaatccctctctcctgatataatcactgttatctggaaatctttgactatacaggctaagtcccctgtatctgccgcgaggtccttcctggaggtgctgactggactagctgatgttggctagatgaccgccaaccagatgaccttggctaactgatcttatcccttgggccgctgtggcacaggatgagtgagctacgcctggtaacaagagtgccactctcgtgtaagggggctgcgaagtagaaaggaggccagccctttggaagatgtttctagagggtgtgggcagaaccaagtctcggtagttaggaagatcttggctccaaagtttaacttgcagcgtcccggccgggttcacagcgcatgggacagggggggcggggcgatgcggaggcggagcggggcgatgcgatgcggggcggagcggggcggggcggcgacgcgcggcgcggtgcggcgcgcggccgacgtggcagccgcaggagcatgcgccgcccgtggccatcttgtaggcggggacacgccgaggtaacttccagggtgcgccttcgttgtcttctccaagctgtagttctacgtcccgacctccctatcataccacactcttcagcgaccacgcaggcactttcccggtccccaggtgagcgccaggtggctccgaggggcgtgtatgaggggggtggcatggcatggcatggcttgcaggcgcc

SEQ ID NO: 34276 - DNA, 2300 bp, Homo sapien
tgctctggctcatacccctgctctctttaaaatagccagttggaattagcttagactgcgtggtccaaccctagccaatgggggaaagacacagcagtagggactagctgcgttaggataagaaccccttcccctcccttgttcaggtgtgctcttgacattgctccatctgtgagacacacccttctatagaagtaaaattgccttgctgagaaaattaaatttatgttcgagtgctatttcttttgtggcaccgaaaatttatttctaacacagtgacactctgttctttaaaaacccaagttttttaacctggtttatgaggctgaacaccttctgggcttctgtctgtccctccagtcctgattcttctttctctcccttcacatggattttattgaatgtatcttgttcttcccagctcagttggtatatatatttgctatatattcactttttctggactctgcctttcttcccttgcctaattaagttcttatccttcaaatctcggtttatctgtgacttatttggggaaccctttccttacctccaagtcaaaatcatattcctgtcaaacaaaactgtgttcttaccctcagagcacataattcagctaccattcattgtaaattggtttattatttgattgtttcgtgtactagactgtaagtatcctatttgtttttgctaatcattgtcatttccaaaggcatcagtatagtgctcgtcaagcagttgaccttcgctaaaaacttattaaatgaataaaaatattaaaaacaaatatagcatatttagaagttggttctgtacttgagatacacttcaggatttgtaattttaaagaaagttttctcatattttataatccattgttgtctattaggatgctgctatctaatggcatttttgctatagttaacttttctaaaacctcagatatacaatttatctgttactggatatgctttaaaatgtgaactaggaaaattgtgaattaatgcttttatcaagtgaagcacattttattttattttattgagacaaggtcctgctttgttgcccaggctggagtacagtggcattctcactgctccctgcagcctcaacctcctgggatcaggtgatcctctcacctcagcatcctgagttgctgggaccataggcacatgtcaccctgcctggctaattttttaatttttttgtagagatggagtcttcctatggtgcccaggctggtctcaaactcctggtctcaagggatcctcccacctctacctcccaaagtgtaggtttacagcggtcagccactgtgcctggctttattttttttttatgttaatggggttatcttatacacagtactttatgagagaagaggaagggcttcaaaaatacattaaatattttatttatttatttttagagatcttgctctgtcacgcaggctggagtgcagtggtgcagtcatagctcactgcaaccttgaactcctgggttcaaggcatcttctcatcacagcctcccaaagtcctgggatttcagacgtgagccactgtgcccagcctcatttttattttaaatttaataatgactgaaatttatattatttacttattttattttttagaaatgagatcttgctatgttgcccaggcttgtctacaactcctagcctcaaatgcttcccgtcttggcctcccagagtgctgggattataggcatgggacaccacacctggcccagacataactatctctaacatgcattcatgtggcagaaatcaaattagtaatttactatttgaaatgtagtagataattagttatattgttattataacatgaaattatttcccacttataaagtatctacatgggaatgttacagattgtttgatattaaatattctcatagattgctttcttagaaatttggacaaactcttcgtctggaaataagttgcattataaacagtaaaggtggacatctatctcttgatgattttttttttagtcgttctctattcaagctttaaaaatatacttttggttactgtgtaatatttgttacatttttgtgtttttatagtataccataattgaagaaaaatgatggaagagagtggaatagagacaacaccacctgggactcctccaccaaatcctgcagggctggctgctactgctatgtcttctacccctgttccattaggtacatgtagttgtctaacatctcgtgtgttttgagaatagtgaagatactatcatcttttctcagagtcaattaagaaaaga

SEQ ID NO: 34277 - DNA, 2300 bp, Homo sapien
caggatgtgtattacttgaatcattcaaagccatgttaacatttccacagttaacttcagaactgttgcagaataatgcagcattttgagtaagtttgtctctgttggtcaccgcaaattcagtcctgcctagctaggcaattccgttcctgttaaagtctaaagattggtctcgctagtctgccagataaatataaataaggttgatagtatatctttgcaggataaagtgtcctgtctatcacatgtgaatggaaactggacaagcccaagagtgtccttgctcaatggatgggctgttttgacacctacttttgaaaccacgtcaagtcacgtaactaggtttctgatccagaagttttaaaaattaggtactgcaattatgtggtttaggaatatttaaaatacagacagcattgcttcactgcaccctacaggccgttaacacctgagggatgacaccttcaattcattccaacgtgccagtgaaaaactagggatctaccatcatttggcgttggggtggtagggggtggtgctacctttttggtaacgatttttataattctgggcagtttatttataattttcataccttagtgtgcttgatcacataatagaaattaaaaataaataacattttgcacaaaaatggtgtaaaaagaaaacactcattcatccccacctacttatcaaatccccactatgtgccaggcaggactacacaggtactgcaactattaattagatcattgcaccctattgcaaaagggtgggctcttgagttgatgacctgtagaatcaagtccctgtgtgtggctccacagaacaaggtgtccaatgcacttaagtaattctgtcgctgtcacttaaaaaaaaaaaagaaaagaaacatgtcattgctttaagatacattttcttcagagaaagtattttttccttactgtgaaattgtataatgagatgctaatgaaataaaatgtccaagggatccaagcctgagaagggtacatgttgacattaatagtttttgtgtaagacatttggattcaggatattttaaatggctgcccttccccaccaaaaagtagattaggtaagaaagaattgacctcttaaataaaagggtaactttcaatttctggctgatttttatatttcagattccacccatcaacacggaggccaaggaaaatttaatgagccaaataacttatggctcttcaaattacaagatctgtgggttttaaagtgtcattgtgacttgaactagctgtctttctttcaaacaagacttacttcaaatgtgatggtccagcacctcagtccggcttgatgacttgtgcttttgtttttcctctctgcatcagttagctggcacctcgggttttgaattcagttccctggactgtaaggggttgaagatttgatttaacttatatttaaaaaggcaatgatcccagaacagcaaataattcctcaaggagcttattgtgtaataaggaggagataaacactgtcaagactcgcactgtaatcagtgctgccaccgagtacaggtgatgtctctggagatggagtaaaaaacaccccatccttggtgaagggaaacaaagaaggccccaccgagaagtgggtatttggtgtgaaccctaagggagggagagatggaaagaaggagaggaaagatgcttgcctcatagtgcttgcctcccctcctctccacagatggaaagaaggagaggaggcaagtattatgaggtaggaaacctggaggtgttagagcacagcaggtattggatcaagctgaaaaacagacaaaatgaggacattctccacaggtgtccacagactcagttacacggaagtttattctgatcaacacattggccattttactgagaactaaatgtgatttggtgttgactcctttctaaacttataaaaataaaactcagatcttaaaaattccattgtcagcataggtcctaatctgtggtccggaaaacatctgggcatcaggcccacaagggggttaatgggctgtggacactggggtgcaaaggttttctgaggggaagagtggtgagatctgggcttaaaaagatgaatcgagatgcagtgtgtaggaagcatgggcaagggatgaggaacgccactttgaaaattactaaaactaaagcaagtgactaagagtgtgaatgaccctggctgcaatgactacgcctgctgggcttcgtaagtaattatgggtgtcttctgtttttgtcagtatcacaagggagcttgactcgagcaag

SEQ ID NO: 34278 - DNA, 2300 bp, Homo sapien
gaatgttgaattccaatagtggcagaattcgttgtggagctgaaaggtactgcacggatcaactactaatgcagcaattccctagtagaaaactgcactgcttaaaggaccacctcatttttctggcctcctctggttattactaaagctcaaaaggagctttaaaaatcctgatgcaacagctgttttcccctctcaccgtctttaaaaatagagataataaaatagcctgaaaagttgtcaagttcaagtaagatcatgtttatgacaattttttgaaaattgcctggttgcagcttttacttacagcattttcaaacagttctgccaactctgtggctctttcatcatgtttcaagtgttcagcaaacgatggtgttcgtctccataaagtcaaagtttaaaaatacaagggccgggcgcggtggctcatgcctgtaatcccagcacttggagaggcggaggtgggcggatcacgaggtcaggagatcgagaccatcctggctaacacggtgaaaccccgactctactaaaaatacaaaaaattagcagggcgtgatggcgggcgcctgtagtcccaactactcaggaggctgaggcaggaggagaatggcgtgaacccaggaggcggagtttgcagtgagccaagatcgcacccctgcactacagcttgggcgacagagcgagactccgtctcaaaaaaaaaaaaaaaaagtacataaataaaaaccaagtaattggaggacgccattcattgattttacttaggactttgggcataatctataggtttaaaaatttctgctgctaagaaagtgggaacacagttatattcccttacattttaccgaagagaaactagacctgcagaggagtacctttctgtttctatataagcagaggaattctgcacaacccaaatcacgcagaaacctcctggtaaggactccacgggtagttattgccggcattgtattctgagagatgagctgcatatcacttttggaaatgccttaaattaaaactcgtcttgaaacaacatgacgtctcaaagaagctcccttctcaccttggaacatcagcttttaaaataaaggtgtcatcagaagtgtgtagacacccactgcatcacaactggaactgatctctggttatgccaatctaggtctgcctggcagggtgagtctaccgctcgaaagctgcacagaggaaatcctccctcctccaggttcaggcccggagttacgagcggagattcgcggcggcgggtcagagcccagagcaaaccaggctggggaacgcacctcgcccgcggctccggaagcggctgcggccccgaccggaaagcccccagcatcgcccgaaggaatcgcggctggcctgcggctccggcccggcctcgggtaccacgcgcctagtgggaagccgcactgacgcctgcagcatctcgcgagatttcgggctcagcccaagtactgcgagttcaccaaagcggggggaaaaaaaaaaagccagcgtgcgagagcctctgaagccgtggctggggcgctggggtggcagctgccgcgggagcatcagctaccggcgtgaggcgaggcagggcacgcgcgccgtccgcagccccgttgcctgggctgcaggtccactgacgcgcggcccctgggtggagagaggggaggtggcctgggagcccgctccttttcgccgcagagcgcggcgggggagggaggtgaaggcgtgggaggaaggcggcggaagaggaggtagccgcgcggagatcctcccggcgacatcactgaggcggagcgtagccgcgcctgctccccgatcgcgccgttcgtgctgcccgcactgcccgaggccctttgcggactggctggccgcgctcttcgcacggggcgcttttgcgtggggtcgcgcaggagccgcggagggccggatcgctgagggagcgtcagccgcgcgccgctgcgggaccgcgggtgggcgggctgaggggcggaggagcctccggccccgcctcccgcgtgctgctgccggagccgccgccgccgcagccccgccgaggctttaaacagcggggcccgccccgcgcccgccacactcgcgcgctcgctcggctgccggtggcctctgtggccgtccaggctagcggcggcccgcaggcggcggggagaaagactctctcacctggtcttgcggctgtggccaccgccggccaggggtgtggagggcgtgctgccggagacgtccgccgggctctgcagttccgccgggggtcgggcagctatggagccgcg

SEQ ID NO: 34279 - DNA, 2300 bp, Homo sapien
caccctgttaaggttttccttcaaacagcaacattcccactcttgcgatccctaataggcgtacataagccacacaacacaatctttcaaaacgacacagatggtaggtgctctccaacctctctcgagagatcctcactgcacattctcctctaaagggcccacaaacactactgtcattcagagggatggtgactgttgagcgtgggtgggaaagaaagtgcacacgagatacctaactggatggggaaggttgttagaggcagccctccggtatcacgtaactagccaaacccgctacaaacttttgagagattaagttaacattcctcggcaattccacccttgacagctgaatccagagatgccagcaagtcgtgcacgtctactactcccgccacctcaactcgggaagagtctgcagccacatcccgcggtcggcatgcaccaggggctggggaagaagggagggctgggcgagctcaccttttccagctcgtcgtggagctccgccaggctaggccggagcagcttctcgcccagctgcgcggctgtgtgccggtagtgatcgatcctgggcacagcgtccatggtgttgtggccgaaggtgcgcaggtagtaggtgttggtgtgggtatcataatagtagtgctggtggtgcccactgccgccgccgccgccggagtgcaggctgctgccctcgctcagcaccgtgtccccgccgttctggaagctcacgttgggcccgtcgactccgaccccggcagcatctgacaggctgtcttcagccgacgaggaggcagctgggtccacgaagttcacgcggaagcggcccttggcttcctcgctgcctttagccggctcgctctcgccgctggcttccccgtccgcgggggtctgcttggcccccgccccagcaccagccgccgccgctgccgccgccgccgccgccgccgcagcagcggcccgcccggcgttctcggaaaccaggtccacctggaaacggctctggctcggggtgggccccaagggtctgcccagcccgtccccggccgccgcggggccctcatcgcggaccccgccgccgtcccggctcgcgggcgcagcatcctccggcaccgagggcacagccgtgccgggcagttccaccctggctgcggccagcgcagcggctgacggcgtctccccgaccccggccagtcccggggcgccggaggagggcgccgtgggccgcggctccatagctgcccgacccccggcggaactgcagagcccggcggacgtctccggcagcacgccctccacacccctggccggcggtggccacagccgcaagaccaggtgagagagtctttctccccgccgcctgcgggccgccgctagcctggacggccacagaggccaccggcagccgagcgagcgcgcgagtgtggcgggcgcggggcgggccccgctgtttaaagcctcggcggggctgcggcggcggcggctccggcagcagcacgcgggaggcggggccggaggctcctccgcccctcagcccgcccacccgcggtcccgcagcggcgcgcggctgacgctccctcagcgatccggccctccgcggctcctgcgcgaccccacgcaaaagcgccccgtgcgaagagcgcggccagccagtccgcaaagggcctcgggcagtgcgggcagcacgaacggcgcgatcggggagcaggcgcggctacgctccgcctcagtgatgtcgccgggaggatctccgcgcggctacctcctcttccgccgccttcctcccacgccttcacctccctcccccgccgcgctctgcggcgaaaaggagcgggctcccaggccacctcccctctctccacccaggggccgcgcgtcagtggacctgcagcccaggcaacggggctgcggacggcgcgcgtgccctgcctcgcctcacgccggtagctgatgctcccgcggcagctgccaccccagcgccccagccacggcttcagaggctctcgcacgctggctttttttttttccccccgctttggtgaactcgcagtacttgggctgagcccgaaatctcgcgagatgctgcaggcgtcagtgcggcttcccactaggcgcgtggtacccgaggccgggccggagccgcaggccagccgcgattccttcgggcgatgctgggggctttccggtcggggccgcagccgcttccggagccgcgggcgaggtgcgttccccagcctggtttgctctgggctctgacccgccgccgcgaatctccgctcgtaactccgggcctg

SEQ ID NO: 34280 - DNA, 2300 bp, Homo sapien
tcatttcaacctatgtggtaccatcctcttgcgttcacaaattccatcaatgtagtcattacacacttgtaaaggaagacttcaagtaatcccggctcataaaaaagttaaacattaacgaaatctcaaaagcatcaatgttatctcaaaacagtgacattgaacgctgaagaaataagtcttatgtgaccataaaaaatagttacaaaaatcaatgagtttatggggatggttttctgtttacaaagtgtaactgcttatggcaaagaccccacaggtctttctggtcatcctctacagaaaaaccaattctcctgtttcccttttttctttaaagactcgcctctgtccctttttttttaaatatacacctctcccaaaacgttttcatcgcaaaaaaaaagagttatgccattattaggaacagcgtgtcccaagacaagatctctatgatcctttgtatattcaagattgcaagaattgagctttaataactcatagaccataaacacaccctgttaaggttttccttcaaacagcaacattcccactcttgcgatccctaataggcgtacataagccacacaacacaatctttcaaaacgacacagatggtaggtgctctccaacctctctcgagagatcctcactgcacattctcctctaaagggcccacaaacactactgtcattcagagggatggtgactgttgagcgtgggtgggaaagaaagtgcacacgagatacctaactggatggggaaggttgttagaggcagccctccggtatcacgtaactagccaaacccgctacaaacttttgagagattaagttaacattcctcggcaattccacccttgacagctgaatccagagatgccagcaagtcgtgcacgtctactactcccgccacctcaactcgggaagagtctgcagccacatcccgcggtcggcatgcaccaggggctggggaagaagggagggctgggcgagctcaccttttccagctcgtcgtggagctccgccaggctaggccggagcagcttctcgcccagctgcgcggctgtgtgccggtagtgatcgatcctgggcacagcgtccatggtgttgtggccgaaggtgcgcaggtagtaggtgttggtgtgggtatcataatagtagtgctggtggtgcccactgccgccgccgccgccggagtgcaggctgctgccctcgctcagcaccgtgtccccgccgttctggaagctcacgttgggcccgtcgactccgaccccggcagcatctgacaggctgtcttcagccgacgaggaggcagctgggtccacgaagttcacgcggaagcggcccttggcttcctcgctgcctttagccggctcgctctcgccgctggcttccccgtccgcgggggtctgcttggcccccgccccagcaccagccgccgccgctgccgccgccgccgccgccgccgcagcagcggcccgcccggcgttctcggaaaccaggtccacctggaaacggctctggctcggggtgggccccaagggtctgcccagcccgtccccggccgccgcggggccctcatcgcggaccccgccgccgtcccggctcgcgggcgcagcatcctccggcaccgagggcacagccgtgccgggcagttccaccctggctgcggccagcgcagcggctgacggcgtctccccgaccccggccagtcccggggcgccggaggagggcgccgtgggccgcggctccatagctgcccgacccccggcggaactgcagagcccggcggacgtctccggcagcacgccctccacacccctggccggcggtggccacagccgcaagaccaggtgagagagtctttctccccgccgcctgcgggccgccgctagcctggacggccacagaggccaccggcagccgagcgagcgcgcgagtgtggcgggcgcggggcgggccccgctgtttaaagcctcggcggggctgcggcggcggcggctccggcagcagcacgcgggaggcggggccggaggctcctccgcccctcagcccgcccacccgcggtcccgcagcggcgcgcggctgacgctccctcagcgatccggccctccgcggctcctgcgcgaccccacgcaaaagcgccccgtgcgaagagcgcggccagccagtccgcaaagggcctcgggcagtgcgggcagcacgaacggcgcgatcggggagcaggcgcggctacgctccgcctcagtgatgtcgccgggaggatctccgcgcggctacctcctcttccgccgccttcct

SEQ ID NO: 34281 - DNA, 2300 bp, Homo sapien
atctgggcaatttgggccagaaatacatatatatgatatatgatatatatatgatatatgatatatatgatatatgatatatacgatatatatgatatatgatatatatgatatatacgatatatgatatatacgatatatatgatatatatgatatatgatatatatgatatatatgatatatatgatatatatgatatatatgatatatgatatatatgatagatcatatatgatctatcatatatatcatatatcatatatcatatatatgatatatatgatctatcatatatatgatatatcatatatgatctatcatatatatgatatcatatatatgatatatgatatatatgatatatgatatatatcatatatatgttatgtgtatatatgtatatatgtacgtgtatatatatacacacacacacacacacacaccctcctatacatattcaacattttcccctttaaactaaggttttctaggcttgaataaaccagacactgctcttttgtactgtttcgcaaactgtgcttggatggtctctccttgttttcaggagtgtttgatttttaaattgtgatattccactaaatgagaaatgaccaggacttcacagagatttcatgaaaggagggccacaaaggaagaacccagagcaggccggtgagaggcactctaagaggtacagagggttgcaccaattgctaggatttaatcaatcagaaggggtccaagccaggaagcaagggcatgccccgagcctcatttacccgccttgtcaccaccctgcccgctagtacatttcagagtctctaacccctccctgcatgcaagcccaggcagagtcctgccaggtttcacaccagagcacacccctgcacggactccccaggaccgcggcgccggctggctgcctcggccccccgcggccgcgtgagctccctcttggtggtggagggcgcatttcaatctggaaactcccagcccctaatttggtcccgcagactgacgccgctcccggtggggcggtgggggtaggagggcaaaggggaggtctcctccttcttggattgaggctgcaaccaacagccccgtgagcctctattcctggctgactgcgaatccccccatcccaggtcaggggccgggaccctacagaaagacccgttctcatcctcaaccttgcggcctctgtccggcggggaagttcagctgcgggtcagttcagctgcgggtccggccaagcctggcgcgcttaggcaccctagtccctggtccgcggccgggcgaggacggagggggaggggaaggggctgctgcctcctttcccaaatccggtccctaatcgccccatcccccgccgtctactcgctttgtacaggcagtcaaaacagagctagcggccaattgacggggacgggaagcaaagccgcctagcgcctcgccccctccagccggccccccgggcccctcctctcggcgcccggaccttggccctccctctcctttcccacttctctctttgccctaacttcgcccccatcccccgctcatttcctctcgcacccgggctcgccaatccctctttccaagtccctcttccagcccggccttcctctcgggttcgccccccttctccccaatctccgtcctcttccctcccttcgccctcccccccttccttcctcttcccctcacccaaccctggttcccctcgttcctcagtcccgatctctcccttactctgtccccgcccactctgcgccggcctctcagtccgggttgagccccacgtgtggacggccgcgcccccactgacagccgccgcccgccggcccgccccgcgccccgccgggcctctaaaacccccgcgccgcgccctccaccgccgcatcttctccagcgcccagcctcccgccctctctcttgctggccgcacgccccggccccgcgcacctccgcccggctccgcagccgctacccgcgcttcgttgccctgtgggactccgagcgagcccggagggaaccctcctcttcttctgggggcgacttttgtttgcttgcctgtttctttctggtgacttttgcagctttccaatatccgtcttcggagcgcacgggaatccgccgagctctgcgtgcaggcccttttttcttttgaggttcacattttttgaaattttacgccagggcttttgtaatttcctcccccgcccgctgacggtcctggagtcgctcggggctttaggccggttatgcaacgtgtaccgctcggggctgccggctgcac

SEQ ID NO: 34282 - DNA, 2300 bp, Homo sapien
caaagtctaatctgagacaaggcaggtcccttctgcctgggagcctgtaaaatcaaaagcgagttaattactttctagatacaatgggcgtacaggtattgggcaaatacaccattccaaatgggataaattggccaaaatgaaggggctaaaggccccatgcaactctgaaatccagaggggcagtcaaatcttaaagctcggaaatgatctcctttaattctatgtctcacatccaggtcacactgattcaagagctgggttcccatggtcttgggcagctctgtcctgtggctttgcagggtatagcctccctcccggctgctttcgcatattggtgttgagtgtcggcagcttttccaggcacatggtgcaagctgttggtggatctacaattctggggtctggaggatggtatccctcttctcaaagctcctctaggcagtgccccagtggggactctgtgtgggggcttcgaccccacatttcacttccttactgccctagcagaggttctccatgaggacctcacccctgcagcaaactcctgcctggacatccaggcatttccatacatcctctgaaatctaggtagaggttcccaaacctcagttcttgacttctgtgcacccacaggcccaacaccacgtggaaaccaacaaggactagggctttcaccctttgaagcaatggcctgagctgtatgttggccccttttagccatggctgggatacagggcaccaagtcccaagattgcataaagcagcaaggccctgggcccagcccaggaaaccattttttcttcctagccctctgggcctatgatgggatgggctgccatgcagacctctgataggccctggagacatttttcctattgtcttggtgactaacatttggttcctttttactcatgcaaatttctgcagccagcttgggtttcttctcagaaaatgggtttttcttttctatcccatcatcaggctgcaaattttctgaacttctatgttctgcttccctactaaacataagttccaattccaaaccacctcttcgtgaatgcataaaactgaatgctttaaatagcacccaagtcacatcttgcatgctttggggcttagaaatttcttctgccagataccctaaattatctttctttagttcaaagttccacagatctctagggcaagggcaaaatgctgccagtctatttgctaaagtatagcaagagtcaactttattccagttcccaaaaagttcctcatctccatctgagaccacctcatcctggacttcattgtccgtttcactatcagcattttggtcaaagccagtcaacaagtctgtaggaagatccaaattttcccacatctttctatgttcttctgagccctggaaactattccaacctcttcctgttacccagttccaaagttgcttccacattttcaggtatctttatagcagcacccctctctctgaggtaccaatttactgtattagtccattttcatactgctataaagaactgcctgagactgggtaacttataaaagaaagaggtttaactgattcacagtttagcatggctggggaagactcaggaaatgtacagccatagtggaaggtgaacaggaagcaaggcaccttcttcgtaaggcagcaggaaggagaagtgctgaacaaaggaggaagagccccttataaaaccatcagatctcgtgagaactcactcattgtcatgataacagcataggggaaaccaaccctactattccaatacccccacttggtgttccccttgacatgtggggattatggagattatgggcattacaattcaggatgagatttgggtggggaaacacaccctaaccatatcatcttaactatgaattttttttatacttctcttaaaagtttggcagtttagcttttatattgctctaattatctattgctgcataacaaaatgtaccacaatttagaagcttaaaacaacaaccatgtttatttggctcataaatctgcatttaagctgagtttggtaagcactgcttgtctttgttctactcaatggcagttagggcacctggaatggcagttagggcaactggaaggctgggagctgaaatcacctgaagtctcattcactcacatgtctgatggttgatattgtctatcaggtgggatcatagctggtgttgtcaggcagaacacttacctgtggcctcaccatgtggcctggtcttttttataatacgataccatggctgagttcaaacttcttgagggaaag

SEQ ID NO: 34283 - DNA, 2300 bp, Homo sapien
ctatttgttcagtcttactttgatctactcactaaacaattcatcctctatagaactgagggtgcaaaggtggttggtagtgggttaaagaggaaagtcaaatcagaaatgaagaagaggttgaagagaccacatgtagattaaaaataaacttttttggggcattgattttcatttagtcacaatatttttattttcaaataacattaaagaaaaacaaacagtctttatgttttttaaaggagaagcagagaaatattacactattcctagtcaaaagtaatgttagcaggaatgtctagactatttctatgtgtttatttctctttattttagttaaatgatagatttactcacttgcaactaactcttgctatatttctcccatttcaaaattcttaaactattgtagctaaaaattgtatctattttacttagctgcctttggtagcatttgaaagtgaatgcaaaatttctggacaaaatagaaacaggtacatgggctaatataggaatatacacaatactgttaactgtcccaagatttttcattgattatgtcttccatggtgagatttcaggcataaaattggtttgggttagtacaaagtctggcccaacatatgcttacttgtagttcttcctaataagtcaaacaagctcacatttatggtgctgaatatattctagattcattgtatctgtagttgctaaaaatttagttccatgccttaggatggtattagaatgtccatgataagaaaaataagtgcagcaaaataaaagaaatgccacgcctatctttctgtattattttttccactggagaaggacagattttactcattaaaactacaaaagtctgagaccaactgctccatattcttttgtgttcgttaaatgttgttatttggaggtgacttaattagactaaagctagaagagaaaacaatagaatgtcaaagatgcttttcaagttgtaaactaatgttttaagttataaactacttgatactattttcttaattaaaaagatatttctgaatcgaaaagatcaaagcttctgagtaaatttagaaagcatttttttgtcatttacagaaaagggctttaagagcctatgttcctttggctttaagagctcttcactgtgacttcaaagtaatcattttcagattaataaactggagctcgtctttggaattatcagtttttcttttattacagaatctgaggttagccagaatccatctgcagaacatgaggcagaagggagaaacacctaacaaggtgaggccttccttaactattttaacacaagcaattaaccatttatactcacttaaaagcagacagctgggatgatggtgtctgctaaaaaaaaaaagtgtaatgaaatgttctttagttttttgatctttagtaaaatttcatcttcgtataaaattttattaaccattccactaacttgttacttctccactccacctccccactccctttagaatccttagtttgaagacataattctttaaatgatctgtctcagggaggggggatcttgttacttttaaggactgcaaatagcattataaactttgtttttatttttaaatacgaatatcgactgaagctctcaaatcaatcaatattgttgccaaattttgtaaaacgcactgtcttagctctctaacgatagagttctaatataaatgtaaaaaccaacctatcaacatgttttcaaaaatactttttgtaaagaacagtacaattttgtggtgtccaaatattcctttctttcttacaaaatattattggatctgtccagttcataaatattcctgccctctcttcctccctccctgcctctctctccctgcagtttttttgatgtttgttcttttctttccattttctagttattaattggttcaatggatgacctttgtgcgacactgttataccttatcagcctcgccagggcccccgcgccgcccaatcccagcaactctggttctcctgtgaccccaagccttccagatccctgggtttccccccacgggactgtcacattcttccccgccggagacgccagtcgcggggcctcctccctggggtgtgagcaggtcggcgcgccacacttctctaggtggccggacgcgcgcccagggaggagctggcggcggggcccaggctgttccggctgcggcacgccaggggatgtggttagccctgagcctggaggccgaaggtgggcaggcaacactcccaccatgtttcggaggagaatacactaggct

SEQ ID NO: 34284 - DNA, 2300 bp, Homo sapien
ataagttttaattcttccttttcccttgtgtaatgtctacagtttttttatggttaacatggaggttacatgtgatatcttttagttataacagtctaagcagataacagcttcacctgcatgcaggaagtgtacacttttacttcttctgacccccaaaaatgctattgatatcacaatttacatccatttatattgtgcacccattaacataatttagttatatttttaatacttgtttttaaacttttatactagaattaaaagcaatttacccaccatcattatagtaatattatctatatatttatctttgccaatgagtttcacactttcctatgctcttgtgttgctgtttagtgtcctttcatttcaacttgaagaactttgtttagtatttcttgtaaggtaagtctagtggtgataaacttcctcatcttttgtttgtctgcaaaagtctttatctcctcatttttgaaggacaggttttccacatatagtattcttggttggcagttttcttccttcagtactttgaatatattcttccactctcttttggtctgcaaagtttctactgggaataaaaaaccactcattgttttattggggtttccttgtacataataagtcacttttcttcttgctgctttcagaattctttgtttttaactttgaaaatttgattataatgtgtcttggtgtgacgctctttggtgtcatcttatttcgtgttttgtctcgggtcttcctggatatggatgtttatttctgtacccagttttgggaggttttcagccactattcatttgaatgcactttttctccttttcttcatcttcttctaagagtctcataataaatatattgtttggcttgatcgtgtcccataagttcctgaagctatcctcacttttttattctttttctttttgcacctataacaggatgatttctatgacctgtatgtatttgagttcactgatcctttcttctgcttgatatagtaagctattgaatccttctattaaaactttcagtgcggttatattttttagctctatgatttctgtttggtatttctaaatattttctacttctatcacctggaaaagttgtggtgctggatgtgtggcccagttttttctctcctgagagaggagctgaaagtgggagtttattgctggctggctctgcactgagctgagaaagggagctgtgacaaatgcctgcatgctcattcagattgcatgcactttcaaaacgttgctttgctctctgtctccccaccagcatagcaaatgctgggccctatcagctcacaaagacaggcagattagaggccagtccctcagatagcagccagaaaagttgggtgggtggtatagatgtatggtccaactatttccagggagaagctggaggcttgtttttattgctgaatgaagctagaaaagagaagccaaggaagtgagcacatgcccagtcaagtgcccagaggactagtgattccctgccctctcagctcccagatgaaagttagaagccagatgctcagacagcatctggaaaagttggaactttagaggtagagtctacctttccagacaggagctgaaagctgggctttattgcctgctaagtctgcactgagctggagaaagaggtgtgggaagtgcttgcacacctgtttgaaactgccattttgttctctgtggtcctggggaggtagtgaatacttgagtgttattcactcattccccgtcagcttcctgggttagtcaagtcaggggctagtacctcaggacccttcactcctcggggcaaagctgggaaatgggagttccttccagattttatggcactgtgttaggggtagggttaatggtgagactatttcagtttttcttacccaatttgatgtattttctaagttgtctagtgtgcagaagtccctcaagtagttgctggatctttcttggagggtattgatccaagtgtaactgtttatttggtatatctgtgggtagggagagagtcctgagcctcatattctgccatcctgctgacatttagaaatgactcttaagagggggagagggccgggcgcggtggctcacgcctgtaatcccagcactttgggaggccgaggcgggcggatcacgaggtcaggagatcgagaccatcccggctaaaacggtgaaaccctgtctctactaaaactacaaaaaatagccgggcgtagtggcgggcgcctgtagtcctagctacttgggaggctgaggcaggagaatggcgtg

SEQ ID NO: 34285 - DNA, 2300 bp, Homo sapien
aacattaactaataaagctactgagagtcctatatgagaaaattttgggcatttggtccataatatgatcttgtcaattagaacagttattttctacttgtcatttgaatattcatttatggggtcttactcactttttctggtaacatttataaaaattatcttaataattgtatttctgaggataataatttatcactgaaatgtgcattcacctcccttttgcagcccagtgatgcagaggttgatacacagttgatattcaataaatggtaaatgtgcccatcaaatatctattttattaatgttatttaacatgctattaccacaatgattgcaccattaaactaggttgtcaaggaccaatctcagacagcacaatatatatggaagttgatttccttactgaagggtcagaaacctaatttaaaaacatgaaagggaaatgaagtatgttgactcacggccatgagggccacggcagaagactgtgtagatgccaaggtcctcgctgaggatgtctgaagtctaggccaatctctaatctccaacctactctgtgttaggaggctttacagggtggaaggaacacttttattagtccacccaaaataggtaggtaccttttggtaatcaggtcttgagggggtacacttattagcacaaatcagcatatctgcatatagaagaccttgcaatggagtggtatccggaaaaaaatatcattttgggtctgacgggttcagacaacacttttaaatgggatctctcaaagtgtgatgagaaccagaaaaaaatggctatttctagtagcttcggtacaattgagcaagaaacaccaaaggatggtcttttcataactttaaagcagtgtggttctcaagtagggggtatatttgccctctggggaatatttggcaatgtctggaaacatttttgattgccataactagagggaggagcggtcactaggcatctagcgggagtagaagccggtgatgctgctaaatatcctgcaaatgcacaagatgccccatccccaagaaagagaaatgtccattccagaagtcaacagtgtcagttgggaaaccctgctttaaaggttattttcttagaagaggacagctttaatacctaaaatctaattttatgtttaggcccatgcctatcttcgcaggactcaattccaaggaaattctgttcataatgcatgctttctaattccagttaattatagcgccttacagtgtgcagaaggcagaggattgttttatttgaaagtgatcccttttacttacttaaaaacagatatccttagtttcaatataaagttcagatttttgcttttaatagtatttatattcccaaatccaagtcctcccagaaataggttgagatgaagggaggccagatatcaaatccattcctagagatattgtgttctgtgggaccgaaaaaagacaaaacttgaaccttgactggccctctaaggattaaattctgctgctcttcttagggtatctatcggactgtccctttggttgtaagataccactgccatctcgaggaggactgcatgcttctgcacagagccaacaggtaactcgtcctggcggctctgtgtacccaaccacaaccctagactgccaagaacactgctcattcgaaggcgagcgaagccgcgaagagggccagcgttaggggaagggtggtacaaacccttgtgtgagctgcagcaccggggcaagaacaacgggcagcccaggcgggtcttgggtctgcgagaccactaggcgttctgccggcagtcagaaccgcggcagaaagggcgcgagcggggaactgcgggaacgcagcggcccgggaagctggagggggcggacccggccggcgagcgcaggcgctccctggctcacgcgcgcaccccggccccaccacccacccttacgccgcggcccgccctccggggcgggtaagagagcgcgcgagcagcggtcgtcaggacacgccccttcgcctccgcgagctggcgggcgggctggcatcgccgggaggcggggccgcggcagccggctgggtgcgactgggcggcctcggagctcgcagacgctcgggggaacatggcggctgcggagccggcggtccttgcgctccccaacagcggcgccgggggcgcgggggcgccgtcgggcacagtcccggtgctcttctgtttctcagtcttcgcgcgaccctcgtcggtgccacacggggcgggctacgagctgctcatccagaagttcctcagcctgtacggcgac

SEQ ID NO: 34286 - DNA, 2300 bp, Homo sapien
taaatatatacaatttaatatgcattattccttcagttctgctttttgttgttgttgttaaaatatgtgtgagaaacgtgttaagactcatctcctactggaggtgtttcattgaaattagctttcaatctaaatagcttgctatactcaaaaaataaactgcctctgattttttgcctagctttaaatctgtaaaattgagtctcatgaaaaaaagcatttaggtttctaagtaacccagatatttcttgagcatctggaaacccacatgttagttactccagcattagagattttataagacagcgtttagaggcagatcactcttgacaaagtcaccttgagtgtttttgcctttgtttctaaactctggacaactcaaagaaagtattataggactcagctaattcaaacaatggctttcctttgaaataagatcgtctgcttcccttaaaggcatagtagtcacctttgacacaaggaacagaaggtaaaataacaaaggaagtggtgaaccaacctcagttctggaattaaaaaaaaaaaaaactgatttgcattaattatcatttctaggtgtctggcctagtccagaggatgcaaatggcagttcagatcaatcatccttaaatcggatgtgaacgctttgatgtggctgagggagagttgtggaaaggggagtaggtaccatgaagagaattgcaacaaaggaaaaaaaaatatatggggttgaattgccccaaagaggacagaaacagcaaaaacatatttttttatgtacaagtaaaaagtacagaagacaaaataatctcacctggtctgagatctttagaatataatgtttaatgttgattcccttactcttactccttttaggactcgtgtgtgtgtgtgtgtgtgtgtgtgtgtgtgtgtgtgtgtaatggggtggggtaggggaaggagagaaactgatagtactgatgaatggggagctagaaagacaaggaaggaaaagaggctctgaaacctaagggtgcctactgtcctgggaaactttaaagcatattccatgacgaattacattatctccgggcttagaaaattccgaaaaagatgggaagacaaatcaaaggcctttgataaatgaggcctcagttttgtggtcaagtctgcactaatttttgccttgtgtgatgtgcgaatttgacaaaaagaggcgctggattgaggagtgggatgggaagggggaggcacctctacctgcacacgggggcaggggatggatgcaaatcaggccttcccgagtggccaatcaatagtcaggtgagggattttgggtccccaccccatcccaaccggcgtttgagcacgtgcacggtgttctgggacctttgtcccgcaaagtcacgcttggcgggcaccccttggtccctttttctggtcagatgtgcttgattcttttctgctctacaacccacctctctagtcgtgtcttcccatctccctactcattccctcccgcgccgctgcgggtgagagccttcagcggtgcgtcctaaggagcgtgaggagtgtgcggagcttggcacaccaagttgctgagactgtgacaccagcctccgcccgttccgcgcgggtgcaggcggcgagcctcggctcggacaccacagctctcctgcccgcgccgggcagtcctctgcctgtccagaggcagcactcccggctctcggctggctgtgggtctgtcttgtggggctccagcactagcctgctcggcctcggaaactcctgcagcgtccagaacacagaaaatagactcatctcctaattcgccagggagctcgagggctgcggggccgcggggctgcctcccccgctcctcccccaacccgaccccaccccacccccgccagggcttcggcggcctcccggagtcacacagcctacccccccaccccaacaccccctcccccggcagacaaagggcctgggcaaattcgccgcccggcctcctagcgctccggggaggccgctgcgccccggagtggatcgcgctggaggcgtgcgccgggcgagaagccgcggccgcgggagcgcagtatggggaagaaccgcgagatgcgcctgactcacatctgctgctgctgcctcctttaccagctggggttcctgtcgaatgggatcgtttcaggtaagttcttccgtgactttctcgcttcctttccagccatcccagcggagaccgcgaacgtacgggtcggcagggctggtgcaaccggtgcgtggagagcagggctcagtgggtagcaataaaaatg

SEQ ID NO: 34287 - DNA, 2300 bp, Homo sapien
tgcaaatcaggccttcccgagtggccaatcaatagtcaggtgagggattttgggtccccaccccatcccaaccggcgtttgagcacgtgcacggtgttctgggacctttgtcccgcaaagtcacgcttggcgggcaccccttggtccctttttctggtcagatgtgcttgattcttttctgctctacaacccacctctctagtcgtgtcttcccatctccctactcattccctcccgcgccgctgcgggtgagagccttcagcggtgcgtcctaaggagcgtgaggagtgtgcggagcttggcacaccaagttgctgagactgtgacaccagcctccgcccgttccgcgcgggtgcaggcggcgagcctcggctcggacaccacagctctcctgcccgcgccgggcagtcctctgcctgtccagaggcagcactcccggctctcggctggctgtgggtctgtcttgtggggctccagcactagcctgctcggcctcggaaactcctgcagcgtccagaacacagaaaatagactcatctcctaattcgccagggagctcgagggctgcggggccgcggggctgcctcccccgctcctcccccaacccgaccccaccccacccccgccagggcttcggcggcctcccggagtcacacagcctacccccccaccccaacaccccctcccccggcagacaaagggcctgggcaaattcgccgcccggcctcctagcgctccggggaggccgctgcgccccggagtggatcgcgctggaggcgtgcgccgggcgagaagccgcggccgcgggagcgcagtatggggaagaaccgcgagatgcgcctgactcacatctgctgctgctgcctcctttaccagctggggttcctgtcgaatgggatcgtttcaggtaagttcttccgtgactttctcgcttcctttccagccatcccagcggagaccgcgaacgtacgggtcggcagggctggtgcaaccggtgcgtggagagcagggctcagtgggtagcaataaaaatgagcttgaggtgcaggttaaggggtcaagttcggaaatgaagcacacttctgccggcctcgttttaaccgtatgtggaatagtttccttctaattagagcaataatatttgcaaaggtacgtttacagcacctggaggaaaattagaacgtacctaagttgatagcaacgctctgctctagcatacacttcagaaatcgtttactcgtgctggagtctttgcatcggttttcttttcaacaatgaagtgcggtcaccaaactttgattccccctcccccgcccctaatataatcgtacttttactctgaaaatgctggggtctgtaatctgatcgcaaggcttctggggttgcagagtttcagggtctagacgggtggtctccattgcattcaacgcgagcgccctgtatctatggactgtgagcttggaaatgtttgtgctactggaaccgcggcactttaagccccgcacttctgtctgccccgcccgcagagctgcagttcgcccccgaccgcgaggagtgggaagtcgtgtttcctgcgctctggcgccgggagccggtggacccggctggcggcagcgggggcagcgcggacccgggctgggtgcgcggcgttgggggcggcggaagcgcccgggcgcaggctgccggcagctcacgcgaggtgcgctctgtggctccggtgcctttggaggagcccgtggagggccgatcagagtcccggctccggcccccgccgccgtcggagggtgaggaggacgaggagctcgagtcgcaggagctgccgcggggatccagcggggctgccgccttgtccccgggcgccccggcctcgtggcagccgccgcctcccccgcagccgcccccgtccccgcccccggcccagcatgccgagccggatggcgacgaagtgttgctgcggatcccggccttctctcgggacctgtacctgctgctccggagagacggccgcttcctggcgccgcgcttcgcagtggaacagcggccaaatcccggccccggccccacgggggcagcatccgccccgcaacctcccgcgccaccagacgcaggctgcttctacaccggagctgtgctgcggcaccctggctcgctggcttctttcagcacctgtggaggtggcctggtaagcgccttctttccctagctctccattttcccctgctgctcctctccttgcccataggtcaggatgatttgcatgcaccttctcccctttcagtgtgctccttttgagcttggcc

SEQ ID NO: 34288 - DNA, 2300 bp, Homo sapien
aaaaattcttctttgaattttcttctaaagaaaaatcaacatttgaccccataattatcaaacatccttgacagaaagttcctagatgggtgaaatatttttagaatcaaaaatgctcaggttagacatctgttaattgaaatactcttaaatgtctccacaaaagtacatgaaaaacaattgaactctttgcctattttcaatagtttaaaatattacaaaggggcaatatgatttataggcattctttacaataattttctaggtgaatttttggtaaatgctatgggcagttagaagaagcacactagttaagctaaaccatatcctaaatataataagatatatttgtgtgacatattttgaagctggaaaaaaagtcacagaaaagaaaataaggtaaattaaatatatctcactctctccatagacttgaatttcattggatctgtcatttctttgtgttaggaacatttcaatttcactgttagatattttgaaatatacagtaaattgttgttaaaaaaagcttacaaacagttcagaaatctaaagtataggaaaataatattttgggatttgcaacaaagtaagtattagggtaattaaatattaatatattgaaagaatgtatgtttcaaataggtctgttacaatttaaatatattcttcaaatatatctaatagatttgggtcataagttgactttaattttgctgtgatttttagtctattttgaacaccaacaccagaataagtttcctaaaataacctattatcttatcaatctgctgctggtcaactgctaaatggcttatttttccctacaaacataaagtccctagtctttcctggctcttctgtcttttcagccttgttctttactactctcccccatgatattcctactccctttgcaccagtctgctcaccttttcataactatgccttccccatttctacttgttctgtctttattgacctgttctcctccactctcttctcccagtatctggataggtagtaacacagtcatcttcactacagatttaatactcaacttacttttttttttcttttttgagacagagtctcaccctgtcacccaggctggagtacagtggcacggtctcagctcactgcaacctctgcctcccgggttcaagcaattctcgtgcctcagcctcctgagtagctgggattatgggtgtgcaccaccacactcagctaaatttttaagtcacttttaaatgtcctttatggatttcatatttctgtacaattgttaacaatatgtgtgagtctaaaaaatgtcaaccaccttacagaaatagaaagtctttattaatatgtgtgttggcctcttcatatctatgtctctgagctgaccacaattatagctgtctaaggtttttgacaatttttcttttacatttcctcagagttatctttgcttattgttgccatgtttcagctgccttatccaagtattttttattccctttaacatttccgtagaaaaaatttcattgtgttctgaaaatgtaaaaatccttcatactgaagtaaaaagtactgataacaatttacagaaacatacacactaagactatattgtgtcaggggtcaagactatataatgaattaataaagtactaaccatggcatttaagcataaaagcagagcataagtgggaatagaccttagggcagcagacactgaatttataacacaaaaacaaacacttattcttccagcctggtccatgtgtcatagcatataaatgatgatttctgtcttaattttttctgttgtatctacatcatcttgtataaccatatgtgttttatttaaggaagttttaaaagatttaactttatgaaatagatttttctatcattatgtatcaatcttcccatcactataaatgagccctatactatttcaattacagatttaatattttaattacctaaagcatatttttcttcaaataatttttgttattctatcaaaatagctttcttaacaatgattggcttcacttaaaaaaatgtgataccttccccttattagttattgtgcctttgttttcagcatgttatttgcacaggattatggtgcaaggtagaaggtgagaaagaatgcagaaccaagctagacccaccaatggatggaactgactgtgaccttggtaaggtaagtcatttgtgttgtctgaatttaatgagcatactagatgaaacttgagaatcttgcattttctctgccagttacatttgtattcatcttagcactg

SEQ ID NO: 34289 - DNA, 2300 bp, Homo sapien
gttgatgaattgggttatttatgcccaatgagaattaatgattttgtagatcaacaatatgaatggcatccattaccataaagcccagttgaatactgcaggggagagggtactggtgtgtaggtggacttatttgtcctttactgttgaccatatgcaataggaaatcctctgtaaatgtgctgtcctacatggtaacccctagccacatggggctatttaaataaaaagtaattaaaattaaataaaatgaaaattcatttcttcaatcacactagtcacctttcaatgctccataattttatgtggctactgtcttatcagcacaaataaaaaaaaatttccattatagcgaaagttctattgaatagtactattctagaaattttaaaatgcctttgacgatttaaaaatcagaaggggcctgtttgactagctttgtattctaactaaaatttaactttgagagagcccagtaatctgtattcccaagtgtctctgggaaaaacctagacatggaaaaggagcttcattgtccagcagatgaaacatttagtcagacgtgctcatgcacagccagggaccggtgtggaaagaaccattcctccaaaggctccaggcaggcctagtgttccagggacgctgccagcacctcgctggatcgagccattatgtctaatgccattcaataccatccctttgcgtttgatgtctaaaacagaagactgaaatttgaagagaaggaagtacttgggatgccaaatgcaccccagactatagctttatgcacaacctttagagagaaatttgttaatgctcccttcttcaaaaatcatataccttcaggtaatttcttcctaacgtaactaaggcacaatgattttggccaatacagcttaactttttttgagattctgttgctggacaattttcctccctcattggagaggtaaaattttcctgtctttgccttagaaaataaaacggttcataggcaagaataaaaatcatatcctccattttattttttgattaagttcacttattttgtgggggtaagaatttctttcgtttggatcttcagggtattggccctgtgaatgtgtgcccatttctccactatttgccagtcccactgagccaatcttctaccaagactgaaaatagaccatagttctcatttcttgaacagatatcatcaggagagccgagggggagaccattaggcagccccacattttccaactcaacaggtggaggacatgggatttttacgttctttggggattgaacccccacacaccaccaactcccttagcctttcaggataagtatttccaatccctcagagattttcttaggagagaccctaacgacaatggtgcttctgtgaaggactgaggagagctggtggacgatgcaggtaggagggaagttaggctgggaggagaggtgctgggatgggacgtttggtttcctgacaagtgaccgactagagagagaaggcgcggagtggcagcggtaagaacaacgtggaaaggacggaaaacgcgaagagtggcgccctggcggacctggggcggggcagagtggtaagggtcacgccaggacgtacccggctgtgggccgggggaggagagcacggtgggacagcaacgaacttgctgggggctcccggacccgagctccgccgatgaggtcagcggagcctaggcgccgggaggaggccagtagagcccccagacacgagtgtcgggaggccagcggaggggcgggacgggacgggaaatgggacgaagagcaagagctgggggaggagggaagagggggcgtcggcgctgcaagccggaggcggcccgacagggatcgtttccttccggagaggaggccggctctggactgaggcgcggacggggggcgtccaagggcgggtgacggggaaataccgcggcccgcgcttctctccggctggcagcggtgccgcctgcggctcctcctccgggccagctcggagcccggcggcggggggagcgggaggcgggagtgagggcgggggctcgggaaggagggaggagggagggcccaggcgcgccactgacagggtggcagcctaggagcggacgcgttgccgccgccgctgctcctcctcctcctcctgcagctcctccagctgccgctgctgccgccgctgccgccaccgccgccgccgggagaagtttcactcccgacccttgctcggagccccggcccagagctgagcgggagcccggcaggcagctgcagcccgcggcagtcgaggc

SEQ ID NO: 34290 - DNA, 2300 bp, Homo sapien
ggcaggcagatcatgaggtcaggagatcgagaccatcctggccaacatggtgaaaccccgtctctagtaaaaatacaaaaattagctgggcatggtggcatgagcctgtagtcccagctactcgggaggctgaggcaggagaatcgcttgaacccgggaggcagaggttgcagtgagccgagattgcgccactgcactccagcctggtgacagagtgagactctgtgaaaaacaagacgaaacaacaaaaaaaaaaacacgttataatattattgtgtaaaataagttatttttaaaaattcactctcttagtatgcattgctaaacatgactcaatacaatactgagtttcagcttaagtttattttaatagtctgaagatattgtgatgttttaaaaactcatgatatttaagaataacttgtttctttttagttgcattttaaatctgtgggtgattccagtaggatgtcaaattaaagtacttgaataagatgattacaatctttattttttatattcgaatctgcagtgaggcaataatgaataccttctgtcctaagcacactgatactctaaattgcaaattttgaatgtcattctgtctgaaatatttaattgaaagaggaatgtaattgacatataatttccaaataagttttgtttggctatataatacattaattcatgcctttgttctttttaatttatcttcattatgctatcaataagaaatgtttattgcttctgtttaaagtattactacagataatgggaatcctggaggcataagatatagaacttagtctactgggcaaattgtgcatgaaaagataaacccatggaagcccatactaatttgtgtcaaattaataatgcatgtcccaaaattaaataagcattgcagaaaatagaagggtatttgggtcactggggtctgagagtagtcaatgaacttcacattcttggattatacttgcatagaaccttgtttcaacaaaaacaaggaggaacattttccaagcagtaggaatctgggtaaagttgtggcgttaggaatttgcctggaatggttagaatggcctgcaatgttaggacatagtaagatgcaaacctggtgtgagagaggatagactatgtagtgtggcactaggagatgaggatgaagaagtgtcaggctaaagtgtttgtattatgtagctcatgaatgtctttaagctgtgagcgacaagttccaaagaaccagctgtgtcagataatcagagggtgagctctgtgatgatctgggttgaggtaatatgtttcaaaatgccttataaaataagagtttatgctacatattttgattggtgaaactcagaatatataaactattaataaaattttgtattttctgaatgcaatattggattactcaaggagcagaggaagcataggaataacacatcagcaaaagtggttaccctcaacaatattttgtgaaataatatgatatttttaagaaaggtatcaaagtagtcacaaatggaagcatcagagctatatcatttttaaaatttaatacatttattttcagttgcatataggaaggggatatattttcagtgcttgggtcctctaaaaaatttatctaatcccatatagatacaatctttaatgaaagggctcctagcctacaatgtgctagatgactaagaaaatcagttgactttctgaagaaactagatattggtgtctgtcagacattatgccacactacctcggaatcttgttaaaatgcagattctgatttcagttgctctgaagtggagccagagattgtacatttctaaaaagcacttaggtgatattcatgatgttaatccttggaccacacattgagtaatacaatgaaattttcaacaagttagtctcttaatgtacataaacaaaatattataccatgttgttatgtgttggtttatactcaaagtactgttctaagattctatccaatatttttaaaaagtgaaggatttaacatcctcttacacatttttatgttgttttgtcactgctgtgaattataaaaagttttaaaagatactgtcactgctgtcaagaaatttctatttaactcccttcaagatggctaactagacacagacaggaagagtttctcccactgagaggccggaccatcaaaaagatgcacaatccaagcagatcttctgaaggaagtaatagagaatggaaggaggaaggactcagatcctgggttgaagggggagggagcagagaaccctgcatgtggttattta

SEQ ID NO: 34291 - DNA, 2300 bp, Homo sapien
tgacattatgatttatattttataaagatcattttgggtgctgtgtggcaaattaactacaatggaagcagataggttatccaactaggagcctttcaaagtactccaggaaagagatgttagtagcttggattagagtagtggagatagaggagataagtgattagatccttggtgatgtgtgttgaaagtacagagagaaggtttaaggatgatttcaaggctttttggctggagtgactgggtgaatggtggtacagcagatacagaatcctgcaaaaggaggttttggtttgtttgttgtggagggagtcaaaataaaattgcagtgcctggtagccatctaagtggaggtggtcaataggctgtaatgtatgtcacagaccagtctggaattaagggaagaggtaggtcaagagacaaatacttgagagtcactactctatagatggtaaagccttcagatggaatgaaagctgaccatgttatttattatccaaaccagcacacatttttttattttgacaatttcagacacataaaagttgcaagaataatacatagaatttgcatatgcctttcagtcagattctccaaatgttaacattttattgtaattgctttatccttttctatttctctaattacctatagacagacactttttctctgaactatttgaaagtaagttgcggacatgatacccatagccttaaatacttcagtgggtttttcctacaaagacattcccttgtatcagtagttcttaaagtatggttcccgggccagcagcaactgtatcacctggaaagttagaaacctaacttgtagggccccaccccagatcaactgattttgacaatttttctgtggttatgaaaggaaattaacatgacttcaaaactattatctaatttataggcattatttagattttacgaattgtcccagtaatgtctttgatagcaaaagtaccaaatggacacttttgagattaaaggcaaccacattcaataattttgccaagacaagggtagtaatgtaatcataaaaggcagctgagctcacatctgtaatcccagcactttgggaggctgaggcgggtggaacacctgaggtcagaagtttgagaacagcctggccagcatggggaaaccctgtctctactaaaaatacaaaaattagccaggtgtggtggtgcgcgcctgtagtcctagctacttgggaggctgaggcatgagaatcactcgaactcgggaggcagaggttgcaatgagccgagattgtgccactgcagtcgagcctgggcgacagagcaagaatctatctaaaaaaaaaaaaggcattgaggaggtatactttttcttaatacgtacacttagaggtctggtatgataactgtaattgtctataggattttataaatggatgtccttagtgaccttgacaagagggaaatggactcaaaaatgaaagataagaaagcagacatggtatgtagaaaacttctttataaaacgagcaaagatacggagggggatgtgggattaaggaaggtttttttttttaaagtgggtcattttattaatacattatgttgattgctgctgggaaaaattctttgcagagcagtctagggaggtttacaaactactgatgcctggggctcatctccaaagattcttatttaatggatctgggctgcagccaggttcacggggatttttaaaagctccccaagtgatcttaatgtgtagtcaagattgagaaccactggtagagagagaaaaaaactctgttgaagagaggacttaaaatctgctgcagcagcaagaccttaaataatctaagtgctaagttgcagccagcaccacttaaattatcaaatcttgtcagttacagtatccaactttccctacaagcatccataggcagacgaagggtttataccagtaactgcattccccaggagacaagaaaggaggatagaaaaacgacttaggaatctccttggagctcaagaccaggaacttccccaagccggaggtccctgaggcgctctagcgcgctggccgcactcgcagcccaggtcgccagtgcgcacgcgcaagattaggtggggcgccagagccggggcacctgcgcaggcttggctgcgccctctcgcgccgcacgctctgcgggttcctcccttcttccgagcctctcctctggccgccgcgcgggagagaggccgagatggcagatgagattgccaaggctcaggtcgctcggcctggtggcgacacgatctttgggaa

SEQ ID NO: 34292 - DNA, 2300 bp, Homo sapien
cttaatttaatgacatcttcaaagcctcttgtcatatataacatagtcagaggttccggaatctcaacagttatcttctggaggccattattctgcctactacatagctctgtgaacttacatgatgaacatgctggaatttcctgttcagttctgcgacttatactttgagatgcaaactttaaaaagacaatgaaatttcagaaccttccaaatttattaagccaagggggcaaagttaagccttgaaaactgagtcatgtaatacagctgtttttcttctctggtgcatgactattgttgcttcccgacctttgtgttgagatgttatacattaatcagactccctattcttcgtttcaaacctggactacataatattagagctgtagacccttgtgattgttacttttttacgatagaatattaagcaaccaccttagagtgtaatcaatactagccaatcagatcttaaatctggatgttatccattgtttggaaaatgttgtaattctgtttggcatctccattttgtcttatataaaccatcttcaattttccttacgctggaagcactgatcagcattctttggtgtctacatgttcccatatgactgcccttacactttacagttgaataaacctttttaactggatccttagccttttgattattttggggtgacaagacaaaccaggccatgttcccagaacaactagaatagtgaagagcccacctcatatgtggaacagttaaaggagacatgcagatttatttaagaaaagaggagccacagaactgaactgattctgtcattatagaactgttttaaagtatcagcagatgagggactttggttaactgaattcaggacagtagctagcaagaaatcatcacaataagttatgaattttcaggaagctgcactatgagtctacactgaaaatgggggagcggggacggggtatcttttaaatcaccgtcagcattcagaaaacacaatgcaaggtccaagatcatctagtttattgtttctcagataaaagacaatatccagtatacttggtttaatcgcttcattacgttaaatgttctgcaaatcgaatgcatcttaattttaaaaaatcgattatcttgttattctcagaatgacttgcaataattccttagaataacatagatcacagagaaagaaaagggccttggaaatccattggtccagatctttcatttttaataagaagtcaattttacctaaaagttaacctgaaaggctacacgggtagggaaggagaacaattatgcaataggaacaataggaaaaggttgtggcgcgttagtaacgtgactacagagttttttcttgatgcttgcaaggtcataagttgaaacgcacttaaatacttatgattgtttctaattatgatgctgctgattaattacccatttctgacctctttatcagcaaaaccaaggagtagagagagctgaataggcaaaatgtaaagggtaaaactaggctttacggtcaggcatagcggatttgcatcccagatctccatttactaaatgtgcgaacttcagcgagtaatttaacctcaccttctatggaaataaatgagagaatatacgcataaaatttttaggagtcagtgttccaatcaatgcccgctgcagctgttaggacttggcttttatttatgcacatttccaaagagatagtcgcaactgggaaacgttaaaataaaggttcttttacagacgatcctataccctaaacaggaggtaacaaaacgcgggtgccgacgccatccactatatacaaacctagtccgcctagcagacgatccctgcgccggaagtgactgtgcccctaactaacatggcgtccaggtgatttccgttctcttctggccagtaattgggctctgcggctcctcgcgattttaccagttcccatccgtttagcaaacgcctttagcaaacgcccgtttagcaaacgcctcctccgtcctttggaggagggcggggctaaaagggagatgctgcctagtgattcgttgtggcgcattagtaacgcgactacagggggctggaaacagttcagtctttgattggttgctgagaggcggggctactcgactgctctggaggtagcggccgcggtgaggagagccatgggacgggcagtcaaggtgacagggcccgggaaggggtgggtacgatgccgtcggggagggtatgttcgcgtccttgagaaaactgtctggagtctctggaggctggggctcctgaccct

SEQ ID NO: 34293 - DNA, 2300 bp, Homo sapien
gaaaccccatctctactaaaaacacaaaaattagccaggtatggtggcgggcgcctgtagtcccagctactcgggaggctgaggcaggaaaatcacttgaacccgggaggtggaggttgcagtgaactgagattgtgccactgcactccagcctgggggacagagtgagactctgtctcaaaaaaaaaaaagaaaaaaaaaggaaaaaggaaaaaaaaaagatatattgatacagataggtagatatgatattgtactttcatgccataagactacacaataaagttcctgaaagttcctggctgggcgcagtggctcacgcctgtaatcccagcactttgggaggccgaggcaggcagatcacctgaggtcaggagttctagaccagcctgaccaacatggggaaaccctgtctctactaaaaaaaatacagaattagccaggtgtggtggcacatgtctgtaatcccagctactcgggagactgaggcaggagaattgcttgaacccaggagacggaggttgcagtgagccgagatcgcaccattgcactccagcctaggcaacaagagtgaaactccgtctcaaaaataaataaataaataaagttcctgtgaagtatataaacatgtcaacaacaggcttgactgtcacaaaattctgaaagatgtcgcactctattcttatatagcatatgctaatttatttatttattttttgagattgagttctgctgtgtcacccaggttggagtgcagtggcatggtcatggtccactaaagccttgacccctggggctcagcagttatgccaactaagcctcccaaatagctgagactagaggtatgcgccaccacacctagctattttttttatttttagtaaggacaaggtctcattatgttggccaggctggtctcaaattcctgagctcagttgatcctcccacctcagcctcccaaagtgctgggattacaggtgtaagccactgcaccctgcctattcttataatcatatatttatatttcaaatggattttaactggttatttaatagtttaattagataaagtaattcatggctgggtgtggtggctcacgcctgtaatcccagcactttggcaggctgaggcaggtggattacctgaggtcggaagttcgagaccagcccaaccaacgtggagaaaccccatctctattaaaaatgcaaaattagcaggacatggtgatacacacctgtaatcccagctagtcaggaggctgaggcaggagaattacttgagccagggaagcagaggttgtggtgagctaagattgtgccactgcactccagcctgagagaacaagactccgtctcaaaaaaagaaaaaaagaaaacttttttacacatgggtatctcaccatgttgcccaggctggagtgcagtagctattcataggcacagtcatagcacactgcagcctagaatttctgacctcaagcaatcatcctgcctcagcctcctaagtagctaggactacaggtgcataccaccataaccagctttaattaaatgttttttatttggttattttttttaagttttctgtattcacacaaggggttgcccaaatataattttgctttgactattgagatctagtgaaagtggggtatatgaattctaattgcaaatatccaggctcagaggcccagcaggactttctaacacaatcttttagcggaagttagaaatggtatatagcaggagagtcagatttgagaagcatatgtagattcgaagctgggggaatatggcaggtagtttgtacaacatctaattcagaacattaaaattaagattttagtcaaactgtgtttaagttagttcttattttcctgtagatgcatctcacagcatcagtacaataccaaaaaagcacacaagaataagaatatgtggaatttctatacctattgacaaagcacataatttaaccataaacacaaagccataggtcaacaaagaaatgaagattccagttctgaaggtgagttttctgaagccaaagtggatacatgcaaaattaatatagttttactgtatatcagttgtcaccaatcagaaatggaaaacagatcctatttataattgcaaacaaaactgtaaaatagactttttaaagtctgggaatagacttctaaaataagctataacacttaaaaaggagagatatactatgttcctagataggacaattgaaaattctggagatgacagtttttcaaaaatctattgaggccaggtgcagtggcccatgcc

SEQ ID NO: 34294 - DNA, 2300 bp, Homo sapien
aattagatcatggtattcaatcacgtaatgttttgttacaaaatatgaaaaatctgaaaataaatgtttacataatgaatactaccctttataggtaaatgatagaaaatttactacttaaggcattcacacaaggttactacatttgtaattcaaagggaggcttacaagcacatatatcaagttcgggaattttctggttttttttttttgttctaggaaatttttagaattaatagtctttatgtaaccttcctctactctatcatgttattctcattcagtgaaataggattgtagcgtatcattggtcaaaaaactgcattaaaagtcaagtaaatggtcatcactgtactcacagtaactggaaaatcaaaatgcttatggtatgatgtagataaagatcttatggttaactgaaacagaaaccaagagaaaatttaaaataaaaaaaattggtcattttttgttgctttagttttttttaatctcagggaatttttaaatttttcatttattctagggacttgggatacatcagttgaacaaaacagacaaaaatcccagcttctactagggaaggcagacactaaaagctaaacatatcagataaatacaggcatacctcagtatccgagggggattggctctaggaccacgaccagtaccaaaatcctctcaggtctctaatataaaatgatatagtatttgcacataacccacatatatcctcctgtataaattatctatagattacttataatacaatgtaagtgctatgtaaatagctgttatattgtattggtttttatttgtatttttaaattgttgtgttttttttcccaaatattttccatctgtggttggttgaatccagaaacgcagaagccatggatgcggagggctgactctgaattataaagattgttacaaggtgggaagtgtcatgggatgaaaggaaaaatagtaaggtaggaaagatggagaattttttttttttttggaacacgtgtcactctgtccagcccaagctggagtgcagtggcctgatgatggctcactgtaacgtaactcctggcctcagcctccagagtacctggaactataggtacacgccaacacaccagggtaattttttttttttttttttgtagagacagggtctcgctatgttgcccactctgttctattttgaaggtacaaccaacaagctttcttgacagattgaaagtgaaaatgagagtatgagaggagttatggatgatataaagtttttggcctgagtaactagaaatcctcgccatcaacctagaatggggaagaccatacattacttacaggttcgagagcttacttcagtggcattacgctatccttttgaacttacgataaagttttgtaggcattttggtggactgctggctgctagatagggcactcatgtttctgatttctgagatatgtaaaatacacacccaaaggaatcacagaagtctagtacatgtgtaattttcacgcatttcaaaccaggtggtttagccagccttaaaccagttaatgactgattgaacgattctgacttttacatgaaaaagcagtggtcagaggatgggctctcaaccgctactgagagacccctcatcccacaaccgctcagcacccacccacccaccctcgcctgtgcgcgtccaccgccccacaacgtgcgcagacgtcgctcctccgcacggatgtccgcggcccgggccggggtgggaaggggctcccccacgctcccgcccaggtttggtcgccatctttcggagcgtcctttcccgcgagtgctgcagtcccggatctcaggcgtccgttagctacagaggccaattcctaacccgcgcggctcgaatcccgggggtcccatcgcctgccggccgattcgcccatgccggaggtacggcgggggcggggcctggcggggggcggggccagcactgcggtcgctgcagctgcgcaacggcgcccgcccctccggccgctctaggggcgcgcgccgcctctcgctccgcccaacccgcgcgcgagcctgggcggggagggggagccaggaagctgcgagcgcgctggggagcgcagctgcaggcgttggggcggcaggagccgcggagccggcgctgagaggggctgcggccggagcgggcggctgagacaaaggcgacggtgagtgcaatgccagccccagtcgcgcgtcggccgccacgcctcgccctctcggtcccttgggcggggtcccgaagccccgaaccctcgtccctgagggc

SEQ ID NO: 34295 - DNA, 2300 bp, Homo sapien
cttaactttacattacatctttatctgtacagctacaaaaatcaccgtcacttctgtctttccaggtttagagtcgtggctttggaaaaagcaaaagggaggaatttaatttcacttaatgttcaggactctgtgatcctgtaatgtggttgttactgatctatagttggcaaagcttataaatgtgtgaggtctctttccagaatttacaaataagtgatttatatttcgccatttgggacaaaaatgttaacatctctttgaacacagtcaaattgatacatctttagtctttgatcttttcatttcaaggaaggctcattttcttcattctaccactctactttttaaactttatatccatttttcttgcaaacattgtctacacttgttgactctgctgctttcctttcactcacttaacctcctgtaatctgatgtctacccacactactttactgaaactgctgttgccagcgccacactgtgtttgctgcacagtctaaggaatagtcctcagtctttcctatctcagtggcagttaatactgccacccactttctccttgaaacaggctccagtgacaccacatttaacggattttcctcttctaattctggtaacacccaaacctccttagtagacttctctttttctacctatgatttaaatgctgttcttactcagaggactctgttgagcacactttgcttgtcatgataccgttttgcctagagatcattcattgctttagtcataatctgatgattgcaaaacttctccttggcttcagatttatatatcaaactgtctattggacatcttaacttgactattgtagtagtctgcaagtgatataaacccacttcatcataacttcaggctaaagagggagatatgttgccttacaaaaccaaacgtctggtgcacaggtgaaactgatcttagggatgcctagaatcagagattgatgtcatcttgacttcccacttctcttttgccgctgcttgtcagcattattacctcaaaaccatcttccacatgaggtataggatattattgactaaggacatccttaaagtcaacagcttggcagtcagaaataaaaaataggtttaactctttgtccaactgcagatagaacattgcctgacaaggattctgatagactcagcttggtttgccacagtgggatgtagagtattttgactaacatgcgttctagtaatgatggtaggagtggtgggagtggtagggatctaatagctcgattcacagaagaaagccaacttaacctctacccatttttcatgtacagctctaattccagtggataaggtaataagtttgtttatggtttttgatgaactgcacctgcttgattatctccttagaattcattgctgtgtcaattactgtctgagttgtctgtgagaataaaggactcaactgaagaaacctatatgaaaatggtgatcattatttcttcttggaattagaaacttgtatgtggcagtcataatgttctaattagtgatttttaaaaattaactcattaaaataatccatacttttataatcataaaataggatgccccacgaaggcaaagatttctgtctgcttttactactacacctagaacttgacacttaaaaagttgctcaaaaaataatttgttgaatcaatatcagtttgttaaaatcttgattttttttcagtgtttactttttttggtaatatttattttaagaaataaaagctttcaaggataagtaaagtttaacttttttttactttttcttttttttccctagactatctgttatagtccctgggtcaagacaacaatttttataccttcgtcgtggttcagaaaggagtctctgtagaaccagaagcaaagaaaggaaacaatccaaatttttctttattaaatcgactgtgtaagatacttgacttccaggaacaaaaacacggtgaaataataaaatttcatcttggcatcactggacatcatcgtattgaggagcgtatttttggaacttcccgagttgagatttggaaccttcattggtgctcatttactgtggactgtaagcatgagtgaattctggttgtgtttcaactgctgtattgcagaacagcctcagcctgtaagtatgaagtatgtggacacatcaggtggggtgcttattaaactttccactggttctcaaactgaggattgggatcctagcagtaattgcaaagcagttgtagagaataccacagagaatagttcagtggaactccgaacata

SEQ ID NO: 34296 - DNA, 2300 bp, Homo sapien
atttctgcataacaaattattctaaaacttaataaatgtgtgttgtgttaagccattatcttagagtttttgtgagtcaaatttaggagcaccttagctgagtggttctggcttggtatctcccatgaggttgttgtcagaattgacacagggctgcagccatccaggtcttccctgggctgagctgtagaatctgtgtccaagatagctattcaaatggcctttggtgcatgaccttcagttcctcatgtgggcctctgataggctgcttaattgtccttacaacatacttaaggggaacttaggcttccccctaagtaagtaatccaaaggagaataaggcaaatgccacagttttttattatctgtattcaagagtaatgcatcatcacttctgctaaattctgtttgttataccaggtaactctgatacagtatagaatgggtctgtacaaggacatgactatcaggaggcagggatcactgtgagccatctttgaggttggctgccacaatatataaaataaaagctttgattgcattaaactgatttttcccttcatgtctataagacatttaaagcacaagcatagtacaatgttcagtgtctgtgaatttgctttttgaaaaacttgcagattttttaaaaccttatatttttatttccctagcttaaatatatgtatgttttgtgtgtactcttatttttttttttgagacggtgtctcactctgtcgcccaggctggagtgcagtggcgcaatcttggctcactgcaagctccgcctcccgggttcacgccattctcctgcctcagcctcctgagtagctgggactacaggcgcccgccaccacgcctggctaattttttgtatttttagtagcaatggggtttcaacgtgttagccaggatggtctcgatctcctgaccttgtgatccgcccacctcggcctccctaagtgctgggattacaggtgtgagccaccacgcctgaccatgtgtactcttaaaacattataaatttttttatgtaatattttacagaactagttaccatactttagttgggaagttgaatgatactaaagatgttaatgttatctttaagatgcaaagatcacttagtgtcaaacatatattgttaggatttaattaagatttttttcttagattgcatttttataatagctacccttccaattagaagatgctgctactattaaaaatcatttatgtgagtaaagatcaatgtatttgaacattccttgccattctaaagatataatacagttaaataacctgcagtgtggatttatgttatgaacgttatctcgacagaaactgaaagtgcaattttactgataaagaattgtatactatactattttcataaaactttttaaaaattgaaatatagctaattcctatgtcctatggatatatagcaccttatagttattcttaatctctttgctgactgcttatatgtgtttcttatatttataccttccttacacatatatccataccagggagtggcctgaggcactcataaacatttgttagttaaagagagttacctagttagttagacaaatcttgagctagaattcacatttattatccctgttttaattactttttggattttattaatggcatttttaaatacttttgtttagtaagaactagacaaaagactttttcactaacctattagatcaaaggccataactaaacccatggagtggctaggaatattagataaacgctccgctttcatctgaacctgtatggtccttgttctctctggaggttgtgaattctgttatcttccaatatgcccaggtttatatgtgagtctgaatatacatattaatcaaataattgattttaaaaatcaacggtcaaatagtaccttagtttctctactttagcaacataaatttataagttgattgtgaaattgggaattgaattctagatttcgttgtatttttaaggtatagtcctcgatggtctttataccagaatttctgttttcttatagaacaattgctggagtttatgcaccagctccctgcatttgcaaacatgaccatgtctgtaaggagagaactctgctcagtgatgatttttgaagtggtagagcaggctggagctattattcttgaagatgggcaagaggtaggtcaataaataaattacatacatttattatggatactaacttttaaaataacttaatttccataaatttgtcctgatttttgagtactgatttttgaaatttatacaga

SEQ ID NO: 34297 - DNA, 2300 bp, Homo sapien
agaattttgttcctttactgagttggtgtttactacagtaggtctaacatatggcactagtggattgcatttctcacactgggcagcagttttttaaagcagctaagagatggctgtctcccttgcccagcttgaggtccttctttgtgtgttgatcagcatgatttataaaaagggggaaaggtgtgcattaaaattttgctttttgattcggctataatatattctgttggtactatacatgaatataattactgtctggtgttgaaattcttggtattcttgaatcttgctactgatatttatgtgtaaaatactcatcttttagaaattttatcttaagtgaaagtttgtcttcatgtacatacaaagtacctactatcatttttctgttttaaagaatgattaacattagattttaattaatgtacaatattaagtatcaagtggaattccaactcacgtatgattgatttaaattaaactgaaaaaaaaaaaaacacattggtgcttgaaaaccaacctgtataaatattgcatgttttatgtttagaaaactagtcatgcttgtttgcatttgtgagatttaattttatatttaaatgcgggtattgtgtattttggtattgtgtcttttggaattttggcagaaaaacattcttaaaagctttatgaaaatctaaataattacatattttgaaagcataacttgtctttgttcaaaattatacttagtttaacttaaattctagttttataagtagcagtgtaattcagattggcagcatagtgttgttcagaaagtgactcagacttttctcaaagatattgaagaacttattttttttgtgcttaacaacaagatgtttcttctgcagtcagtggagtcctttgttaaaagacctgtctcccaggtaacatctcctcttatgttgcacaccccattttccccaaaataaaagtgttaggtaaataaagcaaaataattatattgctttgatttgttcagtgattgtttttctcataattttgccgcctggaggtataactaactatattttactattgggaactgtctttctttggccactaggagcaaccattgcaagcttagttggagtatctaatgccttgtagcagaagcatgaagaacaaggatgggtactagtggtattgtgtttcagatggaagagggtgtggcaaaattaaaatctttttctgtaatttctatagaaaaatggggcaattttttttagtccacactcactctggaagcaggtttaatccttttctttgatttcttctgagtgagttttgctggcttcttgtctttttctaggaattcagcattgggctacaggaaagtaccatgttgtgtagattattctttctcaaagaagtaggtgcatgctgcaactattggtgtacatctgatttttttccagcttccctttgcaaaatgaaattctattgtttccatttaaatttactatctacctacaaatcttagtactagtttgtatattcttaatgttaatttagagtgatcctgaaggttatatctttcagaacagttatttgataaatagcaaattttgcaagcagaaaccccttgttaacaaatacatgtgacatctgagaacctaggctgccttgtttatttggaatgcaatggtatcttatcagagcttataattttaccttgggaggacaatactgtattacatttgaataataataggaaatatggcttcccaaatatagctgtgtatcaatgtacagaattaaaaatcaaaatggatttttaaaactgtgaagtagaaagggtgctcaagccaatttttttcttaaagaatttagcttgctgacgtgtctcatggaaaggaggatggggtgtgtgtgtgtgtgtgtgtgtgtgtgtgtgtgtgtgtgtgtgtatgttttcaataaattgctcttggggctacatctgcagatacagtagccaattgatctaatgcagtttctggaggctttctgtacaggtgatgtcatccttttagctctattctcctcccactctctttccttcttattagatatttcatcttactgcagagcatagaatcaataggagcttctccttagggagctgctttgaaacaggcaaggacagtagaaattaagacactaacattcagtcttgctttagcagaagatataatggttttgtaccatattatataaaaatgtttaaccagaaaagctagacttaaatcaacagtgctgttttactgatacattagaataaggaacagtgc

SEQ ID NO: 34298 - DNA, 2300 bp, Homo sapien
gaagatgacaactctcagtacagaggagggctaaaagcaaatgactcatgagcatgatccacagctaatagagaaaatatgaaatctgtctaggattcatgacaggacaccaaaaaaatctgggaaaagaagatactgaagttgagactagaatgagcaagcagtcaaaacacactctagctcacactaggaaaactaaatattacagttaaagattctttcatttattaattctacctcttgacattttttctatagaaatgaaaatgtgggcatacattgtacttagcaccttaatttttaaaaaataaggaaaaggccgggcgctgtggctcatgcctgtaatcccagcactttgggatgccgaggtgtgcagatcacaaggcaggagatcgagaccatcctggctaacatggtgaaaaccagtctctactaaaaatacaaaaaattagctgggcgtggtggcgggcgcctgtagtcccagctactagggaggctgaggcaggagaagcgcgtgaacccaggaggcagaggttgcagtaagctgagatcgtgccactgcactccagcctgggcaagagagcgacactccatctcaaaaaaaaaaaataaataaataatgaagaactggaaagaatgtaacttatcaaatatcaagaactgaataaattatagcatattattataatggagtactgtgcagtcattaggaataatgggaaaaacatttaacaacattcaaagatgtttagtttatatatttgtttttaaaagttaacaaaaatttacatatttaagttttcaatagttagcaaaaaccttacagatttatctgtatgttgaaaagctttatccaagaattgcaaaatatcatcaaatagttatataactgtgtaataggaacaatctgtttctaatttttcaaaaaaagacacatattacttacacagtaaagcaaaatatgtcaccttaattagtgatgggaaatttacaatacaaaaacagaaattgttaaatagtgagaacaggaaataaaccttgttgtggctctggatatgataaattttaggactatttcatattcttgtattgaatcaatgcaattaggcaaatgtgacaaacattagagctgccttaattctaacacttattccagtacaaacaactctcgaaataatctttcttactcctaacacctaacatggaatgaataaatatctgtttatgacaactgaaaaaactaaacacatccttgggaatttcactatattcaaccatcctttttattattatttttaacaaatgcaaacaagaggaaatgctctgtactaattgttttaatattctagaaatcgtgagtactttggaaactggtaactatgaaacctctcccctcaaaaatacacctgatttttttagattacccttatttcttgattcagctacttttcagtctaaaaagaagctattcacaattaaagacttttgaagacacagcttactttttttttttttttttggcaacagagttttgctcttgtcgaccaggctggaatgcagtggtgtgatactggctcactacaacctctgcctcctgggttcaagcaattctcctgcctcagtctcccaaataactgtgactacaggcatgcactaccacacctggctaatttttgtatttttagtagagatgggggtttcaccatattggccaggctggtcttgaactcctgaccttgtgatccgcccgcctaggtctcccaaagtgctgatattacaggcatgacccactgcacccagcctaataacttttttcactatttaaacaacaacaaaaaagcaaaaccagaactcccactggtaagagcattcctaaccaattcaaccaaacagaagcatttaaaaagattatatatttacctgccccaaattttcacatacagagcccagcatgttgatattaccaaagatacatgtaaattaaagatactagatatgaaaattaaggaagattcatgaagtgttcctaaatatactcacagaaagatagctgttaacctccacatcatcagtaatggtttggcgctctcctttatagttaattttccgaaatcttcttcgggattgtctggcaggaatttctctttgtagaatactatcttcattatctttggcattctctacctgaaacacatgttcatattcctgatgaaatatcaaatttttccatattattgacaatctatggagtcttaacagactcataaggaagcttcatttacttcttacaagaaactgcc

SEQ ID NO: 34299 - DNA, 2300 bp, Homo sapien
ccgggcgtggtggcgggcgcctgtaatcccagctactcaggaggctgagacaggagaatcccttgaactcccgagtagttcaagggacattgcagtgagccgaggtcgcgccattgctctccagcctgggcaacaagagaaaaactccgtctcaaaaaaaaaaaaaaaaaaaatcacttcctagaggcaaaataatggaaataataaggagtgctcggattgtgcagcatactaagtgcttcatgtgaattttctcatactaagtgcttcatactaagtgcttaagtgcttcacgtgagttttctcacgtaatcttactaagtgcttcatgtgacatactaagtgcttcatgtgaattttctcacttaatcttaagaaaattctgaaacaataggtcctttactatattcccatttaacataaggaaaatgaaggcaacatactaagtgcttcatgtgaattttctcgcgtaatcttaagaaaattctgaagcaataggtcctttactatattcccatttaacataaggaaaatgaagttcagagatgttaaataacttcaagtcacttaactagaagaggtctaatattagagacacaaattctaggtctgtttgcccctaaagttcaagttcatggtgatcatgctttatagttctttctccctctttcaaaatattgatgtgactctgaaaattgatccttgaagaatggaagggttaacttttgtttgtgatcctgggcagatctttgagaggttatatttgtacaaaaaatgaggaaaacggatcgtctgcaacatcctgtgattttttccacaattactttatttctacaatggctatgccacacttcgctggtaaagtttttgatctatacctgaaaaagagaaatgctaatagtatgttgtaaactcccagtttgggcaagccccaggaccaacagaaaacagtccttaagtcattgccggtcccagaaacggtgttgtagcctgaactctcattgttttcaaatataattttaactcttattacgtcattaaaattactgtgaagcagtcattaattggaaagcatgtcataatcataaatcaccttgttatttagtgaactatgctaactgctgtgagaaataccaaggtgtacctagatgtagttacagccatcaaggagcttaaaattcagtggaaaggtggtgtcgccaaagttagttacctatgaacttatgagaaagggtaaggagtatcctagaacgatggattctggaattgtcagtgagcttattgttgaaacggcctcagcagctctctggctgctcctaagggtggtctgtttttcttaccaagggagcagtgaaacaaaactggctttattcggtctgttgggaagcagactagaatgtaaaaagtattgcaaaagttgccactcgagtcccaaccctaaacgcagttgcctgagggagggctgccccgggcatttagttacaagaacgcagtctaaatctagttttttgactcaaaggtaatcgtgagctggccgcggcaccggctgcctatcctggccgtgaatgtttgctttctctgccctggtctcaggacgtccgtttcgaatagatcaagcacttctctgtcggcagctttcacaagagatctcgttttatttaaagagatatgaggtgtgcgtggaattccttctttgccgaatggcggcttctacttccgcatattcaaagtcggcagtagaagttgcagaggagagcgcaaagccggacttggccacaccctgggcttccggatttgggcacaacagttctctccagtcagaacgcctccccacggttctgccccaaaatgctatttttgctcaggtcctcagcgcgtttccggtgtctccaacggatggagaagacggaaccacaacgccaaggcagaccccgtgactgatttaggtgaggtctcgcgaggtgtctttaaatctcacgacgacagcaggaaacgacttactcgcaccgccccaattttaacgtcacagtggagttactcccttgggcgtttcttagcgtgcgcgtgcgtgctgcgcatgcgcacttactctcccccgcccccgcgcagacttgtctccggccagtcgcgcgtgggtagaggccttaggcgggcgttgcgaagggttgtttgctagagttcggaccttgttacggcgcgaagttccctccttggggcgggggaaaggtaccgcacccgctacctagtgtgaatgaactgtggcgtgggctgctaagggcaggctgcggagtacccgggcc

SEQ ID NO: 34300 - DNA, 2300 bp, Homo sapien
tatttttttgagacggagtcttgctcttgttgcccaggctggagtgcagtggtgtcatctcggctcagtgcaccctctgcctcctgggttcaagtaattctccagcctcagcctcccaagtagctgggactacaggtgcccacgacaccacctggctagtttttgtatttttagtaggtacagggttttaccatcttggccaggctggtcttgaactcctggtctcaagtgatccacccatctcggcctctcagagtgctggaattacaagcgtgagccactgtgcccggccccagagatatgatttaaatcaggaatggttaagtgtgtggtgtgacgactatagctttgctccattttaccactactcctttcctctccttgcaagccagtggatattgtgctttgtcttttcttgattggacacagctacagaatccttgtgtacatagtacttcaggcagtacttctctaacaaggtaaaaatgctctgcatggagcctgggttagagaatattcttgggatatgtgagtttcagaactgactctttgcttgaggtttctgaaccatagcatttgtttaaagaggaaaccagaaaacccttaaattcacctttctctctggttaagattattcatctcatcttcctcccttgaatagtcactcatctgttaaagaactaagagtgaggccaggcatggtggctcacgcctgtaatcccagcactttgggaggccagggccagtggattgcttgagcccaggagctcaagaccaccctaggaaacatggcaaaactctgtctctacaaaaaaaaaaaaatacaaaaaattagccaggcatggtggcacgcgcttatagtcccagctactcaggaggctgaggtagcaggatcacctgagcctaggaggctgaggctgcagtgaaccatgattgtaccactgcactccagccaggattacagtgtgagaccctgtctcaaaaaaaaaaaaaacaaaaaaacgagtaaaacctaaactattactcatacagtaaaagaagtaggtttctgatcattaaaaatagcttacttagctgtgtcagtaaaggacatgtccaataactgattttttccattacaggagacttgtatggcgctattggctctcccgtacggttagcaaggactgtggtagttggcaaacgacaagacatggtccagaggctactttattttcttacttattttataagatgctctgaacttcaagaaacgcatcttttagaaaatggagaagatgaagccatcgttatgccaggcacagtaattactaccactttagagaaaggtgaaatagaagaatcagagtatgtccttgtcacaatgcatagaaacaaaagcagtttgctctttaaagagtcagaagaaattagaactcccaattgtaactgtaaatattgcagtcatccactccttgggcaaaatgtagagaacatttcacaacaagagagagaagatattcaaaacagctctaaggagctgctaggaatttcagatgagtgccagatgatttctccttctgactgccaagaagaaaatgctgttgatgttaaacagtacagagataaattaagaacttgctttgacgccaagttagagacagttgtttgcacaggatctgttccagtagacaaatgtgcattgtcagagtcaggcttagagtcaacagaggaaacatggcagagtgagaagttgctggattcagacagtcacacaggcaaagcaatgagatccacaggaatggttgtggaaaaaaaacctccagataagattgtgcctgcttcattttcttgtgaggctgcccagacaaaggttactttcctgattggggattctatgtcacctgattcagatactgagcttcgaagtcaggcagtggtggatcagattaccagacatcacaccaaaccattgaaggaagaaagaggggctattgatcagcatcaagaaactaaacaaacaaccaaggaccaatctggagagtctgatacacagaacatggtttctgaagagccctgtgaacttccctgttggaatcattcagacccagaaagcatgagcttattcgacgaatattttaatgatgattcaatcgaaaccaggactattgatgatgttccatttaaaacaagtacagatagtaaagaccattgctgtatgttagagttttcaaaaatattgtgtacaaaaaataacaagcagaacaatgaattttgtaaatgtatagaaacagttccccaagattcatgtaaaacctgct

SEQ ID NO: 34301 - DNA, 2300 bp, Homo sapien
tctcctcacctagaaagttagctcttttttactttggatccccactgcctagaacataaatgattgtggaaagaatatgttactatcttaatcatcaataaatagtgctttaaaaaagtcttggaacattgaaactcagtattttggttgttgacaaattctcaaagagatataaattctgcctattactttttcttttctaaatatcttcagacccttatttagagcataaactctagctgcaaatcagtgggagttggtagccacttaaagaaaataaaatttaatttgtatacctaattaaatgaaattctcaaaaagtatttgttttttgagatagggcccccctctgttgcccaggctgaagtacaagtggcactcactgcagcgttgacttcccacactcaagctaccctcccacctcagccacccgagtgggaccacaggtgtgcgccgtgaccacacctggctaatttttgtttgtttttgagacggtgtctcgctcttgttgcccgggctggagtgcaatggcacaatctcggctcactgcaacctctgcctcctgggttcaagcaattctcctgtcccagcctcccaggtagttgggattacaggcattcgccgccaccacgccggctaattttttggagacggggtttcaccatgctggtcaggctggtcttgaactcgtgacctcaggtgatccactcgcctcggcctcccaaagtgctgggataacaggcgtgagccacagcgcccggccacacctggctaattaaaattttttttttttttttttttttgtagagacagggtcttactgttgcccaagctggtttcgaactacagagctaaagcgatctgcctgcctcggccttgcagtgttgcgattacagacgtgagctaccacgcctgcccaaagtatttttatccagccttccaaccatatacaagttatttcctaaatttctctgaggattacatcccattgtacgagcttcctcatcctggagggggagtgagtgaatggatggggttgctgaaaatttataagattagtttgatacaaactctgatatattttggttccatgggttaaataagactgtgaggtcacatgtgagcaatgtttttctttttttagaaagcgtttcttccctgtaacttgactaaaattccacagttcctcccgtcttcatacctaaacattaagatagatttattaaaaatctaaataattagcgtaaagggttagatatctgtacatatatgtctttaggcttcctgacttcgttggtttcacctgattttgttggttaacaaggaaacagcctaactcctgagcctccaatcgctagctcttccaagagactaattcccggtgtcagggttctaggcgctagtacaaactgcccgcagtgcctgctcgaggtcgtctttgcggggagccatggctgtggcaggggtcccggcagtttccttcaccagtccctgtgagccagcccccgcgctgtccagatcccagacctctcgcgggccggcgcagccttctaagggcggtcctggggtcctgggctcaaagtccagccttggccgcggccccacgggtacgcttgtgggccttccgtgctccaggagccgccagactctgcccggcgcggaatggaggtgtgaagccgcagaagctagggaggggctgacaaggaagagtcggttgcccgtggttccctacgcaactctgtgggtgcggggagtcgaagccttcttcactccaaggctcctggcatcgtccccgcgccaccccggcgtaccctctgatggtcgctgacagcttcacaggggaagatcgagactgacccttctcccgctacacatccctagccaccttccagtcctgtcctctcggctcacgccccgcccctgccacgtgacgggacccgccagtgagcctatgggaggcagctccgccccacgcccccaccttgccccttgctccgcgcgccgccacgtgatgcggcccccctccagccaatgagtgccggccttgcctcgcgccccgccccgcgcgccgtggccgtttgaagtgactaatttctgtcatatgactgaggcgcccatgggggtggcggggcggctgtaggagcaggggcctagcaagcgcccagcggagcgacccctgcctggccgtggctagcatggcccctacgctgttccagaagctcttcagcaagaggaccgggctgggcgcgcccggccgcgacgcccgggacccagattgcgggttcaggtagggcgctgtg

SEQ ID NO: 34302 - DNA, 2300 bp, Homo sapien
tgttagcattttataactggctaacaaaggaggacttttcccacaagtggtgagtatgtcctgcagtttccttcagcataaaggagtgtatcttttcaaaaaagtttggctttttcttcactgtggagaaagtcacactccacattcatggtagatgacattatgaagtgtgtgccccaaacacttagtagaaaactgtgagagacagtttattttagcagaaaactgtgagagacagttggtggctgagcccaggtcaggagccaaggtttgcccaagctggcccaaaagccagcacaggagagtgaaggcctctgcaaaggggtggagagcagggaagtccagcagaggagagcacgtggaggcacagcccacccagatcccaagccttgtgcagggctcccctggctggagtagcccctgtccctagggtcagtcccatctgtgagatgtgtcctgggccctccctttgctggcggggcacagcagggctccctgtcagcattcctctttaaggccctggttccagggatggcttgtgaggccaggctcagccagtgtttggggtttggccttgtctcctcctctggctggggctcataccccagccacagttgcatagacttaggagtctctgggcccctttctctgcaaggactagaaagtgctgactagccaagaccttctgaatccctgcccgggtagcccagggatcctggagaaatggggtgtggggcaggtcctgcaggtgtggggaggaaggggagagagccgggctagagccgactgactgcaagtgaggggcaggccctcagagaggagacttccctgcggagcccactctgctggtttctgtgtgcttcatttggctctttgcttctgcagataacctagacccactgacgctgcgacctaacactccgcttcctatgctgccctgtctctctcttctttctgcaccttccccctccctctctctctccctctctctctcatttcttctctctttcatctcacctctctctctgtcctcaccactcccattcccctccccctcttcctgtttaccctccaggaccattttctctttattgttttatgattctcttgtcgtcttcctgtcagtgtttctttcctttctgtctcccatgcccgtcgcctgcagaaagtgatctttccgagacaggacgatgtgctcatctccttcctgcctctggctcacatgtttgagagagtaatccaggtaagacacccacctgactgaccgggccttgcctgggctccttcttttttcttacagagtcagtgggctcccacttgtgcggatgtgcacatttcctatttgcctttagcacacatgtttgagcgaatggtgcaggtaaggccctggcatcagggaggcacactctgtgcctagaacccataaccctagcgggtgtcacttgtcactggtggcatgaagtaggaccaaactgccctgtcctcagaaggtaccataggggtcagagggctcagaggactttagccaccccacttgtccctcctgggagcattgttccagggaagcccccaggcctgccctgtcttacccatggacacactcagctgagagagaccccagctgatagcatcttctcagagagtattgcagctttgcagaagtgctttaccattcaagctctgtgcagtacagctccgtttatgaccaaaacacttatgttccataacttttataattcacaaactcctaaaagagaaaacaaaagagtaaagttggggaatgaaactggcatggctcttcaggctgcagatggggactggcctgaggctggccctgagacaggccttgtggaagtacagagggagtgggaggaggaatccatatgtgattatggagacaaggaattctccatatatgtgtcactcaagggaccagcatatgaaaaaactgtgtcttctaggcctttcccattttgccttgggggaggtcttatgtaatagtgcaggtaaggccgtggcatctggagagcatgctttccagctttccagacctggattcaatgccagcaattactgtaaattagttttgtgaccctgggcaagtcatgtaacctctctgagctttgtgttccttacctgtagaaatgccacttcccttatagggttgctatgagcattaaagaaaggagcatatataaggcccctggtgtactcctagtcccattaggaaccagccaggggctcccccttggcctcgcactaaacagcacccacagccaacttcagcagcatctccagta

SEQ ID NO: 34303 - DNA, 2300 bp, Homo sapien
gcaccgaatgccacaatatgcaaagctcagagtctgtgagcatctgccaaggaccagggactggtggtaatgaggtatccttccagggttccctttaaaacttttggggtatacagctgagccctcgtgctaggcatgagtttcttggtccttggcttctcatatcattaagtcagttcagctccttcaagaaaaatgtccatcagctcagaacccaccctacgagttggtgagcatgtctggattttctactaagtagtgagtcatttatctgataggcctggctgtgatttcatcttcccatctatagcttaaggaagtaaatgtcccaagaaggccagctagtcacctacccagagtcttctccagagtgattttccctggtgaatctactgtggtctataacttggcctctgctttattatgcagaagctgaattggatggatatgctaggagtgggttgttcctccaggatggtctcataactgacccagctcaaggaagcttctgttaaaactggatttccagctcaggagctcagtgaaaataccacacttggctagaggctcacccagagcctgtgggtggctgatgagtgttcccaggactcagcctgctgtgccatctgcagggcataaactccttctgtggggccacagtgtgcaggccaaatcacctctgcccagtgcttgtaccaggcctgctcctgaccccttttcatgtgtcctgggctgagcagtcctcttggtttgacaagcatatactttaaccatctctttagtcctctgaatatgccagatgcagtgcaaggggctttatatgtctaaatggtactgccctcattttaaagatggggaagtggaggttcagagaagaaggataggctcaaccttgcattgctcataagagaaggagaaggaattacaactgaagggctttttgtgtgtctctgcaatgactttgcacatcactgacttcatctccggtgtcatgatgttatggtttaacacaaatgccatttattgggatttcagcagatctcccctctctcaggggtcaagcaattttttggctcatatcccatggctgcagagtagccactgttgcattctccttgtttcccttcttggaagcacagccatgcttccaaaggcttagggcctgtgaggagggtgcctcggggtggtacagggcagccttgagcccaccctgccatcactgggctggcagacctgtaggtgcctctagcctcaagtcctactaggcagtgacatgagggggtcccattggggatgccagcacccatcacctggcccacccttgatactttcctcagttccaagcaaggtacagaacccttgagccaagctggctgtgtatttgctgtgccaacacggcctcacttagtggccgagaggaggatgccgcaggcccctggggcctgcttctctttcagccattctccagtgcttctcacagagaccttccctctctctaccccagggcatctgccatgtctccctgatgggcccactgtacccacttgggctgtagtgggtgagggtggctccctggctgccatctgtgacatggcaggagatgttggtcccccggggagcgcacacagcactccgctgagccatttctctctgagtcgtggtttctcttcctaccaggttaacacctgctctcctctgccacctgccttgcctctgaacacttgctgaagggatcagggaggatagcacagggcccagttatggtggggccagttgtcctcttggtagtcggtgagggacagtgcagagccatagtgctcatacagtcagataggtcttcaccttcacatcatgagggctggagtatctgtcagggctgatctgcggtctttgccctgcccccacttcgctctcactcagggtcagggcctggagttgggagattagaggtagagagggaggagcctgcattccttcacccctgggcactgtgctgagcacttctgctgcccttccctcttctccacaccccaggagcaaagataagtaaaatgctatgacagctgtcacacaggagaacagagcacccaggccttgaggtccaggaagcatcattcccagagctgccagagcagtggccctggaaaatatggaagcagctgtcagccatggcccagggcctgagcgtatgattctcaggaaaagtgggcaggacatctgactgtcaggtgtgacggcagaaggttctggcctcttcctgggaaaagcccttctaggtagccagcttctggggtgcactc

SEQ ID NO: 34304 - DNA, 2300 bp, Homo sapien
tccctgacttgggaattgccaggtgggacccactgtacatcccccatgagatagaggcccaggatacgatacggggttgccaggttacatggtggctcacctgccaagcttccccaaggagcctgatcatagctctgatggttcaattaagccccttgaatgtagaaaggcccagctaaggctggctgtgactgagtactttacagagccacctgttgcaactagcccaagctcactgtgagcatgcctccctttagcagcctccactgcccgctggcctccccatcctcatgacagtacctctcaaaaatctcactcaccctaagccctgctcagggaatgtgggtccacattcctgatgctagcaccaggaagccaggcacaaacaatgctttcaggaactttaaaatatgaatagccttgagaacagaggagcaaacagatacacagtgtctttcacacgctctgagataaacgttgccctcaccatgaattaggcaggacaaagttctcagagcaaagagggacagcaggggctaaaaaaacagcagtagtccctttggaaatatttacagggtatgataaccaggactgatggtgtggacgagttcagatccttccacgccaagccctgggacagcaggcaggaccctaggaatactgaccagggtcaccatcacctcacaggcacagggacactccctggccaggccctcctgtgcaggaagccaaatcctgtggctgtaacacgatcctttgcctttccggccatgtccacgttaggactgctggtgtcccggcctcaggagcaatgattcatttctgccactggctcaaacttaggacacactgcaaactaagcttgaaccagtaaagggcatatgggctgctcatggcgaggccatgcactcagagctcaactgcaggtggctggggtacaagcaggatgggatgcgacctcctccagctagagggaagctccttgaagtagggagggtcctgccaatatatggttgggggtcactgaggtggggggagcaacagagggatttgcttgcctgcttgttcacttaggagccctgctggtctcctggggacacgtgctaggggagaaatgcacaaaagacagaacctgagacatccttagccagggagggagaacaaggagaggatccgagctgggtgggaaagggtagagaacagggctatcgaagagggacagaagtgggttggtaagtcacaggaagagcctgtaagatgttggggcccctggcaggagccctcacacagtggcgggaaggaggcagaggcctgtctgcactgaggactggggcaggaagctgaggctggcaggatggcacttagctatgggagaaaggaaaaagatggtgatgggtactgtatatctgcctcatgccttcagagtcacagcccacaagctaatggcactcagccctggggatgcaaaagtgccccaggcaagctgtgctcctacatccttggcaaagggattgctgctgcagccaggatccggcatggctccttcacctaccattccagagtcactgaatttttttgtagactagaaagtgagcaagacaaaaagagttttgcccttggttaagggcacattttctggcaaatttggtaaatagctgaatattctggcatccccatagtctgacaaaattcctcttctgaatgcctcaagaagaaacaaatctgaatttcctccagtttagcaaaaggctgtgctggtcaacgggaatctgccacctcctgaatcccccctctggaggtcaggcggcacagcagctgcagccttaagctgctctccctccggcagcaagcggtcaagttctgctgttggcctgtgagagcctacagtgtccacagagttaacattagactggagcggcccagccctcagcgggcaggagcactgggaactcaggcctccttttcaaggccaggatgaatgggaaatatgcaaatggccgcctcccaggagcggcaggggagggcctgctgctggcaggagggcatcactccacttgggtctgtcacatgaaagggtttgtattcctgccgctggccggctcctggccaggctggggctgttctcaccagaaaacaaaaatgtctttcagaccaaagcaaaacgaggccccagctggcccaggcaggccattgggcgttgttcacactgacccactatgaacaccaatcactggggctctcactttgcacccactggaaggaacccatcatctttggagacggaactggaggcctcggtg

SEQ ID NO: 34305 - DNA, 2300 bp, Homo sapien
gaggagagagacctggccatgatcccacaaccaggctagggcctttctgtccccatctctcaggggaagccaagccatgctcagaggaaaacagaaaaatacttggctaagctagaatcagtcacagctccagtactggtttttgaattaaaatattcacaagtagcagagacatctgtagggagagtaacgggatgcgacatcctgctggaggccaagctaaatgtgtcccatgacatcactctgaagaggaggctgccagagccgcatagggcccggagtgctcctgcagctgagtgccgcagaggcctgaggcttgcagcctggctcctggccccctgctctgtgaagaaatgctctgttgaaccactggcctatggggaaattacctgaccacctccctagaccaatctggtctggggagatatgttctttctgcccaggcttctggttcccctgggtctcctcttcagtactagcagatctccagttactctgctgccagtgggagtgtatgggtggggtggggggattctcaaagccatgttacttgctgggaggagtcctgccatacagcctctgtcacaccctcttggaggagccctgccaagcttgagatcccagcaaagtccctgccaggctgtggctgagttcaagctggagcagctctcccaggagtccagatcctatgatggagaaggtgtaggatcctattgtaaagattggaagtgactcagaggcacacatctgcacacttgcaccactacaaggtgcacacaggcctgggcacacacatgccatgtactcgtactacagatacaggcccccccacacacccagctgctgagctgtgagcccacatgcactcatggctgatggtctctggtgggcctgaagagatctcatgctcttccactctctgcttcctgacttctgctctctggttttctatcctcttctttctgggctgtggctcagccagctcctggcctgggagggctgcgtatagagaaggcccggctgcctgagcgctgtcctcggtgctggagtcctggtgggctctgcatgcttgaggaaaacaagcaagggcattgggaagaggtgatcttgcttggaggtgcagatgttcatggggtgcccaccaggatgcctacccttattatttcagaaaatgtgcaactgggcttcctcctttcaatggcagacactgcaacaggtgtccaagccctcagcccagcagtgtgggcatctgtggctgtgtgtggctatatggccatttattgtggctatgaggggcttcttgagacctcgtgtgccacatacagttgtgtacgaagatcatgatttcctcatgagacacctgtgattccatgtggctgcctgtgaccatgttactactggtgaacacatatggcagcctgtgatcacactgagtctcctgtgaccttgcgtagcctcagacctgaactcgtgcgtccccagatgatctgggcactatctggtctagctgcctgatttgtcagagcctaggtgaacacttgccactccctcccctcactggtttgcagaggtggcacccggaggctccccatgtctgcaaactcgggtcctagggggcgttggtgtcagcgggcaacagcccacaggagtgtgcacctcctaggacaggtaaccgcgacccggctgccattcgagcctgcccagccataaaacccaggctgcgagtcgcgcgggggcagggtcgcgtgttgatggggtgggtggcggcggggtgggctcaatgtcacgctctggcgctcgtcgcccgtgctcccccttccagccggtttccgcagaatgccaggtactgacgttggagagcggggccggagagggctggttcgctctgcggccgggcccctcccccgcccgggagcttggcggttccgacaccgcggtcagtgcggggcaagccccagacccggccggccaggctgcagggcagggagtaaggctcggttgcgagtgcgcgccgcgccctcccccttgagccgtctccgcagcggcgcggggaggcgggagctgcggggccggagggcgggggctaaaaatacccggcagcggcggcggcggcgcggctactgctggggctgctgggctgcggggctgcggggctgcgggtcggggaggccgggccgggccgggccgggccccgctgaccgccatgctgaccttcttcctcgtgtcggggggctccctctggctattcgtaggtaagtgcccgtcctgtccgcgtcccggactcccatctcccgcaggct

SEQ ID NO: 34306 - DNA, 2300 bp, Homo sapien
gccaacccacttagagatgctagtctgggaggagatatgtgtgaacatggctggccgctaaggtggctggatttgctggctaaggaccaagagggatatccaagggctccccagcctggcctgggcatttctgggccctgggttccatggatgccacacccatgcagtctagggcctgagtcacagcgtctacccatgcctgcagatggtccacagattgagactcacagagaaggaagaagaccttgggaactcaggacaggaaagaacaagtcccattactcagtggaaggaacaggcctagagaggagagagacctggccatgatcccacaaccaggctagggcctttctgtccccatctctcaggggaagccaagccatgctcagaggaaaacagaaaaatacttggctaagctagaatcagtcacagctccagtactggtttttgaattaaaatattcacaagtagcagagacatctgtagggagagtaacgggatgcgacatcctgctggaggccaagctaaatgtgtcccatgacatcactctgaagaggaggctgccagagccgcatagggcccggagtgctcctgcagctgagtgccgcagaggcctgaggcttgcagcctggctcctggccccctgctctgtgaagaaatgctctgttgaaccactggcctatggggaaattacctgaccacctccctagaccaatctggtctggggagatatgttctttctgcccaggcttctggttcccctgggtctcctcttcagtactagcagatctccagttactctgctgccagtgggagtgtatgggtggggtggggggattctcaaagccatgttacttgctgggaggagtcctgccatacagcctctgtcacaccctcttggaggagccctgccaagcttgagatcccagcaaagtccctgccaggctgtggctgagttcaagctggagcagctctcccaggagtccagatcctatgatggagaaggtgtaggatcctattgtaaagattggaagtgactcagaggcacacatctgcacacttgcaccactacaaggtgcacacaggcctgggcacacacatgccatgtactcgtactacagatacaggcccccccacacacccagctgctgagctgtgagcccacatgcactcatggctgatggtctctggtgggcctgaagagatctcatgctcttccactctctgcttcctgacttctgctctctggttttctatcctcttctttctgggctgtggctcagccagctcctggcctgggagggctgcgtatagagaaggcccggctgcctgagcgctgtcctcggtgctggagtcctggtgggctctgcatgcttgaggaaaacaagcaagggcattgggaagaggtgatcttgcttggaggtgcagatgttcatggggtgcccaccaggatgcctacccttattatttcagaaaatgtgcaactgggcttcctcctttcaatggcagacactgcaacaggtgtccaagccctcagcccagcagtgtgggcatctgtggctgtgtgtggctatatggccatttattgtggctatgaggggcttcttgagacctcgtgtgccacatacagttgtgtacgaagatcatgatttcctcatgagacacctgtgattccatgtggctgcctgtgaccatgttactactggtgaacacatatggcagcctgtgatcacactgagtctcctgtgaccttgcgtagcctcagacctgaactcgtgcgtccccagatgatctgggcactatctggtctagctgcctgatttgtcagagcctaggtgaacacttgccactccctcccctcactggtttgcagaggtggcacccggaggctccccatgtctgcaaactcgggtcctagggggcgttggtgtcagcgggcaacagcccacaggagtgtgcacctcctaggacaggtaaccgcgacccggctgccattcgagcctgcccagccataaaacccaggctgcgagtcgcgcgggggcagggtcgcgtgttgatggggtgggtggcggcggggtgggctcaatgtcacgctctggcgctcgtcgcccgtgctcccccttccagccggtttccgcagaatgccaggtactgacgttggagagcggggccggagagggctggttcgctctgcggccgggcccctcccccgcccgggagcttggcggttccgacaccgcggtcagtgcggggcaagccccagacccggccggccaggctgcagggcagggagtaaggct

SEQ ID NO: 34307 - DNA, 2300 bp, Homo sapien
ttgtctccacagctttaaattcattgaactttaaaattccctagaaaagcccacttacactaaaaaaaatacagcttttctctgtaaggaatcacattatttgtgcacaagtccccaaaacgtttacatagacagtaacaccaaggtacagttgagtatgcaaggaacaaactctgggtccgtggggcaataggggaccctaccggagctaagattgctgaggtagttagatcagagcccctcaaatgcactgaatcactgaggatcttatcaaaatgcgatttttgattcagaaagtctgggctggggcctgagggttgacaccgctaacaagctcccgggcagggctgacctgcaggtctgggaccacaggaagggtagcaagactggaaatctgtctcctcacaagactgagctgctagtggaggttaccatgtctgttttattcacagcaagtgctttgtagacgtctgttgaatgaattgtgcctacggagtacgcaagctggtgctaaggctcccctctgtgtgttgagttgtgcctgtcagactccactccgggtccagaacctagggctcttcctggtccagggcccagcctggggctgagccaggagggcatatcagctacagaaatcatcctcacagcatggccttgagtcacagcctcttcacctgcctccccacagccacatcctggtccttgtcttcacctgatctgcttatgctcagaagcccaaagcacccaaattccgctgcctcagcataacctcctatcccgcatcccccacactgatcacaacacaccgcaccatgacccagaccctggcctttccttactgctctcctctccctcccacccggggccagtcatcttgaagaagtcttccacatgcccctgtcacactcatccctttaccaaaagcccctaccccatggggtgggtcaggcaggccccaagacaggcccgtatcaggaggacccctcttctctcaggggctgccctctgggataaccacccccgcccttctgggtttcctgcttcctatctggctgcagtttctcaggtcccttgtggatttccccatggtctgtccccactcacatcccctctctgcaaaccttgcctactgggcctgcacctggcaaatccatgctcagcacagacggggatcaagacctctcaatacaactgtctcctgccaatccctgccccagcagcctgaggcccagtctgaaaccagggagttgctctcctttctcctcccttgacctcacccctcagaccatgccaattctgcctcctaaacctcccaggccagcccctcccccagctcccagtgacagtgtcctcaggtacctgagctcagctctcggtgctaccagagggactgccaggggctgcagccgggcctcctgcagaggctgagtcccacacgcagggaacagccatgccactgctagcagaccagtaagagaatggccacctggggcctgagcgccctcggccatccaccagaaacaaagtgtcaaggagaagctgcccgaagcccatgggacaaaccactggggactggaacaccagtaattctgtattgggaagcggcaccaagagatgtgcttctcagagcctgaggctgaacgtggatgtttagcagcgtgaccggctaccagacaaactctcatctgttccagtggcctcctggccacccaccaggaccaagcagggcgggcagcagagggccagggtagtccaggtgatggcagatgagatcccactgggcaggaggcctcagtgagctgagtcaggcttccccttcctgccacaggggtcctctcacctgctgccatgcttcccatctctcatcctccttgacaagatgaagtgataccgtttaagtaatcttttttcttgtttcactgatcttgagtactagaaagtcatggatgaataattacgtctgtggttttctatggaggttccatgtcagataaagatccttccgacgcctgccccacaccaccacctccccccgccttgcccggggttgtgggcaccttgctgctgcacatataaggcgggaggctgttgccaactcttcagagccccacgaaggaccagaacaagacagagtgcctcctgccgatccaaacatgagccgcctgcccgtcctgctcctgctccaactcctggtccgccccggactccaagctcccatgacccagacaacgcccttgaagacaagctgggttaactgctctaacatgatcgatgaaattataacacacttaaagcagcca

SEQ ID NO: 34308 - DNA, 2300 bp, Homo sapien
agcctttcagcctgggcttgcaggcaggatctctagtgaagctctctggtccccttggatccccaagctagagaaggtggccctctgggatccctcagctctggacttccccctgccgagtcaaggtcacaccatgggagggtccattgcagtctgtttcctaccagactgggagcctcaagggccaaatgtgagggccagtgggagggtcccgtttacctccccagaacaggtcctggtgtggattggaaagacttgttgactgactgtctgagctatgacaactcatttctaggaggaaagtgaccttctctcccagatgggtcatacaggctctctgcctccctggccatcagctgaaccactatctatggctcccttccctgccctccagcctccagggtgctatccaacacatgtgatatctacatgtagtatccatgtcctcatctctcccccgagagctccctggaaagagctgagccaaggccttgcaaaaaaggtggagaaagggccagggcctggacatttcatgttcccaccccagcctggccactaggagtgttctacgcaggctcagatggatggggctggcctcacagtggggtctggaggactaaggtttggtttctctatgcaaggtcagaaaaactcccacagtacagggaaactggccagggctgcagactcagaccacagtgctaaagccatgaactccacctgctctctgaaggctcgccaacctgagtccagcagaatgttctcgcttgtgtccaaccccactggtttaggctgaatcagcctctagggcccagaggcactgcacctggagtagggagcttctccagtatcagagtcaccttcagaggcctggagcctttcataaagcaggtaagaggactcaatagatgcatctgcatggaaaacatcctcccctctaccaggcacctgtatgtacaaccaatcacagcagcacacatacacccagaaatgggcacgtgtgggcccacacccctttagctatgaaacccaggcatggggcagcttgagccagataccttgtgcaaacacaaactcgtgctgtcttctctgaactccattgtgaaaatcaaacacttgtcagcccctcaagagcctttagatttcctacttccacacttccacagaaaggcctctggagttgggggatgctggggttatgtaggaaattaagcctggagggccttgctggggaagccattgtccctgtacctgagatggatgcagccacagccctggagccagcctgaagctcctggtgtcttctgggggctacatataggagtgtagtccgaacctcagaggggcaaacctgctctgcagagggaatcaaggttcacataaccagagaggggagtcactcaggaaggtggctccagagccaagagtcagactctgggtcccgacttgacccagccacaccccctctgaagcttgctgagagtggctgcagtctcgctgctggatgtgcacatggtggtcattccctctgctcacaggggcaggggtccccccttactggactgaggttgccccctgctccaggtcctgggtgggagcccatgtgaactgtcagtggggcaggtctgtgagagctcccctcacactcaagtctctcacagtggccagagaagaggaaggctggagtcagaatgaggcaccagggcgggcatagcctgcccaaaggcccctgggattacaggcaggatggggagccctatctaagtgtctcccacgccccaccccagccattccaggccaggaagtccaaactgtgcccctcagagggagggggcagcctcaggcccattcagactgcccagggagggctggagagccctcaggaaggcgggtgggtgggctgtcggttcttggaaaggttcattaatgaaaacccccaagcctgaccacctagggaaaaggctcaccgttcccatgtgtggctgataagggccaggagattccacagttcaggtagttcccccgcctccctggcattttgtggtcaccattaatcatttcctctgtgtatttaagagctcttttgccagtgagcccagtacacagagagaaaggctaaagttctctggaggatgtggctgcagagcctgctgctcttgggcactgtggcctgcagcatctctgcacccgcccgctcgcccagccccagcacgcagccctgggagcatgtgaatgccatccaggaggcccggcgtctcctgaacctgagtagagacactgctgctgagatggtaagtgag

SEQ ID NO: 34309 - DNA, 2300 bp, Homo sapien
ttggtgctgttagggagctagaaggctgactgcagggcctgaagagtgggagagacagctcctttagggcctgaagagtgggagagatgtgaggatggggagacagctctttcaagaaattccgctgcggttgagaacagagacactcagtggggtcgaatgagggttttgttcccatagtagaggcttgaacacatttacaggccaatgggaaagatccagttgagagcgggtagttgagccttcaggagagaaaagggatgttccatggggcaaactcctgagaagggggaggagatggaaggaagcttctgtggatgtagcagatgcaggagggtttgtgtagttttagccgggctcgagccggtggctgacgcaggcaggaacaatggctcacccatgttttatgtgtatttccgtgtgcgtgctcctgctttccccaggtctgggccgcctgcctggcccgtgtgccgtagggaatatccacactgggcctgggcggaggctgggcatctcccgctctgggcttgctccctgatgagattctcagaccgtgcttcccctcattcatgagaggaaggttcacagagcaggcgtgggaacctgcctggccgccagggcctcctcccgctcaggctgaggtttgctgcatctctgtccttattcccttccagactggattggctgaaccaggtgtccactctttttggcccatggcataaagaagggtttgggcaacccagtgtgccccaggttgttaccgcccccccgcctccgcccccacccagcctttgatgggcccccttctcatcaatccatcacccctgcacatgccaccaggactgcctggaccagagcccgggactctctgaaacccactgagagctcggccctgggaatgggcctcccaatctcggtctccagggggtgggccccaggtccctagtcttcctcagggtcttctccactgttctgcctcctctcctgatacccagttcctagccggggtgaccccagcctcccgtaacagcctccttgtggtggtgctgggaagaaggggcccgtgtacccggcagggccccccaggcaatgggcatgagcgcaggcagggaaatccgtcagcctccagggacgctctccctacagccccggcgaggggatcgggtcgtggcgacctctccagacgcccaggggctgggcaggagggcgggccaaggcccgcaggtgggggcgccaaagccaggcgggcgcggagtacgtgcggtgggctgcgggcggcatgaagggcgcgggcggccagctccggctccggctccggctccggctcccgcgaggccgggtagcctgggcgttcccaggggtcgcagaggacggcgaaccccggcggagccaccggagctggggaccaggacgcaggcaggcgtgtggagcgtgaggtggggacgtggcggcggctcaagtgggcggagccccggcagcggcccgaggcggagtcgccaagggaggaggcgccgagctgaccgggcgacgccgcgggaggttctggaaacgccgggagctgcgagtgtccaggtgagcgccccgcccgctcagccgccagatcaaccttagcgctggggcgcgggctggggtcgccaggcggtgcgttctgcccgcgcggggctgagagttaggggccggggccggatccggggccgggggtcgcgccgctagccgccagcagcgcagtccgggccgccaccctgcaccctccgccctgtttctgcacccgtctgggttcttgtgccgccgcccgcaagccttcccgagctcagggtggtgaggtcagcggcgcccttcgtgcagttccctcggctgtcgggcggggctgggaacttggccgctcttccctgtcaggctcccgggaagtggcggcctgaccccgggctgccggctgttgggagcgggggcgcggcgtccgcctggccctgaggggcctcttcatattggctaagcccgttctgcaccctcccaagggctgggagtcctaggtcttgtccgggcagggtccagcttggagcccattagatgggccattggatcagaaagtcttttctcccccagacatccttgtggaaccagcgttgtttttccttggcagctgcggagacccgtgataattcgttaactaattcaacaaacgggacccttctgtgtgccagaaaccgcaagcagttgctaacccagtgggacaggcggattggaagagcgggaaggtcctggcccagagcagtgtggtgagcgctgtgctggaagggaat

SEQ ID NO: 34310 - DNA, 2300 bp, Homo sapien
agatggagagaagtgggtggattagagggagatttaggggtaaaattgaacagacttgggatataggtaaatagggtctggggatgagggagagggagctgccaagtatgactcccaggcttctggttaggtaactgatgggaagtatctccttcagtacagcagtgaagacaggatgtgtggagggggaagatgtagggggagaacaataactctgtgttggacatgttgccattgaggtgcctgtggacactcaagtggggatgtacactgaacagtgagttacatgaatctggggttcagcagtaaggataagggtaaagagagaaatttgtgtcacctgcgtgtaaagagaagcgtgaagtggaaagcctagacctgagttttgaggaacccccaacctttactaatagggagaggatgctgaagaagcttgagcagaggtggccagaaaggatgaggggaaaccaagggaaatcagtgttccagaggggctgtggtcatcgctgggtgtcagacactgctcagggccctggcagatgaggtctgaagaacagccgttgaaattggagattggaggctacagtttattgagacctggtttggtgctgttagggagctagaaggctgactgcagggcctgaagagtgggagagacagctcctttagggcctgaagagtgggagagatgtgaggatggggagacagctctttcaagaaattccgctgcggttgagaacagagacactcagtggggtcgaatgagggttttgttcccatagtagaggcttgaacacatttacaggccaatgggaaagatccagttgagagcgggtagttgagccttcaggagagaaaagggatgttccatggggcaaactcctgagaagggggaggagatggaaggaagcttctgtggatgtagcagatgcaggagggtttgtgtagttttagccgggctcgagccggtggctgacgcaggcaggaacaatggctcacccatgttttatgtgtatttccgtgtgcgtgctcctgctttccccaggtctgggccgcctgcctggcccgtgtgccgtagggaatatccacactgggcctgggcggaggctgggcatctcccgctctgggcttgctccctgatgagattctcagaccgtgcttcccctcattcatgagaggaaggttcacagagcaggcgtgggaacctgcctggccgccagggcctcctcccgctcaggctgaggtttgctgcatctctgtccttattcccttccagactggattggctgaaccaggtgtccactctttttggcccatggcataaagaagggtttgggcaacccagtgtgccccaggttgttaccgcccccccgcctccgcccccacccagcctttgatgggcccccttctcatcaatccatcacccctgcacatgccaccaggactgcctggaccagagcccgggactctctgaaacccactgagagctcggccctgggaatgggcctcccaatctcggtctccagggggtgggccccaggtccctagtcttcctcagggtcttctccactgttctgcctcctctcctgatacccagttcctagccggggtgaccccagcctcccgtaacagcctccttgtggtggtgctgggaagaaggggcccgtgtacccggcagggccccccaggcaatgggcatgagcgcaggcagggaaatccgtcagcctccagggacgctctccctacagccccggcgaggggatcgggtcgtggcgacctctccagacgcccaggggctgggcaggagggcgggccaaggcccgcaggtgggggcgccaaagccaggcgggcgcggagtacgtgcggtgggctgcgggcggcatgaagggcgcgggcggccagctccggctccggctccggctccggctcccgcgaggccgggtagcctgggcgttcccaggggtcgcagaggacggcgaaccccggcggagccaccggagctggggaccaggacgcaggcaggcgtgtggagcgtgaggtggggacgtggcggcggctcaagtgggcggagccccggcagcggcccgaggcggagtcgccaagggaggaggcgccgagctgaccgggcgacgccgcgggaggttctggaaacgccgggagctgcgagtgtccaggtgagcgccccgcccgctcagccgccagatcaaccttagcgctggggcgcgggctggggtcgccaggcggtgcgttctgcccgcgcggggctgagagttaggggccggggccggatccggggccgg

SEQ ID NO: 34311 - DNA, 2300 bp, Homo sapien
aaggcacagtcagaagtaagcctctgatgttctcttaagtcagggatgtcaacatgagctcatgtgagggaatgactggcctggacccggatcctgcatcattccaatctgtccagatgctgcccaatgaaatggggaagtttatggaccagattctaaaaaattcatccagagtccccaccccacctccacctccaaacttgtgatagaagcctttggagatggattacactgcccagagactcaggggccaggaaggtcatattcaggaggaccacttcacattcccccggacagaagtaaacgggtaatgaaggaatttcaggatggaggcaaggagtgtaggcagtctttgggatgtgaaatcgggggaaacaagcaatgtatgaagaggagtttcaggaattcactttgggatacattgggtggaagcttccacagacccttgaggatcccttccccccagaaaaggtctgcactgtttacattcactaggactcttggagcccagctgacaggcctctgaccacaagccatgctgtacaccaaaccctcaggacagccagtgataagtgatggctgccccttactctctaccccatttagtagggtctaagtcctggggagcttctggcctacagacctcagagagacaatgcagtgaccagctctcctgctggcccttccacctttcttcacttgggatccaagtctgcaaggggctgagcagaaacctcctccaccacaaagtgatggagaacagcccaatggctggtgctctaatggattcagacaccgcacccccccccacacacacaccccaaatacactcccatataaacaccgctaccacacaccacttgtttctctcccagctgaacagatagcagcatcttgcctcctacagaggcacccacattctactctgaagggcccctcccttccttggactgccctaggtttgtgcttctcaagcagttctcctctttgcgggttgtcagagacccagtggacacatttcatcccaccacctgtgaggagcccaagagcagggtccttatcacagcttgactaaaaggacacataaggttaaggatttgggctaaatgagagacctccacagagtctggaaaagtaaaaggtgtctccctgatgtagccagatagaagtgccgagagaaccagagggaggttggtggtgccatggcatctgcattggctgttcaagtacatccccggaggataatggttgggaatggagagaagaccttggagagaaaagggcccaaagtgaagcgctgcatatatttcttccctttacactgcacagccacgaccccagccgctccagctgctactttctcaggagacctggggaaacaaatctcctggcaaaggacgaggggagggggctgtgcagacagggaggtggcctgcgaggagcctgcaagcagcaagagaaggcctgaatgttctggggaagcagggacaccttgcttccagatacaagtcagggaccacctcttccaggaagccttactggcctccacaaactagtctgaggacctttctgtgtccactcccacgctcggcgctgcctgctgtcgttttgggtctgcgtccccggcccagtgctgcgcaagcccctggttcatagggttcttggttcagagggctcctcacacggcaggatgggccgcaggtgtgccagtcgggcccatgaggaggtatctgagctggggcagccccatcccccaagtgggccctccatccctcctcgggctggagcaccgcccctaaaagcgacttcaaagggccggtgtcgacagctgggtttgggtccgcggcctgcagatccaaggcccgagcaggatccaggccgtcggggccgtccgaacgcggggatctctgagagctgagtgggggtgccgggttgccggcagccggggctgagggcgggtcctcagagccccccgaagtgggagggtcgggctggccgcggggccaatccaggcgcacagggagcgggggcgggggctgggccgagtggggacaggggcgggcgggccgggggcgggcgcggcgtccaggcggcggcggcggctgcggcggcggcggctcctcctcagagtccggctcaggctccggctgcggctccagcccgcgatgccccattccgtgaccctgcgcgggccttcgccctggggcttccgcctggtgggcggccgggacttcagcgcgcccctcaccatctcacgggtgagtctggcggctgcgtggcggcagggcggtcccatgtct

SEQ ID NO: 34312 - DNA, 2300 bp, Homo sapien
ccctcacttatgtgcaatctggaagtgcaagcagttgaccaatggagacagaactaggaaacaaatacctcctcattctatatggctctttagaagcccccagtgggattaaacctcagtaacccacagcaatggggattgagacaaggctgaggtgaggaaaaagagcaaggcacttgtctctggtgcaaatttaaggaggcaccaagaaattcagtaaccaagattaattatattttaatgcaatattttttaaaatagaaattaatgcaaatacccatgatgaacgcaatatcaaaattttcaataaagacaggctcagtattgctaattttccatttattcttaggctccactagggctccacacaacactgttactgatcttggtcatcgccaataaccatctcaatttcacagtctatgttggctttacctccctctctgttcactctcctccctagtccctcacttctgttttatggtatcattactcagaataaacgaccttatatacgttcttgtctccaactttgctctattatatggggtggagtagggagatgaaacccaagctaagtaagataatgaccataatatatcattcgaagaaggatacttgtgaaagtaaagggaggctctattaataatttcactggattaataggcataaatcagagctgtcctagcacatcaggatgtatagtcttattacaggtaggaaactgaggttccaagggggtgggaagtcctcctaagaggaggggtcagactggaagctacacaaaaagaggcagaaatgtccctccgcctcttaatcggagcctggggaaacaaacacactcgtgcaaaatctccaaagaggtgagctcttcaccctgtcaattttatctgcctcgtgaaccccagggctcaggctccaggcccgggctagctcacacaacagcagaagggccttaggtctgggcactgagccaaaaaaagggaggctgtggtccctgctttggttaccctgccgggtctgagcgccaaatcggatctcctacttctctctccctccctccctctgttcctggactgggggcaggcccttctgctaacagaaagccttccagtcggagaaagctctgacagcctgccgcgataaagggccctgggggcgtgaggagagcaaggggctcaaaatcagaacccagcgtgacgacagtgcctccatgactgtgctcccgcaatgcgcaggctccatgtcctggcgcccgcccgcccatggacccggcgggggcttccaggctgggctcagccattacgccggcgtgcgggggaggaaactcgcctcccgggcactcggttgtctcctgcccccgcccctccctccgatccgggcccatctctgacgtagtgtgaccttgctcatcccttccaggctgtgggcctgttttccctgtgcaagatgagggtcctggctgtcctgaggacgctgtccgggcgccgccaggggtgaccgaattcagctctgctaggactgttgggaaatgagctccctgtcggcgtgtgccagccgcctgcgcgaggcgccacaggagagggcgcgctcctgtcgctctgccgcccccagaagtttcccgggaaccgactccactgactcgcccctccgcgccccacgcgtggcagcctaagctcagcctccagattggaggagaccgcggagggaaccctgctggggtctgggcccggggccacgcggcccgagcagatcgagggccgacccctccgagaactcgctctctggcctcggctcctcccttgcgcccgccctcccacgtggggcccaggtctgggaatcagcgctcgggggtggctggggacaaccgagaacgagcttcttccccggcacgcgggcggaatggctgagcccagcctggaagcccccgtcaggtccttgggggcgggcgggcgcgcgaagcacagggcggagacagccgggagcccagcctcccgggctgggccgccctccccttccccgcgcccggccggggatgggggtgtggtcccaagtgtacagtggcatcaagctcagcgcgagctcccgggaacgctccaacgccttcagcctgtttcccaggaacggtccccggcttcgcgccccaatttctaacagcctgcctgtcccccgggaacgttctaacatccttggggagcgccccagctacaagacactgtcctgagaacgctgtcatcacccgtagttgcaagtttcggagcggcagtgggaagcatgcgggactacgacgaggtgatcgc

SEQ ID NO: 34313 - DNA, 2300 bp, Homo sapien
catccatcctgcttaccctggtacttgcttccttccctcctcctcccaaccaccagagcccagttttttgttgttgttgttgtttgtttgtttgttttgagacacagtctggctctgtcacccaggctggagtgctgtggtgtgatctcagctcactgcaacctccgcctcccaggttgaagtgattctcctgccttagcctcccgagtagctgggactacaggggtgcaccaccactcccagctaatttttgtatttttagtagagacggggtttcaccatgttggccaggctggtctcaaactcctgacctcaagtaatctgcccgcctcagcctctcaaagtactgggattacaggcgtgagccactgtgcccagcccctagttgctttttattttacttccaccactcaaaaaggaagccaggaagggaaaagctgccaaaaaaagcaaatcctggtgcatgtgtgtgaatgtgtgatgatgtacatccttagaggtccctgtgaacagcgtacaacatgagtagctatggacttggaggccagcagctactcacccctcacgccctacagtgaacaaaaccagcgagcaatggaaaagcagacaggtcagcccagctgccagggaaggctgccactcatgggtccagcctccataacaggcactgataacacttccaggaatcgacgcgggatgagctggcccccagtctcagctgctcccaggccatgctgtgggcagggagtgggcaagcactagagcccctgctagggaagcaaatccagagaagcatggccaccttagggcccagggtaggtatggtgccaatgctgggggatccaaaggcagtccctgggctgagcccacttcccacaggtgccacagattcgacaaccaccacgcctggctggccaccattctcttgcagaggagagtttcaaaacttcctcactggtcttcttgtttatcatagcagctagagtgagctctttccaaaagcacgaacctggccttagaatgcttactattttctcactgtcctccgaataaagtcagctcctcagtatacatagaaggccactatgaactagcccttgtggccatttctagtctcatttgtcatatctgtcatcccttgagttccagccactccgatatatgagaattccattacctgaatttcccatactcttgcctagacaggtcttgctcacattttcagaatcagctaaaatcatatcaccccttcttggagtatttcctccacctattgtcccacagagagggtgatttatttatcccaggtcacatagcaagcaaggcaggacttgaatttgggttccagaaccctattgctaaccagggttaatgttagccttctcagtaacacagccagtgtgccccatgggcatctgagggtaggctccacacaccagatgtccacaccttagtgctcagcacaaggccagacacaatgtctgatgaccgctataccgtgctgagggaaagggataagggactagcagaggccactcaggtttttcttgggaggagcatgaggcagaggagggactagcagcagggaaatcctacctgcctgaccaatagcaggcaacagctccatgaggatgctctcctcagaagaaaggtgtatcctgacccaggtccttaccagatgtgaagcagcaaaagcgggagaagtgtgtgtgcatcctcattcctggaacttagaaaacctgccactaaccacgcagggtgctgaggggctacagcccctgcctgccaactcaccctgtgctcagagaggtccctgagggccagggcttccagctggggtttcgccttctgtgcttccttgcacccaatgagcctcaggaggccatctgctgtcttagagaaactggggcctcaggaaaggaccccaaacctcacaagtatatggtacggcagtacacctcctgatgcctccagaagtctgtggccagggaacagacaagatttggccccgccctgcccagtaacaaggtccctcacacccctcctcccatgcctggcaggaaggtgactcaggcagtgcgtctgggtagcctggggctgcgcttcccccaacgcaacatctaggttcttaggaaacttcatttgttgtgaaaatcggaaatgaaaagacagttggtgacaaactcctttctccatcacctccttattggacagaaacgacccaggaatgcgcctcgcgtgagtcctattctttcttggggtgcacacccgctgctggaagtatgaacagcaggtttgag

SEQ ID NO: 34314 - DNA, 2300 bp, Homo sapien
acgtggacatctttgccaggtatggagccaaacacagtatgcattgtctcatgtaatccccacccaaatggaattgttatcatccctctttacagatgaagaagctgagttttagggaagactgtaacttgctcaaagtcacacagctgatagagaagtgacacacccagcatcaggtcctggaacacttgtctccaaaggctatgtacttagccctatttgctttaactggagtattagtgggcattacaaaaattgatgcatatgtacaaaggatggtaattttgtccagtatgtttttgttaatacttttccaacttgagttaattttaagattttctgttgtacagaattctttaaaagtttatagtaaaatctatttatcttcaatttcctattcatcttaaaattaaatgtcacctatattttcttctagcttttgatttatttactcttggctctattttatttacatttattacatttggctctttagttgatcaggaattaatttggtatgtggtttatggtgggatactatttattcccccagtttttccatttttaccagttcttcagcttgtcgattgtcccagcaccagtcttcaacaatgtatcattttcttgataatttataattcatctttatcatatgttacaatttttcaacacttgggtctgtttctgtgatacctcttctatttcgttgattgatttatcttttgtgtgtgtgtctgtgtgtgtgtgtgtgtgtttgtgtgttttccaggaaacccagagtagtgtagtcattgtgtgtttttatatatgtaagagaacatttccccttatcaatgatctttttcaaaaatttcttaaacatattacatatttcttttttcagatgctctttacaaatattttttaacttcttaaaatatctcattgaggattccgttccaagatggccaaataggaacagctctggtctgcagctcccagtgtgatcgacgcagaagacggatgatttctgcatttccaactgaggtacctggttcatcttactaggactggttggacagtgggtgcagcccacggagggtgagccgaagcagggcagggcatcgcctcacctgggaagcgcaaggagtcaggggatttccttttcctagccaagggaagccgtgacagatggtacctggaaaaacgggacactcctgcccaaatactgcgcttttccaaagtcttagcaaatggcacaccaggagattatatcctgtgcctggctcgacagatcctatgtccatggagccttgctcactgctagtgcaacagtctgagattgacctgcaaggcagcaacctggcatggggaggggcatccgccattgctgaggcttgagtaggtaaataaagtggctgtggaagctcgaactgggtggagcccaccacagctcagcaaggctgactgcctctgtagtctccacctctggggcagggcatagctgaacaaaaagcagcagaaacttctgcagacttaaacatccctgtctgacagctctgaagagagcagtggttctcccaggatggtgttttagcttggagaacagacagactgcctcctcaagtgggtccctgacccccatgtagcctaactgggagacacctcccagtagccgactgacacctcatacaggcaggtgcccctctgggatgaagcttccagaggaaggatcactcagcaatatttgctgttctgcaatatttgctgttctgcagcctctgatggtgatacccaggcaaacaggtctggagtagacctccagcaaactccaacagacctgcagctgagggacctcactggtagaaggaaaactaacaaacagaaagaaatagcatcaacatcaacaaaaaggacatccacaccaaaaccccatctgtaagttaccaacatcaaagaccaaaggtagataaaaccacaaagatggggagaaaccagagcagaaaagctgaaaattctaaaaaccagagcacctcttctcctccaaaggatcacaactccttgccagcaatggaacaaagctgggtggagaatgactttgacgagctgacagaagtggacttcagaaggtcagtaataataaacttctcccagctaaaggaggatgttctaacccatcgcaaggaagctaaaaaccttgaaaatagattagacgaatggctaactagaataaacagtgtagagaagaccttaaatgacctgatggagctgaaaaccatggcacgagaactttgtgacacatgcacaagcttcaatagccg

SEQ ID NO: 34315 - DNA, 2300 bp, Homo sapien
tttgggaggccaacgtgggcggatcacccaaagtcaggagttggagaccaacctggccaatatggtgaaacccccatctctactaaaaatacaaaaaaattagctgggcatggtggcgtctgtagtcccagctactcagaaggctgaggcaggaaaatcacttgaacctggttgcagtgagccaagatcacaccactgcactacagcctgggcaaaaagagcaaaactgtcttaaaaaaaaaaaaaggccaggcgcattggctcacacctgtaatcctagcactttggaaggctgaggcgggcagatcacatgaggtcaggagtttgagaccagcctggccaacatggcgaaaccccatctctactaaaaatacaaaaattaccagggcatggtggtggatgcctgtaagcccagctacttgggaggctgaggcaggagaactgcttgaacctgggaggcagaggttgcagtgagccgaaatcatgccattgtactccagcctgggcaacacagcaagactccatctcaaaaaaaggaaaaaaagaaagaacgtagactaaggtattaacagtaggtatgtttggatggtcagattatagatgacttctgttttattttttccagatttccatactttacaaatgcttcatatattacttttataatcataaagcagttaaaaaataaaaacttactgagtgttgactaagtgccaggtcttcagaagcatagatgaagagcatgaagaatgcaaattcatgcatcaggctgggcatggtggctcaagccagtaatcccagccctttgggaggccaaggcaggtggatcacttgaggtcaggagctcaagaccatcctggccaacacggtgaaaccctgtctctactaaaaaaatacaaaatttagccaggcatggtagcgggtgcctgtaatcccagctacttgagaggctgaggcaggagaatcacttgaaccagggaagcggaggttgcagtgagccaagatcacaccactgcactctagcccgggtgacagagtgagactctgtctcaaaaaaaaaaaaaaaaaattcttgcatcagtgggcttagtctagcctggttataaactcctgcttgtggccttagcaacttgcccagtgctcccctggggcttagccctgtggaggctgaaacccaggtcaaagtcatgttctccaatccagagctgggtgtctctctcacttcctttgagcagcaatcacctctaccctgatttagaccaagccaagcttgctatgctgaggtaacttagcttatcaccaaggttatatttaacagactgctgaaaggattataaaaaattatggggatttgaactatcacccaatgcctccgtctgttgacacagacaagtttaaagcttgattttgtgaaccttgagatgatcttcctccagcactgcaaatgtaatccttctcatctaaaactcccattctaatgccctactgtgctcctgcccctgcagagccctccagctcaccctcctgcagttgtcttctctgtgactgagtcctctgcaacacatattccattgtagacatgcaactctcctctttcaagtacatccctggttgttctctccatctcctttccttgatagagatctggcttctttctgagcactccactagcctcatggctctgtctctcaaaggaaggctactcattttgcactatccatgatcctggaagacaagagctgagcaggctctcagcattctccttgcttcccactgccatttctaaatcataactccttcaccttcacatacataaaagacctgctcaggtttgtgctgtgccctcctggttgctgttaccaacatctgcctggttggttatccacattctgtgagctctctgacacccagcccaaggtgctggtgacttttgtgctcaggaagatgagtagtgctacaccttagcctcgcagtacttgaccttcacctatacttcacactcttgctgctgaggacacaccctgggcctctcatcagtcacaacagctccatctcactctaggacctttgttttcctcccaactcttcagctctcacctgatatcatttcctttccctttcagtttataccttgtgatccctccagcccattcatactcttgccactaccccagtccttttgtttactagtcttgcaaaggctaagctcacaataagtcaaaccattttactcttcactctcaatccaggatgctgacttaagatacaagaaagaaggggggctgttgatgggtgcaagg

SEQ ID NO: 34316 - DNA, 2300 bp, Homo sapien
atgttaaaataagacttcttcatcttgtttggtctggacagaggtcaacattcttctcataaaagctttcatttcttttgaagcattaaaataatattttagcacacaaaaaaggagtttattttcaagaagctttgctttctttttcagttagttctagataagaactataacttcacataagatgttagaaggatttaagtacattgctgaaggtataaccatccatcttcaggaagtaagaatagtgaatagtaagtataaagaaacaaacaagtcctgtgataacatctttatcataatttttttaagtctattatgctttatgcaaatgtttagatttccttgttaaaaatctgctggccaggttaggttccctttctgtagctttattttcaactcataatatagtgactattaaatattctttactcaacacattatattgtaaaaatatacacttagttctgtttctatcactaagccactactattttaaaaaggaatatcttgcattgttaagtttagcagcccaaattcttaaaggccttaggaatggtgctgtccaataagataaccaatagctacatgtggctactgagcacttaaaaaatgagtctggccaggcatagtggctcacgtctgtaattcagcattttgggaggctgaggtgggaggattgcttaaacccaggagtctgagaccagcctgggcaacacagggatgccttgtctctgtaaaataaaaaaaataaaaaaattagctgggcacggtggcatgtgcctgtagtcctagctactcagcaggctgaggcaggaggcccacttaagcttaggagttcagggctgcggtgagctatgattgtgccactgcactctagcctgggtgacacagtgggaccgtgtctccaataaataaatgaataaataaatattaaaaaataaaaagtgtggctagtccaaattgaaatgtgctgtaaaatacacactggattcctttttttttttttttcaaatcctgagaacctgtgaaacacactgaattcttaagatttagtatgaggaggggaaaaaaagatcaatgatttacatataacaatgtaaaatatcaataatttctatattgattatatgatgaaatgatcatgttctggatatacttgattaaatataccattaaagttaatttcatcttttatttttactttttaaatatgcagcattgcccaataaaatacaggacaaccagttacatttttattttatatattcctgcttgggacataatatttaaaaattattcattctatatctgaaattcaaatttaactaggagtcctatatttttatttgctaaatctggcaattttattaatatggctactagaaaagttaacataacaaatgtagctccttatcctatggaacattgctgctttagaatcacctcgctgctttttttttttttccagttagcttctgaataaactctgcacggaaataactaatctgtggggaatatttaaccctaggctaggatcgttaatcgtgaagttaaatttttacatctgcatgaacaaaatggcttgttacagacgaaaatgtggaaagggcatctggactagaatgaaaagtcatagctcccagcctctctactagggtagttaacagtcccaggttcaaaataatccccgtccctcttataagattaggcggtgtcaagagcaactatctgtgagaccctgggccagtgactttctccttacctccgcccccaagtaggccttgcaaaaagctgggaggggtgcgttttcaacactggagcttcgcggccgctctcccactcgctccccgcccggcgctagaggagcgagttcggactcggaccccaaggcctcgagtcccgctgccttcctaagccgagcccgggctacctcggtcgtccccagcaggcttggctggcagaggccgggcctcgccaggtccccaggacaggccccgcccgggcctcaggtgcactcccggcccgccccgcgccctcgcgtcccgccccagctccgccttcgccggcgccgctctgcctgccagcggggcgcgccttgcggcccaggcccgcaaccttccctggtcgtgcgccctatgtaaggccagccgcggcaggaccaaggcggcggtgtcagctcgcgagcctaccctccgcggacggtcttgggtcgcctgctgcctggcttgcctggtcggcggcgggtgccccgcgcgcacgcgcaaagcccgccgcgttccccgaccccaggccgcgct

SEQ ID NO: 34317 - DNA, 2300 bp, Homo sapien
ctattcactggctacttactcaatgctgctgaaacttcagggagctagagtgccagtgtctaaaaaagacacaaaacacatacatcattaacatcatgttcctacatccagctccaacaactgctccaacaggttcggaggggacagacaaaaccacccagagggaaaatccaaggggatgagaaatgagaaaggctcccctacaccctatgacctaaggctgtatgctttaactaaatctggccgacagccttgcctcataatacctgagaaaatattccaggtcaacaagtcaccctgaacccatcttcagatgaatggatcttaaagagtgacaactgacggcctggcgtggtggctcacggttgtaatcccagctttggaggcagaagcaggcagatcacgaggtcaagagatcgagaccatcctggccaacacggtgaaaccccgtctctactaaaaacacaaaaattagctgggcgtcgtggctcacagctactcggagactgaggcaggagaatcacttgagcccggaaggcgaagattgcagtgagccaagaacgcacgactgcgaaggttgcagtgagccaagaacacacgactgcgctccagcctggtgacagagggagactctgtctcaaaaaaaaaaaagactgacaactgaccatgggaaaaggcaaacaattacttacagggcatgaccagattgtcgtttttgggttgtggacggtaggggaaggagtaactagaggaaaaagggaagaggcagttgtatacacatgctttatttaacttttaaaagttcaggaaagagaagtatttcttctcttctaaaaagaaatcaagagactagaggaaaaacgggatagcccctggcccaagtcctggctctgctacttaccacccccaaccccaactagagtaagtcctggacacacagggccatagagcatcgcccagggaccgccaggaccttcctggtaccctcttcaaagtggccatcaggacgggaggccagactgaccacctgtgcagggaggagcacactgtggctggaggtcacctcgtgaagcgttcccaagccacctggctggagggtctccatcgctagggtgttgaccgttgggggagggggagtgacagcgtccagtgcgcatctgggagagaggagctcgggttcaaggaccgcgacaggtcctccgagccctggtctcagccccagcaggggccggcacccacctcggtcacaatggtggacaggtagacgtcctgactgaactcccagccatccagacagctctcctgctccagctgccccaggtccacgtcgcgccccggctccagcccaagcgccgagaagttggcgatggtggcgagccggtagcggcggcagctgtggggcacctcgcggccgtcccgcagccgcagtgggacagtgtggttgcgccaggcgctgctcaggttcgcggcgtccggcacccggcagcggtgctccggggtcgctatcaggaacacggaggacaggccggtgaagccattggggatgatgctggcgctgagcaggaagaagatgaggcgctggaagggcccccactcgcccaggaaggcggtcacctcgtcgtagtcccgcatgccgccctcagaggcccacagagcgcggcctggggtcggggaacgcggcgggctttgcgcgtgcgcgcggggcacccgccgccgaccaggcaagccaggcagcaggcgacccaagaccgtccgcggagggtaggctcgcgagctgacaccgccgccttggtcctgccgcggctggccttacatagggcgcacgaccagggaaggttgcgggcctgggccgcaaggcgcgccccgctggcaggcagagcggcgccggcgaaggcggagctggggcgggacgcgagggcgcggggcgggccgggagtgcacctgaggcccgggcggggcctgtcctggggacctggcgaggcccggcctctgccagccaagcctgctggggacgaccgaggtagcccgggctcggcttaggaaggcagcgggactcgaggccttggggtccgagtccgaactcgctcctctagcgccgggcggggagcgagtgggagagcggccgcgaagctccagtgttgaaaacgcacccctcccagctttttgcaaggcctacttgggggcggaggtaaggagaaagtcactggcccagggtctcacagatagttgctcttgacaccgcctaatcttataagagggacggggattattttgaacctgggactgttaactaccctagt

SEQ ID NO: 34318 - DNA, 2300 bp, Homo sapien
acatcaaatttccaaaaagaaaaaacacacacatgcacacacacttggatctcccagggtagctctcagactccattgaagggtgatgacgccaagaagcaacacagttgggatctccagagcccctgtaagcccctctgaggctccaggaggggaggctcagcaccaacatccagcagggcttgaagctgtgccagggcctgtggcactctccctctctatgaactctcccctctctgtgaactccgccgtcctgctgggtggtttcttgctgctgcactggggccttcagctcactattatgctgagctgaacaccctaggctcacggagaggcctcctcttctgggaagccttctctaacctgcgaattggtcatctgcacatttagtgagcctatctatcaatgagggctattcactggctacttactcaatgctgctgaaacttcagggagctagagtgccagtgtctaaaaaagacacaaaacacatacatcattaacatcatgttcctacatccagctccaacaactgctccaacaggttcggaggggacagacaaaaccacccagagggaaaatccaaggggatgagaaatgagaaaggctcccctacaccctatgacctaaggctgtatgctttaactaaatctggccgacagccttgcctcataatacctgagaaaatattccaggtcaacaagtcaccctgaacccatcttcagatgaatggatcttaaagagtgacaactgacggcctggcgtggtggctcacggttgtaatcccagctttggaggcagaagcaggcagatcacgaggtcaagagatcgagaccatcctggccaacacggtgaaaccccgtctctactaaaaacacaaaaattagctgggcgtcgtggctcacagctactcggagactgaggcaggagaatcacttgagcccggaaggcgaagattgcagtgagccaagaacgcacgactgcgaaggttgcagtgagccaagaacacacgactgcgctccagcctggtgacagagggagactctgtctcaaaaaaaaaaaagactgacaactgaccatgggaaaaggcaaacaattacttacagggcatgaccagattgtcgtttttgggttgtggacggtaggggaaggagtaactagaggaaaaagggaagaggcagttgtatacacatgctttatttaacttttaaaagttcaggaaagagaagtatttcttctcttctaaaaagaaatcaagagactagaggaaaaacgggatagcccctggcccaagtcctggctctgctacttaccacccccaaccccaactagagtaagtcctggacacacagggccatagagcatcgcccagggaccgccaggaccttcctggtaccctcttcaaagtggccatcaggacgggaggccagactgaccacctgtgcagggaggagcacactgtggctggaggtcacctcgtgaagcgttcccaagccacctggctggagggtctccatcgctagggtgttgaccgttgggggagggggagtgacagcgtccagtgcgcatctgggagagaggagctcgggttcaaggaccgcgacaggtcctccgagccctggtctcagccccagcaggggccggcacccacctcggtcacaatggtggacaggtagacgtcctgactgaactcccagccatccagacagctctcctgctccagctgccccaggtccacgtcgcgccccggctccagcccaagcgccgagaagttggcgatggtggcgagccggtagcggcggcagctgtggggcacctcgcggccgtcccgcagccgcagtgggacagtgtggttgcgccaggcgctgctcaggttcgcggcgtccggcacccggcagcggtgctccggggtcgctatcaggaacacggaggacaggccggtgaagccattggggatgatgctggcgctgagcaggaagaagatgaggcgctggaagggcccccactcgcccaggaaggcggtcacctcgtcgtagtcccgcatgccgccctcagaggcccacagagcgcggcctggggtcggggaacgcggcgggctttgcgcgtgcgcgcggggcacccgccgccgaccaggcaagccaggcagcaggcgacccaagaccgtccgcggagggtaggctcgcgagctgacaccgccgccttggtcctgccgcggctggccttacatagggcgcacgaccagggaaggttgcgggcctgggccgcaaggcgcgccccgctggcaggcagagcggcgccgg

SEQ ID NO: 34319 - DNA, 2300 bp, Homo sapien
aggcaggtggatcacaaggcaggagttcgagaccagcctggccaacatggtgaaacctcgtatccgctaaaaatacaaaaattagccctgcgtggtggtgggtgcctgtaatcccagctactcgggagggaggctgaggcaggagaatttcttgaacctgggaagtgggggttgcagtagccaagatcgcaccattgcatgccagcctgggtgacaagagcaagactccgtctcaaaaaaaaaaaagaaaaagaaaagaaacttccaagctgctctgcatcgccttgctctccacctgtctgcttctaagaagccctcggcccagtcctgggtgggactcccactccctccccattgtcctggactagcttttctatcagccttatcttgtgtagagacagatagtcttagaagatgggagagccctcactgttatccccaaagctgcctggaggaaaagccagagcaacctgggagctgggaccggggctgactctgggcagcagagacccgagagacctggagcttgaacctcactgttacgcctttgttgatttctctcactcaggggacacacagaccctcatccagccttttgcagctatatggcaaggcagagaagccacttgcggggtcccgtggcccactatgcacgtacatagtagacacatctggccatgagtggtcagattgagccactctctagctagctgacacctgtaatcctgggtcaaatttctgacagttgacacaaagcagggggtcagggagccaaaaaaaaaaaaaatggccaggtgtggtggctcttgcctgtaatcccagggctttgggaggccaaggtgggcagataacctgaggtcagagttcaagaccagcctggtcaacatggcaaaaccccgtctctactaaaaatacaaaaattagccaggctggtggtgcatccctgtagtcccagccactcaggaggctgaggcatgagaatcacttgaacccaggaggtggaggttgcagtgagccgagattgtgccactgcactccagcctgggagacagagcaagactctgtttcaaaagaaaaaaaagagtattctggagattgaagttcaggagttcagggttcatctcgactttgggcagccaagcaagaactaaagtataccaagatgttgaaggttgatacctttttatttatcgattcattcactcacctatgtaccaaagagctcctgagcctctcttctatacagggggcactgccaggagttgtagaggatgtgatagcaaagataggaaataccttttctctttgctctgacaacggtggggcaaggattcatcattgatttcagcaggaggcaggataaaatgtgtgtaggaatataggaatacatggcaatcagtaacatgtggtacctagcagcatgtctgactgttgatacggtcaggctaggtacatcccctcagggaagaacttctgtcttaggggcacacaccctatcttttttcccttcctgccaattcacaggtaagaacatttagtcccagggaactatgtcatctctctacttctcataactgaaaaagcagtgccaattatgtatgaggtataggagacacaattctccctctttttaaaaatgtttaatagctttattaaggtgtaaatgacataaaaactgcatgtagctaaagcatgcaatttggcacacatgtatctctacacccttgaaaccatcaccactagaaaggtgcatttctccccaggaagaggggcaagtctaggccctttgccagagttgctcccagattgttttcaggttgggcctgcattcacagctcagccagctgaagggtgacagcattagactcgtgacccaaatcttaaacccacacattccattttaacattgatacctgtgatcatcagccagtatagcccatcccatgtgccaggcggaggcatcaataagctggtctgtagcagctttaatcacagctggggagccaggagctaaggaatgctagactcctttgtaaacaatttaagtagggggtacttagcctggactctatgtgcttctcatccacctcttctcagggagattctggccaagtcctggaacctactgcagtccatctggtggttgacagatatgtggacggattggcaggctgggacccaatctatgtttgcccttgtgttcagttttgagacctagcacctttcctgatcctgctcacagaccccctgcggccaataggaaagaagtgttaatgcatatttgcttttggagggcccaa

SEQ ID NO: 34320 - DNA, 2300 bp, Homo sapien
ttattgctgcgtgtggatcagctctttgcttctggcttgtgatcaccaaacattccacaagctctggttctgcaaccttattcccacctatggctgtgctctacctggtctgtgggtctgctgttggcagggaggcctcactgagattggaccttgtactgccaggttcatccctgagtccccccgatggctcatctctcagggacgatttgaagaggcagaggtgatcatccgcaaggctgccaaagccaatgggattgttgtgccttccactatctttgacccgagtgaggtaagcaccatgtgggtgtgggtgagagggacagactgaccgtgatttgagagcagcagcacccagccctgaagtcctccctgctcacagcagcccagccctctctccgcccaagccccaactgcccattccccccatccccccactccccacccccacacgggccctgttaacactcagaagttgaggaataggttacagctgcctcactcttttcaccacgggtttcagattttcattttttacttcctttctaggcaatcatatattttaaccattacttctaacaataaatactctttttgagtaataggcctttcataaagtcagcatttgggaaaatcattgtttcttatacctaaggtggcttgtcaccttacaaagctaaccccaaacgtaaaatgtaaagcacaaatagatttggagttagaagtatttcatctcttgagtattagcaattattcattaaaaagaaaaaaaaagtgtttagtctctttctgccctccaatggttaattattgcatatcatcttggagtcaggtcctttttgatgtccacctcttccccctaccccacccctcccgtcagccctgttctcacacaccatgactcatttcttggctctacctagttcctggttcttgcttttccttcccgttccctctcctaccatctctgtagcaggcagttttccttggtctcgtgactatgagaggttagaagctgtaaatgctgcctggtggggttctggaatgtgtctgtggtctgactggaagatgaggggttgggtgtgggaacagccacaagcagccctgctgaagtgtgagaggcaggcatggttgggcttggaaaagagggaacagttattgtagacagcggaggccaatggccactgccagccctgcagacttcccagtgagtggtggcccagcagccactgtcagcatgcaccagaaaggggtcctgtgcgcaaaggtcaggcaggagtgtggcagagggcttttaagttaggtggttttgggggcttttaagtgaggggtcaatctgggtgaatgcataagccccactggcatctttgaggaaatgaggctatttcaggggatactttcagtccaaagttgaccttttgttgaacttctaactctggaaaaacaagctccaaacctgggtttgcttaagaaagcaacatcagtgtgtttagacgtgtggtttattaatggccttggctgtgctgaatttcataggaagtcactctgggtgaagctcaggtcaattttcctgtttttctatttgaattctttttccctggaagcacaccagtaactacatagtataaggactcaaaacattaacttttaaaaaatatcagaccaataaaccacacagccaggtactctctctgacccagagggcagggagccaggcttcgggaggaatacttagaggcctccttggaatgtggccaccgacaggaatatgtgggggtgcagtgaggaagctgtcagcctgggcctctgtcttcctgtacccttgagggactggtcacttacttttcctcattttcattcactctgatttgttactgacaaggcctagggaagttttcacagcctaaaacacagtcagtatacttactgttcttagaaacgtaacactccccgacgctgagatgcagacagctaagatgccagggattcaagtatgttattgtgtgctctgagtctctgaccacctcttcttcccatacacttatgatgttgttcctgcagttacaagacctaagttccaagaagcagcagtcccacaacattctggatctgcttcgaacctggaatatccggatggtcaccatcatgtccataatgctgtggtatgtaaaagagacctgcctgaggcttccagacaaagcttcttgaagtggccattgggcctcttgtttacagacatgcctcagacaaaattcaaagcctatgtcatcagagagtgaaaaggatatgtcttgtgttag

SEQ ID NO: 34321 - DNA, 2300 bp, Homo sapien
ctatgtgaccttgggatttccttcatctttttttctcccaaatgaaaaataaatagattataatataccacatgatagtagggagaaataatgaggtaataatgcatgtaatgcatttagcatagcacttctctagcaaatagtgaatgaaatcagtcagttgtcattctgactttatgcaacagtgctaatcgactctggtacactggaagtcagatgagatttttggccccacaaagtcaaggaccaaacctggaccttgggaagttgccaagatgaaaaacatcaggccggccttgacctcctgatgctctctgttcacatgtgtgatgtctataaaaggtaaccaggatttggcttatctgcttacatctcttcctgtcttttcctgatcttcatcttcccaaacatagtttttatgcagaagcagatttaactctactttgctatcttggagtcaagaattgtcctataaggaggaagaggctccaaggcttgccttttttgttttttctttttccttcatactacagactaaaagtagcatcttctggacagagaaacaggctgttgtttttctaaggtcatcatttggcctgccccactttcccacctgctcttgagggaactattgcaaggacacatacaagcccctacatcagtcacagaccagggcctccatcttgcagggaatgtgcccaaattacaaacaggtaaaccaaagtgactctgggcagatttaatagctcattttggtttcttgttccagttataacagactgctctgtgtttgctctatggcaaaaacttttatgtttgctttgcaacaaacgtacagacagggcaaactgtgtttggagtatggtgtcttaccaatgttttctaaaagcaagtgaatagaaatgcttgcaaaagtattttcagacctcagtggccagcgctgaacaccgctgtaggaatgtccatcaaacgttgtggccatgctccactctaacaaaaacctggttccgtggcataattgtgggggctaattgtcaggctaagtttcagacaccttccaaaaaaaattgcagggcttcctcagtctttaaactccagataatattgtccaaactttgacaactaacctgttatcatggagatagctccaagttgatggactggccattagagaatgtctatcaagcatccaggtaaatgacttggttgctgccctcaaggaacccacttagaggctgtcagaaaattttaagtattttcttccttctattgttcattcctaaaattctggcagtaggtatgattattattattcccatcccacaggggaagtaattaagtctaactacttgaatattttgccccaaatcactgacagtaagagacggccagacactgaaacctggaatctctaaatgtttagatattgatgggcaccgcttagaccagggagtccaaaccataggcttgctgttccagtttctcttatcggatgaagggacccccatttcaccgacgtcattgacttttgggttctccgctgaccccagatgagatgcctggtacctcatggtcaagtcccctccaacggggactcctcagaggcttggtcccagttgctcaggctgccatctgcctcctcaggccagagcccgaggcgccgccagcggtcaggtcccgggccggctgccagccacaggcccaagtaaacgctgaatgaagggcagatggaggaacctgtcccggtcggccgaagcgccgcgggcgcctttccacttacggcgggcctgcccagcctcccgcccagcccgggcccgggtcccgccgaggcaggtgtgcgtggcggactagctctcgggcactcggctggcccagctccaccccgaacgccaccgggccaggccacgcgcagacccgagcccggggcccccgcctctggctgccggcccgcgcccgccgcgcgccccgcgttcactgcgcgctcggccccggtcccgcctcccggagggtttcgctttcgctttcctgccgatgtcgttgaggaaaatgaaagcggtcgtggccaggactggcgcagctgccgtttcaggcgaggggcgcagaatgcagcggccgccagcctggagcgcgggccctggggccgcaacccgcgccgggcgaggtaagcacagccccttcgcggccgcctcgcgggctcctccttgcggacccggcgggcccgacgccaggcgtttgacccgggcagggtcaggggttctgccgtgggggcggggagggcctgagaagcggcacccttgggt

SEQ ID NO: 34322 - DNA, 2300 bp, Homo sapien
ttttccttctgctttctttttcttctccctctctctgtctctccatctctccttgttggaggctttccttaaatgccaaatatctcagctatctgttggtatttattaatggagcaataaaaggctgaactaaactctgcttggggagaatttatcaactggggtttcactacaggaagcaagacagtcttttagttaacaagcctccaatgagcaccttttctctagagctaggtttcttaaccttggtactagtgacatgttgggccaaagaattccttgttgtcagaggctgtctcatgcattgtagaatgtttagcagcaccagtgacttctgcctactaaatgccagtagtaacccccctcccagagttgtgataaccaaaatgtctgtaaacattgccaaatgtcccctgggggacaaaatcaccctgttgagaaccaccaccctgaagccattcagctcctcaagagaagcattctaactcctagttctagttattgaacgctacataacaaaccacctcaaaacttagtagcataaaacaacaaccattttttgggccactgtcaaggagtcagaagggcaattctctgctctacgacggctaggatgactggaatgactcgaggtgactggaataactgggagttggaacagctggggctgaagggtccacttgtaagatcgttgttcacttggcaaagagagctggaaggctgggctcagctgggactgttgaccagagagactacacatgatgtctccagcaccatggcctggtcattggacctcttacgaggcacctcaagtctctggtgtgagtgttctggccagcaagacagaagctgcatggctgtgtatgtcccagccttggaagtcacatagctcatttccactgtagtcagaaatccacacaggttcaaggaaggagacacagacccacctctccattggagaaatgtcaaagaatttgcaaccatcttttaaattcaccataccctcatccagagtgatatatacctggggtggggcagggcaaggtaagtgggtgggacattgagtcccacgcttcattcttcagacttttccctcacctccctgttttcatccctgtattcatctgccctccctcctgcctgtctctctcctgttcagtgtctttgtctccagctgtgtggggcagggtgtggaggtgagacctggggaggatttcaaccagtttcctccattcattacccccacaggctgctgtacctcagccccaccagccacaacacctggactccccaagtctgagctcctcctgcagggttccaggggtaaagtggcttgcctcctgtcagtgtgcccctctgcaagcccttcagagcctagcttcctccatgtcagtcattattcctccacctgcctcccagcttcctgtagtttggggaactctttcagccactcatgtctcctttaccattctctttgcctttgagagttaataccatttggttggttggttgtttgagacagagtctcgccttgtcacccaagctggagtgcagtggcacaatcttggctcattgcaacctctgcctcctgggttcaagcaattctcatatctcagcctcccgagtacctgggactacaggcatgtgccaccatgcctgactacttttcgtatttttagtagagtcggggtttcaccatgttggccaagctggtctcgaacttctgatctcaagtaatccaccctcctcatcctcctaaagtgctgggattacaggcatgagccaccgcgcctggccccatttgatttttttaagagacagggtatcacttcatcgcccagactggagtacagtggtgtgaccatagctcactgcagcctcaaactcctgggctcaagtgatcctcccacctcagcctcctgagtagctgagactccaggtacacaccaccacacccagccaattttttttttaagacagggtcttgctatgttgcccaggctggtcttgaacttctggactctaatgatcctcctgccttggcctaccaaagtgctggaattataggcgtgagccactgcacctggccccatttgatttctagactagcattttagtggtgcttcaggagagaaaggaaactaggagtgtaaataactgatgtgttgaactggaaaccctgttgtacctctcttgtatggatctatctctacattgtgttatagtcttccctgccctgtaacagctctgtgaagcagtacagtgacatttaaccttctgttgatcattcagagtcctcc

SEQ ID NO: 34323 - DNA, 2300 bp, Homo sapien
tgcctcttgcagtagtgagccattgtacaaaagacatccagcggagggaggcaggctggagaggaggacagccgaatcttttctcaaaggaaatgcagttgtggttttgagacgttcatatttcacatctgtggttggcgtttcccagggttctcagaggtgaatgcagggtcagccctgtgtcaccaaataaggctcacagtgaccttagcaacaagctttgctgcccattggctgtcactgctgccgcctgccaatgcggcctcctgaaggccagcactgatgctgagctgaaacttctgcatgtgccaaggtccagctgcctctgtcagaaatcaccgtccttggaagcagccacagataggtagagagctccggacaaaggtggacaaggtcagtgggaggactgtccaggtgtccatgtttcagagtccacctggccagcattccattctcacatagcaccaaaccagcaccttggtggcctggtcccagcttgccaggacaaccccccattccaccctgtcaaccttgaactctataatggtcatcatttcatagctctgctcattttagttccactgggttctcccttgtgcttggcacttgactaagctccttctacacattacatcttttacctctctcaacaaccctgtgagccaattagccccattttacaggtgcagaaactgacaccaaaggaagtcagtaatggcccaggtgactgcaccactagtaagtggggaagtcagaatttaaacccaatttaaacagacctagatcccatgctattaaccattgcactgtattgacagacactcaatgtccgtgcagctcagtgtcttcattctgtgacatggggatgacagtaccgtacctcacagggttggggtgagcattgtgtggagtgacttatgtccagaagcacacctttgcaccagtggccttggcacccccaaggcatgctccacaaacagcttgcacattcctttctcacagcgtgtgctgctgaaacattgaggtttgtggaccggacttctctgtagcccttgtatttagttttcacttcctctttcttgacctcctcccaccccccacccaactgcaaggtagggaggctactgaggggccagcctgtggattccagagggcacagggctatctgggatggaggggacagggttctgaagacagaaggtgggaaggtcacactgtaagggcagacataccccatttcttctacctaaacaactgggtgtaataccactgtttccctgagaaacactttcaggattaaaaagtatataagtaaagaaaataaagcatataagtgatctggtaaagatgaaaacatggctgatctgaaggtagtgaattatctcaattgacttcacagtcagttacagatcgaactccttgttctactcttttcccccttctcactactgcccttgactagtctttttttgttgttgttttttgttttttttttgagatggagtctcgctttgtcacccaggctggagtgcagtggcgcgatctcagctcactgcaagctctgcctcccgggttcacgccattctcttgcctcagcctcctgagtagctgggactacaggcgcctgccaccacgcctggctaattttttgtatttttaatagagatgggatttcaccgtgttagccaggatggtttcaatctcccaacctcatgatccaccggcctcggcctcccaaagtgctgggattacaggtgtgagccaccgcgcccagcgactagtctttaaaaaaatgaataatataaatttttttaaaagatgaaaacatatatataccctgtaacccaagagtcccactcctcagactcttctcaaaccacactcttacccatgtgcaccagaatacccacacagcaccagaaaatgtccaaatgaccatcaaaagtggagagtacaaataaattgtgcagtgttcctggagtgaaatgaactacagcgacttgcaataactgtaatattgtcatattggataataatactgtaataacaaatgactcatcaatgaataaaacctacaaaagaatgcatacagtataattccttttagcaaaaatttaacagctggcaaaactgtattgttaaggatacatgcagaggaggtcaaactacaaaaagcacagaattattacaaatgtctacttatgcagaagggagggttggggttgtgattagtaggggaacacgtaggtgctttgggggtgctagtattgttttctctctttaagtttgggagattaccc

SEQ ID NO: 34324 - DNA, 2300 bp, Homo sapien
ggggcagggcccgagcaccttatgccaagcaagcacttgtggatgctgagggaaggcggcaaaagctgcagctgctgtgctgccctgccttcagctctcctcccttcccccagcacacacaccttccaacacccctggcaacatggctctgccgctacaggccccagggccccaacagggtagggtttgccccacctatgccctggaggccacctgcagtttcgaagggtggggccccagggggccgagacacagacaggcttgtaacttggcctcagtgcagggggcagcttggccacaccaggcctgtttggagcaaacgggggactctggcctgctaggccttatctcagctcccaggatcaaagaggactttttagccatgtttctgtctcagcaagacaacctagtctcctgttctgctttaaaccagaccctctgttgggtcctggagttcctcagaggtctggaccctggatggctgtgagactcaggaccatgcacagatgcattctcattcccagccaccaggctcgggtcagaccctatggctctggtgggcctaattcctggtttcttgatccctgagaacacctggcacctctggctgctggccagttgccaccttacatcaggcgggcgctgggattcacctgcaggcttcctttagggaaggccctcccctgccctcctgtgccagcccagaggggcagcctgggtgaggtcttcacatccatttcgggccaaatgccttggattggctggatcccctcctgtttctgccctccttctttccttcaaagcaacaaggttgtgggggtgtccagttctgctaccacctctccctcacactgtcaatctggaatttgtccagaattggggcccaagtagtgagttcttacacagtggttaaacaaacaaacaaacaaaaaccccacacaactcagctacaccttggctcagagaggccatgggatataccgaggatctcagatcaggagggaggcccctggagaggtgtggcggggatcatgtgcttctctggtttcttggagaaagctgactttgtgtaacaagggaggcatatggacatggagttggtgtttggggatgtgggaaccattaggccagaattacaagaagtcctgtcatgtcggccacactagggcaacagtggactggggcaggggctgatgacctgattgtggaggcagtggagggctgtttctgctggggacccagggctcccctccaagtgctcctgcttggcttgttgggatggggagaggagctggagttgggatggggagaggagctggagttgggatgggtcacagcgaaggctacagcctggcattcccatatggggtaggggtggggtggggtgggacagggaggaggacctgaaggggtgtccaactttccgagacttggaacagcctggtgagtgttcatcaccattcttctgtcataggtggcgagcagccagagttctgggcacaggagaccatctacccccaagcttgtgcggcctgcctcaggtcactgaagaggaccccatttttggtctttggccatcctaagacttgtacaatggagccctggggccctcccttctctgaccagtgacagccctcacaggcaaagcctcaccctctagggcctgtcccttcctgtctgccagtccccacagggtctgcggggtacccaatctcgccaaccagactggaagctccccaggggcaagcagcttatctcttccatattctcacagtgttcagccaggattggcacttcagagcatctcctgctgctcagcagagatgtagttagcatctctctatagtagcactttctgagtccctcccctgggggaaccaggctagactctggggtccagaggagcaggcaggctgagaggcaaaaagggcacagaggaataaccaaccctgcccctgcagtagagccctgggcaaaacaggccatgaccaaccagcagccaaggtcaaagtccccagaacaagggccagtgtgtgcatgacatgcagcatgaccgcttgtctcttttcggcagtactggagatagaaggctgagtcattaacaactttcttttattaaaaatgtacataagtaaaaggaacatggtttaattgtgcaaagagtaagaaatacagatgagcaaataacacgtattaaagccacctacgatataccacccagaagtaaccaggctgttgaatttttagagactggggtgcaaacacattttttcactcccttgtgcatatatctgggagct

SEQ ID NO: 34325 - DNA, 2300 bp, Homo sapien
taatgtatacctattacaaatgacattgcataagtacatttcatgacatggaaagatgctcattatggctaaatatacatatgcatatacgggtatatttatacctgtatctgtgaattaaaattaagtttttgttttaaagcattttttatagtgtcctgttgccttcacagggtcactgtggtcaacttatcagaccacaaagatgcaaacttcctttccctaatctcatcctgaattttccagtggatgtgtcaggttctcaggggaaggacaagcatctatttgctgtaccaagaaaggatcccacgactcaggggtcacttgttttctcttattcttgctcagaaggtcttggtccctgtagcaagtccccacttccatttgtcacttaaagtaccccaaaacccacctttccattccagagtgtcattgccctccactttgcttaacactcagttaggttccttcctcagtttctcctacctcctttcctctcctagctcctgacccacctctatctggtagacagttttgcccattcctgctggtatcctgggaaccaggtttggcattggtcacagcactcagattgcaatgcgccagaatgggattaacccatgcatttcctctacgggagggaggtagagtgactggcaagtcgaatgttgcatgggtgtgtctatttatagcctgcaaaatggggtgctgccctggagggagagctggggtgaaggaaatgacacgcctgggagagtaacttacttctgcaggagctttagggagatgaaggaagaagcctcctgggccagagttttggatggaaaatgaacacccagtcaagtctctaggactatacgtggggcggggactagttgtgcgcgagagttaagtaggggccttaccaaggagcatgggacctgggctccccaaccctttggctagccccatggcgttgatcagccctgagctaattcctccatgctgcccagaacctctctgggccaagccctggggactcagagatgacagcaatgcttccattgcggaactcccatacgcgggccacagggaggctctggaggcggcctgaggcaagagtgctaggagggatcagagctagcccacccctaccctcactcagccgtctgggcttctctgaaccccttctcctcctctgttccctaaagccagccagggggagtcccagggaggcagaccgaaaaggggtggggtgtcatcctggtcactattagaccctgcaacggcgaccttgaaaactactcagcgtctgttgcccgagtggagcatagtgctttacaatctcttcccatcacagcaaaccatcaaggtagggctactattattttatggttgaaaaacagaggtcctgcgtcccttgggggctgtgccagcagcggccaagttgggatttcccctggtccagcagccccagacagcacacggggcagggtaggctttctgccttcttcacttccccagggcaggtgagtgacctggagggagggggtcacccctaaaaacaggggtagtgctaggactgaaaccctcccttcttgatatcccactggcaagcttgaggagccaggctgccagtcgggagattcggcccagtgttcccactggagagggcggcaagtgcccgggcgatcccctcacctgcgttcgggagatatacccccgcccccgccccgccaggagggtgaaaagatggccccaggagccagccggctgggacaaggcggagtgagaggacaggctggggccaggggcgctgggctgtcccgggcagccctcctccgggcaagccggagcaggggtggattgggagcgctcggggcgggcccgcggtggccccggggcggtggcgcccggccggagagggtggggcggagcagccgccctgtacttccccttcgccgctagctctacaacagcctgatttccccgaaatgacggcacgcagccggccaatgggcgcccgcgcggctgtccgggggcggggccggccagggctggggaatcccgctaagtgtttggattgctcggtggcgccgctgccctggcagagctcgccactccttagtcgaggcaagacgtgcgcccgagccccgccgaaccgaggccacccggagccgtgcccagtccacgccggccgtgcccggcggccttaagaacccggcaacctctgccttcttccctcttccactcggagtcgcgctccgcgcgccctcactgcagcccctgcgtcgccgggaccctcgcgcgcgaccgccgaa

SEQ ID NO: 34326 - DNA, 2300 bp, Homo sapien
tgatgtattacaccctgcccatttcactcactggtcttgaactcctgggctcaagggatccactgcctgggcttaccaaagtgctgggattacaggcgtgagccactgtgtttagcccaattttttattttttctagagatggagtctcactatgttgcctgggctggtctcaaactcctgggctcaagcaatccttctgcttcagcctcccaaagtgctgggattacaagcatgagccaccttgcccagcctcctatgatagaatttaagcactcagaactttgtgtatttaaggtactaaaataacaagttatttggcaattcccctgaaactttcacctaagccctaacttcctcagtgtaacataaaggtgtcagggggaatcagagagaacgctctcatattctctgggaagagaaagctcctgccagaactcagcttcttttctgagaataccattttaagagcactttgaccaagcctattgtgattcctactcccgaaaatctcactcccgatagattttctgaagtgagccaaacttctgcagtctcaaggaaacatttctcaaggaaaacatttctcaagtgcgcaaatcagacacatctaaccaagagtccaaaacttcagcacaaacaaaaccaaacgtggtacaagaaggccgccactgaaatccaagactgtctttatctttccagtgcagagctgggattgagtatgtatgaaaggtgtgtctacctcccagctgcctctacttctcctacacaactgcacctagctttggaaaactgttctgggcaacagtttgtgtttggtaccatctgttcttgacgctcaagacaggcctgaagtcaggcttctaggctgcaacatagagccactctgggatgctcactgaagcactctattaaaaacaatgagccacatacacctccatcatatgtgttcaggccagggaaaaaggaagtgtgtgatctaggagggggcctcatttgtacctttctgggattacaggtctgagcctaaggaacaaaggctgattcccctaatttcatggcccgcccaaggtgtgaaaggacacctccacccttatgggacataaaggagaggacacatccatgtattgtgtatctgtgacagatatttattggttgccttcctagaatctgtgtcccccttactactgggaccccacatttctaagctatgcagttgaggtaggattagggtcacctctagctccagggagagccaatcagtatatactacaccctggtcacagttcaaggatgaacatgtgacccttgtcagaaagagactgaatttgaaagcttttgattaaacaatcagaaaagcacagcttgctttttcctgctgctcatgaacagaatacatatagatccaggagtctggacatcatcttgagacctcaatgggaaaggtgcccaaggatggagtcaaggaagagtcactgaagccatcaaaatgtaaaagagcctccattcctggactgtttggttctatgagccaataccttccctctttatcttcaacaactttaggttaggtttttagtcactggcaacagaaaggatcctaatcaagaccccagtgaacagaactcgaccctgccaaggcttggcagtttccatttcaatcactgtcttcccaccagtattttcaatttcttttaagacagattaatctagccacagtcatagtagaacatagccgatctgaaaaaaacattcccaatatttatgtattttagcataaaattctgtttagtggtctaccttatactttgttttgcacacatcttttaagaggaagttaattttctgattttaagaaatgcaaatgtggggcaatgatgtattaacccaaagattcttcgtaatagaaaatgtttttaaaggggggaaacagggatttttattattaaaagataaaagtaaatttattttttaagatataaggcattggaaacatttagtttcacgatatgccattattaggcattctctatctgattgttagaaattattcatttcctcaaagacagacaataaattgactggggacgcagtcttgtactatgcactttctttgccaaaggcaaacgcagaacgtttcagagccatgaggatgcttctgcatttgagtttgctagctcttggagctgcctacgtgtatgccatccccacagaaattcccacaagtgcattggtgaaagagaccttggcactgctttctactcatcgaactctgctgatagccaatgaggtaattttcttt

SEQ ID NO: 34327 - DNA, 2300 bp, Homo sapien
aatgaatcttattcaaccttaaaaacgacctgaattctgatatatgctacagtggtccccaacctttttggcaccagggaccagtctcacggaagacagtttttccacagacaggagtggggtgatggttttgggatgaaactgttcgacctcacatcatcaggcattagattctcataaggaatgggcaagctagatcccttgcatggggcaacctacatctttctcatgggcagttcaaaatacggtttgtgctcctatgagaatctaatgcccccactgatctgaggcccagctcgggtggtaatgttcactcacctgctgctcacctcctactgtgccaccaggttcctaacaggccaggtatgcatactggtcagtgacccaggggttggggactgagctgcaacatggatgaaccttgaggacattataagtgaaatgagccagtcacaaaaagataaatactgtatgattccacttatatgaggtacttagtaaaaaattatagagacagtaagtagaatgttggttgtcagggtttggaggatgtggggaggaaagggttattgtttaatgggtagtttgttttgcaaagtgaaaagatttgtagaggttgaaaggtggtgacggttgtacgtgagtatacttaacaccactgaaatgtacacttggttaagatagtaaattctttttgagacggagtctcgctctgttgcccaggctggagtgcagtggtgcggtctcggctcactgcaagctccgcctcccgggttcatgccatactcctgcctcagcctcctgagtagctgggaccatcggcgcctgccaccatgcccggctaattttttgtgttttcagtagagacggggtttcaccgtgttagccaggatggtcttcatttcctgacctcgtgatccacccgtctcggcctcccaaagtgctgggattacaggcgtgagccaccgcgcctggccaagacagtaaattttatgtgtattttacaatttttaaaataaaaaaaggtctttcgtcttttcccattgttttattacatttgctttgccaagtaagacattcctatataattttaatgttttgttccattagttattttaactattttgtaataactgacactttccggttttttttaacctggtacagcaagagactatttctcactggtcttccccacttgcatcctttggcacatacatttatgtattaggttctgtaaattatttgcttgggattgtatgactggagaaacatttcctacatttttccaaggcaggcagaggcaaattataccactacagtaattccaaatttgtgtttcatttaaatgtcctccactattgtttcagtaatttttatgtatgtttctctaggcccttaaatgtgatatccctccattaagtttgtttccaagaaagcaatattctcagttacttctgagacaggtaacttctctttcccttatttttaaagatatctattgctgggagcactgatcggaatggattacctctacattcttcatatttgcagactgcttttagttttagttcccagacttttggtcttaaagacgcctttacactaaaaaattacgggggacctcaaagagcgtgtacgtgagttataattatcaacatttactcaattagaaattaaaattggtatttctaagcgcaagaatacacatgcgcacattccattaaccgccactgcaatggcgtcatcacatgttatgtgatcactggaaattactacacgaacgttagagagagaatgagaatgaaaaggaaaatagttttgacacgaactgaccccgcttcctgggtctccaatccaccccaccactacccccattccaggagtcccaggatcaagctttgggaagcgccatccgtcacaggtcttggtctccccttccaaaagtcagtgcctctccaggctgcccatccccagcaaagatccggaagtccgctgcccctggcaacagcacccagcacctagccctctgcttcgccgtaccgcacccggaagtcggagctgcgcacgcaccgcgggactctgatttcccggcgtgccccaggagagcggcgtggacgcgtgcgggcctagaggcccacgtgatccgcagggcggccgaggcaggaagctgtgagtgcgcggttgcggggtcgcattgtggctacggctttgcgtccccggcgggcagccccaggctggtccccgcctccgctctccccaccggcggggaaagcagctggtgtgggaggaaaggctcc

SEQ ID NO: 34328 - DNA, 2300 bp, Homo sapien
atgaccgtggtcaacaaaagcgccatgaggcccagtgccaacaggagaggattgaggagcggatgcataggctgggtggcttgtggccttggcgtcttgtggcagcttttataggcccaagtggtgacgcctgacaccatggtctctgctttttcaggcactatctagaaaccacatctttactcatcttgattttactttgtggaaaatccagtgtcgcataaaggaaagagtttgatttctcatggacttattgagaagggtccagggcagagtttccaagatctgggtgggtttaattccagcggcaggcaaggggccctgagagcggcgtggcatttgcaatgctgccctgagttccagcagttttgcctgtgacaaccctgagtacctggacagctgacccaactctgagctcctgtcctcagacccttttgggtcaccagaagtgctgagcagatagtcttagtgcactgtggctgtgaccacagtctaccagctatgggaatttggggagttttattttttcgatgaaccagtctcttaaattacttaagtaacacttgcttggatacaaaattcaaacaggcaatagaagagtaaagttcacttcttttggcttgcctaattcctccttggccccactgtgagagggattgtcaaagttcagatttccaggtctccactgagagatccagaaagattcagaggtctttctgggagcttttttggtgtttttttgttttgttttgttttgtttttttggagatggggtctcactatgttgcctgcctaggctggcctccaactcccagactcaagcgatccccccacctcagcttccagagtggctggaagtagtgtgcacgtgtctggcccctttaatttaaagtgtatgggccatccttctgggaaactcttaactgggccaggctggcagccttagtccaggtcagagattgtaagtgttcctagtgccactggggcttggggtgatcccctttgctcaccagtctctgcaggatcaacccctgccgtctgggggcctcaaatttcccttctgcagaatgagtgctgtggagggcggctcctgggcttggcccctgcagccatgtcgccttttcctgctcttccctcgttttcctagaagtcctccagaaacccccacagcagaggccacggcatttgcctgttgggtgttgatgtcaagatttctcccctacccacttcctccccgaaccagcgcctccccaggccccctctctgcctgctcaggctccctccgtcctgtcctcgatggggctcaacctcctcacaagggtgtgcttgtgaccctcctcacaaggcatgctggattcccgctcagaggcatcccaggcttgcccaccctctcttcccacagggaacgtcattcccaccctctctgtccacactcgaagcttcccagcccagctgctggctctgactcccagaagtctgccccttcccctcgagggcccccagtgcctggagtgccgctacttggccgtgtgacccctctacgggcctgtttcctaatctgtagtagagggcccacggcatctcccacagggtctccgtgatgggggaaggagcggggaactaccttggtctgtgcaactcccggagccccgcccgggtgagtcaacgccccttatcccccatggccaccaaaagccctgccgggagcggtgggcaggggcgcccccgcgcgtgggagaaggcgctggcgcggcggttgcggcggcgatggcccgcggagataggggggtggccttatgtaacgggagatgggcccgataagcgggatctgcgcggccgggccctcctccgcggcctccggcggtggccggtccgggaggcaggggtgggcgcgcagaccggccagtctggaagctgcggaggctggcgagggggcggcaaaggtggcggtccgagcgccaggcagggcaagggccggctggacacccgggccagcggctccccgagcgccggtgcgcaccggcgaggggcgggagcggccgaggggccgaggcgcgcacgtgccgctccagcaccggccatgtcaggccgagggaccccgcgggcccggccgagcggcagcccctgccctggagggtggtctccagggaccaaggcgtggcgggcggtgcggagaggcgcggcacagatggctacatcagagggtctgttgcttgtttctagattgtcagcggggatccactcccgtgcgggtaattttaattaacactaactaccaaagggccgctccgggcacttgg

SEQ ID NO: 34329 - DNA, 2300 bp, Homo sapien
cgcgcctctccgcaccgcccgccacgccttggtccctggagaccaccctccagggcaggggctgccgctcggccgggcccgcggggtccctcggcctgacatggccggtgctggagcggcacgtgcgcgcctcggcccctcggccgctcccgcccctcgccggtgcgcaccggcgctcggggagccgctggcccgggtgtccagccggcccttgccctgcctggcgctcggaccgccacctttgccgccccctcgccagcctccgcagcttccagactggccggtctgcgcgcccacccctgcctcccggaccggccaccgccggaggccgcggaggagggcccggccgcgcagatcccgcttatcgggcccatctcccgttacataaggccacccccctatctccgcgggccatcgccgccgcaaccgccgcgccagcgccttctcccacgcgcgggggcgcccctgcccaccgctcccggcagggcttttggtggccatgggggataaggggcgttgactcacccgggcggggctccgggagttgcacagaccaaggtagttccccgctccttcccccatcacggagaccctgtgggagatgccgtgggccctctactacagattaggaaacaggcccgtagaggggtcacacggccaagtagcggcactccaggcactgggggccctcgaggggaaggggcagacttctgggagtcagagccagcagctgggctgggaagcttcgagtgtggacagagagggtgggaatgacgttccctgtgggaagagagggtgggcaagcctgggatgcctctgagcgggaatccagcatgccttgtgaggagggtcacaagcacacccttgtgaggaggttgagccccatcgaggacaggacggagggagcctgagcaggcagagagggggcctggggaggcgctggttcggggaggaagtgggtaggggagaaatcttgacatcaacacccaacaggcaaatgccgtggcctctgctgtgggggtttctggaggacttctaggaaaacgagggaagagcaggaaaaggcgacatggctgcaggggccaagcccaggagccgccctccacagcactcattctgcagaagggaaatttgaggcccccagacggcaggggttgatcctgcagagactggtgagcaaaggggatcaccccaagccccagtggcactaggaacacttacaatctctgacctggactaaggctgccagcctggcccagttaagagtttcccagaaggatggcccatacactttaaattaaaggggccagacacgtgcacactacttccagccactctggaagctgaggtggggggatcgcttgagtctgggagttggaggccagcctaggcaggcaacatagtgagaccccatctccaaaaaaacaaaacaaaacaaaacaaaaaaacaccaaaaaagctcccagaaagacctctgaatctttctggatctctcagtggagacctggaaatctgaactttgacaatccctctcacagtggggccaaggaggaattaggcaagccaaaagaagtgaactttactcttctattgcctgtttgaattttgtatccaagcaagtgttacttaagtaatttaagagactggttcatcgaaaaaataaaactccccaaattcccatagctggtagactgtggtcacagccacagtgcactaagactatctgctcagcacttctggtgacccaaaagggtctgaggacaggagctcagagttgggtcagctgtccaggtactcagggttgtcacaggcaaaactgctggaactcagggcagcattgcaaatgccacgccgctctcagggccccttgcctgccgctggaattaaacccacccagatcttggaaactctgccctggacccttctcaataagtccatgagaaatcaaactctttcctttatgcgacactggattttccacaaagtaaaatcaagatgagtaaagatgtggtttctagatagtgcctgaaaaagcagagaccatggtgtcaggcgtcaccacttgggcctataaaagctgccacaagacgccaaggccacaagccacccagcctatgcatccgctcctcaatcctctcctgttggcactgggcctcatggcgcttttgttgaccacggtcattgctctcacttgccttggcggctttgcctccccaggccctgtgcctccctctacagccctcagggagctcattgaggagctggtcaacatcacccagaaccagaaggtgagtgtcggc

SEQ ID NO: 34330 - DNA, 2300 bp, Homo sapien
ggccaacatggtaaaaccctgtctctattaaaaatacaaaaattagctgggcgtggtggcaggcacctgtaatcccagctactcgggaggctgaggcaggagaattgcttgagctcaggaggcagaggttgcagtgagctgagactgcgccattgcactccagtctgggcaacagagcaagactctatctcaaaataaataaataaatcacagagtagattttaaatgttcttaccaaaaataaatatgtgaagtattgtataagtagcttgatgtagcaattccataacatgcacatttcaaaacattatatcatacagcacaaatatgtgcaatacttatttgtcaatttaataataataataataagggaagaaaagatccaaaacagaggcaaaaccttggccgggcatggtggttcacgcctataatcccagcactttgggaggctgaggtgggtggatcattttgaggccaggagttcgacaccagcctagccaacatggtgaaaccccatctctactaaaaaaaaaaaaaaaatacagaaattagccaggcgtggtggcatgtgcctgtaatcccagctactcgggaagctgaggctggagaatgccttgagcccaggagatcaaggctacagtaagctatgatcaccactgcactccagcctgggtgacagagtatgggggcagggggtggtgaggggggggcggggaagtggaacagaggcaaaaccttagcaacacacatttttagatgatcttccagaataaattcatagggaggcccaggcacagtggctcacgcctgtaatcccagcactttgggaggccgaggcaggcggatcacgaggtcaggagatggagaccatcctggctaacacggtgaaaccccgtctctactaaaaatacaaaaaattagccgggcgtggtggcaggtgcctgtagtcccagctactcggggaggctgaggcaggagaacggcatgaacccaggaggcggagcttgcagtgaactaagatcacgccactgcactccagcctgggtgacagagcaagattccatctcaaaaaaaaaaaaaaaaaaaagaaattcatagggaaaagaaggtcagagaccaagggaagggaaggttctgggagaaaagcagggggcaggcagggcccaagaatcctgctgcccatgagcccttactgggaggtggggtggccttgcacagggcccaggcacctgagtgagtggtggggtccttacgttcactgctggggtgaggcaatgagcaccttattgtgtccacatgaattcaataaaaaacaagcagggcgggtggtggggcactgactaggagggctgatttgtaagttggtaagactgtagctctttttcctaattagctgaggatgtgtttaggttccattcaaaaagtgggcattcctggccaggcatggtggctcacacctgtaatctcagagctttgggagactgaggtaggaggatcacttgagcccaggaatttgagatgagcctaggcaacatagtgagactcttatctctatcaaaaaataaaaataaaaatgagccaggcatggtgcggtggcacgcacctactgctaggggggctgaggtgggaggatcacttgagcctgggaggttgaggctgcagtgatccctgatcacaacattgcatttcagcctgggtgacagagtgagaccctgtctcagaaaaaaaaaaaaaaaagtcattcctgaaacctcagaatagacctaccttgccaagggcttccttatgggtaaggaccttatggacctgctgggacccaaactaggcctcacctgatacgacctgtccttctcaaaacacctaaacttgggagaacattgtcccccagtgctggggtaggagagtctgcctgttattctgcctctatgcagagaaggagccccagatcagcttttccatgacaggacagtttccaagatgccacctgtacttggaagaagccaggttaaaatacttttcaagtaaaactttcttgatattactctatctttccccaggaggactgcattacaacaaattcggacacctgtggcctctcccttctatgcaaagcaaaaagccagcagcagccccaagctgataagattaatctaaagagcaaattatggtgtaatttcctatgctgaaactttgtagttaattttttaaaaaggtttcattttcctattggtctgatttcacaggaacattttacctgtttgtgaggcattttttctcctggaagagaggtgctgattggc

SEQ ID NO: 34331 - DNA, 2300 bp, Homo sapien
ttggccaggatggtctcaatctcttgacctcgtgatccacctgcctcaacctcccaaagtgctgggattacaggggtgagccaccacacccggcccagcagttgtttttctaaaacacaaataggccaggtgcagtggctcacgcctgtaatcccggcactttgggagactgagatgggagcttcgcttgaacccaaaagttcgagaccagcctggccaacatcctgtctctacaaaaaaaaaaaaaattaaatttttacacagctgtgctctcagctaattgggaggttgaagcaggaggattgctttagcctgggaggttgaggcttcagtgagccttgatcatgccactgtactccagcctgggtgacagtgagaccctgtctcaaaataaaacacaatgtgaatggcccacttaaaatccttctgtggcttcccactgcttacagaaaactcttccacagtaggatcctgtcccatctctttccttttcaggctcatttgcctccaccccgtttgctctacttcaagcacaccaccaacgcacatggcatccaaactcactcgctcctggaatacctttccccagctgttgaactgctgaagacctcaaacagaacttcccctgagaagcctcttctgcccctttggtcaggcagacatgtgtcaggcaccatgtcagctgcacaggaaggatgccgtacctggcagctcaccattcagcctcttttaccacagccctcagcatgctatgcagtcattctccattcatgtggccacctctctctcctaagggagggtgtgagttttgaaaagacattcttctcagcatagagcaggtacacagtaaacacagaagagatgtgcacatgtaacggactacagcaggagatacacttaaaacagggcacatgctgggcacagtggctcacgcctgtaacctcagcactttgggagcccaaggcgggaggactgcttgaagccaggagttccaaaccaacctgggcaacttagcaagctcctatctctacaaaaaattaaaaaattagccaagtgtagtggcagacacctgtggtcccagctacttgggaggctgaggtggatcatttgagcctaagagtttgaggtcatagtaagctatgattgtgacactgcactccaacctgggtgacagagtgagaccctgtctctaaaaatgaaaaacaaaacaggctacctggtgagtagcataactcatggtggggtagaaatcaaggccaacataatatttctgtaatgactctgctgcttttaggttgggttaggcaatatcctcttgctaagattagtatcgactctgagaaatactttattcagttgtaaagtcccagttaaattcctttgcacaactggagaaataaagcctttgattaaaaactaaaatttccccagccctctaaaaagggatgggggaggggagcaggtggagaggaatatctgatctgtcatattctttagtcagagccataaacgtgtttgggtgagacaatctgatcttctgataacgttgataaaagtcacttgaagattgggtcacaggaagcccaagataaatgctgagaggaaacaggttctttttgaagtagcctcttcgtaatcattttcccacacatttgttcaacttccgaaaaaggactgaatacctgatttgctttgcaaatgaaacagcttaagacagagaaattgagataataattaataaatgtgtttggaaggctcctccagctcgctttaagttcaggctgtggcttcagaactgtgttaactccttctgtaaaggcacaggctaacggtggtcttcagtgatttttactctaccttgttttaaaaatggattcaaagtgatttattggaaaagattaagacagaaaataacattattaggaccaaagcagaaagggagtaggaggaaatgatgatccagagaaaaataagactataagcaggtcatcagatattatagtcctatcagcaaaagcacagtggaaaacgcattattttacttcactctttttatatatgcggggagaaaatagtctgatataataatctggtacttagctttaaaagaaatttctcgagaatcttcacaagatgataggatggacaatgtcttcagcagcatcccgacaacacaggcagtaacagacgcgtttgtaagggagtggctcagtggtatcgcttgatgaaactggacaccatagctccagaactcaattgcagaagaggggcaaagggggaaaaggcagcacgatttatta

SEQ ID NO: 34332 - DNA, 2300 bp, Homo sapien
atggtgcactactgtggaaaacaacttggcagttcctcaaaatgttaaacattagcattaccaaatgatccagcaattctacttctacatatgtaaccaagaggaatgaaaacataggctcatacaaaaacttgtagcagcattattcacgataggcaaaaagtagaaacaacccaaatatccatcaatgacaaataggtaaaaaaacatgttatagccatgcaatggaatattattcagccataaaaagtaacaaattgctgatatatgctataatagggatacagcttgaaaactttgtaagtgaaagaagttactcacaaaaggctgcatattgtgtaatttcatttatatgaaatgtccagaataggcaaatccacagagatagaaagtagattggtgggttgtctaggtctgggatgttgggagtggggtgggaggagggttgcagagagcaagggggagtggcttatgagtacagaatgtctttttggaatgataaaaatgttctaggttatggttgcacaactccatatatagtaagaactattgacttgtacaatttaaatcggtgattgtatggtatggtgtgtaaattatatctcagtaaagcttgtatgtgtgtatatataaaatattgaatggtgataggtactatggagaaatataaagtggggagggaaaaaaagaagagtttgggctgaaggttgaaattttaaataaggaaatcatgttagggttcactggggttatgtgaacaaagactttctggaggaggtgagtggtcaggtggttttttagggaaagagctgtctaggctgcctgggtttggacctgggctctgccattgtttatatgtatgaccttggaaaagttatttaatggtcctgtgcctcaattactttatctgtaaaataataataaatagtatctatttcaaaaggttattgtgtggattaaatgaattaaaaaacgaaagcatgtagaacagtacactggcactatgtaaaatgctttatctttatttctatcagttcctactgcaagctcacagcccttgcatgctaagatggaagcacgacgggaatgttggatgaagcaaggaggccaggtggggctggtgcagaagaagcaagagggaggattgtagggcttgtggctttagctttgtaagatgggaaatcaatggagggttttgagcagagaaaagagaagatctgattcatgttttagcaccagcactctggctcctgtccagcacactgaaaagggacaaggacacacaatcaaggaaaccagttctgagcgattgtagtaatgcacgtgagagacgatggtggtggtagaagtggccaaattctggttccactacaaagatagatacaacaggctgtatttaaagatagaatattgtgtatgaaagagactgcaattttgacctgagcagttgtcggaattaagctcccacatattgagatgaagaaagtctgagagggatgagagagagcccttttaaattttttgatgggggtggagtgggtagtggggcgattgatgggggatcaagatttcaattctggacatgattaacttgaaatgcccattacacattcaagtggactagaaagaggatggacggatcactggttctttgaccaacacgtataaaaatcccactctgtgccaggctctgtgtgggctctggagatagatgtgagaatactaacaatctccttaagagagctcactttctaatggtaagacaggtcatgaggaagttagcaatcaagcgaggtcaggtaggtaaggtcttcaattcttcggatgagacaaaatgtacaattgctattactgattttaatattccgggtattgcaagggccagaagacgggcctaagagcagctcctcctcccaaccccgggctgccaggttacctccgcctcagtgcgtgccacatttctagcgcagcagaatggcagcattgcgcacgcgcggcctcagtctggcgtcctaggagatggactcggaaagcctccgcgcaggcgtaattcaagggccgagagagcctgagactgggcttggggcggggcgagctcggaatgcggctgcgcactgggcgctctcgcccgagaagccgcagtctcgagagcgtcaacgaggtgtttcggtagtctctggccatcctttctgcgcacccggtgtcgctgggctgcaccccgggcggggacgtccgccgggcacgggagggggccaagatgccggtgaggagagtcgcttcgcttctggggtttcttctca

SEQ ID NO: 34333 - DNA, 2300 bp, Homo sapien
ggtttcaccatattggccaggctggtcttgaactcctgacctcaagtgatccgcccacctcagcctcccaaagtgctgagattacaggccagcttcttttgagattttttttttttaatcttgatttcctgcaggcttttttcaacttttattttagattctggtatattgtgcaatgctgatatttggggtatgaatgatcctgtcacccaggtactgagcacagtaccccatagttatccaacccttgtcccctccttccctccccgctctggtagcctccagtgtctactgttgccatctttacgtccatgtgtactcaatgctcgcttaaaagtgagagcatgtagtatataattttctgttcctgtgttcatttgcttggaataatagcttccaacttcatccatgtttgctacaaaggacatgatttcattctttttaatgactacatagtattccatattgtatatgtaccacattttctttatccagtcgatcactgaagggcacctaggttgactccatgtctttgctactgtgactagtactgtgatgaacatgcaaatgtatgtgtctttatggtagaacaatttattttccttttgcgtatatacccagtaaagggactgctgggttgaatagtactgttttaagttgtttgagaaatctctaaactgctttcaacagtgactgaactaatttacattaccaccagcagtgtataagcattcccttttccctgcagcctcaccagcgtctgttggtttttgactttttaatagtagccattctgattggtgtgagatgcattactctgatgattagtgatgtggagcattttttcatgtttgttgaccacttgtatatctccctttgagaagtctattcatgtctttttgcctgttttttgatggggttgttttttgcttgtttaattaaattccttacagattctggatattaagacctttgtcgaatgcttactttgctaatacttttctcccactctataggttgtctgctgactctgttgatagtttcttttgattttctacggtttaaataggaatgtctaggtgtagttcttggcatttatcttgcttaatgttctcagagcttcctagaattgtggtttggtgtttggcattaatttggaaatattcattctcagtcgttattgtttcaaatatttcttctgttcctctctttcttgtccttctggtattcccatatatttttaatatacatttaatgtaatgaattttttaaacaaaatataacttaggagccaggtgtggtggtgtgcacctgtaagtctcagctacttgagaagctgaggttgagggtagcttgagtccaggagtttgaggttgtagtgtgctgcgatcacacctgagaatagccactgcactccagcttgggcaacatagcaagatccacccctaaaatttatgtatgtatgtgtatacatatatatgatttgtatgattttccttattatacgtttatagctatatatgtatgtatagatacataaacatatatgtatatgaatgaatcaccttgtgagggaggtattatcactttttttttcggagaagaggtagccaaggctctgagaggtcacgacacatgcatgagatcacacagcgcgtctggaattccatttcaagcctgtctgaggagggcgctctcgctgcttctttacctggtcttgtgtccccaagtgtgtaatgtgaggtaagacccagggtctgtgtccgggagtcctggcccaaggcgggcgcagtctccagccgccccacccctggctgggggctctgctcagggagcacggccggcaggggggaggaggcgtgcgctaggcagcagcggggatggagggaagggagggggtccgccacccgcctgtgcgcgcccagtcctgccgcatcctgggtgcgcgccgcccacccgcggggcgagtgcccaggaggcgaggcgcggcccggtgcgccagaggtagctccaccgcgagcgttgtgggtggggcccgccgagcccgcctccccacctcccccggcggcgccccaggctgcagtgttccgggagctgggttataaaatgccgggttaagcggcaactcagactcaggatcccgctcacgacatggcctcgggcgctcagctcccgccgcagccgtcgagctcagaggtcagcgccgtccagagcccaggcgggcgtcccggcgccggtctggaggaaacagccctgggcgttcctctcccgccgtctccgggggaggcccctctgccccg

SEQ ID NO: 34334 - DNA, 2300 bp, Homo sapien
cctgggaggactaggcaggggcagcatcccccgtctcctagagctggctgcaggaacagacacactttccaatctggtcctctgggaccatctggggcctcctcctgagtaggaaaacaggtgggcccttatgggtagcaaccacagcccctggggccacctatgccaggagacatggagccctcagcccaggcatccctggccatcccaggtggagcaaagctacagagtggaagggcctttccccctgggggcatcgggctccctctggggaaacttggcctggagttggtgctcgggtgtactcagggtgtgtctgagatttgttgagaattcagacatcgggtggggctgcttcactgttttaactcagatttagcgcccaccccgcagcttgacctttcttccccagtgggctcatgtcttgctttatttctctcttggcagaatgcagagccagagccccggagcctctccctgggcggccatgtgggtttcgacagcctccccgaccagctggtcagcaagtcggtcactcagggcttcagcttcaacatcctctgtgtgggtgagtgtcagggcctggcctcagacagagggtgggtgagaacctcctgggagagggggtgcttctggccccctgttgagctgcaagggggcttcccaggcagagtgaaactttgggggtgtcaggacgaggatttggttggtgtctctgccagagtcaaggatagagttagagccagggcctgacacagcattgtcatgaagagtaaactggatcgggcacatgaaagtgctttgtaaactgtgggtgtttatcacagagatttaggttcatttattcatttgtttgttcatttaaaaaacatgtactcatttactgcttcccaccctgtgtcaaggacgttatggtaaacagctctgcccctcatcaccatatcctatggtaagtgctccagcacgcatgtgaacaaataacagccccaagcagagaggctctcggaggttccctgggactcccagaaggacacaaagtgctcttctggtccctctgcaggtgtccttcgggaagcagcccatcctgagttcccccagctaaagccatgtggagctagggctgtccggggcgcatgggttgagccactggtggctttagaccctggccctcttggtcccatgaccaccctggtcccaggaggggtgttgtgtagagcaggttatgtgtgaggtgattgggtctgcagtggtgtctacacagctgcctggctctgtctcttccctgctccctgaggaaatacatcacatatcacacacagctatgtcttctgtccaagttcaccttttggctcttccttccacaggttatttctgaggccacaggaaaagatagttcctggggaatgggggtgatgagggatggggtgggcggcctgcccctttctcttatccaggggccatggatgcctgagccctgcctggcctagccaccagtcaaggacagcccatttccagcctatgacacccacttcttcccctcctgtcctcactgcccaggggagaccggcattggcaaatccacactgatgaacacactcttcaacacgaccttcgagactgaggaagccagtcaccatgaggcatgcgtgcgcctgcggccccagacctatgacctccaggagagcaacgtgcagctcaagctgaccattgtggatgccgtgggctttggggatcagatcaataaggatgagaggcaagaggcgggaagggcggccccacccagcctcctcccaccccacctacattggcccctataacagtagcccagccctcacactgcagggggccagggagggcctcttggggaatatctgaggctctgtggtcaccaacagaccagttactcctttaggtgtctggagaaggggtcagctgcctgtatccagtcagggatctcaggcagaagctgttcccagaaagaaaaggccagggggcagcctggcttggccccgagccctgagccccccaagccccaagcccctgatctcagctggcagcctcctgggtgatggagctgtctgtagttacaggcccatagttgactacatcgatgcgcagtttgaaaattatctgcaggaggagctgaagatccgccgctcgctcttcgactaccatgacacaaggatccacgtttgcctctacttcatcacgcccacagggcactccctgaagtctctagatctagtgaccatgaagaaactagacagcaaggtatccctgtccccacctgctgtcacagg

SEQ ID NO: 34335 - DNA, 2300 bp, Homo sapien
gtgtgggtagagctgtatattcccctttcttttgcacagaaaatgcatattagctgatcaaaagctgaggacttctacagaaccctgtctgtgtatggaactcagcattccccagttatttgacggtgagaccaatctttttgtggtaaaatctatgaactaacctctaggtgtatacgaaacactcagaaatgctgccataagaaataacactttgccatgtgagaaatgatcgttatattcaccttttgagccctcatagataattctcactcttttataagttctgaccagcagcagcataaaatgagagaaatttcggcattgtggaataggaggaaattctcctgtttactcctacagagcagagtgaatatatcccaaaagaaggaagtcacctgtactctgagcttttccttctcatagccactggccaggactgtaagaagtacatgttttgaaatatttccgattagagataaaagaccattttgaagataatttagggctagtcccagagagttgtaatgcagaactgccatacggatggcagttggtcgtgatttcttgttagttatagggaaagaaaaaggaaacagtagatacagtctaggatgatcaattcagtattgaccacacattctctgggctctgagattaaggcccttgtagtctagagagggagattttatttaatattatattttaagtacaacttaaagccctttacttatgttatttaatcctgtaacataggtgctatacttgttctcatttttaggaccagggaagggaggcatagttaagtaacttgcctagctaaggttaaaaagctagcaggattccaccaggaaggtttgccatagatccagctaccctaaccactgctctgctctatttcttgtagataactttaatacagcatgggaaacagcaacatagagagaggagcaaagtgaaaacattgtcaggaaggtccagcgggaagtcagtccaccttggggacaagctacagtttgcctgggagagtgaggaggggaaagccaaatcagggtgacaaggtcaaacagcagagagggggctcctcttaagccaggtgtgctaagtcgaacgtggtctttaggcacctccagtcagcacaagtttctgagtaggagaaacaggtcaggttgcttctcagcatactggggtgaggggtgtgtgtggagggtggaccaacctgggatgaggccagtggggggtagggggcaaaccttgccacattcccagaaagagcagagagaaaggcagagggaagagaaagaaacggggtttcagaggatttgggagctgcttttgtatagattgtcagtgagaaggatacagaacctcctgaggcctccgaccctggcgtaagtgttaattttctgaacgttttgagcagtgacattagcggagagaacgtgcacgcactgggagtggtcatcctctttgcacaatggtggaaccattaagacgttgtcccaagcccttgggacaggcagggtgatggacacttgcaatctgacgccttgaccgtcgagctccgcttttctattgcaggaatcccagcctaaactgcgcatcctgctcgttggttgcacaaggagccgaaggctggtcccttgcccgggaaggccgcctggccggacgcgcgggtcccgccggggttcccgccttagctccggccggagcatcaggtggggcccaagacacccgcagactaggctgccgcggcctctcccggatccgacgggtctcccgcagcttgtccacactctggttggtggtcccagcacatttgcaggctccagcgggtggagacggcttggtgggggagatctctagggcgcacgccgtgccccacttcccccttacgggaaaggctttccagcgcgcggacccaggagactctcacctaggctcggccccaggctccaggggacacgcagaggcccgccgggcaccagccccgagccccccgacactgccgtcccggtcccccaacgcgcggactacaagtcccagcagtccccgcagctggcacctcccgcctcgccgcggagacccccggccgtccaagcggcggggctccggctgcgctcgtggccgggccgggcggggaggccggtcccgcgggcgggggcaggggcggctccgcggcttctcccgccgccgccgccaaggggagtttccaggaagtggccatattggatccattcagccgcagccgcccgggcggagcgcgtcccgcagccggctggtccctgtcgctgcccctg

SEQ ID NO: 34336 - DNA, 2300 bp, Homo sapien
acacacatacagaaatgtcgtctgtgataccatttgcattgtacatcagaggggaaagatgaaacaactggtttggcatacacatacacaaattgcctagatgtgaaggagttaaaaaaaagtttttaaagaaaatttattcttttctcacaaacacaatatctttgtgaagttagggaagggtctttatttttagaagccaaagtaaaaataataaataaaataacaagtacacttgacaacatcaaaaatttaaacttctacatgacaaaagaaagtataaacaaaagtaaaagacaagcaagaggcctggagggcagcatttcctgaagcgaagtcttgtcatgttcaagttcagtgtggtgctgggtatgtatgcagggtagagacaaggggcaacaaagtgtgggtagagctgtatattcccctttcttttgcacagaaaatgcatattagctgatcaaaagctgaggacttctacagaaccctgtctgtgtatggaactcagcattccccagttatttgacggtgagaccaatctttttgtggtaaaatctatgaactaacctctaggtgtatacgaaacactcagaaatgctgccataagaaataacactttgccatgtgagaaatgatcgttatattcaccttttgagccctcatagataattctcactcttttataagttctgaccagcagcagcataaaatgagagaaatttcggcattgtggaataggaggaaattctcctgtttactcctacagagcagagtgaatatatcccaaaagaaggaagtcacctgtactctgagcttttccttctcatagccactggccaggactgtaagaagtacatgttttgaaatatttccgattagagataaaagaccattttgaagataatttagggctagtcccagagagttgtaatgcagaactgccatacggatggcagttggtcgtgatttcttgttagttatagggaaagaaaaaggaaacagtagatacagtctaggatgatcaattcagtattgaccacacattctctgggctctgagattaaggcccttgtagtctagagagggagattttatttaatattatattttaagtacaacttaaagccctttacttatgttatttaatcctgtaacataggtgctatacttgttctcatttttaggaccagggaagggaggcatagttaagtaacttgcctagctaaggttaaaaagctagcaggattccaccaggaaggtttgccatagatccagctaccctaaccactgctctgctctatttcttgtagataactttaatacagcatgggaaacagcaacatagagagaggagcaaagtgaaaacattgtcaggaaggtccagcgggaagtcagtccaccttggggacaagctacagtttgcctgggagagtgaggaggggaaagccaaatcagggtgacaaggtcaaacagcagagagggggctcctcttaagccaggtgtgctaagtcgaacgtggtctttaggcacctccagtcagcacaagtttctgagtaggagaaacaggtcaggttgcttctcagcatactggggtgaggggtgtgtgtggagggtggaccaacctgggatgaggccagtggggggtagggggcaaaccttgccacattcccagaaagagcagagagaaaggcagagggaagagaaagaaacggggtttcagaggatttgggagctgcttttgtatagattgtcagtgagaaggatacagaacctcctgaggcctccgaccctggcgtaagtgttaattttctgaacgttttgagcagtgacattagcggagagaacgtgcacgcactgggagtggtcatcctctttgcacaatggtggaaccattaagacgttgtcccaagcccttgggacaggcagggtgatggacacttgcaatctgacgccttgaccgtcgagctccgcttttctattgcaggaatcccagcctaaactgcgcatcctgctcgttggttgcacaaggagccgaaggctggtcccttgcccgggaaggccgcctggccggacgcgcgggtcccgccggggttcccgccttagctccggccggagcatcaggtggggcccaagacacccgcagactaggctgccgcggcctctcccggatccgacgggtctcccgcagcttgtccacactctggttggtggtcccagcacatttgcaggctccagcgggtggagacggcttggtgggggagatctctagggcgcacgccgtgccccacttcccccttacg

SEQ ID NO: 34337 - DNA, 2300 bp, Homo sapien
gaagaacaagaaaacaaagtataatactacatttatttgatgctatcattaaaagttgtatgtttttgaagactagactagctattgtcattgggaggaatgctcacaatataaagtgagggggaaatgtttaaattgtttgcatcttggggacagggctgaactcagaaattgcccctggggattggattggggaaaggggaccctttacattttagtcttctgttttccttttgagtaatactaatagtagtgactatactactaataataattcaaatgattactgtaagccaagcattatgctaagtcttttgtgtttattttctcacttaattctctcaaccatctgagcaggtaagtactattttcctcattcctttacagacaagaaagctgaggcacagagaagtcaaggcatttgcccaaggtagagccagaactcaagtgtagaatgttgactccagagtcttgttttctcagctactacaatatgctgcttctggttagatatatttgtagtactgcaattatttatttatttatgagacagggcttgctcttgtcatccaggctggagtgcagtggcgccatctcagctcactgcaacctccacctcccgggttcaagcgattcacctgcctcagcctccggagtagctgggattacaggtgcgtgccatcacacccagctaatttttgtatttttaagtagagatggatttcaccatgatggccaggctggtctcgaactcctgacctcagatcatccgcccaagtcagcctcccaaagtgctgggattagaggcgtgagccatcgcgcccggcctgcattttaaattaaggaactgattctacctctgccaggcagttccctcaactagaaacctcttccccgtctacataactccctgatctccttcaagtccttgtttaaatgtcactttcacaacgagtactatcctgactgcccagatcaaaattgcaacctgaccctcatccgttataccccgctgtgcttttttcatagcatgtatttagtatatcatatagttttcggattcaccatatgcttctgttctcctccaacacatgagccccactaggtcacgggtttttaaatctgtcttgctaactgacgcatcttagccaaaaaaaaaaaaaaaaaagtcctggcacaaactacgtgctcaatacctatctgtggaacaaacgaaggtttaaaaccatggcatgactccgcattgctttcttactttaaagcataaacatacatacacacatgggagacagggagaggatatttcaaaatgttaatggtgatttcaagtgattttttttccttctttatgttttcctctatgttttcctgttatgtttatgtttcctgtggttttataccccaaattctacgtgaaaatgtattctcttaccatgagaaaattgcttttgaaaacgtctctctaaacctagagtaacgtgcattgccgcgcagagtgaattggttttgctgtaaatctcatgaagccgttttcctgcatgaaacacagtaaaaaaaaaaaaaaactggagtggtattgacgacctttaaaaaaaaaagattgttctgaaatcatcgcttggtgttttgcagtggttaaatgtttattaaaggaataaaaatccattcctccttggcggaccgcggcgtccctagggaacacacccacctagcaaccgagaccagagctggagcgctgcgcctttaattctggggcgggcggggggcggcgggaatttctgctccggttccctctgcatcgcgggggcagctgtcacctgtaaggcgagcgcggcgcgggggatggaagcaggcgcccattggacagaatacaaaggcagaaacctaccccgaaggccggggcccggcggggcgctgggggtgggcgctccccgcggcccccggcgcccttcgccccgagacgccccggcccagcggcactggcgcgaccgaggtccagcttcggggacacgcccggctggccgcggggaaggcaccaggtgagcgcggccgcgcctcccggaaccccgctcccgcgcgtcccgcggcgacgcggcgcccacccgccccgggagccaggaacccagggccccaccatggcgctggccgccgccgccgccgctgcggctgccggggtgagccaggcggcggtgctgggcttcctgcaggagcacggcgggaaggtgcgcaactccgagctgctgagccgcttcaagccgctgctcgatgccggcgacccgcggggccgcgccgcccgcagg

SEQ ID NO: 34338 - DNA, 2300 bp, Homo sapien
tttgcaaaagaggtccccaaccctaagtgtgagggctaagctcctgggcttagtaggcatatacaaatgcccccaggtgggtgacatcaagatgttctggtcctaggtctgctgagagcctctcctgggaatgttgtaggtactgcctttcccttttaggaaacaccatatcctcctaccactaacccccatccttgccctaaccagcaatctgtaacatcctgggcctcagggacgtgggtggagggtgactctgagctccagatagtgtctaggaggctcaaataagcctgctttttggtcctcaccctagccgtgggccaccctactctgcactccctaccaagcagctcagagaatggaggccagcgcccaaaagtctccatagttcatagggagccccaaacctcaacactgccctttcccaagcctcaaaatttctcttaccctgacccaggcacacccactcaactcttacccttgatccccctcccaggaccagaagggattgatttctggtgagtcctgccccaagctgtgcttgcctgctctgttcgtacctaatattgcatgaggaacctggccagtgtctatggtggcaagtgcttcacccattctgtcctcttccccagaaaagactaatagggagggaagaagcgtgcgcagaagctaaggaactctcttccttctctaccaaggccacccctacatctactccctgcaaatctgttatttcccttgacattcagcaaatatttggggttttgttttgttttgttttgttttgttttgttttgagacagagcctcactttgtcgccaggctggagtgcagtggcgcgatctcggctcactacaacttccgcctcccgggttcaagcgattcttctgcctcagcctcccgagtagctgggactacaggcgtgtgccaccacgcccagctaatttttggtatttttagtagagatggggtttcacgatgttggccaggatgctcttgatctctttacctagtgatccgcccacctcggcctcccaaagtgctgggattacaggcgtgagccactgcacccggcccaaatatttaacattgactgtatgccagggactctgctgggcactgagagtgcagcaatgaggaagagcagggcccattctcaggaagctcaggggtgggaatgggaggagggaatcagaagcaagccaacagggacagtgtggggtgggggtcagctcagcacactgtaggagtcccaaaaagtgaggagacctctaagctgagtcctacaggagaagcaagaatagaagcagggcaaagatgggggtcggcccatcattcctagacgaaaggcagagtttgagaagtgggggccagattattttggaatctgccaatagtgtatggggaggtaggggtgactttcccatagtggagtgtgggcttccttggaggattcaggctgttggggaacaggagggatggtaaactgcctttcagcagggcttgcttctaggaaattgattctggctgcagtgagcgtggaggcaggcctggattccaggcaggcttctgccacgtcccagctgtgtggccctggacaaatcatttccctctcagaacctcattgtccttgtctgtaaaatgcagacagcagttgcaacgatcaaaataaatatttatataaagcacctggaacataacaggcacagagggagggaggaaggctgtgaagctgcctctgccccttgccctgggtcttcccccacccctcctttcttagctcccctgaggtcacaagagtgttcttgaccattgtttatcagggaaagatcacatggagaagccaacagaacggccaggaagcagcctgggtggaacagggttggggaggaaaggaacatgggtacattctcagcgttccaggaggtctcagggtaaaggctgcttgtgtgggcaaggggagcctggcagggaatgagctggtcccaattccttcccctgagctgggccctcaaccttcagaggtgctccctgggactggtcctacttcctctgccacctctgatcccaaggtgactctgccaaaatctgggggatgccagcgcttgtgacggtgtgaccagggaggggaagtgtaagtgtctggccgtccgtggtggcggggccagcaggctgtcccagccctcacccggagctcctcacccggcaccacatctgtgttttcccaggacccacgcagccacccagcctcagcactcatctgcgcagccatggaggccctgggacctgggggcgaccgc

SEQ ID NO: 34339 - DNA, 2300 bp, Homo sapien
ggggttacttttctctttctcagaacagaagaggttaagagagacgtgggtaggtgggatttcagttttctggggacttaggcagagagttgcttagtgtgtgcaagaggtgagcggtaggtgggtggagtgggttaataagaatcgctctggactgcatcctcatggtccctagcagagagttgcttagtgtgtgcaagaggtgagtggtaggtgggtggagtgggttaataagaatcgctctggactgcgtcctcatggtccctagcagagaggtgctgtagtgtgtgcaagaggtgagtggtaggtgggtggagtgggttaatagaattgttctggacactgtgtccccatagttttcaagaaatataagtaaaaaacataaccattttttttttttttgagacagaatctcactctgttgcccaggctggaatgaagtagcgtgatctcggcagactgcagcctatgcctcctcggttcaagcgattcttgtgcctaggccttccaagtagctgggactacaggtgcgtgccaccacgtccagctatttttttttgtatttttgtagagacagggcttcgccatgttgccgaggctggtctcgaactcctgagctcaagcaatctgcccaccttggcctcccaaagtgctgggattacaggcatgagccaccgccccagccaacatgagcaattaaaaattttttgttgttgtttgctgggctgtctttcttctattttgatgctgctgtgagactctgtggatcagggtcttaaaaatattaaaagtctttcaggccgggtgcggtagctcatgcctgtaatccagcactttgggaggccaaggtgggtggatcacctgaggtcacgagtttgagaccagcctggccaacatggcgaaccccgtctttactaaaaatacaaaaattagctgggcgtggtgcccggtgcctgtaatcccagctacttgggaggctgaggcagggaaaattgcttgaacctgggaggcgcaggtttcagtgagcagagatccggccactgcactccagcctgggcgacagagggagactctgtctcaaaaaagcaaaacaaacaacaaaagtctttcaaagccgaaaggttcttaggcactgtcttaaagcctagcgctccagctgaagctggtgcctgagtccagatggtgttgaagaaggagcagggcccagcgggcaccactctcagaagtcgggctcaggtgtctcctgcctccgaacccaagaagacccaagaagacagagttcctcaggctcccagtgtccctaggaagtggcaaccttgactcttggccagagttcagagtcctggttattaacaccaataaacctttatttgccagggatactaccatgggaggacacagcccctgagcccagccctgttgatcctgtgggagcgggagggcagcggaggacaaaggcagagacctgagagccggagaggctcatcaaagggtccccagcccctctcaggaacggagcatttcttggcagagtggtattcataggacagagtttgggaagtcggggcaggggagcctgaggacacagcaaggagagctcagtggcaggtgcaggcagagcgttctttggaaaatggagatcctggaaggtgagggcctcgagcgccagtgtccagccttagtgggtatgcatatgtccagctccctaaggacacactcaggacagctaaggtgcacacaagtccaggggcttccccgtgctccgcccccctctcccccaccccggtagcaggctggagggcccagaccatgctgggtagtgggagaaatggaaagaaatgggacagggaacaggagacaagagcccatggtgggagtcaaagagctggaagagttttggaaatgggggtctgggggtagagttgatcaagggccgagttactcagcgggacaggtgggaggcacgaggccctggcagctctgttttcttggccgggcttgggggggaaagcgggtagccgtcaggcgcctaagggcccgccctggacctccccaccgagggaggtgtcaggccccgagggacccggcccccgagcatcacggacgcgctggaggccggtgggcggtcgccgtagtcgccctcccaccacctcgctcaggtttctccggcctggggcaagaggcctgtggcccgcgcgggaacgcactgtccaccctcagacctgggactgggccggcgcgcggacgctaccaagaggctgcggctcccgcccccgcggccggacgtggcgcctcccctg

SEQ ID NO: 34340 - DNA, 2300 bp, Homo sapien
cggcaaggttggaagccgctcttggaggtcgtgaggtaacttccgggagataccattttcctactgtctctaagggatgacgcctttgtcccagaaagaagtgggctgactgggtgacccgtaggtgggaggtgccttggaggccctgcccgggccggtggggtggagcctagcggaggacgtcggggattgaactgactttgggggacagtggacaggcggaggcgctcacacttctcctcagccctcggcttttctgtggaatcccagtcaggaagcggccgaatgcgggaggcgggggagggaacaaaaaggtgacgaggaaggggcctgccgacctccggggcagcgctggccaggagcttggggcctgcgagtcttcccagctgtagacagagcgcctctgagccccgaggccgggccgccccacagcagaggagcacgaggtttcatttggccttggccagtagctcaaagggggcttcgttattttcaggccatgagcgaccccagcaccaaaatcagggacacacatcgaaggcttctcttggactctgttttagagtcccctggcaggctgttaacgttcccaagagataatacaaacgtttcgtcagtttcagccacaaaaataatcaaataatcgtcaattgatgaatgctgaggccgcctcgacagcagccagcgtcctccccagatggtttgcgtggggtggggggaatcacgatgccccagttctttcttctccccacgtgagaagcaaggaaagtcgggtgagaggccttattatgttttccctgaagtgcattctgcttgacgatgctgttgtcaatgtacagctcgccctgaggtgtcttgtcagtgttttgttaatggaattgctggccatattttatctaggactaagctctcattcaacagttggctgtgttttataacactacttacggaccacggaggctcggcaggcagtcaacttgtattttgcagacataccttagttttctcatgtaggtactgcacaaactggcttcgtatcttgcactatgagtgtaggctgactcttccagcatagtctccttcggggtggcgctgaatatcccctcatttcagcttttcatggtgctcctttgcctcatttttttaaaccataatgtctagcctggtctcagctccaaggcaagaacagaaatacaggtaaggacagaaatattgtggcaaattctaccaccatttggatgaataataataaaacgttcatttattttatagcatctgcaaacatcccaaaacctttcaaccaaaatatgtatagatgagtgtgcagaccaaagtaaggacatcagtatgttacatttaaaaataagtcaaggttaaaggcggtgtcctcttttaagaacatcgcaaatacaattccagtactccaagtacgtattctgtacccagccacctgggaggactgagagacctaatggttttctgctttctggaacttctatgccaattgtgactttctcacccaaatttgtaaattcgcaaattaacatgcagcgaataattacaattgtaaacacctggaagtggaaaaggccgtgaggataaattgagaggaagagtaaacctaataccataagttgcataccagcagatctgagtatcgtcatgaataattggttagcttttccacatgccttagaagtttcagcaagcacctagcgaacatcttaatccaaatttctcaaaaaatgagagattttatttaagatcattcctcaatttatcttagactttcagctacatagttagtccggtagtgtaacagtaacgggttttacgtaaatgccaggggaaaagagaggaaagctaaataaccaagtaaatctgtatctaattaacaaattggctaaataaggtgttatcagctgcttgatatagagctgataaaatcttcagctaggcatacttgaggcctgattacagaagtgaccgtagtccacccacacacctgaaatttatttaagagaccaagctaggctcttcctggcctttaggaagaggactggcatggagaaatatgttcctcactagttctcccaagccatggcacgtcccaacaaattcctcctttggttttgctgctttgcctggctgtgttttcctattagccttggttctcaggcttctgggggagaagctcagattgctgctagtgctgagttggaatctggggctatgccttggtccttgctgcagcatatagatgagagagacagagctggcctccttcccgcgcttttcaa

SEQ ID NO: 34341 - DNA, 2300 bp, Homo sapien
tgaggaacatatttctccatgccagtcctcttcctaaaggccaggaagagcctagcttggtctcttaaataaatttcaggtgtgtgggtggactacggtcacttctgtaatcaggcctcaagtatgcctagctgaagattttatcagctctatatcaagcagctgataacaccttatttagccaatttgttaattagatacagatttacttggttatttagctttcctctcttttcccctggcatttacgtaaaacccgttactgttacactaccggactaactatgtagctgaaagtctaagataaattgaggaatgatcttaaataaaatctctcattttttgagaaatttggattaagatgttcgctaggtgcttgctgaaacttctaaggcatgtggaaaagctaaccaattattcatgacgatactcagatctgctggtatgcaacttatggtattaggtttactcttcctctcaatttatcctcacggccttttccacttccaggtgtttacaattgtaattattcgctgcatgttaatttgcgaatttacaaatttgggtgagaaagtcacaattggcatagaagttccagaaagcagaaaaccattaggtctctcagtcctcccaggtggctgggtacagaatacgtacttggagtactggaattgtatttgcgatgttcttaaaagaggacaccgcctttaaccttgacttatttttaaatgtaacatactgatgtccttactttggtctgcacactcatctatacatattttggttgaaaggttttgggatgtttgcagatgctataaaataaatgaacgttttattattattcatccaaatggtggtagaatttgccacaatatttctgtccttacctgtatttctgttcttgccttggagctgagaccaggctagacattatggtttaaaaaaatgaggcaaaggagcaccatgaaaagctgaaatgaggggatattcagcgccaccccgaaggagactatgctggaagagtcagcctacactcatagtgcaagatacgaagccagtttgtgcagtacctacatgagaaaactaaggtatgtctgcaaaatacaagttgactgcctgccgagcctccgtggtccgtaagtagtgttataaaacacagccaactgttgaatgagagcttagtcctagataaaatatggccagcaattccattaacaaaacactgacaagacacctcagggcgagctgtacattgacaacagcatcgtcaagcagaatgcacttcagggaaaacataataaggcctctcacccgactttccttgcttctcacgtggggagaagaaagaactggggcatcgtgattccccccaccccacgcaaaccatctggggaggacgctggctgctgtcgaggcggcctcagcattcatcaattgacgattatttgattatttttgtggctgaaactgacgaaacgtttgtattatctcttgggaacgttaacagcctgccaggggactctaaaacagagtccaagagaagccttcgatgtgtgtccctgattttggtgctggggtcgctcatggcctgaaaataacgaagccccctttgagctactggccaaggccaaatgaaacctcgtgctcctctgctgtggggcggcccggcctcggggctcagaggcgctctgtctacagctgggaagactcgcaggccccaagctcctggccagcgctgccccggaggtcggcaggccccttcctcgtcacctttttgttccctcccccgcctcccgcattcggccgcttcctgactgggattccacagaaaagccgagggctgaggagaagtgtgagcgcctccgcctgtccactgtcccccaaagtcagttcaatccccgacgtcctccgctaggctccaccccaccggcccgggcagggcctccaaggcacctcccacctacgggtcacccagtcagcccacttctttctgggacaaaggcgtcatcccttagagacagtaggaaaatggtatctcccggaagttacctcacgacctccaagagcggcttccaaccttgccggaaatgacgaacgagtcaaccggatcggtgactgtggagggcgagctgagccctgtgcgtgagtggggtctggttgtgcagtgttcgtggaccctgggaggctaggggcgccccgctgggctgggaaaggataaggagtgcaggggcaggagtctggggttggggatggacccccgcggggactgcggcgcttcgcgaaagcgagccaagcgcctg

SEQ ID NO: 34342 - DNA, 2300 bp, Homo sapien
gctttgagaggccgttaatgtctttctccctctggtgtttgccccaacccgccgaagtagacggccaccctctcccatcttgctcaccttgttctacacttagactatttctccctggttctttgactcctttggagagaccagctcaaaagatccaaatcccttttctcagcccaaaccaggcaccaagcctattctttttattccaggagtgctctactgagatgactctgccgtaagccctgtgatgtgtggagcttctgctttggatgaaattagtctgctttaagcctgtgtctcatcaaagggcttccctctctaagcttggggaaatggatctcacctgtgtggcaggagtgctgaggtggtgggtgtgtggaatgtggtgagttttagtagttcagtgctcctatacatgacctgggatcattttaggggacatttgcagaaatcctcagaggagaacctgagtaaaacctttgaaggaaagacagctgctgtgggcttcagtgctggtaacccatctggagcctccagtcctgggtatggatcccttacctgctactctggcacaaccatttgctccatttgacctttctttttccaaatgctcctgcccccacaagcgtttttatctatgggctgcagagtctgatgaaaggaatgcccttgctcttttagtttgcaggcagtcctcaaaatgcaggcctaaggtaggcccaaaagtctatgccagttccagctagcaaaaaagcaaatacaccttgaccttttgttgaaattttacctggtaaagtttttccatttcagagtctttcatcttttattaggcacctcctgcttagggacagcaaaaagtttccaattactgccaactcctagtgatcgacctggaatgtgtttcaaacagctgctcatgtagctataccctctttctcccatttcatcctaagcatttgcctcagaagcataaaatctcttgagagttgtatccagagttaccaagctctcagctatcaaatctgcttcagtctcattttcttcttgtaaattagtcatttgaacccccaaactgacagaataggagactaaagcccaaaaaggggaagggctggcctatgggcagttgcactctgtagaccccaggctactgcttaccagccaagcattctaccttcttacggctgcaactgttaaaggctacttaggcctttctattggatgaaggagcatgcagttacgtgtatattcactgagcaaaatacttgattgtagaatccatgaaatttttttttttttaatttcaagaagaggccttcacagtctctcaagtatgggatggctgtggacaaatactgccaattcagctaactgctgcctggatgttgctttgagtttgatttttgctccatacttaactaaaacaactagcattcacgtagacatgttaaaatactttccccttccccaacagtggttccttccacagacagtgactaatggttttttcttttggggagagggtggcatacaacatagaggcttgaaccaaaggcctctgcaatgttgtcacactcatgaggatgaatggtcctttccgcctacacacagaggggcaagggcttcaagctctttctttccttgactgtgttatcagctttacaaattaacaccatgctagtttgatcctgctagaagtacaggaaggcagaaatggaggattaggagaattactcatcttttggatgaacagtttccaaatcccatttggcacatcactctagactggtaaaggggaggctgacactgaggccacagacccaactggctctaggacatcacgttgttcagtcctttgcttatctaatcatttgtgttcttacccagtgctcactaggtcacccacatagccacttcccctcccagcaaaagttcccagtttaggcacctgtctgggatcatccagtatccaagcttaggggtgaagggagggagcagagaactagtctcaactggttcgttggtatataggtctcttctcaatgttcctaaagtgcatgcagtggcatccccctcaaggcctggctccatgattctgagaggactagaatcaggacagtcagatctgtggtcacatcctgcccaattccagctctgaggtccatcaaaccatctgcttctcccttggcaagaagctccctctgtctgactggcagcagggtcagtggccatccttttctaccttcagctgttgtgcatctcctccacgttttcctggagtaaaggaacaagcaggttct

SEQ ID NO: 34343 - DNA, 2300 bp, Homo sapien
ggacaaatactgccaattcagctaactgctgcctggatgttgctttgagtttgatttttgctccatacttaactaaaacaactagcattcacgtagacatgttaaaatactttccccttccccaacagtggttccttccacagacagtgactaatggttttttcttttggggagagggtggcatacaacatagaggcttgaaccaaaggcctctgcaatgttgtcacactcatgaggatgaatggtcctttccgcctacacacagaggggcaagggcttcaagctctttctttccttgactgtgttatcagctttacaaattaacaccatgctagtttgatcctgctagaagtacaggaaggcagaaatggaggattaggagaattactcatcttttggatgaacagtttccaaatcccatttggcacatcactctagactggtaaaggggaggctgacactgaggccacagacccaactggctctaggacatcacgttgttcagtcctttgcttatctaatcatttgtgttcttacccagtgctcactaggtcacccacatagccacttcccctcccagcaaaagttcccagtttaggcacctgtctgggatcatccagtatccaagcttaggggtgaagggagggagcagagaactagtctcaactggttcgttggtatataggtctcttctcaatgttcctaaagtgcatgcagtggcatccccctcaaggcctggctccatgattctgagaggactagaatcaggacagtcagatctgtggtcacatcctgcccaattccagctctgaggtccatcaaaccatctgcttctcccttggcaagaagctccctctgtctgactggcagcagggtcagtggccatccttttctaccttcagctgttgtgcatctcctccacgttttcctggagtaaaggaacaagcaggttcttatccaaatacccaacctgtgaagatgagacggcccttgggaagaggtattagccaagttttcagtatgatgcccggcagaaagaatttgttgtctttgtcttaagcttattatcctcccaggtcataggaagatctaaagtccaatcagtctccttactcagaattcacagctttcccctcaaacttaaaatgcccatgtcatttcacgagtacccataactacccatcgtttagatacatgtcctcccttggtctagaaatctgcagcagttcctacttaaactgatggatgctttgggctttggaggtatctcatccctatgcctgttgccctgaagctgccggaaggaaaggccccactcaactactgggaagaaagcccataattcaaggcttttaatacagtcactacacaagctctccctctgatttaggagatcttgttacctcctcatctacatgtgcttaaaaacaaaaagaaacctataattattcaattcacctgtggtccaaataagtctcacatccagccattcccctgagagggcaggaggccagactttgaactttccacagctgggtcttcattttactagtgagataaagaggtgcagattagggtgacagtccatctaagcaagtggacgatctggggaactgtaggccttgctgaagcatcctcccacagaaaggagataagggccttatccaattggctgtacacaatagatcagtgcttctttcctagacaaggctgaaaggggccaacattatttctgaagacttcattattggaattctatgggagtgatctcactgagctattttggaatagaaatgtggctagttgcctgacctccctcaatggtttcacgtggctttcaaagggaaggaagggcagtgctgacttttggtaaaatgggcgaaagggtccatgccagcaacacaatcactcaaagtccagatgagggatcagtaaatacaacgtgcctgaaaggtggcccttgagcacattcctccggtagacattaacttattaaattgattctgattacaaatataaactttgcccccatctcacccagtaacaatgcaagagttgatgtcagtctataaaaggaagtaggaactgtccctggctttcaggctccaacatcctccccctgtcaagatgtggcacctcaaactttgtgcagtcctcatgatcttcctgttgctgttgggccaggtaaggagggaaggatacttatgtgtgtgtgtggagtgtggagatgatagtggtggtggaacttgaaagctagattcagtcctgaggaatggttcctctgttctgagtctacagca

SEQ ID NO: 34344 - DNA, 2300 bp, Homo sapien
tcttagtgtgttctaggaacagttttccataagaggacaacttctcaatgatcatgatagttatttagtaagaaataatggttgttaatcaaatacatgttatgtcttgtccttctctgatttttctgacttggattccttaatttgcagtgatgtcttagaaatggaaaaagtatcctctgggctttcagactttcagcaacaacagccagtgggatacctctgagttcttgtgttctagtctcttgtatgtcctgaaaggcagcaggagcatttttggggtcacactgatattttgttaaagcagagtttcctgcatggtttatggtgctgctctaatattttctctttaaaactgtgtcaatttttggagaatgaatttttcaaccttttcattgtggaggatttttcccacaaggtagtaatgggcaatggatcaaaatcctatcataaatgattgaattttcaatgtcatagtgtgtggaaatactactccctttcctccatgtctatcttcttagatgttctgtctttgtcatcatctgctccagcacatactttggactcctttacaggtgaccttcccccctccctcctcaataggtgtcctcagtgttttctaagcatttaaaactgaatttgacaagtggctaaaaacttagtctgagacttgtacttagtatatggttaattatagaaacaacaactattttaaacagttactctgttgactgctctttatgactacacttgtatgccaggaggcagcagcctatacaccattagactctttacaagcaaccaacgaaccaattgcagtggttgcagttgtcacagtagtcttgcctgggccagactgggctgggctgtgggaagcattccccttcaggggagtttccacagctcagcccaggctccagtctggctagagagcatccagcccattccttgcctcagtgccacctttttctgggcaagtagccaagaagtgactttatatgcagtgagtacttcagataaacttacagctacagctgccgaagagtggagaaggttgaccaccatttatttaattctctagtgtaaaaacaattgagagcagtgtgcgtgagcccacagacacctgtgtttctgggagctctggcagtggcggattcataggcacttgggctgcactttgaatgacacacttggctttattagattcactagtttttaaaaaattgttgttcgtttcttttcattaaaggtttaatcagacagatcagacagcataattttgtatttaatgacagaaacgttggtacatttcttcatgaatgagcttgcattctgaagcaagagcctacaaaaggcacttgttataaatgaaagttctggctctagaggccagtactctggagtttcagagcagccagtgattgttccagtcagtgatgcctagttatatagaggaggagtacactgtgcactcttctaggtgtaagggtatgcaactttggatcttaaaattctgtacacatacacactttatatatatgtatgtatgtatgaaaacatgaaattagtttgtcaaatatgtgtgtgtttagtattttagcttagtgcaactatttccacattatttattaaattgatctaagacactttcttgttgacaccttgaatattaatgttcaagggtgcaatgtgtattcctttagattgttaaagcttaattactatgatttgtagtaaattaacttttaaaatgtatttgagcccttctgtagtgtcgtagggctcttacagggtgggaaagattttaattttccagttgctaattgaacagtatggcctcattatatattttgatttataggagtttgtgtctgggtcccaggaacatctactggggatgactgttaggcagcttgtgatgatgttttttaaaaaacctaagtaacttggggagacagagcatttcaaacccatatagacacctatcatacctgtatatcccctaatacatggaacataaatttcatttcagctttatgcattaatgtattgaagaggcaggctttttttccagtaataatactgtacatctaaggttgctattcagtaaaactaatagaagagataattattgaataccttggaatatgtagtgagaagaggccaaatttttcatgtttgtgagcatgtctttcagatactcgctaatggagaaattcactttagacctctagaccccaaaaccaagttagcaagtgacaaaaagtaaattattaatagtctgtaaagtggatgctggt

SEQ ID NO: 34345 - DNA, 2300 bp, Homo sapien
gccatttgcttatcttctttggtgcagtgtctgaatattttgcccatctttggtgcagtgtctgaatattttgcccatttttaaatgggctaagattcttttttttttttttttgtgacagagtctcgctctgtcgctcaggctagagtgcagtggcgcgatctcggctcactgcaagctccgcctcccgagttcacaccattctcctgcctcggcctctcgagtagctgggactgcaggcgcctgccaccatgcctgactaattttttgtatttttagtagagacgggatttcaccgtgttagtcaggatggtctcgatctcctgaccttatgatctgcccaccccggcctcccaaagtgctgggattataggcgtgagccactgcgcccggcctgaaatgggctaagattcttactgccattatcatatatgtgatttgaaaattttgttttcttgctctgtggactaccttttcattctcttaatagtgtccctctaagaacacatgttaacttttataaagtccacttcttcagtgttttcttttacgggtcatgattttggtgtctatgaaatctttgcctggctgggtgaggtggctcttgcctgtaatcctagcactttgggaggccaaggtgggtagatcacttgaggtcaggagtgtgagactagcctggtcaacaaggcaagaccccacctctacaaaaaatgtaaatattagccaggcgtggtggcatgacctatagtcccagctacttgggaggatgaggtgggggatcatttgagcttgggaggttgaggctgcagtgagtcatgattatgccactgcactccagcctaggtgacagagtgagaccttgtctcaaaaaaaaaaaaaaaaaatgtttgcccgctgggctggtggctcacacctgtaatcccagcactttgggaggctgaggtgggcagatcacttgaggtcaggagttcgagaccagcctggccaacatggtgaaactccgactccactaaaaatataaaaattagccagacatggtggcgggcatctgtaatcccagctactcgggagactgaggcaggggaatcacatgaactcaggaggcggaggttgcagtgagccaagattgcgccagtgcactccagcctgggcaacagagcaagactccatctgaaaaaaaagaaaaaaagaaaaagaaaaatctttgcctaacccaaatcctcctatgttgtttcctagactttttttttttcttttaaataagagaccaggtctctctgtgttgccctggctagtcttgaacttgtgggctcaggtgaccatcccacctcctctgcttcctgcatagctgggactctgctctcagttatcctaggctttcttttctgtttttgaaagagtctcactctgtcacccaggctggagtgcagtggtgtgatcttggctcactgcaacatctgactcctgggctcaagcgattctcatgccttggtctcccgaatagctggaattacaagtgcatgccaccacacccggctaatttttgtatttctagtagagatggggttttgccatgttgcccagcctggtctcgaactcctaagcttaaatgatccacctgccttggcctcccaaagtgctacagttataagcatgagccactgtgcccagcctttcctagtttttttatagttttaggttttacatttagatctatgatttatcttaagctaatttttctatattgttacaatatatggaatgaagttttatcctcttgtatgtacatatccaattagcatctttatttaaaagccttctctttccattgaattgcctttgcagttgtagttgactctgtatgtgtgatgcatttctgacattttatgtttcattaacctgtttgtctgtcatggtgccaatatgagcctgtcttgatgatttgactttgagacttactgtaaagtcactacaatgtaaatcctcaaattatattagtgtttttcaaagtagatttgacttttctaggctctttgcattttcataagaattttaggctgggcacagtggctcacacctgtaatcccagcaatttgggaggccgaggtgggtggatcacctaaggaggagtttgagtctagcctggccaacatggtgaaaccccgtctctactaaaaacacaaaaattagttgggcacggggcatggtggtgcacacctgtaatcccagctactcaggaggctgaggcaggagtctctgggaggcagaggttgcagtcagctaagatgatgccattgcgt

SEQ ID NO: 34346 - DNA, 2300 bp, Homo sapien
gcatgacatttttgcttttaaaatgtttcacacttgaatgtttatattagaaaagaattactatgaataccacttaacatttttttcctgtcctttacatagaagatattttttggggataaacttttctttggagtatattatgcttacagaaaaatacacaacataggtattatggcttgaagaattttcacagcatcaacagcttcatacaactcagatcaagaaatagagcattaccagcaccctaaaagtcgttttccaacccacctcctattgctgtcctgtgttcttaaaaatgtggtctgagttggctcatacatttacctctattttcctagttgtgctactaaccatcggcgggtacttcaccattctgaattttgaattaaattagaattttgtaactcaatttgcattgtttgatttttcctaggtgttctttaagtgtgatatcaataaaaaatgaatatttcatagatgcttttgtttcttctcactgccatttgctacttagtttacaaagtttcagagattattagtatgtttgaataaatgtgtcttcagtatcagtctgatttctttttctgttgttatagacagtcatttgggtatcacttttttcattaaatttttgtttctgcttctaactataacattgagttatgaggaatataatattttcataaactgccaaaatacgaatgttagctaatctgctggactgtggaagttaatttttttttttttttttttttttttttgagacggagtcttgctctgtcgcccaggttggagtgcagtggcgcgatctgggctcactgcaagctccgcctcccgggttcacgccattctcctgcctaagcctccagagtagctgggactacaggcgcctgccaccatgcccggctaattttttgtatttttagtagagacagggtttcaccatgttagccaggatggtctcgatctcttgacctcatgatccgcccgcctcagcctcccaaagtgctgggattacaggcctgagccactgtgcccagctggaacttaattttataaaggcagattacttttctgttcttcaaaagtttttttttttttttatgagaaggaatcttgttctttcgtctaggctggagtgccatgtcatgatctcggctcattgccaccactgacttctgggttcaagtgattctcctgcctcagcctctcgagtagctgggattacaggcgtgcaccaccttgccgggctagtttttttttttttttcggagatggagtcttactggagtgcaatgacgcaatctctgctcactgcaacctctgcttcccgggttcaagcgattctcctgcctcagcctcctgagtagctgggattacagacacccgccaccacgcctagcttatttttgtatttttaatagaaacggggtttcaccatgttggccaggctggtctccaactcctgatgtcaggtgatccgcccaccttggcctcccaaagtgctggaattataggtgtgagccaccatgtctggccacacccggctaacgtttgtatttttgctagaaatgggttttcaccatgttggccaggctggtctggaactcctgacatcaggtgatctgtccgtcttggcctcccaaagtgctgggattacaggtgtgagccactgcacctggcctttcaaaatactttgtgtatttaaaagacagtcttgctatgttacccatgctggagtgcagttgctcttcacaggtgaaatcatagtgcactggagcctcaaaatcttggaattgagcaaacctgcctcagctgcccagagtagctgggagtacaggcacgtgccactgtgctcggattatattttactatggttatttttaggcacttttcaatgattttttttttcactacagaaatgatatatttggagtttgcttcaaggtattaacgttaagatatgaggtaaagcctccctttgaaaagcccctttccattcgaagtttggaaaattagttcagaattatattttatttctgattatgctcattttataattttattttattttatttttttgtagactagcaaagaagataagttatcaagtcgtattcagagtatgcttggaaactacgatgaaatgaaggatttcataggagacagatctataccaaagcttgttgcaattcccaagcctacagtaccaccatcagcagatgaaaaatctaacccaaatttctttgaacagagacatggaggctctcatcagagtagcaaatggactccagtag

SEQ ID NO: 34347 - DNA, 2300 bp, Homo sapien
gcagaatttgaaagcaagtaaatgaaataggcacaatttctgtgtaggataatttggtaatatctatcaaaattaaaaatccttttgatctaaagattccaggctaaggatttatcatacaggtataatttgctcattatatggagttgtttttcgtttttaattattttaacttttttgagacagggtcttgctctgtcactgagactggagtgcagtggtgcgattagggctcattgcagccttcatctcctgggtacaaacgattctcccacctcagcctctctagtagttaggaccacaagcctgtgccaccacaaacggctaattttttattttttgtagagatggggtctcactatgttgccctgtcttgtatgaggttattcattgcagcttagcatgtaatagtaatggcttggcaacaagcggaatatccacctgtaggggattggttaaataaattaggatgtttgcataagtggaatattattctgcctctaggaagaaaaaggtagttcattatatactgatatggcaggatgtccaagacatttttttcttttttctttttttgagacagggtctcactctcatccaggctggatggcaagctcccggctcactgcagcaccgacctcctaggctcaagtgatcctcccacctcagtctccagagtaggtgggactatacgcatgcaccaccacgcccggctaatttttgtatttttcatagggatggggttttgccatgttgccggggttggtctcaaactcctggtctcaagcgatcagcccccctcggcctcctaaagtgttgggatcataggcctgagccactgtgcccagcctatccaagatatttgaagtgagaaaaaaaggactgaacagcgtatatagtgtgttaccttttgtgtaaaaagaagtatccctatattttaatgtattacttacaaatatgtagggaaagatacattattaaatgctaagtgattgccttccaggactgaaacagctaacagacagagatgggagaatcaattattttttattctgtcatgttttgagttttctattaagacatttcctaatttatatagctctatagagaaaatgcatataaagagtgaagcttaaaagaaatagtagatgtttagaggtgaaagaagtgttcagaatgatatgctgaagaaaaacattagtgggccgggtgcggtggctcacgcctgtaatcccaacactttgggaggcccaggcgggtggattggttgaggtcaggagttcgagaccagcctggccaacatggtgaaaccgtgtctctattaaaaatacaaaaattagccgtaggtggtggctcccccctttaatcccagctactccggaggctgaggtactagaatcgcttgaactcgggaggcggaggttgcagtgagccgagatcccgccattgtactccagcctgggcgacaacagcgagatctatctcaataaataaatgaaaaggaaaacattagtggcagaagatgtttaaatgacgaagaaagagggacggtttggcttcttagggtaagtttactggaaataccgaacagcctcctgcgtcctttgcctttttgctggacctcttgaggactcgaggcttcgacacctggaagcaagtctaggaagctccgggttgggccggatccccaccagaggcgaggggcggaaggcctgggtttgtcacctgagccccagaaccggcatatccggttcggcccggccccgcccttcggaacctcactagcgggctacgcgcaggagggcgtgagctcccggatgtgcaggccctgtactgccgtggcagccctgccggacgcggccgcagtgcccagaggctcaggcctataccgctcgggcgggtcctttgcctggcccgggtcatcagaccccacagccgggaacgtcaccaccccgggcgtcgcctcccggcccagccggcccacagacccccgccccctactcccccagcggggaggggcgcagaggcatcacgtgacgccccgcacccgcccggtcttggtcacatggtggcacggccgctgcgtcagtcacagccctggctgcaggagtccagctgccgtcgccgccgccagcggacggggcggggatcctggtgccaggtcttcgttaacccgcccccgccgcctcagtcagctgtcccagcccgggcccgaccgtcatggagcggtgcggggcctacgcctgttccgtgtgaggcgcatcgctgccgccgccgccgacgccgccttcgtttgtcga

SEQ ID NO: 34348 - DNA, 2300 bp, Homo sapien
cctgtaatcccagcactttgggaggccaaggcaggcggatcacctgaggtcaggagtttgagaccagcttggccgacatggtgaaaccctgtctctactaaaaataccaaaattagccaggcacgggggcaggcgcctgtagtcccagctattcgggaggctgaggcaggggaatcacttgaacccgggaggcggagggtgcagtgagccaagatagtgtcactgcactccagcctgggcaatagaggtagactccgtctcaaaaaaaagaaaaacagggtgcatgtcctttgacccagcaatcctactaggatgtcatcttatagcaacacgggggatttactctttctgttgttgtggtaaatgatctaattgttcagcaatagggtactggctggatacttggggaatatccatgtaatccataacataatgtataaaaagaatgaattagatctgtatgtgcagacatgggaaaatattttcttttctttttttgtttttgagatggagtttcactcttgttgcccaggctggagtgcaatggcgcgatctcggctcactgcaacctctgcttcccaagttcaagcgaatctcttgcctcagcctcccgagtagctgggattacatgaatgcaccaccacgcccggctaattttttttgtatttttagtagagatggggtttctccatgttggtcaagctggccttgaactcccaacctcaggtgatccgcccttctcggcctccgaaagtgctgggattacaggcgtgagccactgcgcctggccgggaaaacattttcataagtacactgaggaatgaaaaaatcaagctggagaacacaacatgtaagagcctatttttttgaagaacaagttgtgctcaaaggtcacatcatcaccttccctaactcctaatcactctttaatcccttactctgaaatatttttcgttagagtacttatgcccatgagaatagtcttcattcattgtctgtagaaagttccatgtgtacacggattttatttgttcaaatgctctgtcctcagctcctaaaacattttaagtgttaattattaattgaaaaaatatggctgggcgcggtggctcacgcctgtaatcccagcactttaggaggccgaggcgggcggattatgaggtcaggagatcgagaccatcctggccaacatggtgaaaccctgtctctagtaaaaatacaaaaattagctgggcatggtggcgcgtgcttgtcatcccagctattcgggagtgtgagacaagagaatctcttgaaccagggacccagaggttgcactgagccgagatcgcgccactgcactccagcctggcgacacagcgagactctgtctcaaattaaaaaaaaaaggaaaaaatatggatgacccagaaacacacacacacttcagaaaattatatatatttcagagaacgtgggttttaagagaataatagctccgtgagctgacattagatgtaggtgcagctaaaatattctaaaatatttgtatagtccttttctgcttgataaagcagctttagttatacagtcccatttagtactcgtaacaacgctgtgaaatacataaaaaacagaaataacgtatatgtttgcactccatggcttgctaaagtcattctttcaattgatggtctcaatcctggtcaactaattcctttctattctccagactacttctagttttctgaacaccaaagtttcattctttgtctttgtatgtgtatccctcgttcgagaatgttgtcctcattttccacagataatgttcttgcctgtaatcatcctttgaaaccctgttcggcccgagaacccgagacccatactggagacaccggcccctcccgacccaccagtccctcccgtcccgaccctccagcccctccagcccctcccctcccgaccctccagcccctcccctcccgaccctccagcccctcccctcccgacccaccagccggcactaagatacctccccttagaagcctgtctggccccgcctacgtctacggcctcccggttggaagccccgcccttccgaggagtttcccaaaaccctgcgcggccggctttgaccgcgctaagatggcgactcccatgcatcggctaatagcccggagacaagcgtaagtaaggatccggttcgggtccactggagggctgggagcggggaaacgcgcgtcaacgggctggtgtcggacccctattgggaccggcggagaatgtccgtttctcaaacactcttctggctcccggggggc

SEQ ID NO: 34349 - DNA, 2300 bp, Homo sapien
ttattgatattgcccctaggtaggagaaaaacagaggaaggaaggtcaaggtcaacctaacttaaaaaaactttaaaaaattgtggtgaaatatacataaaatttaccattttcatcatttttaaatgtacaaatctgtcactgatcatgcacattgttatgcaactaccaccagcatctatctccagaactttctcatcttcccaaactgaaactctgtatcccttaactctccatttcactctacttgtgaaaccgcttttctgtctttatgtagtttattgtaggtgcctgatacaagtggaatcatattaaattttgaatataaaattaaaaattaaaaaaaattaattttgatttgtttggctttccacttagcgtattttcaaggttcattcatgctgtagcatttatcagactttcattcctttgtcttttcaaagctgtataatgtactgttacgcgtatacactaaatttagaaaactcattcatctgtcaatggacatgtggattgtttcctccttttagctaccgtgaataaactactatgaacatgggtatacaatgtacaaatatgtccctgctctcgtttttccaaaggctgttcctggctgcctctactctttttattcccagtacccttttacaggtagcacctggtacttgtctttgaagaattaacaggttttagttaggcaaaatgtgagaacagtgtggccatttgcaagttttaatggtaatcaacccgggtttggggttgctcctatagagtgaagtacctccggaggtggcaggaaatgcaggtatttaaagggaagggcataccagggcaatgtaatttcttctttgctcattcacttttaaaatggctgaagggcaggtactctagccttgagaccttcaactcatgatgtaccctccagcaacggagaatttctttttagtccttaaactatggtctctattgctagttttccaaacttgaacacagccttttccttttctgggaagttgtcctagtctccaccattctgtgcatatagcactcgccattctgtactggggtcacctttacttgtttagccaccctcatgatggggatgatccaggttttgcagaggtgaaacttatataccattggggggccctacaaatacacaaaacaaataattaaaacgacaaatcacaacacattactagagacttggagattcagattctccttagatctctctgggtaatttattagaaatgcttacatagatttgcttcctaatctcaagctggcttcccctctccacaactcagcaactatctattctcccaggaggccatacaagcgaggggccctgaagcttaacatttattaacttcatgtaaaggtctgagcggacctttcaggccaggcagcgtgtcacttgcctgtgttccttgttagggcctaccaccgggtaggtgcttggaatgtgctgtggattaaaggcttaaatcctgcgggcccctcaatctgatctaaggacatgagtggcttagagaacggcgcaacaaggctaagcgaaagaaaacaaagcggtgtggctgggagtgggctccttccctccgctggtgagggtgcgatcttagactcttgagagaacccgacataaaggccgcgttccaatggcggccttctcccctaccggccaacctgccccgaaaagagcagaaggcaccctgcgggatctgcagatcagcttgcgtctcattctggggcaccgacacggtggaatgcaagacaccccactaccggaagtttctttgatgttaagaaaaacggcggaagtaggccgcagcgcttcctcagtatagtgcctcgagctggctcgcctactttctacggtaaagggaggtgctccacatctctatgcagctgtgcagcgccgcaggttccatgcgcaggctcggttggctaaatgcgctttccagccatctttcagccacccagtcctttcccaggttctcgagccaggacgtgacgtattcagacgtactgggggcggggcctcaaggggaaaagcgcctgagccgggatatcgcgagaacatcccgttctttcgtagctctggtgctgcggctccgctctcgtcgcaacgagatctttcgagatcttctccgcccccgctaccggcgcctcctctgcggccactgagccggagccggcctgagcagcgctctcggttgcagtacccactggaaggacttaggcgctcgcgtggacaccgcaagcccctcagtagcctcggcccaagaggcctgctt

SEQ ID NO: 34350 - DNA, 2300 bp, Homo sapien
atgaaggggacatccccagaacctctaaagaaaccctttaacacactgcctagcttgtcccccaagggcccagtgtgaaagggaggtagggatgtcaatccacgttttcaccaggaggagaaaatgaccaatgatagcacatgtaggtccactaggaacaaagcgggcgctaagtagaagacacacaagggactggcctgaaagagcagcgtccgtgtgtacttttttttttttttttcttctcctgagatggagtctcactctgttgcccagactggagtgcagtggcatgatctcagctaactacaacctctacctcccagattcaagcaattctcatgccttagcctatgagtagcctacgagcaactgggatacaggtgcgcatcacaactccatttttgcatttttagtagagatgaggtttcaccatgttggccaggctgttctcgaactcctgacctcaagtgatccaaccgcctcagcctcccaaagtactgggattacaggtgtgagccaccgcccctggccccatgtgtccttcctaagaactgtagccctgctattgggccctgaccctgctggactgtatcctctgccacccgggagggacctattcttctttcccacttgcttcagagaaaaagtgaggtcacacattatctgggaactgccttgatcactgctattataaatgggggccaacccttccaggggcagctcagccacagagctattttacaacagaatgtgagacattagagaggctagttgaacgaggataacagccagcatgtcttatagtgagcactcccagagcccactggggtctgagccccctagttctgccctcatcccaaaccacttgcatcctcacaaaagcctctcttcctgtaaacccacccagtccttccccttcaccctcaactccctgtcccttgagggccaggcattggaggagaagggctgtgtcctagctttaaaactcaccatggctgtctaggcgtggtggcttatgcctggaatcccagttactcagaatgctgaggcaggaagatcacttagagcccaggagtttgaggatgcattgagctatgatcatgtcactgtcctttagcctgggcaaaagagtgagaccctacctctaaaaccaaacaaaaactcaacatggtttaccaataccctaaggaaaaaatcaaggccctttgtctaggtacaaatgaagccctcatttgtctcaatatgaaagatacaagtgttctgagccccaggaattccctccatccaatatttcaggcctccctgagatgttgcttacatggatgacttggctgctgtctaacaaggggcaccaggcatcagcaggttccatagccaggccccagagccacaagcagcccccaagatgtgctacacctgctgaacttcctgacccactctcctgcctattcaagcatgccacacttaggcagcagtgccccccagcaagggtgcctgggcctaaggcattgtgactcaggggccagctctctccatgcccacacccagatgccttcaagctgcaggggctggggtaaggatgccctcctccctcctgtatcatgaggccagattcctccccgccagggaccctttgccctttcctagaatctgactttgcttgtcaccaccccatctctgatggtgtctatcatcttgaatatcacaaggctcccttttcaagagcagcatcctcctaacccctatatcaagcagtgactgcaaaaagaaggcgggggagccttttatgtgacctcacccactgacagcatctgtgctgcaggccccagctagcatcttgtcagccttatctctctcctttctctgccctgagctttctactccaactactggtcactccctgcatgtctgtggtccagctgtcccctttgcctccagctccctcaccaaaccctctctctactcacttatgcaaccgacatgcactcatcctttacccccgcaccgctcctggctaccacctcaggctgctccctagctccttgtacttctcttattgctaccttgcacgttgattattaattatctatttacctgtaggccccgctagacgaagagctgaccgctcagagaatggttacgaaagggacaaacaagccaacaaacgaagtccagtctccccatttgttgtaaccgccgggtcccctttggttgccatggcacttgaggccagaaagtcctcagctcccaggtgaagtcctccaccagctgcccattcctgggggtggatgccgtgacag

SEQ ID NO: 34351 - DNA, 2300 bp, Homo sapien
gcatttctccttaactcactttcaccaagtttctgaattcgtgccgaattcagagaccattctgtaatcctatttgacatttcagtaagattccacatgattaaacccttacatacccttccttacctcacgtggcctcccgcctccctggcttctcctcttcattctgacttcatctttgactgtcttctctctttcactggaatgccatggcttctaataaccctctatactctgatgactctagaattcattcatctgttgatgatctcaacctaacgtatagagaattgaactcttgatttttcccaccctgctgaaatatatctcttctccactcatcaccatctttgaagtctccctttactctcttgctttaattactctcttgctttaattaaaaactcttgtcccctgagccttaagtagaggctgctttttattttctagactttacataccccgaggcctttgtagcctccagctacctgtatttgttcctgccagtttctcttcattcaccaaaggctttagcacctgacactgtcttcctctactgagagcttcctaacccatcagtaatgataccatcttgacaacacattctcctccagctatcctgttaaacttccctcaagtttggactttagctgttctctctcctttctgcttaaccttctcccattggatttcatactcttattctaaggtggtatggagcaggagtccagagaacttaagccaaaaatcatttaaattgaggacagaatttttcacagtctcaatgtgctgagcagcaaggctatggcagccaagagatctgatcctggcaaacaagccccaggattaggggcaaatcagaggcaggctgagccctacagaagcttcaactcagtctctactctctttgcctagcagaggaaagtgtaatcttctatatagagtgtttgccattaaaaggtttattagaaacagaagataggttgatagaacatatccaaattgaagcagaaagagacatgtgagacccaatggaaagaatggaaagtcctaacttttttttttaaacagagttcccaaagaagaggtgagagagaacgaggcagcagaatatatgaaaaaatagtggctgacattttttttcaatcttttgaaagatatcagtatacatattcaagaaatacacatattctttgtaaatcccaaatcataatacaaagaatgccatatgcacacacataataaactgctaaagatcacggagaaaaatctggaaagtagagaaaaatgatacagcaccttcaaaatagcaacaataagactatcagcaaaaataactgaagataatgaaatgataccttaaaatgctgaaagaaaagaatcgctaacatagaattctatactcagtgaagaatagaaagtaaagatttttttttttttttttgagacggagtctccctttgtcacccaggctggtgcaatcttggctcactgcaatctctgcctcccaggttcaagtgattctcctgtttcagcctcccaagtagctgggattataggcctgcaccaccacgcccagctaatttttgtatttttagtacagacagggcttcaccatgttggtcagactggtctcgaactcctgacctcaggtgatccacctgccctggcctcccagagtgctgggattacaggcatgagccaccgtgcctggcctgagaaatacaaagtaaagtaaagatatttgaaaagaaaaactgtgagaatctgtttccaacagatcttcaagcaaagttggtgttagaactattcaggaattaatggcaaatgtgtgggtgaatataaattaatgtcctgtggggttaaattacatatacagataaaattcattaccacaacaatgcaaaagtaagggggaggagggttgaaggagttgaagtgttttatggttctagcattattggggatattaagtaacaatttgtatgagactgtattgatgcaatgatgcatgttataatcactattatgttaacaacataaaagagtgcatcgtcaacaacagaataattaaaatgtttggcaaatccacaagaaagcaaaaaggagaaaaaagcaacataaacaggtaggtcaaataacaaaagtaacatagtagataaaaatcaactatataattaattatgttaaacataaatgtatcaaatactccaagtaaaagactaagatgattaaattagataaaaacccaactacacgtggctttataaaagaggaccttaaatataatgacatagaaa

SEQ ID NO: 34352 - DNA, 2300 bp, Homo sapien
cgaacatgtgggctcaagggatctgcccacctcggcctcccaaagtgctgagataataggcatgagccaccgcacctggcctaaagtttccttttaaatgatccatttcactgagactttcacatttattaccaataattgaatacagcattctcatattttttaatcccttctgtgttctttttctatttttttattgatcaaacatcccaggaatttggctgttttgttggtttttacaaacagctcttagatttctttaccagttctgttcttcagctttctggttgattcattcatttatgcttctgtctccattgattcttcttctttctttaagtttattctgtggttgccaggcaggcttgtagaaatagacagtgatctagtaagaacccaagcttattaaccccaggtcctggccattcctattctagaactctggtggctctatgctaccaccttctccaaccacccccaaggccagtactcctggttctctctctgcgttactgaattccgaccaaaattctatctattcaaagggaaccccactcctccctctacccaaggcaaggtatagggaagtttctttctttcctctttgaatcaagcagggaagtttccttctttcctctttggatcaaacgggtcagagaagagagctacacatttatgttggaagcagtcctccagacatgcctccgctggagctccgtggacctcctccacccctagtggcctgacttgtgacaggcttttctgccactccctggcattctcccccagggcttcaaacaaagaaaaactgaggcaaggactctgactttattgttttgggtctctgtgtggtttggcattgggtgccctgagctcatgttattgaaacagctctggaccattggaggatgggattgtctccctaggcagttgtccatttagctttcacctctgcctccaactgtgtcccacagatcaagaaaagatttgaaattcagactgagttgatggaattatgagcagcccctgaggagctgtgacaggagctacagagttcatttctcacagggaggccgtggagtttttcttttatcctctgcccaccccacatgcatcacaaaaattctaccccactcaggtcccgggatccacaccattgccttttgtacataagtaccaatttgttctatgctctggttccaagaaaaatcttctctattctaaagtactgggatgctttctttaactgaacaacagggagttccagataactctaggaaaatgtagctgtccacttcaagaagaatccatctcccccatctccagggacagtgtgtttagtttagtttaatatgcaggtatgtttacatctcacaaatcttttttgaaagtgtgtaaagtaaaagttatagataaggaagaaccctcaattccactaaaaatgatacttatctcctggacccagagctaggggtaagagggagggtcctccagaccctcattgcttcttccaggcccctccccacagccaggctgggtaggaagggccagagctctgtggagggtgctggagccttgcccacccatgctcgtctggtgagtgggcaggctcacacccccaaccctgaacctgactgccagggcccatggctgagtcactccaagctgaggagggcacacctggcctttcacccatgttccaggggttgagaagtggagaaatgagaatggcccactggaaaatgaatgaacttccccagaacagaggccctgccagtcagtgccataagtgctttctgatacatttcctgcaagaaattaacccctatccaatggctttctgataacagaaagggaatgtatctaaattttattcagaaataaatttcagtggctgctgctctttacatgtagcagctgaacagcattaaatatttggatggccttctgatcgtatttagaataatgatgaaagccatgagtcatagggtacaaagtctgacatgtttattatctgcaatctattttatagccctttcttttagagcttgcgttgctggacaggattattataatttggttaaacacagaactccagtcacctacttgggttcaccccctctggagcagggtctcaggttgggccacaggcccaagtccaggtcagggccgtctctttctcaccagcactgactctcacccacagtgccgccagtcatccgtgtctatccagagagccaggcacaggagcctggagtggcagccagcctaagatgccatgctgagggcattcccatgcc

SEQ ID NO: 34353 - DNA, 2300 bp, Homo sapien
ttggaccacactcacagccatgacagctgattcctgtcgttgagacactccagagaggatttaaataaatttccttctatggctcatttcagggaccaagacgactttcagttaggaatttcctcctgacactgtgttcaaaactcttacacattgttggagagggcgtagactggtgcagccattttggagagagatttggcaaaacccatcaaaactgaaaatgcatcacttccgagaacttatcttacacgtcaacttacacacatgtgcaaagaggtgggtataaggatgtttactgcagtcttgtttgctgtagacaaaacctgaaacagctgcatggggctggggagggggagtccaggaagagcagtgcttgggcatggctcatgggctgcaggacctcctggtgactcccttgtccttgcttagtgcagagagtgccttggaggggtaggctccaatctgtagtggccaagagaggcaccaatcggcctccttcattgactgggcctctgtagggaggcagtgaggctcagggaggaagagactctgtggggagttcctgggttctgcaatcagggtatagaagctgaatcagaaccttcctgtgggaccctgtaccttggagatggggccggaagtggtcactgagtacaagtcaagccctgaggccagggcttcccctaaggctttcccctaagaggggaaagaggacctcgaaagaggcactgagaaagcaaaggccagaggagacacttggcagggcagagtcaccccacaggttccacaggctggagtaccataggccccggcccccatatcttggagatctctggacactactcccaatggtttgagcacattcaaaactctaaagaactggatgttcagatgtttttgacacaagctacagagaattggccaaagcctttaagtgcttcaaatgtagtgttttctaagattttaaaacaaaatgtacccaagcatttaatgagattattttaatgcagagcctacaaccactgtctatcgtggtgcaaacagctctccatgctaatcaaacgcctctcatctttttacaatgaattcatgactggttcatataaagacaataaaaattaaatgagtcatgagctcctaaatcattttcttttggtctttttaataactcccttccaaagaagagctagctgagagcatacgcttcattagaattatttgttcctggttttataccatttaggtatggggagaaaagtgaacattttaacacatccttcaaacactgccacaaatactttcttctaatgggttttgttttttgcttttatcaccgtactctgcctgccgacattagaaagccccaaatagcgagattcagtgaaaaaaaaacccaaaacaaaaaagagtggctctttcaagtcatttgaaatatactgagtttgttgtaggcctttttgttttttctgtttttttaaaaaagaatacaatagaaaaatgttttctctccctgagaatatcctggctaaacaattccacgtgctggtctcagagcatgttgcttccttccttgctggggccagaggccagcagccagtaagaataggagctccacacacagggacccatatccaatttgatacattccactggggcctgggaactacagacagccccacagcaaagatttggaattgctgggggctagatattatgtcccacaagcaagaaacccagagagctctgggccagggcatgtaggtggctgtaggcccatgggcaagttctccactcatctgaatgagttaaccccacgtgcctcatggggcaggggtatgggatgagctgatgcttatgacctcacaaccggcacggagcctgcaccgtgtatgaatggtaacaacactggcaacaacacttgtgatggttcaacccaacagccattacctgtgacttttgagatgccctgtccctgtttctgcccgttcctgtctcctggccctcaggatcataaaggacagtgaggaagacagttatgagatgaagggtgggtgacattgttgaggcaggatgtgccgactaggtttggggacagtcacttcaccctccgagtggccgctgtgcaggctgggtggtcagagaagcagagggctgaggcccagaatgggtttgcatgttctgtttctgcagaaagtgaggcagcaccccatccttcccaaccccaatacctagaatgggggccagagtagggagggaatgtgtggatctgcttctgagatgggtctcaccccagcccc

SEQ ID NO: 34354 - DNA, 2300 bp, Homo sapien
cagtgtgaaatctagcctattttccaatttggggtgtactattaaacaaaaaattacactgagaggtaaaagcacagagcaattcaaagaggtgtcaaggttactggcatctgatgctgcttccctggagccttgttttattttgtcattcacacttcacctttctcattccgaggtgacttttaatttcactcttattttatgcacagtagttaaacagctcacttcagatgttagcattctctctaaggaatattccatacatctggtttgcagcaactaccttcttctccttctttgggaagcgtgtagaagttcagtgcctgttcactgcattaaacagagctatttctgatcttggtcaacctatagaccctgatttacatatgaccttgagttactaaaaaacaaaaaatacacaaagtcctgctttgattatgtaataaggccactaggttgactcagggactttgtgatcagagctgagaatagaaatctgcttttccaaatacctcatgtcttagaggagagccgaatccagcctctaagccatggtgtacgttcctgaccacagacttagaattacatttcagagggaggcacagcacatttccaaacttccctgcttccttttatactcattttctcttttctgtttcccaagatgaaaagtgccatcccttccccagtcctgccatggagaatctggcccctagccagccccagaagttcagtcatggtggccttggcaaagattcatagtcaaatctgagagaggatcacactggctagggcccagggtcactgaggatgtagtagcctttatccttctgagtaaaaatcatggtatccacatgggaagtcaaccaggttttgtccaacccctcattttacaagtggggaaactgatacctacagtagagatacgattggctctgcattacatagcttggcagtgatagagggagagctggaccccagaccaaaactgtgtgatgccaagaccgcgctggcccattcactgctgtatctctagcaactattaatagcacagtgcctgctgcattggaggggttcagcggcaggaaaatctgtggaaggaaaaaacaaacgtaatatctctttcttcaggtcagccttccattattcttccccttttccttatatttaactaacttcatcctcagaaaaatcccctctgtcacctccccccggccaggagagattacagaggcatggacagaacactgttcacctaagccaggaaggcccctggtgcccacgcagccagagcaggaggcaggccctcagaaagtctcctggccatcagcctggcctgggtaggggctccctcctaagtttcctgccagactgaggctacgtatgaccatttatgggcccctagttgttacaaaggtgtttccagttcattcgggaaggaagactgatctcaaaagctgctgatgttaaagagggattcagaaaagtttgggagccccaggcttggggatgggatcaggatggggaaatatcctgttctaagggagaagggaccctctgggcccagctaggtcaggtaggcaaatgtcacttgggattgcccctgtatgccctgaatgtcttaagattctgtagttggaagagggaagattcagaaaagagaaaacctttgctgtttcccaggttgttgggtctcaacggcgggggatttcacccactttgtccccagggacagctctcctgctgtggtgtaccggcccgcctggactccacgagcaatggccgcggattcagagaccccctgtgcgcctggagagcacagctttggggaacctggcccggaaaggagcctggaggagagcagaggtgaagaggggctgtcacttgccgagctccacgctagccagaggcaggagcgctacgctggccctcctccctccgggccctagatggccccagcgctccggagtcatcgcgccccgcgtgcgcgcccgcctgctccgcgcacctgccgtggccgccgcgcgggtctgaccggctggcgggcgggcggcgcgcacaggtggcggcgattgggcaggcggggcccagagggtgacgtcacgggctccggtcccggcggcagaaatagggcagccgcggcggcggtggcacagcagcgggcagcggcggctcagggagctggagcctcaacagcctccagcgagcccgggacccgccgacagcccgagaaaccagccgaaggacgcggggcggggtcgccgccgccgccacggggtgctccctccctcccgcccaag

SEQ ID NO: 34355 - DNA, 2300 bp, Homo sapien
gaaatgtggggaaaagaaagagagatcagattgttactgtgtctgtgtagaaagaagtagacataggagactccattttgttctgtactaagaaaaattcttctgccttgggatgctgttaatctataaccttacccccaccccgggctctctgaaacatgtgctgtgtcaactcagggttaaatggattaagggcggtgcaagatgtgctttgttaaacagatgcttgaaggcagcatgctcgttaagagtcataccactccctaatctcaagtacccagggacacaaacactgcagaaggccgcagggacctttgcctaggaaaaccagagacttttgttcacgtgtttatctgctgaccttctctccactattatcctatgaccctgccacatccccctctccgagaaacacccaagaatgatcaataaatactaaaaaaaaaaaaaaaaaaccagtaaaaaaaaaaagaaaataaaagagcgacattctatcatttctaccatactctatttattagaagccagtggctagattcaaccacactcaactcaaggggaggggtttccatcggggtgtgaatacagcaggcagagatcattggggatcattttagaaactgcttacccacccactttacaggtgggatagctgtagtccagagaggttaagctagtaaaagatagagctggggtttgaatccagccctgggtgagctcagagcccaccttcttaaccattttgctgtcttgctttcttgagcctacattatttaaacacttttgctgtcctcagaccatttgaatggccctccttggtgtgctgatggccctcatgtacacctcggtcctaggatgggcctccctgcactgccataattggtttcttctctgtccggctagataggatgacaagccaggcacaagacagataactgaaagtaaggaatgaaggcatgggctcaggagagtttgctatttaaggaagagtgtcctggaaacatggggccacaggatgaggagtccttccctgatgcgtaggagcatgcgctgacattggatttctgtgtttggctatctctgtgtggggctttcctgggcccttagaagctcacagcttggcagcttccttgacctgcccttcatctctcctgtagcatctctttggaccccagggcacagtggcaggacagagcagtgtccaaaaaagttcaaggcgaatgggtcttgaagggcccattctgggaaaaggagagggcagcagtgtcctctggacacaagtcagggacacaagtggtgtctattgcgcattgtccacgtgggaaaaagctcagggatccctagaaggttgatggcttcctgcaggagtgaggaggtatttccccatcattgattcagcacggtgctgttgccttcttcctaaatgccatctgctgggagcttctaggacagtggttttcaaaggatctggaccagccgcatcagccccacctggaacgtgttagatgtgcaaattttcaggctttcccacccagatccagagttagaaactccaggcacggggcccagaaatctgtgttttaatgaatcctccaggtgattctgatgtggataaaatctgagaaccattgctctaggcagtttttctttaaatcctcccaagcttttacatttttaaaaataaaaatttcccaaagcaaaaatgttcaatatataaatgttggaagatccagggaagcacaaagaagaaattttaaataatctgcagattagtattaattttttagtgcatatcgcttcattattataggtatatgtgtatatttataaatgtacccaattttgaagaagattgagattttactataaatattgttgtgtatgctgctttttaaacatttctccaagtcttaaacattgtcccactgcaccatttatgcatggctgcgtagtattccatggttggaatataccatcatctgaccaatctctgggactgatgcaatccgttccttggagagggagattgtgaactctgctcagatgtgtttacaacacagacagatggtgagtaaaaccaattaacctctccctcctcctgggctaggagggaagaacagctaggaggatagtgagagcctggccttaccacactggggaatttgaatgcagccacaaagcaatgagaatgcagataaagggacaaatgaaggaggtgccgcaagcttggtgagtgcccagaagtgggttttgggggagcaggagtcatagattctgagtctgtgtgacagagaatgcac

SEQ ID NO: 34356 - DNA, 2300 bp, Homo sapien
tattgtggaaacacaaatagtaataaactctatgcatgatccagcttcaacaaatatgaacatttttttccattcatgatttttcagcagaattccttttttttctatgtttgaaagtgacattcaaaacaggaaccatctattttagcattttatgcaactgatcacccaaaaactgtgggcctcagtatttgtcatactgtcttcagggacttgcagctatttctaagtgaatgttcatagaatttatccagagattatggcacatagtggttgctgggtacatctagtcagatgtcaggtacagtattaagatattttacttttagagacagtcttactctgtcacccagactgaagtgcactgtcatcatcatagctcactgcagccttgaactcctgggctcctgtgatcctcccatctcagcctcccgagtacttgggattacaggcataagcctggccctaaaatatttaaaaatgtataaagggttctcttgagtatgagggaatatttccctcactagttacttattgtctgcttgttgcatgcagcatgttggaatatcattgtgcaaaatgctttgagttcataatatctcaccagttaagagaattgagacaatctggtatgaggacacaaatggacaaagtggacaatgagtcagggaagaggactgcagtgtgtttattatagattaactttaaagtcaacaagcagaaactaagattgagaagctcatttgttgaactgagtggttttacagaaaacttaagtaccgctcagagaagggaagctcctgggggactgggaggactttgcaccttggctaaagtggagagtttgcaataaggacaccattcagtctaatacgggcttctgggggatttcgggaaatgtgcagatgaatgacttcttagttttcttaacacagagtttgtgtgtttctgagctgtcaccagggtgagataaaagcttaggggaaaccagattcaggagtagaacacaggccctttagagagacagctcagctgtgtctctgggggataacagcaatcttcgcagggaatcatagagaccagaatggtgaagctgtgggcacaataaatgtcttgcttaacgtcacattgattttcctgaaattgatcaaatggaacttttatgaattgaagcctgtatctgtttattaaggagacatttacagaacgtacacacagagcaaagtatggcgccagggccctaggtgaacttcttggaagtttgtaagtttgcatttttatacactggggatttcaagtaacaaaatttaaaaagagaagcttattttaggaaatctgaaagttattttcaatggcagcccctcacctctacttcctagctaccttcctttcttttcctccataattttttttttttttttgagacggagtctgtggcccaggctagagtgcagtggcatctcggctccctgcagcctccacctcccgggttacagcgattctcctacctcagcctcccgagtagctgcgattacaggcacgcgccaccacgcctggctaatttttgtatttttagtagagtcggggtttctccatgttggccaggctggtctccaactccggacctcaggtgatctgccctcctcggcctcccaaagtgctgggagccactgcactagggccggtccataatatctttatcatcttgtatagtgtgtattttacaccatattcgccctcacaagaaaataaactgccaaggcgggcgggggggtggggggttctttttgttcactgctgtatcttaaatagggagaggtgctaaatctttgttgaaaaaaaataaatgactgtcgggaaagatttttaaaaattacttataatcccatcaccgaaataggactacttaacatttgtgtttctttcgcctttgagagaggaagagcagttacttcgctttcgtgatcagtctgttctacagctggatcttcctttttaaaatggctaaaaacgctatttttggctgtatagtacccaatcatgcaggcggcagggaggggctcgctttggccctcttcagcacgtcacaccctacctttaatccgcagccaactgtgtggcggtccccactttcgcctagcggcaactccctcctccctgcaatccttccttcttattccggtttccagagcacgtctccaggcttcgacgtcaccacgctgggacgtatgtgccgagggccgcggcgtctgacctcatggcgtagagcctagcaacagcgcaggctcccagccgagtcc

SEQ ID NO: 34357 - DNA, 2300 bp, Homo sapien
ccttcttgcctgggtcacgcagccactaagtgagtggttaatctgaaactagcacctaggggagctggcgaaggggcccagggtagcagaggccatgaagaactctttccaagttgttgtttttttttgttttttttttttgggggggggggacaatgtcactctgtcagtcaggctggagtacagcggctcaatctcagctgactccagcctcctccttccaagttcaagcgattctcgtgcctcagcctcctgagtagctgggactacaggcgcgcgccaccacgcccgtctagtttttgtatttttagtagagacagggttttgccatgttgcccaggctggtctcgaagtcctggcctcaagtgatctgcctgtctcggcctcccaaagtactaggattacaggcttgagccactgcacccggcccagattggttctttaaagcggagttgagaggtggcgctggaggggaggaagcccttcgacatttgctcccagcctcaaaactgggttgcaccggcatctgttcctagccctgtggggttcctggagccccgccttgtcccgcccggcctccctgagttcttgtcctccccctgcccaccagtctcagtgtgcggggtggggaccaccaggctgggaagcccagagttcccaggcaactcgtgcgcctgggagggtcatagaatccgtcctacactcctcaggatcttgaagggggctcttccttacattcccagtcacccctcccccagcccctacacagggcctaggtaacctgtctgcaccccactcccactctgtatcagctgccctcttcctcagcaccctatcccactggagcaccttttccaactccagtcgccacttttaatctgccgccttttcccagcagccagtcctgattgcctcctccgtagccccagttgcccactgctttagatagtgtcgcagctggctgtgaggagtgtcctgattctgtaacccggcacctcctccacagggccctagacgcctcaagccttccaggacgtttgttgatcaaaggcgaaggatgtgtagaatcttcgtccatctacgaattaattctcgaaacctgcttcgagtgggcctcgcgcgtaacacaggggacactcagtggtgaacgagaccactcgcttaggcctagcagcgaggtgaccgttcactcaacacacactaactgggtcccgcaggacacgccccggctggtcgcgggggttacccggggtgccctcagtcggccggccggccataaccggcgtgatctcctcgcgccgagagacccagcagggacctcgcaaaacccaatccacgttttgttttattttgtctttttgcctctcaaatgcatggaaattggctgctagtagctttgctacaggagaaaatcgctaatctgtagtgcaaaatcggcgcacaggggttttctctgagattgtctagacgccgcgcgggcgggtcggaggcgccagacacattgtatccggagcgcggagctcgggagcaacagtcgccgcctctactctgtatctgcgccgccccaggcgcccagtgtccgcgctgggcctgggactgccctcgggggatggggcccacgcgggctttgatggggggccgggggccactttgtccacccaggcgaggcttgggtccagcgccggccacatcaactcccgggggatctagcagcgcggaggccaagcaggaggcccaggagccccgcgcgtcttccattagcgcagggacctccgggccacagctcagagaatcggaaggcctcctcccccttcccgagcgctgccactggggccgaggtttccagcaagaacccgcgtgtccctgcgcacgcacacacggtgcacacgtcagtccggcgcctccccgtgccccgactcacgcaggtcctcccgcgcgcccgcaacacgcccgcaggctcctgtgtctgctgccggggcagcggggcccggaagggtaagaacgcggctcgctagcgggatggggaccctggcccggcctggacgctgtcccgggcggggcctgggggcggagcgcgccgggccgggcgcgcaggaggggaggcgggtccgcgccgccgccgtccgcgccgccccgcccttggcccagccgctcgctcggctccgctccctggctcggctccctgcctccgcgtcgcagcccccgccgtagccgcctccgagcccgccgccacatcctctgaggtaggcgcagcggaaaaggaccccggcttccttgcgccctggacggcgggggccagg

SEQ ID NO: 34358 - DNA, 2300 bp, Homo sapien
tcgctcttgttgcccagactggagtgtgatggtgagatcttagctcaccgcaacctccgcctcctgggttcaagcaattctcctgccttagcttcacgagtagctgggattataggcatgtgccaccatgcccggctaatttttgtatttttagtagagacggggtttctccatgttggtaaggctggtctcgaactcccgacctcaggtgatccagccgcctcagcctcccaaagtgctgggattacaggagtgagccactgcacggggccgagtgcctactctttatgtgtcccattttaaacttacaccaacactctgaagctgaggctcttagaggccagccttcttgcctgggtcacgcagccactaagtgagtggttaatctgaaactagcacctaggggagctggcgaaggggcccagggtagcagaggccatgaagaactctttccaagttgttgtttttttttgttttttttttttgggggggggggacaatgtcactctgtcagtcaggctggagtacagcggctcaatctcagctgactccagcctcctccttccaagttcaagcgattctcgtgcctcagcctcctgagtagctgggactacaggcgcgcgccaccacgcccgtctagtttttgtatttttagtagagacagggttttgccatgttgcccaggctggtctcgaagtcctggcctcaagtgatctgcctgtctcggcctcccaaagtactaggattacaggcttgagccactgcacccggcccagattggttctttaaagcggagttgagaggtggcgctggaggggaggaagcccttcgacatttgctcccagcctcaaaactgggttgcaccggcatctgttcctagccctgtggggttcctggagccccgccttgtcccgcccggcctccctgagttcttgtcctccccctgcccaccagtctcagtgtgcggggtggggaccaccaggctgggaagcccagagttcccaggcaactcgtgcgcctgggagggtcatagaatccgtcctacactcctcaggatcttgaagggggctcttccttacattcccagtcacccctcccccagcccctacacagggcctaggtaacctgtctgcaccccactcccactctgtatcagctgccctcttcctcagcaccctatcccactggagcaccttttccaactccagtcgccacttttaatctgccgccttttcccagcagccagtcctgattgcctcctccgtagccccagttgcccactgctttagatagtgtcgcagctggctgtgaggagtgtcctgattctgtaacccggcacctcctccacagggccctagacgcctcaagccttccaggacgtttgttgatcaaaggcgaaggatgtgtagaatcttcgtccatctacgaattaattctcgaaacctgcttcgagtgggcctcgcgcgtaacacaggggacactcagtggtgaacgagaccactcgcttaggcctagcagcgaggtgaccgttcactcaacacacactaactgggtcccgcaggacacgccccggctggtcgcgggggttacccggggtgccctcagtcggccggccggccataaccggcgtgatctcctcgcgccgagagacccagcagggacctcgcaaaacccaatccacgttttgttttattttgtctttttgcctctcaaatgcatggaaattggctgctagtagctttgctacaggagaaaatcgctaatctgtagtgcaaaatcggcgcacaggggttttctctgagattgtctagacgccgcgcgggcgggtcggaggcgccagacacattgtatccggagcgcggagctcgggagcaacagtcgccgcctctactctgtatctgcgccgccccaggcgcccagtgtccgcgctgggcctgggactgccctcgggggatggggcccacgcgggctttgatggggggccgggggccactttgtccacccaggcgaggcttgggtccagcgccggccacatcaactcccgggggatctagcagcgcggaggccaagcaggaggcccaggagccccgcgcgtcttccattagcgcagggacctccgggccacagctcagagaatcggaaggcctcctcccccttcccgagcgctgccactggggccgaggtttccagcaagaacccgcgtgtccctgcgcacgcacacacggtgcacacgtcagtccggcgcctccccgtgccccgactcacgcaggtcctcccgcgcgcccgcaacacgcccgcag

SEQ ID NO: 34359 - DNA, 2300 bp, Homo sapien
gatgccatgaagagcttatggccttgagaccagaggtgagagacaagcggcgtcacaaatgcagcagaaggtggagcacaccaaggcctggtgttcatgtgggggtcacctgcagcttcacagaggaatacgcctgcactaaatcctatgtggcctggggagacagcctcagacacactgagagaggaatgtcttattgagaaagaactattcaatatcgctttttaagacagggctatacagggctttgttgcttatccctagggcctggcacagaactggcaacctgcggtgctcagaagtttttggatggatggctgaatggaaggatggatcgatcatccatagcagtgatcacttagaatccaggaagtagttagcaggccccgtacctgccgtcaggcaactcaccatcttgtggaagacatcaggcgctaaagaggctctgggagccaggggttcagaaaccctcctggctgttttatgcatgtcatggcacacaacatggcagttagggagggcttcctggaggaaggaggtcctaggtcagcctaggagagaagagggattaaagaggatgtggccttttccgggtggggcagtaagccacactctgggtgatggtggactttgaccccatagggtccctgggacctaggtgaactaggccctgggggagagtttggccatccattgaaccttgcctagaatggcaccttttcatgtctcagttcctgcagtcctccaacccctgccacctaggacaattcctccaagtattccctccccaggacactggctctccctgtctgccctctctcctagaatagactacctcccagtatatgacccactgccttgcatggggcttcaagactttcctggctcagtgccccgaggaaagctcaccctcttattccatattcacccctctccagcccaggacaacaggggtagtaggggaaggagcaacgggatgtggtgggcagggtaaatttgaagaggacctgtaccagatcctgtagtcactgctcaccacagctctaaccaggcctcccgcctgcccaaatggattctcacttcttgggatcatggcaccttcatctgtggccctgctggatactaacatgggccaagcatactgtggcacttaataaatgctttctgcccaggggatggggctgttgcataatggtccaatgtgtttcttcaggctcccagggtgggggttgggagtggggacggacgggtttccagttcgtttgttagctgggcattctgcagtctgaggcgtctttttctttttaaggcccattcctggtctcttcctaatccaggaagcctccccgcctccccaggtctgcagagatactttctcctttcaggagtcccattgcctttagaattgaagccaccatcatatcctgagctgttggcctctgtttcctgtgagtgagtctcctgtccctctgctactgtgtctttgttttctgttggtcaagagctgagcttgaaactcatagcctgggtgtgaaatcagcttctccacttactcagtgtgagcgggaccttgggcaagccacctccttcctggagccttctttttctcatctgttaagtgggggtaagagtaatatttgtctcaaagagctgggaagatgggatgagttcctgcttgtagagtacttagcccaatgtctagggcagagtagatacttgctgagtggtgactgttgtcacttattgttcccaggcagcagggctgagctcaggaccaggcctgtcatggtgcgtagcatctgttgcctgagcaagcagctgcctttgcaatcctgcaatcttgcaggggtcatgggtggagagtggggaccagggtggggagggcaccaggaatcctgctttctgaggccaggctgaggctgccaggacgttcagcctgagtggtgactcctcttgccaagagatggccatctccagatgtctgcaggttggaggagccggctggccatgtaggggcctgggggcagagacaggactaatgggaggaaattacacagagagatttcatctcggcttgaggaagcacgtctagcagtcagagctggccagccatggcccggccgggctgcagcagaggcagtgagctccctgtcaccagaggtgtatgagcagaggctgggggctctctagggagggaagccacggaggggctgtctgccctcctggcccctctgaggctgtgagcagtcccttctacttcctgtgcggctttgcccatcacttggcccggttgagcctac

SEQ ID NO: 34360 - DNA, 2300 bp, Homo sapien
taacagatggggaaaaaaatgttccttatgttctttcaccaaataaagacatgaaaaaaaacacttgtcccaccaccattttagtaaagaaaggatgttttcacaccaataaagcagtaagggcataatccttgattaaaggctaatacgaagctggaaagttttaaccttattgagaaaacaaaacaaaacaaaaagaacctcactgttgttgtgacttttctcctttctccaaggactggagaacacttcagcctccactgatctgtgtcggtggaactcatgggtctggggacagctattctggaggacgttcctgctgaaccagggttccctacaaacacatgaggacccctaaagccattgggttgggcagatccggattccctttcagctgtcccagaggaggctcaccctatgccagaccctacctataacctcaggagttgaggtggcggaggctctgaactcccgtccctgtacctctcccctccgggcagggccgagcccccccttccccgccaatccggagcagatgaggcgagactaagcggcaagcccaccctgggaagaggctggggagacctaatgggcagggtccccctcatctccatcaccaagctgagcactcgtgcccatgccaccccccagccccagcctggggaaaggaggaaaagtgggcaccctagcccggaggtggcgggggaggggggtgtgggggctggtgtccgagacacccggctgggcgggcacagataggatctgaacacagggaagcatggcctagctctttgatccacagccagccacgctgggcctggacccggagggaggcacggctgtcttccggcccggctttgcaccgctgccaggggtcctgtggggccctcagagggagaggcgtccaatacccggccctcccccaaataccctctatcccaactgctctcagaagaggcgtgagcgtctacagtgaacccagcacagaaacctgctaggggagctgctgttgactgcatcgcgatccaaaggaccggcgtcttttgtagatgcaggggctgagccaggccaagcgcgccgtggaggcccgcgtggacgcagacccgggtgccatacagatgcgctggaatccaggcactttcccgcgctccgcaaatctagatgtttcagcctggatcgagcgagggttagagggttagtcaggccagggtcaacttcagagtcatgggctccctaaatgcgacttctagggttgagttgctgtggacgagcgacccatgtcggaatcccgcgcccacgtggctgcccaaagttccgagtctccgggctgcaggttctagtcacggaaccgagttgggagagtcataggggctgggacttggaggatcggctgaggtccggtgctcttggctgtgttcgcggctcggagccgtcgcctgactgaggggcccgtcacagatgtgtgatgtataagctctgcacgcaacaggagctcaataaatgtgcgaaggggggtatacttatgttcgcactgtatgcaggcggcctagaaggaagtccctgattggcacagggatggaggatggggcaagagccgcaacagcgccgcggagttccaacgctgccggttccctggggtacgagcacagcctcaagcagcctcaagccctaggaagcccccagttcaaagcacagggcgcattggagcctgggcacgatacagttcacaccacggctgcgatggtaagccacgcccaagtcccaagggcctaggggacccccgccctccacagccggaggagaaacctgggcgcagaaagcagggggaatatctggttgtaggtgagtaagcggggtcaggagttcccgttagagtctctgcgtttcgggagaagggtgatcattcccaggcttgtccgacgtctctctcagggtgcgctccggaagagcgagccctttaaggctatgccgagtgggcgcgtcccggcctctcccgggagaggagaggcggggcggacctgtgtcccgcccccggcccggcccgcccccagtgcccgccccgcccccggcactcggccggcggcgcctttgatgttccgacccgccagctcgcggagccgctctgccccgcgccctagcccgcgcctgcagcccgcccaggcggagtcagcccgcgctccgcccgccgcgatccgagctcggaggttcggactccgggctcgccgccccccgggccggctccgcgccccgcactcccggcgcccagcgccccgcgccccggcgggcggagcgcaccatgc

SEQ ID NO: 34361 - DNA, 2300 bp, Homo sapien
gccctcccccaaataccctctatcccaactgctctcagaagaggcgtgagcgtctacagtgaacccagcacagaaacctgctaggggagctgctgttgactgcatcgcgatccaaaggaccggcgtcttttgtagatgcaggggctgagccaggccaagcgcgccgtggaggcccgcgtggacgcagacccgggtgccatacagatgcgctggaatccaggcactttcccgcgctccgcaaatctagatgtttcagcctggatcgagcgagggttagagggttagtcaggccagggtcaacttcagagtcatgggctccctaaatgcgacttctagggttgagttgctgtggacgagcgacccatgtcggaatcccgcgcccacgtggctgcccaaagttccgagtctccgggctgcaggttctagtcacggaaccgagttgggagagtcataggggctgggacttggaggatcggctgaggtccggtgctcttggctgtgttcgcggctcggagccgtcgcctgactgaggggcccgtcacagatgtgtgatgtataagctctgcacgcaacaggagctcaataaatgtgcgaaggggggtatacttatgttcgcactgtatgcaggcggcctagaaggaagtccctgattggcacagggatggaggatggggcaagagccgcaacagcgccgcggagttccaacgctgccggttccctggggtacgagcacagcctcaagcagcctcaagccctaggaagcccccagttcaaagcacagggcgcattggagcctgggcacgatacagttcacaccacggctgcgatggtaagccacgcccaagtcccaagggcctaggggacccccgccctccacagccggaggagaaacctgggcgcagaaagcagggggaatatctggttgtaggtgagtaagcggggtcaggagttcccgttagagtctctgcgtttcgggagaagggtgatcattcccaggcttgtccgacgtctctctcagggtgcgctccggaagagcgagccctttaaggctatgccgagtgggcgcgtcccggcctctcccgggagaggagaggcggggcggacctgtgtcccgcccccggcccggcccgcccccagtgcccgccccgcccccggcactcggccggcggcgcctttgatgttccgacccgccagctcgcggagccgctctgccccgcgccctagcccgcgcctgcagcccgcccaggcggagtcagcccgcgctccgcccgccgcgatccgagctcggaggttcggactccgggctcgccgccccccgggccggctccgcgccccgcactcccggcgcccagcgccccgcgccccggcgggcggagcgcaccatgccgcagctggactccggcgggggcggcgcgggcggcggcgacgacctcggcgcgccggacgagctgctggccttccaggatgaaggcgaggagcaggacgacaagagccgcgacagcgccgccggtcccgagcgcgacctggccgagctcaagtcgtcgctcgtgaacgagtccgagggcgcggccggcggcgcagggatcccgggggtcccgggggccggcgccggggcccgcggcgaggccgaggtgagcccccgccggcgccggctcctcccccgcggtcgccgcgccgcgccgccccagttgcgcgcggccctcggggtctccagcgcgcagagcgtccctgccccggcgtcggccccgacccccgcggtcccaccgcccctcactcccctccggttctccctccaggctctcgggcgggaacacgctgcgcagagactcttcccggacaaacttccagagcccctggaggacggtgagtttctgcccggcccggcttcccttcgtcgcgctcaggccctggcctcggtgggacggggacgccaaggaccgcggggagccgggtgcctcccccaccgcagctcaggaggcggcagaacccaggggtggagagtggggggcgggcttcccgggcgccgccgggtcgagtcacttccggtgccctgacctttataggagtaaacagacccccgccatccccgcctcccctcctgcccaggtgactgactaatccgccgccttcaggagacagaattggccaaggtttcttggttggagggcggggggtgggaggtcaagtaggggccacctcggggaggcctgccctccaggtccttcccctaaaacttggcactgccgatactcccagcccgttccttcccaagtcaggaacttgcaggggaccccttggca

SEQ ID NO: 34362 - DNA, 2300 bp, Homo sapien
gaactgtaaaactgtagcctttcctcctctcagtgagaaaatggaaagtggtggttgtgatggctgattcacctcagcctcaggcaaagtcattctgaaatccctcattgtcagctgtgggaaacctgctgactcaaccctggggggcaggtggagccttggctccccaggctgggctcccctagaccaggggcctgcctcctgcccagaaagctaggctggagtcccccgagcagagatgccccaatgcctccatgcctgagtgacttcagctctgcctactggccccctaatgtcttaggcaagtcaccccagccctctgccctgggttcccttgtctgtcaaaggggcactattatcacactgggatcctcctgaataaactagtttatgtctggtcctctagcaaagctggtgggatcttaaggcccctgtaggaggttctaggatgcagtaactgctgatatggcctgccaggtcaggctagcccactcactcagcttctctcctctgcagttcacaggcctctgcagacccctgacctctctggcttctactccctgacctcaggcagcatggggcagctcccccacactgtgagctggtgagtgtgggcccaatgggaaaggggtaccgtgtgctggtcagaccaagacctgcctgcccttccatttcctcctccatccctcttggctggccaccctgctgccagctctgtttagatgccaggggctggccagcaactctgtcctaacctggctctgagctaggggtcctcatgtaccccggcctgcattccccagggagcctgacatactccctttggagaggcaggagagctggtccctggtcccagccctgtctccctcagtgtccaagagatccccttagatgggagaactctgggctgctaagggacctccagggccatatgagtaactgaggaagaaaggtgggcccgagcagggaggggacagcatgagtggctaccagagaggctgctgcttctcagctcactggcctcagtgcctactgcttttggtcctttccttggctgagctgcttgaggggcagtgtccctccctgcccctgtggtgcctgcttaagcccaagcctctgaccagcctgcttggagattcttaaggctggaccaggaaaaggaagcctggccccctaagccagtaggcctgactatgggccaaagggcctgtcctcagctggagttgggccttggcaggctacttggccctttactcatcaacgatagtttgagctgcgcaggtctctagcctatttcagagagctgggctgtggcagtcacccaacagcaggaaaacttggctccccaaggagatcgggcaggccagaggcccaacctgtggcccacttgccctttacccatggtcagcaccctcctccgttccagcttctccttggacaatccattctgaatacaaattaagactactcccatgaatacccctaggatcaaagcgtggcaagatgctcaagagcccagccttactggactagaccagggttccgtggatgcaaatctgtaggccagcctttcaaaagcatcccctaggccagcagtgctgaagaccaagagagttgagcctacagcagattttacccaccaaggctgtaaggaggggacttcaggcagccctgtgctctcggcttccacccggtggcacttggctgtgaggaaagaagtaggggtatttaagccatctctccactgagccctattgtgtgccgggcagggttctgggcaccagggaagtcggcactgctgaagccaactgatcgttaggtccctgccctctcagaactcagtctacctcgtgggcaacccaggcaaaaaaccagacagttacagggcactgttggtagtgctctagttagggactgtaggagcccagagaggtacctcatccagcttggaatctcagggatttgaggaggaagggtcacttagctaaggaagacctgaaggatgaccaggaattgaagcaggcaaagtggtgcaaaacaatccagtgttaacagtggctgcaatggccccaggacagatatcagccctataccgtcaaagaaacagaagcaggctggaggggcccaggggcctgctaagctgggtcccaggagaaggataccatttccatccctcaagcacccatacaagtttatagagggaaaccgcacaagctgccctctggtggcagatgcttgaaattccagcagaggcccatctgtctcacaggatgggtcaaggcctgcctagcaaggtaggg

SEQ ID NO: 34363 - DNA, 2300 bp, Homo sapien
atatgagtaactgaggaagaaaggtgggcccgagcagggaggggacagcatgagtggctaccagagaggctgctgcttctcagctcactggcctcagtgcctactgcttttggtcctttccttggctgagctgcttgaggggcagtgtccctccctgcccctgtggtgcctgcttaagcccaagcctctgaccagcctgcttggagattcttaaggctggaccaggaaaaggaagcctggccccctaagccagtaggcctgactatgggccaaagggcctgtcctcagctggagttgggccttggcaggctacttggccctttactcatcaacgatagtttgagctgcgcaggtctctagcctatttcagagagctgggctgtggcagtcacccaacagcaggaaaacttggctccccaaggagatcgggcaggccagaggcccaacctgtggcccacttgccctttacccatggtcagcaccctcctccgttccagcttctccttggacaatccattctgaatacaaattaagactactcccatgaatacccctaggatcaaagcgtggcaagatgctcaagagcccagccttactggactagaccagggttccgtggatgcaaatctgtaggccagcctttcaaaagcatcccctaggccagcagtgctgaagaccaagagagttgagcctacagcagattttacccaccaaggctgtaaggaggggacttcaggcagccctgtgctctcggcttccacccggtggcacttggctgtgaggaaagaagtaggggtatttaagccatctctccactgagccctattgtgtgccgggcagggttctgggcaccagggaagtcggcactgctgaagccaactgatcgttaggtccctgccctctcagaactcagtctacctcgtgggcaacccaggcaaaaaaccagacagttacagggcactgttggtagtgctctagttagggactgtaggagcccagagaggtacctcatccagcttggaatctcagggatttgaggaggaagggtcacttagctaaggaagacctgaaggatgaccaggaattgaagcaggcaaagtggtgcaaaacaatccagtgttaacagtggctgcaatggccccaggacagatatcagccctataccgtcaaagaaacagaagcaggctggaggggcccaggggcctgctaagctgggtcccaggagaaggataccatttccatccctcaagcacccatacaagtttatagagggaaaccgcacaagctgccctctggtggcagatgcttgaaattccagcagaggcccatctgtctcacaggatgggtcaaggcctgcctagcaaggtagggaagtctttcctcgtgtctggccagcagccagactgctaacagctatctctcccaaccacaggcccagccctcctctctaccccctgtccccttcctgcggatatagacagcacttccctgcccccactgcagcccctggcgccccctaccccaggtgagtcccctacactgcagctaggctcctgcttcctgttgcccaggcttcagagcccacacaaggccatgcccaggccagtgcttgccctgtgttagtcgtttgtccatctgtccgtctgtcattttgcagccccctgctgtcctgtgcctgagaatgaagctagtgcaagtgccaagaggcctcagcctgggccacaccgtgcagcagagcaccacagaggccaggacagtacaggcatatgtggctcagcccgtgtgcagatgtgtgtgcactcacctctgttcttcatccctacttagaaggactctcctgggcatcccctgagctttgcccaagctgagacagcaccttttacctaagtccccaacctctgacccttaggggctgctggctcagggataatacctgtgcaagcagtaaggggcagaatggtctccacagaatagcaagaaagtgaagtgggaggtgtgtgtacatggatcccttcacttaggtcactccttcagtgacagactcagtgcaaatatgcaatggcaggggattccacagacatttgctgcccactggagctcacagcccagtatagcaagtgtagacatggcaccggcagcttaatgggccagctgagtgatggggaagccccaaggagacctcaccaggcctgatgggtcagggagagcttcgcggaaagagtaatagatcttttgcgagaagaaaacaagggaacagccataactggggctgccggggaacggagagggacaggaagcag

SEQ ID NO: 34364 - DNA, 2300 bp, Homo sapien
aagaattctgggatttgggagcaagtacagtgaccttaagacaagagcatgccctgcctttttaggaaaggcaaggagtttagtggaagctagagcaagaagtgagtagataaggtcagagttaaagggttgggtgatgtagggccacttctgagaatgagaagtgcttggtttttggggtttttttgtttgtttggtttgtttgtttgagatagggcctcactgtgttgcctgggctggagtgcagtggtgcagtcatgggtcactgcaccttctacctcccgggttcaggtgatcttctcacctcagcctcccgagtagctgggagtacaagcacatgccaccacacttggcaaatttttgtattttttgtagagatggagtttcaccatgttgccgaggctagtccggaactcctgggctcaagcgatctgtctcctttggcctcccagagtgctgggattataggtgtgggccaccacacccagccgagaagttttttttttttttaagcctgtttgtattgaatatatatcatattttgaagaataattacatgatgccaaaactatggaagtacaataaaatctcctttccctgtctcttatctgattggaaactgctccccccacaaagtaatgtggcatttttttgtttttcttttttactggcaccacccgttgtgaacctaggcattagtttctttatatatccttttaagagttttttatttttaaatttttattttttgttagtagtgatagtgattttttttttttttttttgacagaatcgcactctcttgctcaggctggagtgcagtggcacgatcatggctcactacagcctcagcctcctgggctcaagtgattctcttgcctcagccttctgagtagctgggaccataggtgtgcaccaccagtcccatctcatttttgtatttttcatagagacagggtttcaccatgttacccaggctggtctcaaacttctgggctcaagtaagtcacccaccttggcctcccaaagtgctaggattacaggtgtgagccacagtgcccagcctattattattatcatcattttttgtagagacggggtgtctctatattgcccaggctattcttgaacttccggccttaagcagtcctgcctcagcctcccaaagtgctgagattacaagtatgaaccactgtgcccaggtttagagtttaaaaaatgcctggataagcaaatattgacgtttttaaattttcttatatagttggaatacttcctaaaaagctattatttatttcattaaaaacccttagctgggtgcagtggctcacgcctgtaatcccagcactttgggaagccaaggggggtggatcatctgaggtcaggagttcgagaccagcctggccaactaaaaataaaaaaaaattagctgggtgttgtggcaggcacctataatcccagctactcaggaggctgaggcaggagaatcgcttgaacccaggaggtggaggttgcagtgagccaagatagcgccattgcactccagcctgggcaacaagagtgaaactcagtctcaaaattaaaacgaaaacaaaaacctttcgctggccaggcacagtggctcatagctgtaatcccaacactttgggagggcaaggtgggtgaattgcttgagttcaggagtttgcaacatgatgaaaccttatctctacaaaaacaaaatacaaaaatgagccaggtgtggtggcatgcacctgtagttgcagctacttgggaggctgaggtgggaggatcgcttaagcacaggaggtcgagtgagccatgatcgcggcactgcattccagcctgggtgacacagtgagatcttgtctcaaaaacaaacaaacaaccctttgcttggcttttccttattgaaattgttctttctttttttttttttggatcctggcaatgtttcttggctctgccattttctctcagcattgtttactcctccaacattttgctatgaaaaagttttagccatacagaaaaatggaaagaattacacagtagacaaccatgtagccactgcctagattctacaactgaaaacactttcagtattgattttggtctttatgctggtatgtatagtctaagtaatcagcttcctgaaactttatggagtaattattctcctattaaggaaattttggggcttttcctgctttgttcctacaccaaatagtctcacacatgtgtctagggtatttggaatttgctggttacaatatatgtacatattcagcttttctgag

SEQ ID NO: 34365 - DNA, 2300 bp, Homo sapien
tggtttaaagggcagaaaaacctgcccccagggagttattagattgagagtggacccaggaatctgcatttttcttgagccaatttatttttaaagttaaaaaatttgaatatgtaatacattcatgtgaattgatacccaaaagatacaaaggggtataaggtgaaaaattattctaacccatccctcagtgacctagttcccttcctctgaggtgaccaatttcttgtgtatctttcctgagataatctatacatatagcaccatatacaagcaaatgaaatatgttttatttatttttttgagactgggtctcactctatcacccaggctggagtgcagtgacaccatcttggctctccgcaacctctgcctcctgggctcaggtgatcctcccaccttaacctccagagtagctgggactacacgctcacaccaccacacccacctaatttttgtttttttgtagagacggggtttcaccatgttgcccaggctggtctcaaactcctgagttcaagtgatctgcccacctcggcctcccaaagtgctgagattacaggcgtgagcctccacgcccggccccaaaatctgttttaaaagcagacatttcttggtgattctaataaagggggttctcagacatatttggaaaaatatatccctacttttatgccagaccctgtgctgggtccccgggctgtgtgacctgacactgcacagtcctgcttagaatgcttaaagagagttaataaggtaccaccttctatgccataggcggggagcaaaggggctccagtgggccctgcctaggaggcctgaagctagagctgctgagggcagggctgtgctgcaaagaaaatgtctgagagctgcaggcgtttcatcttctgtcatcagctgtggcacctggcagacactggataggcttgtagacaaagacctggtaactcaaggagctgcttggccttcctgcccagtcccatcccagaggcactgtacatctctggtttcttcagggggccctgtgtggaagtatcttttgtcttcctggtgtcagggatatcatcacgtgcctgttggctaggcgagcccggcgcccagtctcctaggatggggagagtaatgttcccgagcagaacagggtggggctttcagactactccctttcctttacagctggcttcattccatcgacctcatcaaagccttcctgggagcaccctagagaagagttacgtccaggccgggccctggctgcctggttcacggcggaatccccagcaccacgcctcgcacgtcgggctcaaagcatgtttagtgaaggagtaggtacctactgctagatggagccatctctctagacttggggtttccctataacgatggctatgtttggcatggaagcctctttagaagtcaatagtaggaaataagggctaacagcacctaattgtggagtaaggttcaaatcctagctctgccacttaaccgttccgaacctgttccctcactgcagaggcgaaaaggctaacactatttcacctcggagggttaccgtggagaatggaagctggacaagctgtatcagttcagtagtaaaacacacacacacaagcgccccacccccaccccaccccaccccaggaatgaacacacacacccgcgcgcgcacatacacctcaggaatgaacacacgcgcgtacacacacacgcagccccccccaggagtgaacacacacacacacgccccgttctgttgttcccaggaacacacacagagacgcacacactcgcccggttttgttttttccaggctttttaactggggtctttcactcggcttagggcaccgctgcctgaaagacctttctaggccagtcggggtccggcacccagttgacgagacagcgcggcgctttcagagctggggagaggcgaaaactcttccggccccccgatcccccggccagccgcccccggcagctccttgccgcctcccggcctgggcccgcccagccgttctcggcctgccgtcaggcgatctcggcggccagcccagccgcgatgtgacgccgcgcgccccggggtcctcggcgcctgcgccctctcctataaagcagacgccgcgccgcgctgcgacgctgtagtggcttcgtcttcggtttttctcttccttcgctaacgcctcccggctctcgtcagcctcccgccggccgtctccttaacaccgaacaccgtgagtagccgcccactgaactggaaagggtcgtggctaccggattgcgtgccggctggcc

SEQ ID NO: 34366 - DNA, 2300 bp, Homo sapien
gctgggtgcggtggctcacacctgtaatcccagcactttgggaggctgaagcaggcggatcacctgaggtcaggagtttgagaccagcctggccaacgtggcgaaatccgtctctactaaaaatataaaaattacccgggcatggtggcgggtgcctgtaatcccagctacttgggaggctgaggcaggagatttgcttgaacctgggaggcagagtttgcagtgaaccgagattgcaccactgcactccagcctgtgcaacagagtgagactctggctcaaaaaaaaaaaaaaaaaaaaaaaaaaaagagagagaatctaggcaaagagaaataatgttgattctgttccatatgtcagaccttggaaggtcaactgcatgactgtggctgagactttgtacttgggagtgtgcagttttaaatcctgaccactatcttaggcaagtcccttctcttttctgagtgcctgtctgcttcttgccccatcagacagttctcacacaggttcatggcaacggtaaagaataagattagacagcacactgggtatggctttataatcacgggcactaagtgatgattttttccttattcattccacttggtcttaactcttacccttctattgtttggggatgttaactgcaaaacagggacagaatttgggctaaagggtctttttcccagtctggtaaattaagtatgtgataagacttctagaagagtagatttaaggtactttcttttgtgcacactaatgggaggtgtgaagggaaagcagaattgcaatttccagcctagggaggccaagccagtcggccttgccaaacacgttgtcttggataaaggaggattttcagtcctgctattggctgatggggcctccagtgccttcttcagcctgttggtggggatgatgccctcagagccgcagagtgagcagtctcctcccaagcatcgctgagcacttgggtgtggaagggttgcctgatactgagggtggggttcctggaagacaggcgatcaggttcagctcttgccttgccctttatggttaaatgttctttggaaagcttctatatctttcaaatcctgggggcattatgatctctcttctgcctatcccaaaccatcttcagccagtactgttgggagaatacaagctccagggcatggtccctggtccgtctggatgacccctccggatctggcatatagctggcgctctatggaaccagatatttatgtaaaagcagggacaatggaatgtgaaaacgtttcgcaaactccaaagcgattcataaccagacagaggtccaatcctagggtatacgagctctctcttttaagcacgtatcacagctgcttctcacgccaccgagacgcggtcaggacaggtgcatccatcttctctgggcttcccctcttgaaagtaggccagggcgcgcaggggttgagggtctctcattcccagagagaattaaacttggaggaaagcaaccaccggcgaggagcggggcgcgtggaagcgagccgcggtccgaggcccaaagaaaagcccaagcctcgcccccgccatcgcgcccgacgagacacctaggtccggggacgggtgtgtgccgcggaagtcaggtgcactgcgcagcactcccccggtaggtacacgctcctccacctacgagtgacctaattacaaggtgccagccgcgcccagaggtgggggtggttaatccaagcggccactcgctgcccgttcctgcccccaaagatgacggaaacccacacgattacagagccgcagcaccccagatgagccacggggtcgcaattctcgtttccgtgatcggactgccaggccccaggtgaggagctgagttcatcaccagagcggccttcccaggggaaccagttacaggctgccagtggccccggcttccatccggtctgcgcctgcgcgcggcccaagccctcgcctctcctggaatagtgctcagggattagtccggttcgccgctgtgcgcactgcgcatgctccagctccatccttcccttcccccaccaccccgccctccgggagccacgcccaaaaagtcaaggcgcttcagttaccagccggctacgtcgcgcctgcgctttgacccccagtttgcgccccaactccggtcgtgcggccgcccggggagggctctgcagttgcgcagcttgctccccggcccttttcccctccgctccccgccgcctcctgacgccgggcgtgacgtcaccacgcccggcggccgccattacagagagccgagc

SEQ ID NO: 34367 - DNA, 2300 bp, Homo sapien
tttttgagatggagtctcgctctgccacccaggctggaatgtagtggtgcgatctccgctcactgcaagctccgcctcccggattcacgccattctcctgcctccgcctcccgagtagctgggactacaggcgcccgccaccacgcccagctaattttttctattttttagtagaaatggggtttcaccgtgttagccaggatggtctcgatctcctgacctcgtgatccgcccgcctgggcctcccaaagtgctgggattacaggcgttagccactgcgcccgtctgaataaccttcaaagaaaagacaattctgaatattttaggtgatcaatgaaaacgatgaccacttctcctttctctcaatataaaccctagcagcatagaaaaaacttgagaagcttcaaaaatactaatttatttacgctatcccaattaaatcaggtgctctggcattggggcaggggtgtggaggtgggggttgggatgctttctaaaagctctccaggtgtgatttaaatatgcatgctgggtgggacccaccagactagatttattaaataatgcctttcctcttatttagcggaagcatagcgagatttcgcttttttacatttaactcattttatagaagaaagcaaagaaagccctattcaataaagaaagcactccctaggcacttggtctagtgatatggtggttattcattagggactgtcattccagttgaactctatgtctacttaagcagttagacactggcctctttatttccgtgctcttgtacatcatttcgtatatggtggaactcttcgaattacttgctttcctagagtttgacatgtggtgagggaggttttttttctttaaaaaagattactagcagttggaaaaaattaaaaggcatatggcaagtgttcaagaaaagtttttgatttaagaaccatcttgaccgggggcggtggcttacgcctgtaatcccagcactttgggaggccgaggcaggcggatcacctgatgttgggagttcgagaccagcctggccaacatggtagaaaccccgtctctactaaaaatacaaaattatccgggcgtggtggcacacgcctgtaatcccagctactcgggaggctgaggcaggaaaatcacttaaacctggaaggaggaggttgcagtgagccaagatcagcgacactgcagtccagcctgggcgacagagctagactatctcaaaaaaaaaaaaaaaaaaaaaaaagatgcagatccttcctatccacattcaaaagcaaccttgtgaggaggctcagctgcgacagcaatctgtactcccctcccccattcccaagcacagcactcttccaccttgcgcctacccagagtaggtttccgtttcttcccacttccccttccgggtcgggaccctgcccatgttccggtcttgcgcacgagtctagaacgcagcaactccgccggcgtttccatggtggcaagtggccggttccttgcggggctgagcaacaaagtagtatcagtgttcggtggctccactggaactacgcagagccagaccagcgggaccacagaatgggctgaggcggcggcggctgtttggataaagtcaacagcgggacgtggggcgtgacgccggtccggcatcctaagacgtgtggtttgagttgcgggcgagaccaggctttttttaggaccttgggcctgataagtgggcgactgcagtagtgcgggaacctattatttgacaggaacatgacaggaagtgtagggaccccatgcttgatggatggtgacttatagtgtggtagtctcagtgttgatgggcatgaccgagacagcaggagtacccctaagttctggtgagaggtggagcctcagaaggacaccttactcaagctgtctttagttcccaaagacaaaaaggctcagtggaaaagattccttttttttttttaatgtctctatatttgagactgtgggtttattgtggatatgcattatctagttttaataaataaaagtataaacgtttaacattttccattttctttctttatttctataaagtagtaaaagcccagcttgaaaatggagatgtatgaaacccttggaaaagtgggagagggaagttacggaacagtcatgaaatgtaaacataagaatactgggcagatagtggccattaagatattttatgagagaccagaacaatctgtcaacaaaattgcgatgagagaaataaagtttctaaaggtttgcttcttttgccttaatcatctaagtcaaaa

SEQ ID NO: 34368 - DNA, 2300 bp, Homo sapien
ggcctgccataacctacttgtagaaggaataattttaaagctattaactgtatgctgttatcagttctgtagctctggattatgagttcattgagggcagggactcagtttggttcatctttgtcctgggcaaatttttttattttttgagacagagttttgctctgtcacccaggttggagtgcagtggtgtgaacagggctcactgcagccttgaccttctgggctccagtaattctccttcagacgcccaagtagctgggaccacaggtgtgcaccaccatgcccggctaattttttgtagagatggagttttgccctcttgcccaggctggtctggaactcctgggctcaagtgatctgcccaccttggcctccctgggattacaggtgtgagccactgtgcgcagcctccttgcaaatatttagcccacaacaaataatatgcttacaccaagtttgagcccactataagatttactatgacattcttatttatagaaggtattttatattgtggttgaataactttctttttttttttttttttttttttgagatggagtctcgctctgccacccaggctggaatgtagtggtgcgatctccgctcactgcaagctccgcctcccggattcacgccattctcctgcctccgcctcccgagtagctgggactacaggcgcccgccaccacgcccagctaattttttctattttttagtagaaatggggtttcaccgtgttagccaggatggtctcgatctcctgacctcgtgatccgcccgcctgggcctcccaaagtgctgggattacaggcgttagccactgcgcccgtctgaataaccttcaaagaaaagacaattctgaatattttaggtgatcaatgaaaacgatgaccacttctcctttctctcaatataaaccctagcagcatagaaaaaacttgagaagcttcaaaaatactaatttatttacgctatcccaattaaatcaggtgctctggcattggggcaggggtgtggaggtgggggttgggatgctttctaaaagctctccaggtgtgatttaaatatgcatgctgggtgggacccaccagactagatttattaaataatgcctttcctcttatttagcggaagcatagcgagatttcgcttttttacatttaactcattttatagaagaaagcaaagaaagccctattcaataaagaaagcactccctaggcacttggtctagtgatatggtggttattcattagggactgtcattccagttgaactctatgtctacttaagcagttagacactggcctctttatttccgtgctcttgtacatcatttcgtatatggtggaactcttcgaattacttgctttcctagagtttgacatgtggtgagggaggttttttttctttaaaaaagattactagcagttggaaaaaattaaaaggcatatggcaagtgttcaagaaaagtttttgatttaagaaccatcttgaccgggggcggtggcttacgcctgtaatcccagcactttgggaggccgaggcaggcggatcacctgatgttgggagttcgagaccagcctggccaacatggtagaaaccccgtctctactaaaaatacaaaattatccgggcgtggtggcacacgcctgtaatcccagctactcgggaggctgaggcaggaaaatcacttaaacctggaaggaggaggttgcagtgagccaagatcagcgacactgcagtccagcctgggcgacagagctagactatctcaaaaaaaaaaaaaaaaaaaaaaaagatgcagatccttcctatccacattcaaaagcaaccttgtgaggaggctcagctgcgacagcaatctgtactcccctcccccattcccaagcacagcactcttccaccttgcgcctacccagagtaggtttccgtttcttcccacttccccttccgggtcgggaccctgcccatgttccggtcttgcgcacgagtctagaacgcagcaactccgccggcgtttccatggtggcaagtggccggttccttgcggggctgagcaacaaagtagtatcagtgttcggtggctccactggaactacgcagagccagaccagcgggaccacagaatgggctgaggcggcggcggctgtttggataaagtcaacagcgggacgtggggcgtgacgccggtccggcatcctaagacgtgtggtttgagttgcgggcgagaccaggctttttttaggaccttgggcctgataagtgggcgactgcagtagtgcgggaaccta

SEQ ID NO: 34369 - DNA, 2300 bp, Homo sapien
cctcaatgaactcataatccagagctacagaactgataacagcatacagttaatagctttaaaattattccttctacaagtaggttatggcaggcctggttaacaaggacagccagtgattcttgctaatacacagctgtaagactttatgatgcacattcactgaatcagttaaaagtgttatatcattttggaaaataataaactgtttccaaaacaattataaatccctgtagtctctgaattccttacctctattgcctccagttcccatcttcaggacttcgttggtgggtcaggaggactctgagcacttttgtatccattcgtcagctcaacagggaaagagggggtaggaggaggacctcagcattgccctaatcttgcccatagttccatggaaccagaaagggttaacttttcccactttccttgtacctccctttcttcaaaccctgaattctgtctctgctttcagtgactgccttgactgataaattacaagggtttttttggttgttgcgggatttttttgaggcagggtctcagtggcatgatgatggctcactgcagcttcaacttcctcgtctcaagcgattcttctgcctcagcctcctgagttgctgggactattggtgtgcgccaccatgcctggctaattttactttttgtagagacaggatctcctatgttgcccaggctggtcttcaactcctggcctcccaaagtattaggattacaggcatgagctaatgccccagctcatgagggatatttttaagatatagtttctctttaccatttttctccatgtaaccctacctgtgtgtcttcctcctttgctattggaagggttaggactgcaatggcagaaaggcaaaaaaattaagaatattcagcttttaacttaaaaaacacattgcgaatgtctaacaggacctatcaagagttaggcctggctaacctgatcaccaaggcagtcactggaagcagagagggaattcagggtttgaagaaagaggtacaaggaaagtcagaaaagttaactctgcttccatggaatcaggggcaaggctgaggcaatgttaaggtcctcattccaccctccctttacctgttgaactgaacagttccccaaatggatacaaaagtactcagagtccttagtataacaaagtcctgaaggtaggaattggaagcaatagagggaaggacggtgaccacagaaaatattcaaggtctttgggaggtcaacacctctgaaccccctggtggtggggggcccttctggcccatttgcacctttcttgctagtgtagaaaacctgaagttatctcaggctagatatataaccctcactcatgtctgccggagctctcccccagaatatgaatcatatttgtaggtttctttgacaaccaaccactcattgatatgcttggaagactgcacccccacattccttaaaaatacaatggtactcccccaccataggcaagtccccggactctgacacatatcttcaattgaaagcagacccagaaaggaaaaactgcataatacaccatcctttaatatttgcccagaatttccaatactagaaaccccactgcaaagcagaaagactatctggtagcttcaaggaaccatttcaggagattgttgtgtgggcctcagtattcaaggctgccttagaagatcgtgcgatcctctcactcttcttgccccaagtaccagagttaataagccactgaaccaaccagaggggaattatttttggtcccggtttaaagaaaacaaaacaagctgttgattctgccatgacctcttgggtaatgttgtctctatacctgtgataaacagaaaacaactaataaaggtttatcccgccctcaccctcttaaacccgcttcacagacctggctgaaactcacatccaggcgaggcgctcacgtgacccgttctaaacgcgtcatagggacacgtggttctagatacttctccccctcccactcaggggtggattgttgacaaggccgcgggcagtcacgtgatcttacatcatcccacctcctttccctgaaatctctggcccggatgcgtccctctttctccaccccgccgagcctaaactagtgacggggagggagacgggatagtgtttctgtttcgtggtctttgaatccacaacctctagtctgaacacagagaacacaaatttgtctattacttcaggaagcccagggggaaccgcgccccgctgaagggctcggggaaggcgcgctcccgcgtcccgcccc

SEQ ID NO: 34370 - DNA, 2300 bp, Homo sapien
gagccgaaatagcgccactgcacttcagcccgtgcgacagagagagactccatcttaaaaaaaaaaaaaaaaaaaaaaagttctcctcctatttattacttgtcccttcctatgatctcactctatcttcactccaagtcttcagcaagactgtatatgaactatgtgatagaaggtactgtttcaaggctgacagtgggccattttatctataccacaagtattgctgaaatgcaaacatttagatttctttgccactttctattccagaaataaaagatgaaattctaaaatactggttaattttatatgtgagatagccacagaaattgtaaaagatgagaagaaaagcagtttaagtgaggaaacaatgagagaaaacctattagaaaattgaaacttgattttgattaactaggaagtcttcaaaaacaaactaaaggaggctgggtttagtagctcctgcctgtattcttagcactttgggaggaggatcacctgagaccaggagtttgaggctgcagtgagctatgattacaccactgcactccaacctgggtgacagagtgagagaccccggctctgaaaaaacaaaaataaataaaagcaattgaagggaagtcattccacaatttaaacttgctttatgcagtggatgcattcctgaaaggctattattattttatcagggcttcatatcatataaagaaatggaattcacgatgacaaacctatggaaatgcattttcttcttctctttttttcatagcttcctactcaaattaggaaaatgcattttctttttttcttttttttttttttttgagatggagtttcactcttgttgcccaggctggagtgcaatggcgcgatctcagctcaccacaacctccacctcccaggttcaagcgattctcctgcttcagcctccctggtagctgggattacaggcacgtgccaccatgcctggctaattttgtatttttagtagagacggggtttctccatgttggtcaggctggtctcgaactcccaacatcaggtgatctgcctgcctcggcctcccaaagtgctgggattacaggcatgagccaccgcacccggcctcttttttttaaaaaaaaaaaaagacaagaatcttgctctgtcgcccaggctggagtgcagtggtgcaatctcggctcactgcagcctctgtctcctgggttccagcgagtctcctgccccagcctcctggatagctgggattacaggcacatgccaccacacccagctaatttttgtatttttagtagagacagagtttcaccatgttggctgggctggtctcaaactcctgaccttgtgatctgaccaccttggactcccaaagtgctgggattacaggtgtgagccaccacacccggcctgcagggtccaatgtctcttatttgccactatcactagtaccaagcacagtgcctaccactgttgagtgacccctcctgtaataaacttacactactgcctcccaaatgaagcccctctcccagtatttatgcctagacctatttccttaatggtggggactaaacaagaaagaggagcagagagggggtacagaacagacacttagctgaggaacattaagaccaaaatcacagagcaaagcaggactgcaacaagtatttcttaagaggctatgtgcaaggtggctcctcaagtctagaagacccaagcctcaggcttcctccagaaaagcagtctgggagacagaatttacaaatcaactggctgaccggacgaagccccggaatcctgtgtcaattcgttttaaactaaggccagatgctttttggtaggctgcctcttcccgtgagctggtgggtacttcaagtctatgatttgattctcatttcttaaaaaaggatgagtatgtgtggtagttgggtatggtataggtatggtataaatttcaggtggaaataggaattaaaggatctgatttgccttggtgggggaagaaaaaggccataaaagagaatcgcacttaaaggtacattgttgaaaaatctaaactataaaattaattacctgccattattacatcaacaacaaaaaggcattttattttattatttttattttttttgagacggtgtttcatttttgtcgcccaggatggagtgcaatggtgcgatcttggctcactgcaacctccacctcccaggttcaagcagttcttctgcttcagcctcctgagtagctgggattacagatgtccgccaccatgcccagctaattttgtttgtatttttagt

SEQ ID NO: 34371 - DNA, 2300 bp, Homo sapien
caagtgactctttgtgtgaagggaaaactttcctttgctctctgaaggttagtgaaaatcaattgacaaaaggcagattaagaggagaaaaggcagccaggcactgtggctcacgcctataatcccatcattttgggaggccgaggagcttggaccacctgagatcaggggttcgagaccagcctggtcaacatggtgaaaccccgtttctactaaagatacaaaattagccgggcgtgatgtcaggtgcctgtaatcccagctactcaggaggctgaggcaggagaatcacttgaacctgggaggcagaagttgcggtgagcagagatcacaccattgcactccagcctgggcaaaaagagtgaaatttgctctcaaaaaaaaaaaaaaaagagaaaagacatacaagtttattaatgtgcatagttaatcacagagtgattaccccatcatccagagtgtgaatattttagatgggtagtaaatgatttttagggtaattcaatgggcttgaagaacatgcaatggcctgggacaaagtctgttgggcctgcagaggagacaagggtttgtgacaaaagtctgtcctagtgtgttgaccatacttcagtctttcctcctgcaaaacaaattcacttaatgaaaactcagggagggaaccagagataattgtttcctttggcgttctggactaaatttaggcagataagggaacaacttcatcttgtgctttgggaggaacaaagaattgacagacaggagtgtgtgttggtggcggaggtcacagagaccttgaggcttcttcatcagttcagcatgtcaaaatacattttggggtgttggtttctgagccccaacacccagttactgtagttgaatgcttccagggatggaaaattcaccacttaaaaggaagctcttttttctctcagtgtgtctgctacctgagactcgaacagacagcagagtcatgccagctaaataaaaactttcaggtccagccagttacgatggctcatacctgtaatcccagcattttgggaggctgagggagacggatcacttgagctcaggagttcgagaccagcctgggcaacatggcgaaaccctgtctctatttaaaaccaagtccaaacttgctcatttcctctggacacattgtttctggctccttccagcatcttttgtaaacacaggtgtcactgttctggttaaaatccttcagcggctccccattcttgggatctagccaggatccctgcctggcctactggccttgctgacctctgcaacttcatcttctccattctctacctgccctgccccgccccccaacccctcctaccccctatcttgcaattctcttaccaggccatgctctctcttgctttgaccgactcccctttactcagaaaactgctcattcttcacttctccaggatcacttccctgaccccaagactagattgggtcccttgcttattcatggttgtagcacgctgaacttctctttactaatacttgtcaacgctgaaattctccatttacttgagcaattatgtcactaatgtccactcctccactccatggtaaagttcaggcgagcagggctccgaatgtgctctcattgcctctccagcacctagcaatgtgcctggcaagtattcacgggatggatggattactcgctccaggaaggcgggccccaaccttcgtggctgtggagacccctggaagtcgaccgtgacccgggccccctgatgtcgctcaggatgaggcggtgcccgggaaactctcagggcaagggcacagcatagctctggctggcatccagctgccaactggaagagggcgctccgaatctgtgtttagggacctcagttttcccaccggttccccgcagggtcgaccgcaaaagacccttgtagccctgggtagacccagggcaggagccacgggctgcggcggtctgaggagccaggagccgctctgtgcccccgcaggccgccgctccgggcgagggcgctccaggttggtcttctggagcagtcgtgcgctgatggggcccctctggccggcaggcggtggcgcagtgcgcgtcgggaaggcggcgggctatccggtcctcggctgcggcgggcaccatggtcggtggcgaggcggctgccgcagtggaggagctggtttcgggggtgcggcaggcggccgacttcgcggagcagttccgctcctactcagagagcgagaagcaatggaaggcccgcatggaattcatcctgcgccacctgcccgactaccgc

SEQ ID NO: 34372 - DNA, 2300 bp, Homo sapien
gctgaacccctcgagaccatttggaaaatctgtcgagggcttgaggaggaaattggatacatagcaggattttgctacagagcagaaatgagcatttactttccgagcaaagacagcccttctccaaggatgcccctgggtgtctctgtatgtacctccccaacccagcatgggtgccatgctcaaggttcagacagaggaccacaagccccatgctgcaccatgcataatgtccctcttcccctttgacgggggggacgatgggagcttggcagaatttaaccatccttagcagaggaccacgcctatgaagggccaatagggccagtgatgggctgtgctcctggggtgggggcaaccctcaacttgctgtcctcagtaacacagccgatagatgtctctgagaaaagagaccaacccagctgtgccaggcaactgactggacccctgacttggattcaggtcaggtctaaagatgccttctcccctattagcatcaggttcaaagccaggcttagccaaaccctaaacattccttacactttctggggaaccacgaaattcttcatgaagcccttaatttaaaaagcatcttgtaggctgggcacggtggctcacgcctgaaatcccagcagcactttgggaagccgaggcgggcggatcacgaggtcaggagtgagacaagcctggccaacagagtgaaaccccttttctactaaaaatacaaaaaactagccgggtgtggtggcatgtgcttgtaatcccagctactttgggggctgaggcaggagaatcgcttgaacttgggaggcagaggttgcagtgagccgagatcgtgccactgcattccagcctgggtgacagtgcgagacatagtcttaaaaaaagaaaaaaagaaaaagaaaagaaaagaaaagcatcttgtgctgggcacggtggctcacgcctgtaatcccagcactttgggaggctgaggcaggtggatcacttgaggtcaggagttcgaaaccaccctggccaacacagtgaaacctcgtctctactaaaaaaaaaaaaaattagccaggtgtggtggcaggcacctgtaatcccagctacttgggaggctgaggcaggagaatcacctgaacccaggaggcggaggttgcagtgagccgagatcgcaccatggcactccagcctgggaaacagagggaaactccatttaaaaaaaaaaaaaaagcatcttgttctgtctgctatgtgggctctaactggaattggtagggctatgggctccaggaggcttcattagccagaggacctactaggactgggcctgcactgatatcttgaggtagaggtgggggcctggaagctgggtgcagggctgaggcccctcactgggtctgcactgaacagctaggcccaggagccaaatcatggttgcagacatttggcttccattatctgactatttgggacagcctcaagctagacttgattactgcaaacctgaaatagttccttattagacagggctagctcaccctcctaaatgagtcttgttgggactctcggggtcttgcactgagcacacttcctcatcctatcctccagcccctctggcaggaaagtaggagcacccccagggcttctgccccgggcctctgcacagactccaggggcacctgtggggctgagggcaagtggcagcacagtgcctccggccaggactggcccagccctcttccctgtgcccagctcctccccatggaagaaaggggagaacaggactggctacttgaggacaccagggactgggcctgcctgagagtgacagttctgggactctccctgctcccggtgaatgccagccagggtgtggggcccaggaggctccagtgctttcccagtccaaaggtcactaactgcccagccgctgggagtgtgtgcagggggcggttctccagccagggaggtgcaggaataaagggggtgtggggagacaggaagaggctgagcttgtggggcctgagagcctctcccctgggcagggtggggtcattgggctgccttagattcccccccccacctctcagcctgctgcctctggacaaagctctgcagaggagccccatctccttcagccccctcctgcctttggggtgcaagtttcctgaaggacttgagtgagatgtcaccaagcaacaggctgtcaggctcttggcagcaagtactggcccagcgactcgcggcagagtctctccttggggcgtctgtccttatcaggggtggatgctgtcagacttgctaatggt

SEQ ID NO: 34373 - DNA, 2300 bp, Homo sapien
tagagaaaaataccaccaattgaccactgagagccacagccaggtctaactggaaggtaatacccagaccatcctcttgccagacaattctcctcagactttgtgaatgaaggccaaggaagaagaaatgttgcagtgactccctttgagctcatatttctttcttgttgcaaaaactgcttatttcagcattcatcatctccctctttgttgggtagacaatccgccctgtcggaggatttgtgctgttattatgagtttgtttattattagatttatttctcctataagcaaatgtgttcacaacattccatcggggaatcttcttaattgtcacataaatgtcatcttatgtaaattgaatatttatcttcccatggaagggggtggaggggaaaggaagaataaacaatcttcagtcttggagagggaaggcgactccggtgtccattcacaactcacccacgtgccttcaaagccaaaggtgagctgaaaaattattggataatctgaggggcagccgaccatgagggggaagaaaaagttggccacgatgctttggggatgttgggccaggctccccacaacctcctcccgaggccagacccaccccctccccagctagaggcattccgaggaggttggagcttgacccccgattcctccccaaccaggaggccagtccttctccttcctcgagagaaggtgagctcggcgggcgcagcgggttgggtgggtgtggcccgcggctccgggaacagacccaaggccccgccaccgccggctagcagcccgacagcccgcccgcctggcgagcgcaggctcttcttccagaaactgcgaggatccgagcgtactgtttgtgcaccacaaggtcaagtcgggaagtggagccggaggaggaggggcgaggaggcgaagggtggggagaggggcgccccgcttcctcgccatgtgccagcctttggaagttacccctcggtttttaacctttcggggtaatgggaaggaagagcaaggaggaaggggtcgccccggggcaaaatcctgctggggccaggatgtgcaaccacccacccacccgctcatcactgccttctccaccccccggaaatgcggggcagcgctaggcgccaggaggcacccgggaggggggagggggcgacgagcccaatggggaccctctctacggaccgcccctcttttcttgaggtcgcctacaatttcaagttcccccgcccggaatgttagttttccatttggagtgggtgcggggaggagggccgcgccccctccccaagactcgcgttcgcccctccactcccctcctgccagcactttctgctcacttctggtgctgcaaaacgccacgcaatttattcgattcgcattttaaaaccagcgattcagaagcagggcctagggcgagggtcttccagcgctggagccccggggggcggggtgctcagtgcaaacctcgttccctccgcgagtgtcgcctccaggctgttatttgcaaagaaacgtctttttgacgcagggagaaatggcaaattttaagtacgtcattaatatggcgccaaaagatttttttaagtataagctcgcttttttttttttttaaggttgcggggggcgccgcccgggtctggggcgcgtagggggcggggtgtgagcagaaagtgtgagtgaaagagtggaggggcggggtatgtgtgtgagtgtgtgaagtgtgagcagacctgatgggacttgcacgggcgcagccgccgctcgggcccggccctggggacagggcgggctaggggcgccccagagtccatggggagtccgggcccagggtgccagcaggcgtggtggtggggctgcgagggagggcacccttcccccacggggcccgcaacgctacctggactccccgccggagccaaacaactgggcggggggttgggggggcggcgacgggggtgtcgggagcggagatccgagtgaataagaaaaaagtggctactccccctccctcgctcctcctgcccgcccccaccccacccccaccccaacacattttttttttctaaagagatcacaaggaagtcttggtttaaaaagaaacagaaacatacacagggggttggtgaatggtgccgaccgcggccatcgcagttggaggctattttttggggggggtgagtagcgtccatggagttactttgcgcccactcctagcggcaccggcttaggtcctgcgggccgaccgtccccggcggggggcgtggggcctgggacgccgcgggcccggc

SEQ ID NO: 34374 - DNA, 2300 bp, Homo sapien
tcacaactcacccacgtgccttcaaagccaaaggtgagctgaaaaattattggataatctgaggggcagccgaccatgagggggaagaaaaagttggccacgatgctttggggatgttgggccaggctccccacaacctcctcccgaggccagacccaccccctccccagctagaggcattccgaggaggttggagcttgacccccgattcctccccaaccaggaggccagtccttctccttcctcgagagaaggtgagctcggcgggcgcagcgggttgggtgggtgtggcccgcggctccgggaacagacccaaggccccgccaccgccggctagcagcccgacagcccgcccgcctggcgagcgcaggctcttcttccagaaactgcgaggatccgagcgtactgtttgtgcaccacaaggtcaagtcgggaagtggagccggaggaggaggggcgaggaggcgaagggtggggagaggggcgccccgcttcctcgccatgtgccagcctttggaagttacccctcggtttttaacctttcggggtaatgggaaggaagagcaaggaggaaggggtcgccccggggcaaaatcctgctggggccaggatgtgcaaccacccacccacccgctcatcactgccttctccaccccccggaaatgcggggcagcgctaggcgccaggaggcacccgggaggggggagggggcgacgagcccaatggggaccctctctacggaccgcccctcttttcttgaggtcgcctacaatttcaagttcccccgcccggaatgttagttttccatttggagtgggtgcggggaggagggccgcgccccctccccaagactcgcgttcgcccctccactcccctcctgccagcactttctgctcacttctggtgctgcaaaacgccacgcaatttattcgattcgcattttaaaaccagcgattcagaagcagggcctagggcgagggtcttccagcgctggagccccggggggcggggtgctcagtgcaaacctcgttccctccgcgagtgtcgcctccaggctgttatttgcaaagaaacgtctttttgacgcagggagaaatggcaaattttaagtacgtcattaatatggcgccaaaagatttttttaagtataagctcgcttttttttttttttaaggttgcggggggcgccgcccgggtctggggcgcgtagggggcggggtgtgagcagaaagtgtgagtgaaagagtggaggggcggggtatgtgtgtgagtgtgtgaagtgtgagcagacctgatgggacttgcacgggcgcagccgccgctcgggcccggccctggggacagggcgggctaggggcgccccagagtccatggggagtccgggcccagggtgccagcaggcgtggtggtggggctgcgagggagggcacccttcccccacggggcccgcaacgctacctggactccccgccggagccaaacaactgggcggggggttgggggggcggcgacgggggtgtcgggagcggagatccgagtgaataagaaaaaagtggctactccccctccctcgctcctcctgcccgcccccaccccacccccaccccaacacattttttttttctaaagagatcacaaggaagtcttggtttaaaaagaaacagaaacatacacagggggttggtgaatggtgccgaccgcggccatcgcagttggaggctattttttggggggggtgagtagcgtccatggagttactttgcgcccactcctagcggcaccggcttaggtcctgcgggccgaccgtccccggcggggggcgtggggcctgggacgccgcgggcccggccgcctccctcgccgcgaccccggatggatgcgcgccccccgccctcccgcgccggccccaggagctcccggcttcgggagcatccttcccgcgccggtccctgcagcggcgcgtagccgagggcagcgcccgtcaggggggcaccgcggagcaaggtaagatccagcccccggcggatgggccctgcgcatctccacgacgttatttggcgtttttgcaacagatctgccagcgctcttcgctccctcgctctctcttgctcgctcgctccctctctctcctgctggctgcctgttctaggaagccagcgcggagaggggggggatgcacagcacaggggagagagattgcgcatgttggtcagtcgtgttttaaagagtacagtgcggggaggctgagaggggcgcatgcaacaacaacttttggaagggtgagcttggcgaccttcttt

SEQ ID NO: 34375 - DNA, 2300 bp, Homo sapien
gcatgagccaccacgcccagcctggtactattattattaacccattttgggggatgggaacactggggcccagagaagtttagtggcttccccagagtcacacaataagtggtgaagctgggctttgagtccacaccctgcgggcaggcctctccaagctgcctcagcggcagagctgtggccacaaaggaaggctgagctggggagggatcctgggactgcagcaggcacatctttgtatccaagggatttggcctctgtcttggtcctggggccgggtaacactgtgtagcaggacactcactgctcacatgacattgtatctgggagaagggcagggtggcatgtggaccttttgtctggaaagggtcaccctgggccgcagccgtgtaaccaggtagggctcctcctgacaccagaggagacgtggcctcagttctactcaagtcaatggagttttcaggctgttggtaagaagggggcttgggcttctgagagtacgtagacaacccctgccttgtccgcagccttgaagggtatgccgaaggacctagaatccagctggcactacctcacttgttgctggcacagggcattgcccatgatggcacataggatacctcttacaggccctagcagtgttagatccaaactgctgggctttagctaaggccccgctaccctgatggcaggaagtgggatgagctctgggcaggtggatgtttatagggtaagcaaggctgcggatcagccctgactcccatcccccactgtgccctactgccctttgggttttctgtgtactgcctgttcacccacagtcatctgagtctctgcagggtgggcagatggtggaggaggaagtgaaggagggggtggaaggaggtgggccctgtgtggtgtcaaagcacacttgtccatcagctcctgagctggactggtcagctccctggagcccctatggcggcaggctgagggcccctcccttcatgacatcctgtcttgattttctaggatcctcccaccactggaaggcccccctgcccaggcatccccgagcagcaccatgcttggtgagggctcccagcctgattggccagggggcagccgctatgacttggacgagattgatgcctactggctggagctcatcaactcggagcttaaggagatgggtaggtgaccactgcattaagaatgggatcacggctgggcagggagggttttctccccatcccgagagggacagtggcccaggcagggctatggtatggcatggatctggagggagtctccatactgcattactgaatggggacctcactggttagtgtctctgtgccacctgaagtttctgcagctatcaggtgggggcaataatagcacatcagttacagggctcttgggactatagtggtaagcatgaatgttacatgaagagttagtgagcatgcaggggaggctaggatggcacatggggctagggtcaggatggcaaatggggctggggtcaggaggtgtgggccacctggctggagcccaataatgtgtcccaggaagggttaactcgaccctattcagccacactcagaggtcccctcatacacacagcacaagcagtgccttctccgtggagctggccgcatcccagagacacttccatgttaattgtacacatgtgtccctgtggtcacaggcaggctgtctaaagtcagaactccaggacaggtcaggggcctttgagatgggatggtccagaccattcagttttcagaggatggagctgcttctcccaggtccaacagtgggtgggcagaaaccctcccagacatctgccctgaattcctgcaactccaggagccaagtcctcttcaaagctcaaaggaggctgggctcctaacaccaccatgccctgctgtcctcctcacagagaggccggagctggacgagctgacattagagcgtgtgctggaggagctggagaccctgtgccaccagaatatggccagggccattgagacgcaggaggggctgggcatcgagtacgacgaggatgttgtctgcgacgtgtgtcgctctcctgagggcgaggatggcaacgagatggtcttctgtgacaagtgcaacgtctgtgtgcatcaggtgggcagaccccccagtcaccctcacctgtgccatgtatacacacgctgcctggcagcgacccccacttggctctccaggggcactgtggacagaagcccttaagaaggaggaggaagggaatggtgaggatgcttcatggtaccatgtgcacccag

SEQ ID NO: 34376 - DNA, 2300 bp, Homo sapien
acgtgccagagatgggaggctgtgtagcagtgtagcatggggctggcactggaccaaatgcagctgactgctgaccagacacagattggccagttccgctgactcatgaccaccctgctctctcctaggcatgctacgggatcctcaaggtgcccacgggcagctggctgtgccggacgtgtgccctgggtgtccagccaaagtgcctgctctgccccaagcgaggaggagccttgaagcccactagaagtgggaccaagtgggtgcatgtcagctgtgccctatggattcctgaggtgggtgagcgtggaggtgaggcagcccaaggaatagcccgtggggaagtgggtctgcatgggactcaggtagcagagcactgggaaaagaaggtgatggactcgcactaaaacactgagatcggccgggcgcggtggctcacgcctgtaatcccagcattttgggaggccgaggtgggtggatcacctgagttcaggcattcaagaccagcctggccaacatagcaaaaccccctctctacaaaaattaggagtgcatggtggcaggcacctgtagtcccagctactcaggaggcagaggcaggagaatcacttgaacctgggagttggaggttgcagtgaaccgagatcgcaccactgcactccagcctgggtgacagagcaagactccgtctgaaaaacaaaacaaaacaaagcacacactgggatctcaggtgatgggccagcaaagaatccaggccgcagctatagggagctttgcttgtggacttggacagagctcaggtggtgacttctatgagaaaatggggttagggaccgctaggagatttcaggagatagggatgaggtctggacagaagtcaggcagctgactagaggggaaagcaggttgtggggtccatctaaaccttagcagttgttccaaccaaagtcaagccacatgttcaaaacaaagataagccagctgaccttcaaagagaatcgggtgggaggccgaggtgggtgaatcacttgaggtgaggagttcaagaccagcctggccaacatggtaaccccgtctctactaaaaatacaaaaaaaaaattagctgggcttagcacatgcctgtaatcccagttatttgggtggctgaggcacgagaatcacttgaacccgagagacagagattgcagtgagccgagatcgcgccactgcactcctgcctgggtaacagaatgagactgtttaaaaaaaaaaaaaaagagaatcaggtggtaagcctaatgggaagttggctagtgggcctgctgctatggctgcggctaggatggtggggtgggtgtgtttctgagtccatgtgggagtgccacgggcaacaggctgggtccagagtcagtgagttagcagaggtcctgggtgcctggcaggccagccattttatttgaaatgtgaaatgttgaaatgcaccagagtttcagccccagccctgctgtgtggactgactcagattgaggccccactccagtgttgcctgtgcccagaagcaagccaggtggccctgtccataagtggcactctccttcctgggctcacagtctgaagcccacaatgcgggcttctgtgataacagttgtttgtgtcagcagtaggcacttgcttgcagatcagcatgttgaagactgggaccacctctgagtgtaccctgggctgggcatggcagagacagaaccaacagggactccatcatgaagaccctttggctcaggacctttggagagaattgctttttccatcctcaggcattagcaatggggagacaaatgtgccctgcctctgggctgtggggtggtctctgcccagtagacttgggcatagttgtagggctgtccccataggaagggctcagcaaaggcatatccccaggagagccctaaagaccttcaagaggagatcccacaatgaggcttttcttggtgcctagaaaaataagtaatacaaatacaaatcgtaacaagaactctgaagatgttattaacaaaggcctgagtgcagaaagaaggaggatcttgcatgtacctatgcgcacaccaaagcacctgtctgtcaaggcccacgcagtcttaagcacatacacacagtcaactacacacactgacggcacactcacacattcacagacaatttaagattagtctcagatgagcacacactaacacactcatccagtggtgagcttgggagagtgaggaggaattccggcctttgagccatgcttgtttggtgtcaggagggacttgggattca

SEQ ID NO: 34377 - DNA, 2300 bp, Homo sapien
acatctagccttgccaagttcaggtgctagtcatgaccatgtagagctcaccgtgtacccaaagactgtggcagcttcctggctgctggagctttccaggccccctatcttctgtttattcactcagccagcattaactgagcatggactggatagggttgctgcccttgtggaatgcaccatctggagagagagaggaatgtggtatcgcagacgctacagttgctgccagtttagggatagaagtatcagggatgtcttcccagaagcagtgatgctccaacaacatctcaggcacttggctgtggccacatatcggctgcagaaggagaagcccatgcaaggcacccacagttgaggaagcagagggtggcaagccacgagcagtgccctcaggcacaggattccagaagcatgggcaagagcctggagggtccacatccccacattggttctggggacatttgcaactccttgtcttgagtgtcaacaacaggcagctctttgttcagggcagggcagggtatttggagatgactggtttgccctgtccaaagctgctgctcacactgttgagaggcttgacgcctggggtgggacatgggctgtgtgcatatcggcgaggctgtctggcctggcggctggacaaagcctcctagtggagatgatatttggcctgtgaactgaatcaggtgaaggataggagaagaaaacagcatatttggagacttagtggccagagcatgtcttggcagagaaactggaaggaggctggaatggctgcaccaggcagaaggaagactcctaaagtggggatgacgggtaacctgggtcacatgtgcgagatcttcttgtagcctgggggaggagcttacactgtcctgagagcagtggggagcctcaggagcctgcctccagagtatctaggcattagttacatgccatgttacagatgagattgcccaggcacagtggctcatgcctaaaatcccagcactttgggagaccacagtgggaagatcacttgaagccaggagttccagaccagcctgtctctacaaaaaaaaaaaaatacaaaaattagctgagcatggtgacacatgcctgtattcctagctgcttggggagcagaagtaggattgcttgagcccagtagtttgaggctgcaagcgagctatgattacaccactgtactccagcctgggtaacagagccaggctctgtctctaaaaaataaataaataaacagatgtggccaggcacagtggctcgcacctgtaatcccagcactttgggaggccaaggtggaaggattactggagcccaagagttcaagaccagtctgggcaaaatagcaagaccctgtctctacaaaatttgaaaattagccgggtgtggtggcatgcacctgtggtcccagctactcaggaggctgaggctggaggatcgcttgagcctgggaggtcaaggctgcagtaaactatgattgtactactgcgctccatcatgggcaacagagcaagactctctctcaaaacaaaccaaaacagatgagactgaggcctggcctgaactgaaaggatacaagggccaggggtgcaccctgaatctcccatctagtttgctgcctgactttgaaagccaaccaagagaccatggcaggagactggttcagggttgctgaccctggggttaggaatggaacccaagcctcttgacccctcaggtagtgttccttccacctacatgtctagctcctcagcctggcattcaaggccctgccctgtccagactcccttccagccattcttcccaccacccacactctctcccaagactacaggttgtgcaggtcagactggagtccaggtcctgcgagggcctctcctcgtggccctgtggccaccccaagtcccccacaggccacagtggacagttggtccaccccaccatgccagccatcccctaactccaacctttttgctgtggagggtgagcactggctgatggaggactcctgggctgccacgcagggatcttggtgctgaccgaggccactcagggtaaccatctccctcctcctctcactttccctgacacagagcggtctgggaggagagcaaagggcaagaagagtgactcgaagaggaagggctgcgagggctccaagggcagcactgagaagaaagagaaagtgaaggcggggcctgactcagtcctggggcagctgggtgagtgagggccatgctggcctgcagacacggcaggcttgaccatcaccacgcttgcagctctgtctg

SEQ ID NO: 34378 - DNA, 2300 bp, Homo sapien
ccatccagcctcccaaagtgctgggattacaagtgtgagccaccatacccagcctatactaattttatttgtaatagccaaaaactggaaacacctcaaatgtccatcaaaaaggaaattgataaataatggaatgctacttagcaagaaagatgaataaaccactgatacattcagtcatattatgctacatggcagaagctggtcataaaaagttatctactgtatgataccatttatatgaaattctagaacagacaaaactaacctgtggtgatagaattcagatcagtggttgcttccggagatgaaaatggggattgactgggaaggggctagaggagactttctgggatgttaacagtgttctgtatcttaaatagcctaattcagacttcttttataaagcagaaagtatattggggattattaccatagaggtggtttgctaactaagcattatcttttccttatgaacagtgactttgaatatagattgtattaaatattttattcatttggcaatctacacatagaatttctttctttcttttttttttttttttgagacaaagtctcgctcttgtcccccaggctggagtgcaatggtatgatctcagctcactgcaacctccacctcccgggttcaagcgattctcttgcctcagcctctcgagtagctgggattacaggagcctaccaccactcccggctaatttttgtatttttagtagagacgggatttcaccatgtttgccaggatggtctcgaactcctcacctcaggtgatccgcccccctcggccttccaaagtgctgggattacaggcatgagccaccgtgtgccctgcccttttttttttttttttttttccgagatggagtctcgctctgttgcccaggctggagtgcagtggccagtctcggctcactgcaacctccgcctgccacattctcctgtctcagcttccctagtagctaggattacaggcatctgccaccacgcctggctaatttttgtatttttagtagagacggggtttcaccacattggccaggctggtctcagaactcctgatgtctcaagtgatccacccgcctcggcctcccgaagtgctgggattagaggcatgagccactgcacctggcctacatacagaatttctttatttattattgttattttttgagacggagtcttgctctgtcgcccaggctagagtgcagtggtgcaatctcggctcactgcaagctccgcctcccgcgttcatgccattctcctgcctcagcctcctgagtagctgggactacaggcgcctgccaccacgcccagctaattttttgtatttttttagtagagacggggtttcaccgtgttagccaggatggtctcgatctcctgacctcgtgacccacccgcctcagcctcccaaagtgctgggattacaggcgtgagccaccgcccccggcccagaatttcttcttattttcagacagaatctctctctgttgcccaggctggagtgcaatggcgcaatctcggctcactgcaacctccgcctcctgggttcaagtgattctcctgcctcagcctcctgagtagctgggattacaggcacctgccaccatgcctgggtaattttttttttttttttttgagatggagtctcgctctgttccccaggctggagtgcagtggggcaatctcggctcattgcaacctctgccgccagggttcaagcgattctcctgcctcagcctccctggtagctgggatttcaggcacctgccgctgcacccagctaattttttgtatttttagtagagacggggtttcacctcgttagccaggatggtctcgatctcctgacctcgtgatctgcccatctcggcctcccaaagtgctgggattacaggcgtgagccaccgcgcccggcccccagaatttcttaagaagataaaaactctgggctaaagtagctacactaaaacttatgttgtcattatggggcacttgtgcttttggccataagtgagtactggttctggaattaccctcccactgtacacaactagaaaaccggacaaaaaaagatgctacaactgttttcagacattgggcaacagctaccacaggactgtgattcctgagagaaaggaaacaactctattttggttttatgccaagaggtaattttcagaccatggtgcaaagagaggacacccaaacatagtccaatagtcttgctgagttgaggagatgtagaccagaatttggaaaggccaacaggactagaattt

SEQ ID NO: 34379 - DNA, 2300 bp, Homo sapien
gctctctttggcagcacatatactaaaactgaaatgatacagagaagattagcatggcccctgcacaaggatgataggcaaattcatgaactgttccatagtaaaacaaacatacaaaaaggctgactacggccaggtgcagtggctcacaactgtaatcctagcactttgggaggccaaggcaggtggattgcctgagctcaggcattcaagaccaggctgggcaacacggtgaaaccccatctctaataaaatacaaaaaattagtcgggtgtgaccagcctgggcaacaccatgaaaccctgtctctactaaaacacaaaaaattggccaggcatggtggactgcgcctgtaatcccagctacttgggaggttgaggcaggagaattgcttgaacctgagaggcggaggtgcagtgagcagagctcaagctcgcaccattgcactccagcctgggcgacagagtgagactccgcctccaaaaaaaaaaatgctgactatctgactacactcctgtaatctcagcactttgggaggcagaggccggaggatcgcttaagcccgggagttcaagatcagcgtgggcaacataatgagacccctatctctacaaaacaattcaaatattagctgggcctggtggcacacgcctgtggtcccagctacatgggaggattccttgagcccaagagattgaggctgcagtgagctatgatagcaccactggactccagcctgggagaaagagcaagaccgtctatatatatatataatttttaaatttatttttaatttaattaatttatttattttttgagacggagacagagtctcgctctgtcgcccaggctagagtgcaatggtgcaatctcggctcactgcaacctccacctcccgggttcaagcaattctcctgcctcggcctaccgagtagctggcgttacaggcacctgccatcatgcctgggtaattttcgtatttttgtagagatggggtttcaccatgttggccaggctggtcttgaactctaacctcaggtgattcacccaccttgacctcccaaagtgctgagattacaggtgtgaaccaccgcgcctggccaagaccgtctataaaacaactgaataaccagctgaataaaagctgaataaccagcatccaacacattatctggtacgtagctacattgtgtaaatcactggtgaattcaataagcacaaataacaaaaaaagaaaaaaaaatgaattcaataagcacgtgtactttgaaaatgtattttaggcagggcgcggtggtgatcccagcactttgggaggctgaggcaggtggatcacttatgctagggagtttgagaccagcctggccaacatgatgaaacccggtctctactaaaaatacaaaaattagccgggcgcagtggctcacgcctgtaatcctagcactttgggaggccgaggcgggcggttcactttaggtcaagagttcgagaccagcctggccaacatggtgaaaccccgtctctactaaaaatacaaaaattagccgggcatggtggtgcgcgcctgtgctcccagctactcaggaggctgaggtagaagaatcgcttgaacccgggaggcggaggttacagtgagctgagatcgcgccattgcactccagcctgggcgacaaaatcgaggctccgtttcaaaaaaaaaaaaaattagccggacagtggtggcgggtgcctgtagtccccgctactggggaggctgaggtaggagaatctcttgaatccagggggtggaggctgcagtgagccgagatcgtgccactgcaccccagcctgggagacagagcgagacaacgtctcaaaaaaaaaaaatgccaaaagtaatttcccctagggaggcatggggtgttcctttctcggcacgcaggcccctaaaatcccttcgggcgggcgggtgtggggagaccaggcggctgggagacccaggcggtgttaggggttgcgagcagcctcgctcaactggggaattggcggcaagactgccaggaggcggaacctagggcgctcggcgacgcggtcctgcggactgtcgctagtgaggcacccgccggcccggaaggggctgatgcgaactggggccacggcagccatcgcgctttgcagttcggtctcctggtgtacggccaacgccaagtaggggattgcgttccctccagtcgcaggtgagtgacagcccctccttctgggaggaccggtgggcagcagctatggatcccctagaaggcgcacttttagggccaagacct

SEQ ID NO: 34380 - DNA, 2300 bp, Homo sapien
atttttattttttattttttgagacagtcttgctgtgtcagccaggctggagtgcagtggcacaatcttggctcacagcaacctccgtctcctgggttcaagcaattctcctgcctcatcctcctgagtagctgggattacaggcatgtgccaccacacctggctaatttttgtattttcagtagagacagagtttcaccatgttggccaggctggttttgaactcctgacctcaggtaatccgcccgccttggcctcccaaagtgctgggattacagttgtaagctaccacgcccgagcaaatacatttttagtaaagttctgaggcaaatgatgaaaacagggttagtataaaatttagtatttagttatttgaatttttactgaccttttttaggcctgacacagtggtttattctttttcttttcttagagacaagatctcactctgtcatgcaggctggagtgcagtggtgagatcacagctcactgtagcctcgaactcctgggttcaggtgatcctcccacatcagcctcctgagtagctgggactacagggatgtgccaccacactggccactttttaaaaatttatttaattaaaaacattggctgggcatggtggcttacgcctgtaatcccagcactttgggaggctgaggcgggtggatcaactgaggtcaggtgttcaagaccagcctggccaacatggtgaaaccctgtctctactaaaaatacaaaaattagccaggcatggtggcaggagcctgtaatcccagctactcgggagactgaggcaggagaattgcttgaacccaggaggcggaggttgcagtgagcggagatggcaccactgcactccagcctgggcaacagaccaagactctgtctcaaaaatatatatatatatatattttttaaatagagataaggggactctccctgttgtccagactggtctcaaactcctggcctcaagtaatccttctgtctcagcctcccaaagtgcttggattacaggagtgagccaccttgcccagcccgacacagtggtttagatctggcttttttttgtatgtaatataacacttcatagcaggcatttggtattaaatgaattaggtaagatgtacttcacactgaggtttcgaaaccgcgtggcatgacattttaatccacagtacaaatctgtaaaggagggctttatcgtcagcacagagcaggaaaaacctaaatagaatgaaggcagctaagatgattactcaatcattaattaactatgttgtccaatcaccgcagtttcgacctccctttggcttcaaaagtcaaaaaagtcaacttgcaaaaaaaaaaaaagtctacttgctctgaaaggaagtttgagttctttaccttactgtaaactcttagaagaggaaacaaaactgccatttaaatgtgctaatgaacttgagcgtgactatgctgtgaatcagcgagtttcaaaattaaaattcctctgagtcctccagtcaaagacaaaggcctccttcttggcttgatcacactattaacatgtacacatatttaaccacctctttttaaaaccccttataatttacatctgaaacacgaagacgaaatgtgaatgaaatactgcgatgaacattaaccgccccagctcccagtggtggtacggtctcaacagaggacgatgacttctatggtctcaggtaatcttcacaaaacccgaggagaggaactgtcagtcccaccccacgaaagcggctactgaatctcagattgccccacgatcctggctctgcgagcgaggtcacgttcacaacggcgggaatttccgtagcggtgacacacggcacttccggccggccgtgagagtcggtgacgtggcggcgaggccgggcacggtcgtcggggtcggggcaccaggagctgtcaggtggcctcggggcagcccggctggcagagaagagttcgccggcgcggcggcggctgctgcgagcccggagccggaagtgccacgtgtcctgattgcggctgcgcggccggcggctgacaggcacttccggccagggcctccctccttctctctaggtttggctgccgccttctagccgggcgttcgcggccccgccggcccgactctcaagcctcagctcccaggctaggctgtggccgccggtggcctggggagagtgcggcgccatgcctcgggcttaatgcgcccccccctcttctcccagtcttcagtcttaagtcgttagcctcctccctccgctttcagcagtggtctttcagct

SEQ ID NO: 34381 - DNA, 2300 bp, Homo sapien
agtgagccgagatcgagccattgtactccagcctgggcaacagagtgaaactctgactcaaaaaataataataaaatatatacattatatatatatattatatacttatataaaaaatggggcctggtggtatgcacctgtagttctagctactggggaggctgaggtgtgaggattgcttgagcccaggagtgacagtgagttgtgatcctgccactgcactccagcttgagggacagtttaagtaagatcctgtctcaaaaaaaaaaaaaaggcaaaatacaaaaaacctgtagaggccaggcacagtggctcatgcctgtaatcccagcactttgggagaccaaggtgggtggatcactagaggtcaggagtttgacatcagcctgaccagcatggtgaaaccccgtctctactaaaaatataaaaattagctgggtgtggtgacacgtgcctgtaatcccagctacttcagaggctgaggcaggagaattgcttgaacctgggaggaggaggttgcagtgagccgagatagcgccattgcactccagcctgggagacaaaagcaaaactccgtctcaaaaaacaaacaaacaaacaaacaaacaaaaaaccctgtagaaatggaacttataaaaagactatgaaaattatattttaaaaaagaggtctgggtaccgtggatcaggcctgtaattacagcactttggaaggttaaggaggcaggagaatcgcttgaacccaggaatcagaggttgcagtgagccaagatcaccaccactgcactccagcctgggcaacagaacaagactccatctcaaaaaaaaaaaaaaagatgtggaacaaatgtctgttggactgtatcaaatcaacatagtgacagtatctctaatacagcataccacagtggtcaaatccctttaacatttcaatattatgacaactacactcatatataaatgttgaagcacatttgaggatttgtcatttaaagttaatgtaaaactgcaatttatagattataagaaaaatccatagccatgtaacattttttctcatcctcagtgtaaatgttactaaatattctagaataaaatgtagtgtacataatctgttaccataattttgagaaagaatggttaactcagtaccctttcagtggctttcctccacttattctttcttctgcccacatagttgcctactcacagacatttttaaaagtcttttagagccatctttgtaaagaaaacagcggtcttctctaaaaacaatgtaaattagagattttagtcactgtctgtattctccaacttcacagaactcttagactctaatgggcaacttaagttctttagcattattctactagtcttatttctgtaaaccaaagatttgtaagtaaattggtaagtaggcaatctgtcggcagaaagtctttgtctattgtaacaactgaaataatcttagcaaatcacaatgtaggacgatttaaggaatcctagaagaggtataaaattataagacattctcacatcaaatgacaaactataatgtacatgtagactcttgtcagagattcagagagttgtgtccacccactttccaaatgctgtccagacatctagaagtcaaccaggagatcctcccttctatttggtttttccacagctgaaacattgaacagctgttgtaggtacaattctgggaaggttctgggagagatgagtaggccctaaaggggtgtcccaaaagcatgcattcatctccagaaactcagactgagtacgacccccaccccacttcagggcctgcggaacccagaagaatcagaccccacatcctgctctctaggagactggggtgaggtggcaaggaaggcgaaggcacacaaacactatgatccttatattcgagttttgaggcattttctcacccgtgtttcacccagggcgttgcatacagcaggtgctcatttactgttttggtgaccgactaaataaatgtgaaagactgagacgagcctggggctacaggtgcacaactgccgtggtcccctggcccagccgcccaccaccatccgcgccagaacccggtaaggaggtcactctctctatctatgtcgcctcaagcagcagtggcacgcaaaggtcagtcagccctggccaggctgcgccctccccccggacagcactcaccgttggtgtagggagaccccgaggccaaggcggctccgttctgggcctggaggctggctggggcgccgccggaggccggtattcccggctgggacatgatga

SEQ ID NO: 34382 - DNA, 2300 bp, Homo sapien
gtgcctataatcccagccctttgggaggctgagatggaagcatcggttgagctcaggagtttgagaccaatctgggcaacatagtgagaccctgtccctacaaaaatacaaaaaaaattagccaggtgtgatgctgagagcctatagtcctagctactctggaggctgaggtgagaggatcacttgagcccaggaggctgcagtgagatcgtgccactacactccaacttgggaaacaacaacaacaacaacaacaaaaaagatggctgggtgtggtggttcatgcctgtaagaccagtgctttgggaggctgaggcaggcggataacctgaggtcaggagttcgagaccagcctggccaacacgacgaaaccccatctctattaaaaatacaaaaattggccgggcatggtggctcacgcctgtaattccagcactttgggaggccaaggtgggtggatcacgagttcaggtgttcgagactagcctgaccaacatggtgaaaccctgtctctactaaaaatacaaaaattaaccgggcgtggtggcacacacctgtaatcccagctactcaggaggctgaggcaggagaattgcttgaacctgggaggttgcagtgagctgagattgtgccactgcactccagcctgagcgacagagtgagactccgtctcaaaacaacaacaacaaaaaacaaaaattagctgggggtggcggtgtgcacctgtagtcccagctacttgggaggctgaggcatgagaattgcttgaacccgggaggcagtgagctgagatcacgccactgcactccagcctgggtgacagagtgagactctgtctcaaaaaaaaaaaaaaaaagaaagaaagaaaataatgatagtggccaggtgtggtggctcacacctgtaatcccagcactttgggaggccgaggcaggcggatcatctaactttgggaattcgagaccagcctgaacaacatgatgaaatcccgtctctactaaaaatacaaaaaacattagctgggcatggtggtgcatgcctgtaatcccagctactcgggaggctgaggcaggagaatcgctagaaaccgggaggcagaggttgcggtgagctgagatcatgccattgcacaccagcctgggcaactacagcaaaactcccatctcaaaaaaaaagaaaaagaaaaaaagaaaatgatagcacttacctcttagggtagttgaaaggactaagtaagtattacatatgaattgtttagaacagtttccagcatactgaacatttaatatattttagttacaataaaaaaatctttaccaactatgaaattattatagtagatatatttctttttaaaaataaagggaaaaaaacctacagaaaatttttaaaaaacatatatatattttttcagacggagtctcgctctgttgcccaggctggagtgcagtggtgcgatctcagctcactgcaagctccgcctcctgggttcatgccattctcctgcctcagcctcccgagtagctgggactacaggcacctgcaaccatgcctggctaattttttgtatttttagtagagacggggtttcaccatgttagccaggatggtctcgatctccggccctcgtgatccacccacctcggcctcccaaagtgctgggattacaggcgtgagccaccgcacccggccatttttttttttttttaaataaataaagtcatgttgcccaggatggtctcaaactcctgggctcaagcagtccacccgccttggcttcccaaagtgctaggattacaggtgtgagccaccacacctggctggaacttacagaaaattcctaagcagtacttgcttcttaatgaaaaatcaagtagtaccacaaaggaaaaggactttgtagaatgcccagaaataattgcaattgttgttaacatcatgatgtatgtagatgtgtatttagattttatgacaatgtaatgattttttaaaatgtctctttataatttattataaataggatatacacatgacaccatccactgacttctataagaaattagccttggactgttctggtcagcaagttgctgttgacttattccttctcagtggacagtattctgatttggcttctctgggtaagttcttcgtaatgattttttttttccgttaaatgaatatcaaaatggtccttatatgatagtgttctaaatatagaacaaagttaaagaatatgtatgcccttgggaaagttaatcagtcagtttagtctattaaaaaccttatagtcttctact

SEQ ID NO: 34383 - DNA, 2300 bp, Homo sapien
gcattaatcacaatagccacgatatggaaataactgaatggatttttcaaatgtggtatatatatacaatggaattctaccgagccttttttttttttttgagatggagttttactcttgttgcccaggctggagtgcaatggcacgatcctggctcaccacaacctccacctcctgggttcaagctattctcctgcctcagcctcccgagtagctgggattacaggcatgtgccaccatgccaggctaattttgtatttttagtagagacggggtttctccatgttggtcaggctggtctcgaactcccaacctcaggtgatctgcccgcctcgacctctcaaagtgctgggattacaggcatgagccaccgcgcccggcgacttcagcctttaaaaaacaggaaattctgtcatttgtgacattatgctgagtgaaataaaccaggcacagagagacaaacaccacacgatcttacttatgtgtggaacctaaaaaagttgaactcatataagtagaaagtagaattatggttattagaggctaggaggcaggaagtggctatggagaaggaaagaagaaatgttagtcaaagggtacaaaatttcagttaggatgaatggattctggtgatctattacacagtatgatgactatggttaataatgatgtattgtatattttaaaataggcaaaataatggattttaaatgttctcaccacaaggaaacaataattggctgagaagatgaatatgttaattagccgaatttgatcattccacaatgtatacatgtatcaataaattagtgtaccccataaatatatacacttattattagtcaattaaaaatgaaaaaagttctgtatttccaatcattggatataaggtatgatttactgctatttattgagaagaactctttttctttcttctttttttttgctatactcttgtcaggtcctggcaaggccaaacaaattgttttactactagcaaatggaaaattcaacttaccttattacataaagtattgggaaaaatggtctctgctctctaagccaagagatgaaagctattattctggcagattctggtgtatcaagttctggaaggtctgtctgttaaccaaaaccaacaatatccaattactttaattacatatctaatgtatggtctatggtacttttcaaatttttatttttttaattacattttttttcttttttgagacaaggcctctgttgacaggctggagtgcagtggcataatcatggctcactgcagtctcaacctccaggctccggtgatcctcccaccatagccttctgaatagttgggactacagatgcgtgccaccatgcctggctaatttttatatttcttgtagagatgggttttgccatgttgcccaggctgatttcgaactcctgggctcaggcgatacacctgcctcggcctcccgaagtgctgggattacaggagtgagccacagtgcccggtctacttctcaaatttaacttattttttgagacaaggtcttgctctgttgcccaggctgaagtgcactggtgtgatcatggctcactgtaacctccactgcctcctgaggctcaagtgattctctcacctcagccccaccaagtagctggaataagaggcgtgtgccacctgccaggtaatttttgtatttttagtagagacgagtatctcaccacgttgctcaggctggtcttgaactcctgggcttaagcaatctgcccacctcggcctcccaaagttctgggataacaggtgtgagccaccatgcctggtcttgaattttaacatgtatatgaatcacctgatcatcttcttgaactacagataatgatttaggaggtctggggcagggttgtggtcctgagattttgctttcctaaaaaattcctgcagtgatgccagtgcaacttgacttgggaacacaattttctacgaatattctagaacaggagtaggcaaacttcttaaaggcccatatagtaagtactttaggcttgcagatcatttggtctctgctgcaactacttaactttgccattgttttttattttttgagacagagtttcgctcttgttgcccaggctggagtgcaatggcgtgatattggctcactgcaacctctgcctcccagattcaagcgattcgcctgccagagattctcctgcctcagcctccagagtagctgggagagtagttgggattacaggtgtgcgccaccacacccggctaattttgtatttttagtagagatgggggt

SEQ ID NO: 34384 - DNA, 2300 bp, Homo sapien
catccaatcaagggtgaaagttcagtctgtatattctttgagctccttatgttgttgaatccaaaccgaagtttcttttgttttcacttctttttcagtattaatataaatatagtattttattatcttctaagtggtatttcacccacttccttattttgagggtgattgtgtggcaggcttagttgcagggggcccacccagtaagctgcttcaaaaccctcctcagcctcaggtgtgaactggccatgctccctgttagcaagggttgatggattcaattccttcattcatctaatcattcacttagtaagtcattactgaatgccaaggctgcattatgactttcaagggccctaagctcttttgcctttgtggctccttcctgcctgaaaacatacttaaaattatattttatgactgtattgctattaatgatgactataatccagactggatccattacaatatagcaaatatattatttttttctgaaaaaacttttttgagatggggtctcactgtgtcacccagtctggagtgcagtggcccgatcattgctcactgcagcttcaacctccccaggatcaggtgatcctcccaccttagcctcccaagtagctgggaccacaggcacacgccaccaagcccgactaatttttgtatttttagtacagtcagggttttgccacgttggccagactggtctcgaattcctggcctcaagtgatccacccatctcagccctcacaaagtgctggaattacaggcatgagccaccgcgcccagtcatttgttctgattttattttatttatttcttttatatatgtatttttgagacggagtctccctctgtcgcccaggctggagtgcagtggcatgatctcggctcactgcaatttctgcctcccaggttcaagcgattctcctgcctcagcctcccaagtagctgggattacaggtgcatgccaccaggtcaggctaatttttgtatttttagtagagacggggttttgccatattggccaggctggtctcgaactcctgacctcaggtgatccgcctgcctcggcctcccaaagttaggattacagacgtgagccaccgctcccggcctttttgtttttttcttttcttttccttttttttttttgagacggagtctcgttctgtcgcccaggctggagcatctttagcatgcgaggtggtcatgaacgacaaggagaaaaaacaaggtgaaggggaatggggagtgttggcaatttagatagaatgtgcacgaaaggtttcaatgggaaattctaatttgaataaaaacgcacaaaacgcgaggaaagcctaggaacacatcagccgtatactttgccgtagagaagttaaggatgaggaacaggcaccaagaacaaatcccagcgtaaggctccctttaagtgcggctcccagggttacgtattcccattgcctacaggcgaggccgcgggtctgtaaacaagcgactgccgctgcaacctccattttgcttcctggcaccaaatctaggctgacctacttactgccatccctttcccactcccggttttcttttctttctttttttttttctcgagacagagtctcgctctgtagcccaggctggagaacagtggcgcgatctcggctcactgcaacctccgcctcctgggtccaagagattctcctgcctcagcctcccgagtagctgggattacaggcgcgcgccaccccgcccggctaagtttttgtatttttagtagagacgggtggggggaggggggagggggtcaccatgttggccaggctactctcgaaatcgtgacctcgtgatccgcccgcctcggccttccaaagtgctaggattacaggcgtgagccaccactcccggccctgggtgctggttttcttcacctccgagtgaacagcagagggggctgttgggtgagggccagaagagttggggaggcacgagggcgtccagcgctgccctcactcaagatggcggccagagcctcgcgcttggtcgcgtggggcggtgcgtgagtgcttagctcacaggctccgggaccgcgctcgggggcgggtctatagtgggaaggggacgcgcgccctgcggcccggcctctagtcatcgccctcgcagcggcggccaacatcaccgccactgccacccctcccagactgtggacgggaggatggagtcgatggccgtcgctaccgacggcggggagaggccgggggtcccagcgggctcaggtctgtcggcttcccagcgtcgggcggagc

SEQ ID NO: 34385 - DNA, 2300 bp, Homo sapien
ctcagtcttcattgtttaagccactggtggttttctatgtcttttaggttgaaatccacattccctacctgcagcccacatccaaacaatttacagggggattcctaaccctccttggtgtccatcctgtcactcattaattagctcaggccttcttacccttggcatggactgccagaacctccagtctctatccctcttcaatgcttctcgcagctaccacaggtgggcagcaagccacggggggcgtggggagcataaactcatcttggagtgtcactcgttggtttgctttttttctttaatcaactatgttgaggtaaaatttacatacaataagtcatgtacagttaaagggtacagttcagtgaattttgaaaaatgtgcaaatctattcaatgaccactaaaatcaagacacagaacttttccatcatctttaggtgtaagaaagtaaaatagtacagaggcaagtaaagtaaaaatatgagcctttctccaactccattatagctttttgcaaaaacaactcaacatggccgggcacggtggctcatgcctgtaatcccagcactttgggaggccgaggcgggcaggtctcctgaggtcgagagttcaagaccagcctgaccaacatggagaaaccccatctctactaaaaatacaaaataagctggggtggtggtgcatgcctgtaatcccagctacttgggaggctgaggcaggagaatcgcttgaacccaggaggtggaggttgtggtgagctgagctctcaccattgcactccagcctgggcaacaaaagcgaaactccgtctcaaaaaaaaaaaacaaaaaaaattcaacatttctgtgtgtgttgcatgagacaatacatatacatttttttggtgcccaaactctcgaataatgttctcaatcttgactgtacttcagaattacctgggaagcttaaaaattcccagtgcacaagaagcactccaggccaattaaatcagaacataggggtggaacccaggcttctattttatttactaatattttagagatgagatttctctgtgctacccaggctggagtcatcatagctcactgcagcctcaaactcctgggctcaagtaatcttcttgcctcagcctccctggctcaaatgatcctctcacctcagcctcccaagtagctagaaccacaggcgtgccagcacacctggctaattattttgcttattttttgtagagggtctcgctatgttgcccaggtaggtcttgaattcctgggctcaagccatcctcctgcctcggcctcccaaagtgctgggattataggcatgagccaccatggctggccctttttttgtttttttgttttatttttaagcttcccagtgcaagcaatgttgagaactaatcttttgccaaagtatttttagctctttgttctctactaggttaacacctaccgggtcttcaaatctcacctcagagttcacttccaagggaaacgtgttttctgaatccgtctccaatggtggactctccttgctgtattacttctgcttgtgtttttagtcaagtctattattattactattttctttgcagagacgagggctacgttgcccaggtcttgaattcctgggctcaatagatcctcccgcctcagcctcccaaagtgctgggatttcaggcgtgagccactgtgctggctttagtcatctgtttcccggatagactgtgagctccccaggatctagcacaagcctggcatatgacaacataaataaatgagtgaatgtatacatgaataaagagcgtgtacggagaaagttgccgcattatttagcgcaaattaaggcagacatcagcctgcccaggacgcctctttggctctggcgcgaaacaccctcacgggccggcgaggctgacgcgctgcgctccatcgcactaatcagccgggcgtggtgcgggcgccgggaagactgggcggggcgaaggcatcacctttcgatggggccggcgctgtgcgtcctccagtcgaggtggggcgctgtggaagagcggcagcttccggtcggcttttctcttccttcggctgccggcgccagcacgtcctgttttcgttggccgcgctgggatggccgccacagctgtaggtgctgctagtgtttagcgctggtctttgccgggcgttgagggcagctcagcctccttgtttgtccggttcgcctgtgcgtggtactcaagggcaccagtattcccgcggtcggcagcatgggtcgggagtcacggtgaggcagagcgcc

SEQ ID NO: 34386 - DNA, 2300 bp, Homo sapien
aatggggattgctgacccctgggtcttcaagcagagaaaacttaagctgatgtgtttctgtagttggaactggacaggtctttgctactgtgttaattagatcatacaggctgaagacaatgatagaggaatgtggcaataaaacctttggtgtacatggagtcaggattttattttctgcttgaatacatgggtatcatttaagcaaaattaatattttaactgcttgccttataaagaggtaagtgagagacatgattatttgctttgaaaaagaattcttttcgtaattcatttattaatttaaatgcagtgtttgcttagtatggtataattgatatatcaaatttcaatttatgtataactttatcagaacacatctctactaccaagtgatgtgaagtgagatattcactgattccacagctccgatgtagttttcctttcatccagaatggttctggtcatttgtctccactgtcaatttacactcaggaaataacgtctaatttttataataatctaagcaagtctcctcagtaaaaaagcaactttgttgaagcaaatcttaagaataatctagaaatataatgataatggccgggcgcggtggctcacgcctgtaatcccagcactttgggaggccgaagcgggcggatcacaaggtcaagagtttgagaccagcctggccaacatagtgaaaccccgtctctactaaatacaaaaattagctgggcatggtggcgggagcctgtatcccagctactcgagaggctgagtaccttggaaacagaaggtagaggttgcagtgagctgagatggcgccactgcactccagcctgggcaaaaacagcgaaactctgtctcaaaaaaaagaaaagaaaagaaaaagaaatataatgatattgaataagagctagggtttggtaatttaagtgatctaaatcttttagaattttcagaggtaattagattttttaaaggatcatttagtttttgaaactccgaactcaactaaacactaacaggatgaaaacaggtgttgctactgtggaatgagcctagtgtcatctgtttctagttctgtaattggagggaccccactgcctggctggctccttggaggctctgtttggctcagcagctccaggcctcccaccaggcaaagggaaggagaacaggaaggacttacatgcctagtcagcctgtataatttatatagcctgttctgtgaccctctctttttactagtggagaatcccttaaaagcagccacagttgttttaggaccaatgaaaggaaatgccctttttttcatagctgcttataaacatatgtaacctattacaagaagttacataagtcagaatttaaactggtccaaattgtcgggctctgataaaagtaggaaaattgattttccagttaaatctaggtgagagtgtcattttccttctttttaaagttgcacaaaaatatcaacaagcttcacaccaactcataccaagcaacgtgttttcctcctaaatttcatttttgttgtaattttcagtttgacttcggtcttgattcttctttttctcttcccttccagcactcaccttccccacgtagttttatagtgttgtgattggtggctagtggaggtataggatttaaattagatatgttgctatgacttcatagccatacccttggccttttccttcctgttgtgcaactgtttctgtctctctttctagctccgtctctgtctctctctggggacagaaaagttactcatttctaatatggggggaaattttctcgtttattataaatctttccctcatttgtgttttttaaaaatacacggaatgataaaaatatagctctctacgttgcaaacccagtcctccttttattcttagacatttcaatctttagtcttctttgattcagctctttttctcttctcagtgtgcaatatggtgtctatctgtacttacctactcactggcattgtccattggctccagattctacccagcctacccttgatggctctctaatctctgccacttctaaacttctggttcatatttccattggcctcatctgtatttccaattggatgtctgatgagcacctcaactacagcaattttagaattaaatttcacccattatcactgtccagaaaacacctgtttacctcctggaatcagtatattcttttacttctgccttttttcacttgccagccagctcttaatatcttaatttgtttctctttttcactgttcatatcccatcagaaaa

SEQ ID NO: 34387 - DNA, 2300 bp, Homo sapien
acagtctcattctgtcacccagactggagtgcagtggcacgatctcaactgactgcaacctccgcctcccaggttcaagcgattctcttgcctcagcctcccgagtaactgggatttagcgacatgcaccaccatgcctaattttttgtatttttagtagagacagggtttcaccatgttggccaggctggtcttgaactcctgatttcaggggatccacccgccttggcctcccaaagtgctgggattataggcatgagtcactgtgcctggccactgatggatatttaaatagtcctattaccttatttaatttcacagctctacaaggaagacattgtcttaatttcttacatgtggaaacttttggtggagcaatgacttgcccaaaataccatgggaggcaagtggcagaaaggcattcaaactcagggctgcctgacttctttgttattctggctacccctccattgggcctgcaaattacttgacttttttagaatgaaaatttctttttcttaaatgtttttatgtacaaatgccatttcagacaagagtttagagttacagatttggaatagtgattatatggtatgggagtgctccacctcaagagcaaaaaaaccttgcttagaaaaaaaacttgtttttagataggctacttaatatgccttaaaatctgtgtacatattttaacttttctatattggtattttccttttacatataaataacactagcatgattaatcctgtttttttagcattttatttttttgagacagggtctcactctgttgcccaggctggagtgcagtggcacaaacacagcttaaggaagcctcagtctccttcctcctatctcagtccttccttctgtctcagcctccgtagcagctggcactacaagtactcatcaccacacccagctaattgttttattttttgtagagacagaatctctctatattgtccaggctggtctcaaactcctggcctcctgctttggcctcccaaagtcctgggattacaggtgtgaatcactccacctagttggaatgatgtttagaatcatgttatgaatctccgtctgccaaaaaaatcctagcttcccaaccagggaattccacctgagctttgtgtccagagttttttgttgttgttgttgtttgtttgtttgagacggagtctcgttctgtcccaggctggagtgcagtggtgcgatctcggctcacagcaacctccacctcctgggttcaagcgatcctcctgcctcagccttccgagtagctgggattacaggtgcgcaccaccatgcccaactaattttcgtatttttagtagagaaggggtttcaccatgttagtcaggcttgtttcgaactcctgacctcgtgatctgcccgcctcggcctcccaaagtgctgggattacaggcgtgagccaccgcacccaggctgtccagagtttttattggtgtaggtttgatcaactgttcacatggcttatctgtctccagtccctcagtagtttgaatgaatgggcttgcttgtttcgtgtgttgtgtcctggcttgtgtgtttgtccagaaaagttgtttctcctcctttctttcctactggcagggcagtacctggctcagggctgtgcttatggtagaactcagttctatgaattgtccatcctcaaatatccttcattacatgggggaaaagggcaagcatcctcctctagcctcttcccactgcttaataaagtgtctccctttcagtagctgccctaattctggatcctctccattctgacatctggaaattcacaggaggaaggagtgaggaaatgaatcccttctaagtgggtttgtgtgaggtgactgatatgtcagatatctcacaagaaaaacataatagcggtagtttgttgttccatcctttcctgtgattatggaataatgaatgcgacaattcctggggcgtggtggcttacgcctgtaatctgcgtggatcataggatgtcccataaaataaagcttttcattatcacatgatcctgggcatgaagagtcccaactcccctgactatcatttatttgtcctgtatctaagaaatggggtcagcaggagttccagcatctcagaattgtggtgaaaaccaatacaagtaaggaagttattaattccccatttggtgggttcctcaaccccagccactggggacggtccacgccggatcaccagcagctcaggcttaaggccacgacgcgcaagcgcagcctgccagcctggctccctcccaaagcttg

SEQ ID NO: 34388 - DNA, 2300 bp, Homo sapien
tgtcttaatttcttacatgtggaaacttttggtggagcaatgacttgcccaaaataccatgggaggcaagtggcagaaaggcattcaaactcagggctgcctgacttctttgttattctggctacccctccattgggcctgcaaattacttgacttttttagaatgaaaatttctttttcttaaatgtttttatgtacaaatgccatttcagacaagagtttagagttacagatttggaatagtgattatatggtatgggagtgctccacctcaagagcaaaaaaaccttgcttagaaaaaaaacttgtttttagataggctacttaatatgccttaaaatctgtgtacatattttaacttttctatattggtattttccttttacatataaataacactagcatgattaatcctgtttttttagcattttatttttttgagacagggtctcactctgttgcccaggctggagtgcagtggcacaaacacagcttaaggaagcctcagtctccttcctcctatctcagtccttccttctgtctcagcctccgtagcagctggcactacaagtactcatcaccacacccagctaattgttttattttttgtagagacagaatctctctatattgtccaggctggtctcaaactcctggcctcctgctttggcctcccaaagtcctgggattacaggtgtgaatcactccacctagttggaatgatgtttagaatcatgttatgaatctccgtctgccaaaaaaatcctagcttcccaaccagggaattccacctgagctttgtgtccagagttttttgttgttgttgttgtttgtttgtttgagacggagtctcgttctgtcccaggctggagtgcagtggtgcgatctcggctcacagcaacctccacctcctgggttcaagcgatcctcctgcctcagccttccgagtagctgggattacaggtgcgcaccaccatgcccaactaattttcgtatttttagtagagaaggggtttcaccatgttagtcaggcttgtttcgaactcctgacctcgtgatctgcccgcctcggcctcccaaagtgctgggattacaggcgtgagccaccgcacccaggctgtccagagtttttattggtgtaggtttgatcaactgttcacatggcttatctgtctccagtccctcagtagtttgaatgaatgggcttgcttgtttcgtgtgttgtgtcctggcttgtgtgtttgtccagaaaagttgtttctcctcctttctttcctactggcagggcagtacctggctcagggctgtgcttatggtagaactcagttctatgaattgtccatcctcaaatatccttcattacatgggggaaaagggcaagcatcctcctctagcctcttcccactgcttaataaagtgtctccctttcagtagctgccctaattctggatcctctccattctgacatctggaaattcacaggaggaaggagtgaggaaatgaatcccttctaagtgggtttgtgtgaggtgactgatatgtcagatatctcacaagaaaaacataatagcggtagtttgttgttccatcctttcctgtgattatggaataatgaatgcgacaattcctggggcgtggtggcttacgcctgtaatctgcgtggatcataggatgtcccataaaataaagcttttcattatcacatgatcctgggcatgaagagtcccaactcccctgactatcatttatttgtcctgtatctaagaaatggggtcagcaggagttccagcatctcagaattgtggtgaaaaccaatacaagtaaggaagttattaattccccatttggtgggttcctcaaccccagccactggggacggtccacgccggatcaccagcagctcaggcttaaggccacgacgcgcaagcgcagcctgccagcctggctccctcccaaagcttgcgtgcaggttggcggcgggagatcgggtctcgcgatgcgagtgagcgtgtgcgtgcgcggccctcgcgagctcgcgcacgccgcctctaacactacagggtggtagcggcctcttcgtactgcgtccggggcaggaccgtgcgcggcggccgcggcgggtgctgggagccagcgcctgcctcgccgccgccctcgctgcctgccactccgtcttggcccgttctccgcaccgtgcagaggcggcgggctggggagggagcggcgccagcacgaggttcccagccgctgggaagcccctagacgcgccgaggggccgggctacgagcggctgaggtagg

SEQ ID NO: 34389 - DNA, 2300 bp, Homo sapien
cagtctattgaaatttttcatttttatgctcaaatcatcccatctttggcaagtaggagccagtttggttcctcagtcattctaaatgaccgtagtaccctggtattcttttatttatttatttacttatatatttaagttttgcattttgatataagatgtcccagactcacagaaaggccttttgagatagcaagacaaatttggcggatttaatttcagccaaaggaagagaataatgtcagcttttctttcctcacccccagaaatttgatagaaaccaggacaattgtgaaggcagttttctcactgaaaagaagtgcacgttggtggtgagacagttaaataaggattctaacctgtggactacatttgttgtcattagagggggtatatacagtatttattcaaagacgctcaagcctgtaatcccagccctttgggaggccgaggcgggaggactgcttgagcccaggagtttgaaatcaaactgggtcaaacagtgagacctcatctctagaaaaaaatttaaaaacggggtgggaagatcgcttgagcccaaggggttgtggctgcaatgagccataactgagcaattgcacctgggtgacagcgagactgtgcctaaaaaaaaaaaaaaattgaaagacaattctaacatccaattctaacatctaattctaacatctgtaagcgtatctgtcccaaacacagagctaaagtaaaaacacaggaaggggccgggcgcagtggctcatgcctgtaatcccaacactttgggaggccaaggcgggtggatcacctgaggtcaggagtttgagaccagtctgaccaacatggtgaaaccccatctctactaaaaatataaaattagtcgggcgtggtggcgcatgcctgtaatcccagctacttgggaggctgagataggagaattgcttgaacccggggaggtggagattgcagtgagccaagatcgcgccattgcactccagcctgggcaacaagagcgaaactcttgtctcaaaaaataaaaaaatcaaacaaacacacatacaggaaaggaaaggagataataaaaaggaaggagtagtaaccacagggcatccatgttggagtatccagatcagcttccttttcattagtcataaatccttttggtgctctgtcctgttggcttttcatgcaccttcaaatcatgtatgggggtatgagaaagatagtttaaaaaggaaaggtttgttgttccactgttaggggtgagggaggtacttagcgaaatgatgactagtaataagctctagaactgtgggctcttttatccatgtccattgtttcatattcttctggacccacaagatggcacttgaggatctacaacagcaaaaccataccaacgtatttagaataaaagaatcatccacagggacagattaatgatgcatctttctggcctaacagtgtctttttgatgggcatagagataaggggactatggccacaccatcagaattgtattattcaattaataatgcctaccactttgaaatgcttcctgtgccccaggacactgtgctcatcactttacatctcatttcatctataagactctatataacgtcatttccactttacagctgaagaaacttaactttaagttacataacctgctgactgtgaactatcacatgtgctgaagttgggattcaccaagcggccaaaaagcacaggttccccttaccattgctatgttaaccaatagactgatgtattttaaatcagtttctattttttcaacctcataagtttgaaaagctgcactctgcactgatttagcactgactggtggctgcttaaagcttgccttattccattttagcaggccccccggcaaaataccccaattagtggtgtcatcctctctattccaagaattttctcttaagactcccgctctgtgcgtttgcttgggaatgcagagccctgttcctcatctccccatctatgctttcttcattctaagccctttcctatctactttatgctcgaggtggctccacctccaccatgagccagagccaatgatgctcacggccccaaccatgattaaaaagagattgccctgcaaggtaaatcagttaaaaccaacctctcctgccctgagtggataggtagggttagggttgccagatgtcacgaagttacaggatgctcagttttaaggtatatcccttatactataagggttatagtaaaaaatattcattatgtgaaattcaaatataactgggtatcaggtattc

SEQ ID NO: 34390 - DNA, 2300 bp, Homo sapien
gatcgcttgagcccaaggggttgtggctgcaatgagccataactgagcaattgcacctgggtgacagcgagactgtgcctaaaaaaaaaaaaaaattgaaagacaattctaacatccaattctaacatctaattctaacatctgtaagcgtatctgtcccaaacacagagctaaagtaaaaacacaggaaggggccgggcgcagtggctcatgcctgtaatcccaacactttgggaggccaaggcgggtggatcacctgaggtcaggagtttgagaccagtctgaccaacatggtgaaaccccatctctactaaaaatataaaattagtcgggcgtggtggcgcatgcctgtaatcccagctacttgggaggctgagataggagaattgcttgaacccggggaggtggagattgcagtgagccaagatcgcgccattgcactccagcctgggcaacaagagcgaaactcttgtctcaaaaaataaaaaaatcaaacaaacacacatacaggaaaggaaaggagataataaaaaggaaggagtagtaaccacagggcatccatgttggagtatccagatcagcttccttttcattagtcataaatccttttggtgctctgtcctgttggcttttcatgcaccttcaaatcatgtatgggggtatgagaaagatagtttaaaaaggaaaggtttgttgttccactgttaggggtgagggaggtacttagcgaaatgatgactagtaataagctctagaactgtgggctcttttatccatgtccattgtttcatattcttctggacccacaagatggcacttgaggatctacaacagcaaaaccataccaacgtatttagaataaaagaatcatccacagggacagattaatgatgcatctttctggcctaacagtgtctttttgatgggcatagagataaggggactatggccacaccatcagaattgtattattcaattaataatgcctaccactttgaaatgcttcctgtgccccaggacactgtgctcatcactttacatctcatttcatctataagactctatataacgtcatttccactttacagctgaagaaacttaactttaagttacataacctgctgactgtgaactatcacatgtgctgaagttgggattcaccaagcggccaaaaagcacaggttccccttaccattgctatgttaaccaatagactgatgtattttaaatcagtttctattttttcaacctcataagtttgaaaagctgcactctgcactgatttagcactgactggtggctgcttaaagcttgccttattccattttagcaggccccccggcaaaataccccaattagtggtgtcatcctctctattccaagaattttctcttaagactcccgctctgtgcgtttgcttgggaatgcagagccctgttcctcatctccccatctatgctttcttcattctaagccctttcctatctactttatgctcgaggtggctccacctccaccatgagccagagccaatgatgctcacggccccaaccatgattaaaaagagattgccctgcaaggtaaatcagttaaaaccaacctctcctgccctgagtggataggtagggttagggttgccagatgtcacgaagttacaggatgctcagttttaaggtatatcccttatactataagggttatagtaaaaaatattcattatgtgaaattcaaatataactgggtatcaggtattctatgtggcaaccctaggtaggggagcacaggttaggcaagcgattagaagatttgcagcctccaaagtttctgcacctcgatgggacactagaacaggaaggctcctgggcctttctggctctgggaatgaagcgtggaaaaccctccttaggcgggcgcagtgcttcaagtagccaagctctgacttccgagggaagaaaggaggccatgggcctctgccagagccatgctctgcactctggggtcagcagagttcaaaacgacctgcaacgtctggcgcttagctcctaaagaggtctccagtccagcgccgacggccagcggctagaggccgtccgcccgactccaagatggcgcccgccacagctgccaggtgttaagatggcggcgcggggccgcgcccgcgctcccaggctctcctcccccagccttcctccggctggcagcacgactcgcgtagccgtgcgccgattgcctctcggcctgggcaatggtcccggctgccggtcgacgaccgccccgcgtcatgcggctcctcggctggt

SEQ ID NO: 34391 - DNA, 2300 bp, Homo sapien
tggagtgtggtggtgagaccatggctcactgcagccttgacctcccaggctcaagtgatcctcccagctcagcctcccaagtagctgggaatacaggcatgtgccaccatacctggctaatttttttcttttttttttgtagagatgaggtctcactatgttgcataggctggtctcaaactcctgggctcaagtgatcctcctgtcttggcccctcaaagtgttgtgagtcgtgaaccaccatgcctggcccacagtttcgtttcgtttttttcttttcttttcttttcttttctcttttctcttctcttcttttctcttctcttttcttttctttcttttttttttgagatggagtctcactctgtcacccaggcgggagtgcagtggcgtgatctcagctcactgcaacctccatctaccaggttcaagctattctcccactgcagcctctcgccgaataactgggattacaggcgtgcttcacatgcccagctaatttttgtatttttagtagagacagggtttcaccatgttggtcaggctggtcttgaactcctgacctcaagtgatctgcccaccttggccttccaaagtgctgggattacaggcatgagccaccacacctggcctgtggcccacagtttcttaattcctttcacgaaagaattctctgtagcatgcaatgctgtttgatagcattttacccacagtagaacttctttcaaagttggagtcaatcctctcaaaccctgctgctgcattatcaactaagtttatggaatattctaaatcctttgtcgtcatttcaacagtgttcacagcatcttcaccaggcgtagatgccatctcaaaaacctactttctttgcttatccataaaaatcaactcctcatctcttcaagttttatcatgagattgtagcaattcagtcctatcttcagactccacttctaatcctagttttcttgctatttctaccacatccgcagttccattctccattgaggtcttgaattcctcaaagtcatccacgagggttggagtcagcttattctaaacgcctattaatgttgatattttgaccacctgccatgaatcacagatatttttaaagtcatctagaatggtaaatcctttccagaaggttttaaatttattttgcccaaatccatcagaggaattgctatctatggcaactatagccttatgaaatgtatttcttaaataataagagttaaaagttgaaatccctccttgattcatgggctgcagaatggatgctgtgttagcaggcctgaaaacaacattcatctccttgtgcatctccaccagaactcttggttgaccaggtgcattgtcaacgagtataatattttgaaaggaatctttttttctgagcagtaggtctcaacagtgggcctaaaatactcaggaaaccatgctgtaaacagatgtactgtcatccaggctttgttgttccttttctagagcacaggcaaaataaatttagcataatttttaaaggccccaggatcttcagaatgggcaatgagcaatgagcattggccctgtggttgctcatacctgtaatcccagtactttcagaggccaaggtgggtggattgcttaaacctaggagttccagaccagcctggggaacatggtgaaaccttatctctacaaaaaatacaaaaacttgccaggcatggtggtgggcaccagctacttgggaggctgaggcaggaggattgcttgagcccagaggctgaggctgccatgagccatgattgcgccactgtactccagcctgggtgacagagcaagaccttgtcaaataaataaataaataaataataagatttattgttaaataaataaataagaccgcagctacactggcctctaaaaagagtccgcctgtcctttgaagccaggcattgacatctcttgtctagctatgaaagtcctagaagccaccttattccaatagaaggctgtcttatctacatgaaaattgatttttgagtatagccaccttcatcaattctcttagctagatgttctgggtaagttgttgcagcttctttttttttttccccattgatctttgatgttactatgttgtagcttctctatcagcacttgctgcctcaccttgcacttttatgttctggagacagcttctttcttaaacctcatgagccaaccccagctaatttcagacttttcctctgcagtttcctcacctctctcagccttcgtagaattgaagagagttagggccttgctctggattt

SEQ ID NO: 34392 - DNA, 2300 bp, Homo sapien
ataaacagtcaatgtaaatgttggaaatataacttttaattctttaggaccagcaacatttgataagggcccccagtgtgattcctcccgagttttgcttttgaaatggttacatcttttttttttttgacagagtcttgctctgttgccaggctggagtgcagtggtgcaatctcagctcactgcaccctccgcctcccgggttcaagctattctcctgcctcagtttcctcagtagctgggattacaggcacgcaccaccatgcccagctgatttttgtatttttagtagagacggggtttcaccattttggccaggctggtctcgaactcctggcctcaattgatccacccgcctcaccctcccaaagtgctgggactacaggtatgagccgctgcacccggcgaaatggttacattttgtcaagtgggcaaatgggaagaacagaagcccgtgaattttgggctactttgaggcaaaatgctttattttttctaggtccatatggatggactgctaataactgctaagttgaagttaaatggactcttgttcttaaaaaaaatattttgccatatcctctgcaaaactgcttattaatttgcataaacttttttttttatttttgaggggggtgagggaaagggtattttgctgtcgatggaatgcagtggcgtgatttcagctcactgcagcctcccgggctcaagccatcctcccatctcagcctcacggatagctggaactaccagcacgtgccaccacgcgtggctaatttttgtatttttaatagagatggggttttgccatgttgcccaggcagatctcgaacatctggcctcaagtgatcctcctgccttgtcctcccaaagtgctgtgattacaggtgcgggccaccatgcctggcctgcttaaactattcagttaaaaacaaacaaaaaagaggccgggcgcggtggctcacgcctgtaatcccagcactttaggaggccgaggcgggcggatcacgaggtcaggagattgaggccatcctggctaacactgtgaaaccccgtctctactaaacatacaaaaacaaaattagccgggcgtggtggcgggtgactgtagtcccagctactcgggagactaaggcaggagaatggcgtgaacccgggaggcggagcttgcagtgagccgagatcgcgccactgcactccagcctgggcgacagagcgagactccgtctcaaaaaaaaaaaaaaaaaaaaaagatacaagtgagtattcttaatagtatgtcaattacatctcaaaaaagtcaaaaaaaaaaaaaaaaaaagaatgaaagaatacctccccaaaaatgatacaagaaaagattcacctaaatctgttcacagctgtctgcagagctcctactgtgtgctgagcctgggggtaaacagggcacggacacgtttgggaggggattacaggccgggtttccacactttttggtccaggcaaacccagacgagccagctggctcaagaacttggcagctgcgtgatgactgaacagaggctgcgttcgaacccactactgcaagacttaggagcccccgatgggaactgccgtggttcactgccccagccccgccgctcaactgccccgccctggcctacgacatcctcctgcccgcatggactgcgcgcagcgccgccaagcggggagcccagctcggtgctagcgcccgcgaagcggaggaggccggcgcccgaggctgggcgaagttcctcctagcgcagcgaggaccggagggcaaggccagcgcgcgccgggcgacctgcgtcccgggcacagacgcgacgggcccgcacggggcggggaccgcgcgcgcctgctgggcctacggctgtggggcgcgcagagtccacctggcggccaagggcgctggcgaccgctgaagctcctgggggtgttcggggtccgggctgcgcctgtgcccgcgggaaggctgggcgcttcccacacacagaccccgctccgggccagccccgcagggagactaccagggctggcggtagctgggcgtggtcgggtcgggggcggctgtgggcggccggcaggcagcgcgcggggcagccctcggcagacggccaatggcggcggtgctcggggcgctcggggcgacgcggcgcttgttggcggcgctgcgaggccagagcctagggctagcggccatggtgagtgcacagcggccgcgtgggtgggggtccggggtcggggggcggtgcgaggcccggcggcgtcggctgagggaccagcgggactggggc

SEQ ID NO: 34393 - DNA, 2300 bp, Homo sapien
aaaagtccctggtgagaaagggttgtatgtatcctacagggaacaaaaagatgaaacactatgttcccctgggactaagtgcactgactaggatcacccatggggaacctaatcatgggccctcatgcattcaaaatacaactaggtaaccctgggctaggtactatgggagatgtacacaggtacaatccaagtctctgtcctcaagctgcttataccttagctggagagagacatgagtaaacagttacatgaccctgttcataatctaagttgcatttagtcttgtcctaactttgccactagttcgttgtcaccctgggcaaactacattacccctgggcttcagttgccccatcctttctagctctaatattgataggccctatatcaaagctctaagatgcttaattaatatcaaaacaaggctgggctgggaacgatggctcatgcctgtaatcccaatactttgagagggtggggtgggaggactgttgaggtcaggatttcaagaccaacttaggcaacatagcgagaccttgtctctacaaaaaatgttttaaaaattagccaggcatggtggcatgtgcctgtagtccaagctacttgggaggctgaggcaggcggatcacttgagcccaggagttggagactgcagtgagctatgatcacaccactgtactcaaggctagatgacagaggaagaccccatctctaaaaacaatgtttttaatttaaaaaataagtctgaaagaacaccacaaacaagtataagtctaggaatgaattctaaatggaaagaaaagacaacagactaatgtctgagactaccaggtctgtataaagcataagatctccacctcctctccaggctgtcctgtgccccacccaccgaaaccaactttgctacggtcactgatgtcctccatgctgcttcctccaatgggcatcccctggtactcatcttacttggtgtctcagcagaattcatacttccctccttttgaaacaccatcttcttttggattctgtgacatgacattgacctgattttcttcccttttttttttttttttttgagacaaggtctcgctctattacccaggttgcagtgcagtagcacaatcatagctcactgcagcctcaaactcctggcctcaagcaattctcccgccttggcctcccaaaatgctgggattacaggcaagagccaacagcctttttccatttatctaacaaatctttcttgtctttgccaactcctcctcttctaactcacccctaaatggaccaagtcctgagccatcctctcttctcacactataatttcttcttgagtcatctcatctattaccttggcttttttccataaatacctatgattctccaattatctccaacccagacctcacctctggctttctaattcagacataaattttctggaagttgacatttggatgtctcacagcactccttaaacagtgtccaaaccagaaatcttgatccctgcatcccaaacccattcctctcccacacttccccagctcagtaaatatcacttccagccacctatttcctcctttcctccaggcccgaaatctgggagtcatgttgcctaggctggagtggcacgatcttggcttactgcaagctctgcctcccgggtttacaccattctcctgcctcagcctcccaagtagctgggactacaggcgcccgccaccacgcctggctaatttttttgtatttttagtagagacggggtttcaccacgttagccaggatggtctcaatctcctgatctcgtgatctgcctgtcttggcctcccaaagtgctaggattacaggcgtgagccaccgcgcccagcctggaagtcattcttaatacccttcactccttttacccttgccatgagccctacaaacaactaacttaccactaatagtcacatcgtccctcttattaatcatcatcctagccctaagtctggcctacgaatgattataaaaagggttagactgagccgaattggtatatagttcaaacaaaacgaatgatttcgactcattaaattatgataatcatatttaccaaatgcctctcatttacataaatattatactagaatttaccatctcacttctaggaatactagtatatcgctcacacctgatatcctccctactatgcctagaaggaataatactatcactattcattatagccactctcataaccctcaacacccactccctcttagccaatattgtacctatcgccatactagtctttgctg

SEQ ID NO: 34394 - DNA, 2300 bp, Homo sapien
aagagagaagtcacaaaagtatactactgagtttcctggagatgaaatcctgttgtccctagctatgtgaatgagcacagggatccctgatgccattattttgtatattcatacggcacacacttactgagggccttctgtgtgccctaggggattgagcacagtgacatatcagggcaggtagaaacagatggagagctgatgcgggctgtcttagagcagctgccccaggaggcccctgtggatggatgttgggcaggagccctgagacgttaggggcatataactaaaggacatagcaggagttataggaggagctgatccctgagggaaacaatgaagacggagaagatggggctaaagtttgaattgtggggacattaatcacagtgattcttaaaactttgctgttgatgattttaaatggagaaaatgagtacgtaagatgttatttcccagttcagtatattggttgcccacaaagtattttcctaccatgaatggtcatatatacttgttgtagaataccagggacagcagagatggtggggtagttacttccttttcttacagcccaagaactttggtgtccaggagattgaccaatttagccactgagcatttaatacaacacagggctacccagatcccactgtcctgatttgccctgaaagccaaaggagttaggagaaggtgagtggggagaatatattaatcctgagagttgaacagagcaaaaatccctattacttttgtacttaaaacatctctgccacatgtgctcactctttatattctgtttaggtggtttatatgtgcacatcccatcctatgcctgcagttagccaactcagggtttatattgcctcctttctttttttctttttttttttttttttaagagatggggtctcattctatcatgcagactggagtgcagtggtgtgatcacagctcattgtaacctccaacgcctggactaaagtgatcctcctaccttggcctctctggtagctgggactacaggtgcatgccaccacacccacctaattttttttatttttattttttgtagagacagtctcactatcttgctcaggctagtcctgaactcctgggctcaagttatcttgctgcctcagcctcccatgggtaatttttatttcctttttttttttttttggagatggagtttcgctcttgtcgcccaggctggagtgcaatggcacgatcttggctcactgcagtctccacctcctgggttcaagtgattctccatcctcagcctcctgagtagctgagattacaggcaactgccaccatgcgcggctaatttatgtatttttttttagtaagagatggggtttcaccatgttggccagactagtcttaaactcctgacctcaagcgacctgcctgccttggcctcccaaagtgctgggattacaggcatgagccgctatgcctcgtcgctgatttttatttcttattttttttttagagatgggggtctcactatgttgctcaggctgatctcaaactcctggcctcaagtgatcctcccaccttagcctcccaagttgctgggattataagtgtgagccactatccctacctcactattaccttctttgcttctcttgttttcttttgttctaagtcaaacccatcacaatcttttcttgtccttccaggtgttttccagtgctgtgccctggatgtgctctctttctcttagagcccagagaacttgcttttcccccttatatatgacccttaactttttctaacacattattaagggcctgtgtctatcagctgggggcacttcttgaagggagggcctttgtgtggtctgtttctagtgacttccagctttaacccagagcctcatgattgctgggtgcccatagcctttttgctgaatggaggcactcagtctccttgggaagagagaatccatgatagacccacttgggagctccccacttcaggggcctacacactggtaatgcaacagaatgcccaagagtgacctcataaagcaaggattcccttcgtggccccttctctgctgcctctcagaatccagacgctaaggaaaatccctaagcagagattttctgttggatgctaaaagcaaggaataaaagttgaaaatttggaaaatgtctcaacaccgtcaccagcgccactcgagagtcatttctagttcaccagttgacactacatcggtgggattttgcccaacattcaagaaatttaagtaaatattatctatctccattgcctgttaagaa

SEQ ID NO: 34395 - DNA, 2300 bp, Homo sapien
aagttctgcttgtgggtctaagctttggagggctgcagcagaggcggcccgggagccctctgcgcgggtgcccttaggcgcgcaccccttgctcacccgcacgcgcggctcggtgaggttggtccacacggcgatctcctccctcatgctcatgtcggggtagcggttcctctggaacgtggcctctagctcttgcaactgctggcttgtgaagtgcgtacgttgccgccgctgcttcttcttcttggctgggtcgtctgcgccgccgcagcccgtgcctcccgcaccactgtcctcgggccccttgggttccccgccgcgctccttctctgcagtaggcaggacggggagcgggtcacctgggcttacgccccgttgcaccccgtcccggctccaccgaaccgctcgccaccagcgctggcggtcttccctccctccctccctctagggttcctgggaactgtccccactggaaagcgcccgccgggtgctggtcgtcagtaggcacctctagtctggtgtgccgcggagaagagcccaagaatcggagctggagccgcgggcctgcgttcctggctgggcagggcctgcacccttagctcggctcagattctgaccctgctgctgatgttcccagcaaatgtatgctttttgtttgtttgttttgcgaactcttagggggtctaaatctgagggggtctctgcttttctgaactaggatcagatctctccagcctaaagtccctccactttcttctcctcaggggtgtatgggagccccactgggcaggcacaacacagccgggttctcggccttgcttccaggcctccagtcccaaagcctagaaaaccccaccaactgcagcccagacagacagactctgtctaggtgacctcgggctttagtctgtctctctttgaagctacacaaaacacacgcagtcatagaaacattaatacataaagaaaaagagtttaaaaacaaaacacagaagcccagaaaagctcacagctctatgcctaaagacactgaaagggccacaaattctcaaaatcagacaggaagaaacacagagcaaatgtaaattaagaagccagaaagctccgtacaaacacacccctaactaaatacagagctgtaagtgtataaactccaggttgacagaagcatttatttctctgggatttaaaaaaataatgtaccgttgtagatagatttttaactccttcccaataaggcccttgtagagataatttttaaatcccagagaaacacattatagttagataatttaaattccccaaataacaccactgtaaatggattttgagaaaattccggagaaacgcgccattttggattgactttttaaaatctccggaagaataatgttgcatgtagatattttaaattccagacctacacttcgtacgttaattctttcagaatcgaaagatacagttaaaattaattcatcctcatagatttggttcaaaaaaatcaatatacgattatatatctctctaggttttaaaaataaaaccaaccaaagaccgcgcttaaaacttttgaaaacaaaagtagagttcagcgttgattatgttttaaccaagcaaacaacctctcagaaaaatcacttagggatgcaaaagagaaacagatactaagaaagtggagagaaacattcagctgtgtattaagaaatgaacgcagaagaggcgcccacaccggggagctcggagcccctccggaacccggccggctgcgctgggcagcggattcgctgccccactgcccgcgccggccacccgcgggcccagttcgctgctggaaaaaagctccagctcggacaaaaaaaggcagcgcggagggagacgcgcaggagccggggcgggggccagagccgggctgctccgggcttcggccgcgcacgtgggccggatcccttgatcggcgttccggctggccttgctgggagtccggccgcgcctgttggcccgctcgccctcaccgtcctctgtgtctcccttctacttgatgacccctctccccccgtttacccttcccgcccgccccttctctttggtctctttcattctgtcgcctactgtcacggtgttaacctccctctctgtctctctgagtgcgttctctcgcccgtcacccctcttcctttctcggtctcctcctctcccttcgtccgagccgctccttagcgcccagttgcgcaaatcaaattctttcccgttctatttactcctgatcaagaggggctgtcagtccaaccctccagctgtag

SEQ ID NO: 34396 - DNA, 2300 bp, Homo sapien
taaatgcactaacagtgaggaaacacgcccctcagactaagcagtgagtgctgctcacagaatagtccccattgggggatggcccaaagagtcactttggtccctctgggaagtgagaaggcaagtgagaaggctgtgagtcttaacctcctctagaggcccacagacagaccattcatttctaagtctctacccagagacgcactgtgcttcccaccttggcctgacatgtggcagggttagaacacacctcctatcccctgccagcccgcgttcatgccaagtagcacatatatgcctaaactcagcacttccatagtgcagtgaatacatgtgtgtgtacagcatctccgcatggatgtacaggatgtgtgtgtgtgtgcgtgcccccatgctgtctgcattcaggctgttctttttggtaagacagctaaaaaaagaatggtctgtgaagggacactccctagcacgctgcaacacctgaatatctccttgaaaggagggatcttctactgcaggagactcgtggtaaaggtggccaagaaacatggcaacggtggggctgagggcaaatgctgggcaactgtgcttccccatgttcccctccccgtagccaagactcatttcatggagggagatctcagcttggaagaaggcaggagtcactgagcctccccaatccaaacccctgagaagtgtcctccctctggcctcagaccctgcatcctgtggtcacagacccacagtgagaaaggaccaggccctaaggagctgtgctgtctctccacggcccagagcgggggatggggatggggatggggatggggatggggatggggatgggggtaggggtgggggtgctttggactaacgtggagggaatggaaggcaggcctggttccaccctgcatgcccgaccctggccccagcagcccccacaaggagctcagctgaccctgggtgtctccctgtgatgggaaggggtaagacgaggactcaaaggcagaacctgcagagtgccccagacgctgatacctgcacagtcagtgccacccacccaggagttgaggaggcactgggttttggggtgaggacactggacacctccctgcttctttcccaggcagacaatcctggcgcagctcccttgggttgctgtgtctggtggagctgatcacaggtgaggggcagagggcagtctggggtccgcctatggccagaggagcaggtcagggcggcgccttgccgccccagctgtggcctgtttgctcaagacgctgaggtctcggggccagctaacaattgttgagcaaaatccttcgacaaacttcacctacgtgcaaggactcgaggagggaatcactcttaggagtgggagagtaatgtctttgcctgtgcccagtgaaggcccattggagctgcagctcagctaccactgtgtgggagagaagctggaagactgagggcttcctgggctgctggcccagggttgggagacagcagtcacctggcttaccaggcctatgcctgaagccctgggaagccaggacgcaggccccaggctgggacaaagctaccctgaaggagggcaaaggctgccaaggccaaccccatgcctgccaaggccaggcctggcccatttggccaaggcctaaggtgtaaaacaaggggagaggtacaagaggctgtggggtctggctgggatccttggggtcttccttctgcattctccaaacgcctagagccagcagaaacgtttcgtctgattagaagccatcatttctatcccaatcccggaaaattgactgcggtgcagagagggaggcctgagaagcagccgtaggggagaaggtccaagctaattaggaggcagcatccgggggcccattagagcgcaggctgctgtcactcagccgggctgagttcccgggagaagaggctggagaaggaggggcaggcggcccctcgacgaggacaccgctgggagctgccggaacgggccccgggctctgcccccgccccggcgctggctcgaaggcgcccgctcggtgcgatcctgttcggcaaacattcactcatcctgggctgttctcgccagggctggggacttcgaggcggccgagacgggagttgattctaggcgaaacaagtcatttgaggcctgaggtgtgcacgagccgcccgggactcgcaggccagatgcgtttcttttgtgaggccgagggagaactcggtgtgtcaccggggaaggagggagaggcgcggcgaggccgcggggggcggggaggcggcgggaaggt

SEQ ID NO: 34397 - DNA, 2300 bp, Homo sapien
gagaaggggtgaaatcaagacactgtggagctgtgatgctcagtacagaagccactagtcccgtaggcctatctaagttaaaattaaaattaaaattaaatagaagtaaaaaatctagtccttcagctgcacgagccagagcgggtatttcaaaagctcaatagacacacaggactaggagccactgtgttgcacagctcagatctgaagaacatttccatcaccacggaaggttctgatggatagcactgccctggatgagcccccgagtggaccatgggcacagaggtccatccccaacatggcggtgcctatcaagaagccctgatcatcacttcagagctgggtcctgagtcttcagtctcagaaaaacctctacagccaaggcccaaacacttctgggaatttgcccaggatccccagtgcaatgtctcacccagacttatcctcttatctcaacaaaagttcccttgtgactcatctcccaaggccacactgtcacactgctccaggggtgtagcgaaaatggtgccccactgccccaccaccaccaaggatacgtccacccaggacccatgagcatgaacttatttggaaaaataagtctttgcagatataattaagttaaagatctcaggatgaagaccaggctgactcaaccaggttgttcctaaacctgatgacaagagcctttataagaagaagagatgtcacagagcaggaggccacatgaagacagaggcagaaactagagttacatagtcacaagccacagcatgccaaggactgccagcagcctccagaagccacgagcgagaagcaggacagatcaccccgcacatcctcccgaaggagtcaaccctgccaacacctgggttttgaacttctggcctccagaactctgagagaataaatttctgttgttttaagccacttggtgtgtggcaatttgttgcagcagggctaggaaactaatataaggggttaatggcaaattatgactgaatgggtttgctctcccaggagagatgcattcagcatggatgcctggcctgtgacttccagcctggacccatgggtccccactgagcatgagcgctgaggcaggcaagcagacggagcctcgggccccagggccaccatttgatctgcacgtgccaggaggaagtacctgatggcagtggcagagtgcaggatgtgggagcagtgaggcctttgcggcactcctcaaaagatgctacagagatggctctggtgccccccacccagtctctcctgacctttctccccttgtggctccctcctccacaccatcctgggccactgtgctctgccctttctcgcttctcctctcctgctgatctcattcctactctcatcccaaggctcatctcaaaacccacctcctccaggaagcctcctcggaccaccccatcccagcatgacagctgcatgccacggcagaaggagccctgagttccaggcttggcctagccatgccctccctatgagactcccatcaatctcttcatttctttctaggcctcagtatccccatctgcagcatgaggggtgaggctagaccagctctaggatttccagctgtcacataacacgctcaccaatttgcaccagtattcacctttttttttgcctggcatgcaagagatgtcaaataatagcaataaacattatctatttatttattttttgagacaaagtctgctctgtcacccaggctagagtacactggcatgatctcggctcactgcaacctctgcctcccgggtaccagcgattctcgtgcccagcctctagagtagctgagattacaggcgtgcaccaccacgcctggctaatttttctatttttaatagagatggggttttgctatgttggccaggctggtcttgaactcctgacctcaggtgatcctcccacctcggcctcccaaagtgctggtattacaggtgtgagccaccacatctgacctaataatattaattatgaaataaaaactagcaattatgaagctgatcataatgctaaatgctttatgtgtgttatcacaatagcatttttttggatggatagatgcatcggaggaggggagaggagaggaaagtgggaggagaggctgcactctaaacaggtctcagactcatgaaggcagaacccttgttcccctggctggtcccagcactgagcttaacatgccacaaggggctcaacacatatggggagggacaccaaagaacttacagaaaggagaccagatttaggaagtatcttacttttga

SEQ ID NO: 34398 - DNA, 2300 bp, Homo sapien
ttcagcattacatgactaatgggcacgtaaattaaatgttactaagcaagagactattctcacttcttgccaccctgagcagggcagggaagccagccagcagtcacagtgatggggacagccttaaaggcccatagtcacttggaagacaatggcagagcccttaggggtttgcccaagccaggtaggatgttagcaccagcctagtgctcaaggatgaggacagtcacatccaccagcccccaaccctcagcaatgagtactcattctaggtcctgatagctgccttactttggcccccagatcacaagtccctttaaaggaaagctgatctcctcgtccactgtggcttgtgcttccttttgtcccaggtgccacccacgggctctgaacattcatcctagtttgcttgctcccgcatcccgagcagcatttgagtcttatgtttgaaatgggttcatttgagccagcaactccctgcttcccttttgtgcctcgtgcacttggagtgtccactgtcctttacctgtatcccaaggctccttctctgagacttcccagctctcctgttatttcccacctcatgcttttctttgcagctgaaccttattcacagtgaaatcagtaatttagccggctttgaggtggaggccataatcaatcctaccaatgctgacattgaccttaaagatgacctaggtaattggggacggggttcggcaccaccagctgtcagatgaaaagttatggaacccagaatttaggcatttcatcttcccagactttacagtggtcaagccaaatttccaaatccaagattgatatttgagtgtagacgctgaatatcaacttactccaggccattccaagtgtaaacggtctgtttcattaagtgtgattggctactctctcctcaattgcaaatacattgccatctgaattctcttccataatgatcaaactgactgctggttacttggggagggatttttaaacgtgttggtttttgtttgtttttttgtttttactttagaactgaaaaatctcaggtaactacaaaatgatagtttctccatttaaaccttaattagaaatgacaaagcttgaaagagaagacaggccacatcagtatgctattaagctgtctttagtccacaatttactaccatcacttcaacttttctttagaactgaaaacagtatatgactgaatgccaccttcttgaattatttggctagaggatggtattaaacagaagggcaatatctccaagtgagttcttatggaggaaaactgccccagagccatggtgtctccctgttcaagatggcagatggttcagggcagactgagaggtgcccctcaagtgtcctgcctctatggctttatctttgcatatgtggcactgtcagctcaatggcacgacagggctgctctgctgctcttcgatgtagaggcttgccaggggaaataggcacacagatgcagcctccttcctaaccctcaactgcaatctattttgtatcccttgagctctcagcttctgctgtttttgtcagatagcagacttccttactgggagatacactcattccatgggcccaggcctgacccacacgaactgggtgcaacagtgggctgaaaacatgaggactggactcaagagtgtccagcttgaacttgttttccaactgccttatacagatacttaaaaaaaaaaaggccacaagctagaaaaagcaaggattctatccaaagcacattttatactaaaatacaaaggccaggtgcagtggctcacacctgtaactccagcgttttgggaggctgaggcaggaggattgagtgaggccaggagttggagaccaacctgggcaagatagtgagacctcatctctacaaaaaataaaaaacttagctgggcttggtgacacgtgcctgtagtctcagctactcaggaggctgaggcaggaggattgcttgagcccaggagttcgaagctgcagtgagctatgattgtgccactgcactccagcctaggcaacagcaagatcctatctgtaaaaaaaaaaaaaaaaaaaaaaaaaaaaaaaaaaaaaattaaaccataaaaataagataggctagagtaagagatgggcctggaaaaatattgatagagatcggcccatatgttgaggggaaaaaataaaggcagtcctctacatatatcaatactgttctctgggttttcaagagaaatcccttgaaggtagacaaaatggtaaatgtcacaagaataaaaatcaaagcctgcaag

SEQ ID NO: 34399 - DNA, 2300 bp, Homo sapien
cttggggccgcattagctctgaaggcaggtcccagaacacatgccctctgagcttctcagtggggaaggaatgcgaggcgctcctcaagttcgcctctctcagggaccagaagaaacatcagatggagatgtgtcactccctgacactggcccatttggtaaaaactaaaccagtggcatggttgtatactagaatgtcacatgtgaagttccagacaattcttaaagtttaataaaatgtgagttaaattatgcctccttctaaaggcctgcctcaaacaattttcatttagacaaccctcttaatgccttatctagggatcagcattaacaatggtgacagatcgaagccaaagaacagactggaaagatttctctctccttgtaaaactagaagggggaagaatttgaagtctttcaagagttttgttgtgtttaagaaaaaataagtttgaaaacatactcatcctcatcagagagtctcttgtgcaagactgagatgctgctgcccaactctagttaaatgtgtacaatgggtattaattccagttgcaggcaagaggtgtccatttcagagttaacacctctgacaacaggctagtagcctaaaggtggcctgcagtaggtgaattccacctaatttacaactcgagtctcccattcaaacctaagactgttaaaaaatgcccgactccctggagcagggagctttggaacaaaacacttcccttaccccctactttaacggtaaaacctcaaaccacaaaggtggaagaaaagagggaagctagcaggagtgccccctctaattgtctattcttatgtgctgtttactgggtcattaaaatcttacaaggcctttatagtcattgtaattgttgaattcaaggtttgtcccagttgtttgtacagaagtctctcactttgaaactcagaaacatttcccctaacatcttgtctaaaagaacctttcaagcaatgtactgaccaactccttgagtgatctgtggcccctgcaggagtgggggtagggagcgccatgtcgcacacctgttgtcaggtgacactgccagcagcatcctgcacactcacctccccactccaccccacccccagcgaggctctttcctgctggccttctccacccggggaagcctacagccttccggagttaccttttaaaaaaagcaaacccttcctaccacaaagcaaacaaaaggctgataccgagacaatcgggagcagcgggggttcccgtggcccctctccagcccatccttggaccactccccaacccggtcccccgcaccagcccggcttcaatcccgcgagtagcccccgccttcccctccctgcagatagcgagccagacgcctacacctcggccccccggggctcgggcccgacttattgtgccggggccggcaactcgcgggccggcgggggcctcaccaagtacaactctgctcacagcagctcccgggtgcccaggcccagactgcctagccagcgccgcggggcctcctgcggcctcgggcctggcccgtgagcccgccccaggaagggtcgccagggtaggcgccagcaccgcttttttcccacaaaagcgcccaggcgcgggcagggggatgcgtttcgaagagaagttggtttccaggtttcttttttgaacaaaaccaaagggaatcccgcgcggcccgacaaggcctgggaggacgtagtgcacgcgcgaggacccggcgtgggccacaccgaacccggcggcccgagcccggcccgcaccacaccggtgcgcgccaggccgggccgctcccgggcacccgcggccggacccgagcggcggggacagggagtgcggcaagggggcccgcgcggcacttacgcggcggctcggtggcggcggcggcagctgcaaggtgtctcggcctgagccctcctggccgctcgcgccttttctctccgcgctcctcgctggcccgcccgcctcttcgcttcccgcccgcgcggcccgcgctctccccctccgcccggcgccgctgccgagtgaactggaaccagtcctcgcggccggcttcccacaatgcacagcgcgccgctcgtcacatcccttcgcggccccgagcgtccggcctccgcgcccgtgccgcccggcgccccggccttgaccccgggcccgcgccctacccgttgacgccggccgctctgcgcccaggcaccagcccgcaccccggacgcgaggtctgacccatgaccccggggacgcccagagcccagtccttgggaagggccaggcccctgga

SEQ ID NO: 34400 - DNA, 2300 bp, Homo sapien
tgggagcaggctgttctctcctagcaatgaatgtagagtgagttttattttttgagcatttttatttttcatgttttcagaatgagcatagctttgtcattggaaaaaaataaaaaacctttaacagaagaagaagcaatagcagcagcagcagctggtacccctctctgagccagattaggggaggagacaggtcaccgaagtggaagaacaggacacacaaagcgcaggaggagagaggggagagaaggtggaggcttctggagaaggatgaggtcagagctgctgcactgaacagctccagaggacaaaggtcctagtgtgttctatgagaatggcacgctgtagaggggcatggaggtggggccgccccaagatcagctcttggaggagtgtagactttaattccacctggtggtccctacagaacggagagtccttgcccaaaggcacagagaaggatggaacaacaatgtggtgtgtgggggagggtctctgcacctttcctgacatcttttcttcgggagatcctcatagaaccataatgctttgttttgggaccagaagcatcataagcatcatcatttttccagcttcatctcctgttactttccccttcacccattctactccaacctcacactcgctctgtcttgactattttggacacactcctaccccagcctttgcacttgctattcctcatgctcggcgcagttcttccccagacatccacacggcttgctccctcaatttcttcaggctttaaatgttactttctcatagaggccttctcttgtatttgagcctcactcttatctcacacttcctattccccttctccgccttatttttctccaccccatggagaccctctgacacattctcccgtttgtctgtctttcccccacgagactgcaaactacaggagggcagagatttctgcctgttctcttggctgtttcatatccagcacccaaatcgatgtatgacacaaaatacgttctcagtacttaatcgaattaacgaatgcatgaatggcaggtattggacattgttttgcaaactcttaaagtaaggtgtaaagcatcccggtgaggtggaggttactgccgctgcgattcccgcgcagcctgaggactggggggtgggggtgggggtctctaattacctccataatccccagtagcggcactttaaacttcacatcaaccctgagggatgtgtattattatccaaatttagttcacagctggatggagaagtggcttccggctccacactttggagggaggggagtagagggcaggcccccatttaagtacccgggatggggcaccaatgccttcaggcggtaaaccaatttaggaagacgtggcgggctttgtggcggctcctcctctttcggcctgtccgcagtttttaaaaaacgtgtgtgatgataaggaatcactgtctacattagtaattcccaacttgggtccgaaagtgaacttttgctgaagcgaagtagctaaccgcttccatgtgcaaggcaggttccagacttcggggtgaggaggattaactgaaggaccccaggggaaccgggtgcgcagtaattgatcttggggcagaccagggcttggcggtggcctgtatctaaagacagcggggtctctgaggcggggcaggggggagttggcattgactggggagggaagagcgatcgctggtaacagccattgtgccttcccactgggttagtgggaaggttcctaaagatgccgtggcagcgacagtcccgtgctcagagccaggcacacagtaggcgttcactcgagacgcagagtctgggacgcgccctgaagaagctcctctccaggggcctggcccttcccaaggactgggctctgggcgtccccggggtcatgggtcagacctcgcgtccggggtgcgggctggtgcctgggcgcagagcggccggcgtcaacgggtagggcgcgggcccggggtcaaggccggggcgccgggcggcacgggcgcggaggccggacgctcggggccgcgaagggatgtgacgagcggcgcgctgtgcattgtgggaagccggccgcgaggactggttccagttcactcggcagcggcgccgggcggagggggagagcgcgggccgcgcgggcgggaagcgaagaggcgggcgggccagcgaggagcgcggagagaaaaggcgcgagcggccaggagggctcaggccgagacaccttgcagctgccgccgccgccaccgagccgccgcgtaagtgccgcgcgggccccctt

SEQ ID NO: 34401 - DNA, 2300 bp, Homo sapien
attttttttttcaggttctacattgcacttaacctttaagaaacgactccttgcattttggtgtggtatgaaaaaagaacatctgtaattatctgaaaaggcgattaaaatcctctattctttcccatatacatatctacataaggctgaattttcttcacatacttcaaacaaaacaacatatagtgaccgactgaatgcaggaggaggcatgaaaccagctatcttctattacaccagacattcaagagccgtgcaaaactgtaaaacaatgccactcttcccactaattatttttgtttggaaagtataattatttttctaaaatacattatttatgtaatataatttctttccatgttaacatttttaaaataaattaataaatatttactttttctcagtttttatttctaataaagcaaatattgatagatgtaacctataaaacaaaagctcttcagggttctcagtaatttttaagagggtcaagggaaacccaaacagttccagtaatgttattgtagaacaactacccagtaaaatgctcataaagaaccattaagtttaaagtgcaggtgacaatcactaaatagagtagaaactctgtatgtttaatgttaagtggatatagataaaaaggctggaatgggagcaggctgttctctcctagcaatgaatgtagagtgagttttattttttgagcatttttatttttcatgttttcagaatgagcatagctttgtcattggaaaaaaataaaaaacctttaacagaagaagaagcaatagcagcagcagcagctggtacccctctctgagccagattaggggaggagacaggtcaccgaagtggaagaacaggacacacaaagcgcaggaggagagaggggagagaaggtggaggcttctggagaaggatgaggtcagagctgctgcactgaacagctccagaggacaaaggtcctagtgtgttctatgagaatggcacgctgtagaggggcatggaggtggggccgccccaagatcagctcttggaggagtgtagactttaattccacctggtggtccctacagaacggagagtccttgcccaaaggcacagagaaggatggaacaacaatgtggtgtgtgggggagggtctctgcacctttcctgacatcttttcttcgggagatcctcatagaaccataatgctttgttttgggaccagaagcatcataagcatcatcatttttccagcttcatctcctgttactttccccttcacccattctactccaacctcacactcgctctgtcttgactattttggacacactcctaccccagcctttgcacttgctattcctcatgctcggcgcagttcttccccagacatccacacggcttgctccctcaatttcttcaggctttaaatgttactttctcatagaggccttctcttgtatttgagcctcactcttatctcacacttcctattccccttctccgccttatttttctccaccccatggagaccctctgacacattctcccgtttgtctgtctttcccccacgagactgcaaactacaggagggcagagatttctgcctgttctcttggctgtttcatatccagcacccaaatcgatgtatgacacaaaatacgttctcagtacttaatcgaattaacgaatgcatgaatggcaggtattggacattgttttgcaaactcttaaagtaaggtgtaaagcatcccggtgaggtggaggttactgccgctgcgattcccgcgcagcctgaggactggggggtgggggtgggggtctctaattacctccataatccccagtagcggcactttaaacttcacatcaaccctgagggatgtgtattattatccaaatttagttcacagctggatggagaagtggcttccggctccacactttggagggaggggagtagagggcaggcccccatttaagtacccgggatggggcaccaatgccttcaggcggtaaaccaatttaggaagacgtggcgggctttgtggcggctcctcctctttcggcctgtccgcagtttttaaaaaacgtgtgtgatgataaggaatcactgtctacattagtaattcccaacttgggtccgaaagtgaacttttgctgaagcgaagtagctaaccgcttccatgtgcaaggcaggttccagacttcggggtgaggaggattaactgaaggaccccaggggaaccgggtgcgcagtaattgatcttggggcagaccagggcttggcggtggcctgtatctaaagacag

SEQ ID NO: 34402 - DNA, 2300 bp, Homo sapien
ggagaggagcagaaaagattactattgggtacggggcttaatacctgggtgatgaaataatctgtaaaacaaacccccatgacataagtttacatatgtaacaaaccttcacatgtacccctgaaactaaaataagtttcaaaaataaaatgtcattattattgtttttcatatggttaatattcactttgatttatatgaatatatccatttccattgctcttcattttcttctacatttctatgctttcatttgggattacttttcttctgcctgaagaacactagaatttactttagagtaggtgtactgttggcaaattcttcagtttttgtgtgaaaatgactttatgtcatctttatttttgaaggattctttatctgggcatggaattctaggttggcggttactttagagcaaaatatcttcaacaaaccaggaataaatgaaaacatcctcaatttgaaaaagaacatttgcaaaaatcctgcagttaacatcatacttactgataagaaaccagaaattttcccactaagatcaggagcaagacaaggacatttcctctcactattctttttcaacatcgtttaaccaaaaagttttaaccaatgaagtaagattaaaaaggaaaaaaaggtatacatattgggaaggaagaaaaaaactgtctttatttgcagatgacgtaattgtccatgtagaaaatccaaaggaattgacaaaaaagctcctggaactagtaagtgattaacggacgattgcaggatacaagattaatacataaaatcaattactttcctatatgccagcaatgaacaagtggaatttgaaataaaaaacacaatgccatttccattaatattcaaaaaagaaatatttctgtataaatctaacaaaacatatacaagatctatatgaggaaacccatgaaactatgatgaaggaaatcaaagaactgaacaaatagagagatatcccatgtccatgaataggaagattcaatactgtcaggatgtcagttcttccctcctttattgatagatttgatgaagtctcgtcaaaatcccagcgagttattttgtggctattaacaaactgattctaacatttatatagacagacaactcaaaagagccaagacaaaattgaaagagaagaacagaattgaaggactggcagtacccaacttcaagacttactacagagctgcagcaatcaagacagtaaggtattggtgaaaaaatagacaaatagatcaatgatacaaagtagagagcccagaaataaacccacatgaatacagtcaaccaatctttgacaaaggagtaaagagaaaacactgaaggaaaaaaaacatggtcatttcggaaaatggtgctgagacaactgaacacctataagccaaaaaaaaaaaaaatctagacacaaaccttacacatgtcagaaaaattaaaatgtacgtatagaactataaaactcctaggagataacgcaggtgacttgaacacactggtggactatgaaatgctgggctacgtgaagggttagcaccttcacattccagggcagccagagcccgcagtgctggacaagcgaccatcttcaccccttccaaactgcatgcaaataggcagagctcgggcgatggggagtgggcatgagagaccaccttctcactgttctgcaggagagatcatgttctatgagtggccatttactgccctctccatcctccccgtccccaggccctgccctctcctgagaccctcagggaagtgccatgttgcctacagtttccttggccaacctctatccagccagaacgctctcctcattctcccacactcaggggactctcctgtcccgtagccatctgtcccaaaaagctcttcttttctaacatgcctgggctgctttgaccccatcctactggcaggtggagaggaactttgcagataccctgggtgcaggtcctaaggtccctgggggtggggtaggagaggctggcagaactgaaacccaggaaggcaggccatctgtctcagaaggggccccacgctggggtttctcaaactctcagcagtggaattgcacttctgcaatgaaaaattacacttctattttctttcctaaagggaaaaaggaagaatgcaacaaaactgaagtatgttctgccacgttcctgaactgcagccataggagccctcccagccctacccaaaccagcctactccctctcaagagctcacagctgcaggactagagccagatgtgccccggcaataaggtaagttga

SEQ ID NO: 34403 - DNA, 2300 bp, Homo sapien
agagacagagaaggagaagacacagagaggaaggccgcatgaagaaaggaggcagagattggagtgacacagctgccaatcaatgaatggccaagatggccaggagccaccactagaagctgcaagagaggcatgtcacagattttctctcagagcctccgaaaaggagccatccctgccaaaaacttgcttacagacttctggcctcttgaactgtaagagaatgaacttctgttgccttaaaccccctagtttgtggaattttgttgtggcagtccaaagaaaggaagctgacacagggagagaaacagaggtggggggcagagagaggacccttgggctcctgctggtttacacaagtcctcgaagcccttgagttcttgagaagcccccgtatccatccaacaactgccctttcctgagtgagctggtcgaagccactttctgtgacttctaataaatctcgagcccttatatatgactgtgtcctagccttccactgagatcaggggtacctgcagggtgcagtcggggaaggggacagctgggcagagtcccctgagccagaaggcaagcgctggtcagtgagtcgaggtgggaactgccactacacagccccctttctcaaaggggccaatccccccccaacccaaagagtcagctaggctcccatggcagcaggccaggcatccggcctgaggctaccacttggatatcaggtggggggcaggcactttgctgaaagctgctcattttgtttttaataccctcatcctataatcgagtgctgttccttactatttatcctccaagtacaaagttgggtgatgtctgggcccctgtggctcctgggtgagtgtaggtgacaagagaaaagtaactcctgacatgcagagggaagacctgctggaataggcgagtttaagacaccgaaggcgggagggggtttggaggaaaggggttccactgtcacctgctgccctccaggggccagctctctctcgggccaggggagctggatcccctggctggctcaccctgaagagggccacagaggctgcaagcagggctccaagagacggtgtgcaacggatttctccgggcatggggcaggcaaggtttcaggaacgccaaagaaaaggaaattctcatattaataattatattctcatattattatttatataaattctcatattattaattcttattaagaatcttgaggtgacttgtgggcagaggtgcggaggagggtggagaagggaagggaaagaagggaagggtgagaccaagactcaaggcaacctgggaaatcacccgatcctcttttccactctcctcttcgcactccccagatgaaggtcagattctttcccgtttcttcatcagcctgaacggagcagcgacacttatccttgccctgcgccctgtgcctctggcatggccactctccagtctatttgaaaatgattttcaccctgttcagcggatgctgcacatttagtgttccacaaacattatatctgatcatcctccacagggtaaacttttgtctcatcttacaggtggggaaagcaatgctcagggaagttaaattactcgtccaaagtcacgcgaccactaagcagctggagaggggatgcgaacccaaactccaagtaccctccaggtttccgcaactcactgggcggctcacactttcgcgctcgcgccccgcctccccgtcccaccccagcgaggggcgcccagcccgccccaagaggagcgtgcctcggccgctaatcgcccgccgaccccgcctctgtttcactgcctggagacgccctggccagcttagcccgagccgactcccggggccgcgcgacgccgccgattggccggcggtaattacgggcacactccgggttgggggaggggcgatggcggcctcccgcgagcataaattatgcaaatacccgggcgctgcacggggatgacctgccgcctcgctccattcacccgggctgccgcgggggcggaggtggcaagggaggggggcgcccattgttgcgccgggtacttaaggggtcctgaggccagtcgtgtgccacactcggtgctcacacgagctgatctgatcgccggcgacatcactcaggagaccggccgggcgcgtggcccctgcaggcgaggcgaggaggccaggccaagttctccgtgcgcccctgcacccttccaggctctcgcacccgcaactggcacagagtaacaaccccaggctgttgggaacgtaagtgcgccctggcggctctgccctcagt

SEQ ID NO: 34404 - DNA, 2300 bp, Homo sapien
ctatttctgagggctgatccaatgtattaaaacctaccccaaaatggagctacaagaatatttgtcaaacagcattggttgtaagagggtaaggttgaaaacaatccaaatgtccagcaaggagtagtcaaattaattctggtacatctgtatgacggaatactctgcagctaaaatcatgataaccgcaatggtcagcacatatcaaacacttactctgtgttggggaccacattaaaagcattacatgcactatctcatttaattctgcctatgctgtacatattattatcatctccatctcacagatgaggaaaccaataccaaatagagttaaggtatttgcccaaagtcacacagctagtccctaggatgcatactcaggcaatttgactccagacaccagcctcttagccattatactacccggcctcagatgaaaccattaagggagctattgttgtagcaaggctagccacatggagcgatgttcacaatatgctaataggtatagcaagcaggttattaaagactacatgcagcctgatcccatgtgtacatgtgcacacaaagcaaaaagaggatgctttgggaagatttcacccaagattttacttgcgtgaaaatgttagttttcttctgcttgggttttctgatttttctgggcaaacgtgttgtttctatattttaaaaaattatttttagagttaaaaactaacataaatgccaaaagtcactccctcatactcatctcatgcataaatgcaaatgtccagctattggctttgctttaggtataggcacaacagcacgcataggcgctgcttgcttttcatggctcagcttcttcttgaagcagcaagggctctccagttgggaagagacgacacagattcttcccattgcacccttcagcagactgtccccatcatccagaagccctctgggcatttttgcctccagggaactgccaggctgatggcatagagctgggtgagctctctcctgacagccaagcccagggactccaagagcttgagatgatccacctcctgtctctgggtctctcaaggcagcaagaagtgaagggcagacaggcctcaaagcaacagagtggtccagggacaggagtcccagttctgcagccgtatatactgaggaccctcctggcctagtcacctgcttcctagctctgtgaccttggacaagttatttcttctctcagagcatgtttccacacctgtcaaataaagaaattaaaagtaccaacttggaagaaaagtaccaattggtaagaatcaaagtaatagataaattagacataaaacgatggtgccaataagtaacatttcctgggtactgacaacatgtatgatttctatagttctcacagccaccctatcagaaacactgtgatgatctgcactttacagatgatgaaacaaaagctgagagcggtaaagtcacttgtgctggaaagtagtgaggagggaatttctgccactatggctgggctcacaccactatacctcgcattctggcacaatgtctagaacatgggaaggccttcatccagatggttaccactgtcatcgctctccactagggctctctacctggctttggagagtagtgtgagagtgaggactcctcctggttctccccaccacccagacactcacacagccaccaggccactgacccactttaaggagctttcctttgggagtcaccaaaactcctccccaatacccgtccccacccccgcatacacacacataccctctttgagtcagttccagtgatcacagtcaatgactttgctgctggacagtctatgacaagcccctgtccagaactggccttgtgttctggcccagcaggggcccttgggggtcaggcctgcaggcactcacacttggcacctgctccaaaaccctttcaggtctttgaggatctgagccctgggcctgggtctcccgccggctcggaaaagctggcctgccgggccagagagagaaccacacgattcagaaaagcagtgcccttcagcagcctctccaccgtctgggctccccaaaggcagagcgggacgctggaaatgtgtgcgcgctgtggtatgggtgtgcaagtgtgcgaaggcggcgtgttgtgtgagcgagagggtagcggatgtgtgtgtgcgtgtgcgcgcgtggctccgggtgtgcgccgctgcgatagcgggtcctttcccggggcgggcgacgggcgggctgggaaggtctcctcccctcaccacattgagaaatctcagtgag

SEQ ID NO: 34405 - DNA, 2300 bp, Homo sapien
ccagccctcaggataagaaagacatgagtcaacgtggcaaacggggtcaaaattgacagaaagagggcaatcatgcatgtcagtggggaataatgatgaacctggagaaaccagtattgctccagacccccctcccaaatccttgcagaaaagaatattaataaaataaaattccaaaatctgatcccagagcaataatagaacacccatgccaaacttcacagccgtggggaggatgcatgtagctgagcaatctgtggatagcatttctcagctgaaattcttgaaagcttgtagtgctcaggccaaaaggctctggaaaccaagtcctgtggaaaatgcaaactttatgaatcacacatgtggccacaaagccagccctgcagctctgagtgaaaagatttgcacagaaatctgtccccacactgaagaccaccagggctgatgtagagcgtactatgggccctgagaggataggaaactcactcagccctttggggactttcttggcaaactctggaagatacaatccagtggagctctgggctggaattagacgcgatagacaaaaggaccacttctcactgtctgagtggtctgcctggagaagaagcctccagggggagaaatgaatccttttctagctacttaactttttgttcctccattttctcatccttgagacagggagcacagaagagcacttatctcatggggtccttgtgagagtgaaatgagttaatacacaggaagcacttagaaagcgcctggcccctcagaacagccaatgtaagttctcacctgcagcaagcactcttagcaaagccggggttttggaatcttcccctgaagttgcatctcttccagcactccccctcaattttcatttttgctttatagatctcggattcgcttcccgctttgtctcccaacaacctattcacaatctggagtgcttcccgcttaatgtcataggacctaaggacaggaaaggccctgctaggtcccccagcttccgcctctgccccaaggcacagctctgttcacactgactccgacagatggatgtcgtttcaatacaggaaatatttattgagcatccactctgggccaagccttatgctcagcactgctaggaatacacacaggagtggggcaggccgagttctcgcagtctatgtggaagaactggaaactccagcagcagctgatgctgcaggccacaggcagactttcttcttctctgggaaaccccagtttctgctcttacggcctctgactgattggacaaggcccacccagatcatgaaaggtaatctcctttatgtaaagtcaactgactgcagatgttaatcacatctagatttgtgtttgattaaataactgggtagtgtagcacagccaagttgatacataaaatcaaccatcaccacagactcgtttgtccttgccctgcccactttatgtccagtgtttcttcctgagctgtaggtctgtaacctataacaactttaggcccaccatgagatgcagagaaaacagctttctgtggaattcttcaccagctcccccacttacataagtttgaatcccctaaagaaatctttcattccatttcactcataatggttctccttccctgactgaaccccaactgatacaaaccctatgtcccagaatcgtctggccttatagaatattggaatcgactcctgagcccttagctacggctggttgcaagaccataccttgcaagactgggggctctccaacaggctacagttgcaattttaaaccagcaaccaatacatgatgccattttttccattgccgtaatacatgggcccagaaatccagccttcttgcactattgtacctagtaacccgtactcacaattttgggcactccttttccctagacggttgcccatttttgtctctcctgctgaaaatgtcacaattgggtcccactggtggctgttacataagcaggctgtggctctctggctgccactgccactaagaaacaggggctctatatggcaggtcccaggttagccctgccgctaccctcaccaccatccaaagcttcccagccccagagagaacaacattccctatgagaaccctgagtatatgcttgccctgtggctgtgtctggctatacaattcctggaacaactcagtcctggaggttggatcccataaggaaatacccgctgtcaatgagatattccttctctggccacccatcatggacatggcctactgattttgctctcactgctttcagctccttt

SEQ ID NO: 34406 - DNA, 2300 bp, Homo sapien
aacgatggactccctctccagtgctcttacagccacctctgtgtagcatctcagatggattgtctcctctcaaacagagactttccccaaagcaaggcactagcacagactgatgctcaggaaattgctgtggcctgaaagggtaaataagaaatggggagtgggccactagttaacaaatgctatcagcatagcccatctgcatgtcctgctactgaggaaagtgctctgagaggtcatcattggggaaggaactgagggagaaagaaaatggggttgctttctggccctagtcatgcagggagtggatctctgtggagtttctttctctctgtaatggccagtagctgccctgccctctcccgagtgtagaatgcaaatgtgaatggcagcacactgcaaatggtgctctgaagtgcgaaggccaggaagaagggatggcctggatcctggccacagagccagcattctgcctgggctcatagccctgtggtctgggattctccaggcctggccatggttgctggtaaacctagggtcctcccctcacttccctgggtgatgcgccccatgggcaggtttgtggcatgcatatgggaatggagcacagtaattcattttggaaagcaacccactcctgctctgctccagctcgttagtagttcaagcagcagctttctgggcctgggaggccatcctgggctgccagggacactgcctgccaacgtaagacctcctcaattggtgctgacacaggactgaggggatgacaaactgcctggcaccccttaggtggtcttccagaggagtgggttttgagaattgtcaggctttccacttgtggatgcattccaatggtgaactcagtaaaaggccactcttcagagacctgcatttctcatagcagccctaggcatatatcccgggcatgacagggcacagcttggggttgatgctgatggcaactctgaagcctcaagactgagtgggtcaccataagcagcaggaagttgaggtgccgggatggggtgtgatgcttccactcctccctggaactttgcaatacttccctagccaggccggcgactccatcccgggctgtcctctcccgatacaggtccactctctgtgtgccggggcaggggagggagtgatgctgcaggaaggtcccttcacctccaagtccccactcctcagtggacaggcctttgtaggatcaagcttcggtggtcaggctctgtcttgctttggaagaaggaggtctggctggctgtcgcttcatattaacctggatgacgtgacatgaatatgcccagtgggacaagagcaggcccagcagaggccccttcctcctgaccatacccttcaccattcttgtcaaccttggggtgtcttggctgagacccacagctgagtccctgctggaaactagcagaacgctggggggcttcgagtcttcttaggaagggaggaaagacactctcattgtaatcaaaagcctctccgcacagcaggccacttctccagtgagcacggacccctggcctggggcctggctgaatgtagggtctgcctacagagagggagtttgaggtacagagcaccacctctgccttctgttggcccagggcggacagtgtagggtgagccagggccaggcagggagctgggcccctagagagctgtagctgaaagttagacatgaccctgaaccaccaggtgcctgctctaggcacggggtactgagtgggacatggctgagatgaacaaaaaggcatcactgcccagagttgggatgggagagagtccacagctgattggaatcagcattgtcagcacagcacagtacagggagatacgcgcattgccgtctctggatgggcggctggcactttcagttcaaaggcgctgaggctctgaagttggcaaggaagaggataacccggagaagggaggactaagagaatttcacttgatgacccttgcctctttgtgtctgggatgagccgcgcggagcgcacccttatccacccagagtgctgtgcctttaaggtccactgggggcgtgatgtcagccgccctccggcacttggagaggtgagcgcggcagcccgcgcagccggtgactgggggactgggtttggagtaggacctgcggcgtgctcgagactccgacttcggtcttgcggcgcgctcgcgcccgcgggccatgccccactgactctaagtgggcactgccccggctccgggagggcgagaccgagcgccggccatgggaagcttccagctggaagactttg

SEQ ID NO: 34407 - DNA, 2300 bp, Homo sapien
taatcagaattctaccatcaagaaaaaggcatacatccagtgctttgtaacaaaagtgtttgccacaggctgggaatcctttgagttttctcttcagtgtctgcaaagagcagggatggaagtcagagatgtgggatggcttaagggaatttagcaaaacacctgtttctctttaccttgtttaccaccaagacactcccttccccatagtgcagtggaacactgacgagccatcatcactcctaagaaacaatacaaaatgaaaaaaaacagtattgccatactcttacagtggaggcgaggaaatcttatgagtttgtccccactggctattatagttcagagtgctaagctaaagaacccctcaccttttcaatctactgtgtagaagctatatttacttacctgcacatacctccaaatatgtatcctagaaatcagatttgaaatcttataaatcccagaagtaggaagttcgtatttcaagaactacttttcaaattagtgttttaattcaacaagcatttagtgagtgcccacagttccccaggcacctccttaagtgctgagaatataggggtgaactggacccataaagccctggagtatatatcctggtgggagaggcagataaaagatctgcagaaaaacaggagttcaggaggattaagagctgaaatcaggaggcagacttctgggcttgaatacaaattctgcggcttcctggctttgtggttttgggcaaattacctgcctctctatgcctcagtttctccatctgtaagataataagaataattatagtacttcatagagttacactgagattgcttttttgactcatagtgattaaacacagccatactgaagggccaggaagctaagatgtagacagtgttttaaagggtaaaaaatggtgatgacaaattactccccacctcatttggcagccgagtgtattacatggcttaatgcatgtaaagtacttagaaatgttgctagtatggtcaggcccagtggctcatgcctgtaatcccagaactttgggaggccaaggcgggcggatcacgaggtcaggagttcaagaccagcctggccaacatagtgaaacctcgtctctactaaaaatacaaaaaattagccgggcgtggtggagggtgcctgtaattctagctactcgggaggctgaggcaggagaatcgcttgaacccgggaggcagaggttgcagcgaacctggattgtgccaccgcactccagcctggtgacagagggagactctgtctcaaaaaaaaaaaaaaaaaaaaaagaaatgttactagtatgtagtaagttctcagtaaatgttagctactatactctttcaagtgctgggtttttacttgatgtcatacagtgttatataagatctccaaagatactgaggagtcctcaaggccaattttaacaagcatggttgccgcattcttgtgcttatagttgaacatttcttctttcagacacttgcacaaagggatacttctaagatgcatttgcattaggtggcaaacttcatcctgggtatgaaaaacattgagatttgggaataaagcatagtaagactgaggttgcaattactaaaggaaaaccccaacagagataagtgaagttctgcaatatcatgcaccctcccccaacccgctctgtctccccaggccccccttcgttagaacacccatgactggctatattatatcagcatttcccataatgtaaaaagggaaaatacagacctgggcgttcatggaaagtattctaactctcacaaccagaatccctgtctttgaattttttttcttggtttttagatctttaacttttccttcagcatttcagtactcaactttttgaaaatcatcttttctgaggaatgatatttcctggcacagcatcatctctgtcaagtgactcagtttgatttttttgtttgttagtataaagtggccccaacttacagagaaaaagtgggctcttggtatcagtttgatgtcagggtttttccgtgtttgagagggagctttaaataccactcgatttgaaggtgtctgcaagcgagctccagtccgctgtcaagatgcttctggccatggtccttacctctgccctgctcctgtgctccgtggcaggccaggggtgtccaaccttggcggggatcctggacatcaacttcctcatcaacaagatgcaggtaggctgcagggggagcccatgggaaagacagctactgacaaagtgaaatatgtatgaggatgaaaaaactcgg

SEQ ID NO: 34408 - DNA, 2300 bp, Homo sapien
gcaatggggaaagaaaaaaataaaaatgcattttatattgaaagaaaaactgtctttgttcgcacacaacatgactgtctatgtagaaaatccaatggaatatactaaattctaataaaaatttctattaataaaactgacaagtgattttagcaaggttgtaggatacaagaccaatataaaaaatcaattgcatgtcttcatactggcaacaaacaaatagaaattaaaatttaaaaaacaatactatttaccataacatttaaaaactatgaaatatctaagaatagtcctgacaaaatgtgtgtaagacttataccctgaaaactgcaaatgttgttgagagaaattaaagaagacctaagtaaatagagcgctatatcaatcatgtttatcgaagacacaacattgtaaagatgccaatactccctaagttgatttctagattcaaggcaatcttcagtaaaatcccagcaatatttttgtagatattgacaagcttgttctaaaaaaatcatacaggaatgtaaagaatctagaatagacaaaatagacaaaacaattttgaagaacaagttagagggctaaaactatgtgatttcaatacaagtacttgttataaagctacagaaatcaagacggtgcgatattggtgtaaagatgggaaaatatattaacgaaatagaacagagggtctgaaaatatacctacacatacatggacaactgatttcccacataagtgcaaaggcaatttaatggagaaaaagagtagccttttcaacaactggtgctaggtaaattggatacaacttgcacatgaaaaaaataaaccttgacttctatcttgcagcatacacaaacattaactcaaatagaacatagacctaaatgtaaaatctaaatctataaaccatgtagaagaaaatataaaagaaactgtgaccttgacttagacaaacatttcttaagtttaacatcaaacaaatgatccataaaaaaacaaattgataaactggatttcatcaaaatcaaaacttctgcttttcaaaagacaccattaagaaaatgaggctggggccgggagccgtggctcatgcctgtaatcccagcactttgggaagctgaggcaggtggatcactttgagatcaggagttcaagacgagcctggccaacatggtgaaaccccgtctctactgaaaatacaaaaacttagccgggcatggtggagcacgcctgtaatcctaactattcgggaggctgaggcgggagaatctgttgaatccaggaggcggagcttgcagtgagccaagatcaagccactgcactccagctggcgacagagcgagactccacctcaaaaaaaaaaaaaaaaaaaaaaaaaaaaaagaaagaaagaaagaaagaaagaaaagaaaatgaggccggacacggtggctcatgcctgtaatcccagcactttgggaggccaaggcaggcggatcacctgaggtcaggagtttgagaccagcctgaccaacatagagaaacccagtctctactagaaatacaaaattagccagacatggtggtgcatgcctgtaatcccagctatttgggaggctgaggcaggagaatcgcttgagcccaggaggcagaggttgcagtgagccaatattgcgccattgcactccagcctgggcaacaagaacgaaaccccattgcatttgtgcattgataaaggggcgcccttcatcgggagtaagtcccagaaaccacaagcgttggctcatgcctgtgtggagtcacaggcaggtggccacggggaattagctgaagaccagcaggcaggaagcctcccacatgccacctaaggggcgctcccggaaccgccgcccctgcgggaggagcggctggggtctcagatcgccgtgcgtgacttggtgctgcgccaggtgggcgccatcgccgcggcctgctgggggaggcggcctttgaggagcgggcgcgaggcggggccaggcggggcggggccttgggcggctgcggtctgcgcggacccccgtgcctaggcgctcctgtgcctccagtgcgcggagccggcctcgctcgggcgtgttcctgcgccgaccggacggccggactccagcaccttggcccggcccgcgaacgctgagcacgcgcggaaaccctttaaaggtagcacatttttcgggtgtcgcgggggcaccgccggcggtggcgacgtggggcggaatgggctcgctctttgggcccgggaggcgtgcgctcgcgccctgggccacgtcggggcggtctcg

SEQ ID NO: 34409 - DNA, 2300 bp, Homo sapien
gatcgactttttaaatggtcacatatctttaagctagaatgtttagattaacgttttcaagctaataaagatcaatttgtctaaaatatattttacaatgtacatagctataaaatcatatgaagtgtttgatttgtggatgagcataatctttatgctcggaagattacacaacttaaaaaaaattaaaatattatttttaacaagttactggtattaatataataccttaaattacttattgcaattctactatcagtgaattggcaatttaatgatatcattaaataattttaacaatccatgccacatacaatgagatttaatatatagcacagtccctctgttaaggactgcaaggtagttttctaacctggcatttgagtgatgtctttgttttatgttagcatcactggttttcaagtaaaggattctattaagggtaacttctttataaaaacttagtgaaaatttatccattttgttgatttccaaatgaaacggttgcaagcaaaatgtcaatgactgtgctccacatcagagtttagaatccagcatctgttcttgtaccttacagcattaaggagttagcattgaagagtagtagatcgggccttttaaaatagcacatgctttgaattcttggtagtcagcagtttcacatagtctacgtagtactgctggacagggcctaagtcatgcatgtaactggtttagtcagactgaaatgtgtgtagtagctcttttgcctgatgcttgagatgcagctttgtaactatttttgcttttcatttcaattttccaaaccctaaagatgatttttcattttgttcaatgactttataggtcattcctgcttctgggatccaactctatgttgtgcttaagaaatgtgtcacatcagacagagtgaatcacaagacagagatatttacctatcacataaatattttattagatttcaaggtatgtttcaattatgacactgaatctttcatgtgtacattcctaacattgcaggggttaaaggagggttatatagttaaccaaagttcaataaagttcagaaccactcttaccattattttgcctttcaaataattgtatacttaaaatactttgtattcttacataaaatatacgtacaagatgaccatatatacttggacgtatctggacttcaaatttgctggaacttaattgcgtcccaagctggctaatacctagagattcatcatttctgtttggagggtaagaatgctcattccctgtctgctttactggagaggatcaggtgtgttgcttgaactaagactttgtccctgccatatctaacttctctgagctcctgtgtcctggctgtcgtctgaaaattgttgcagatcatttgagtttttgttagaattgtgctttgacttaagtaatgaaaacagttcagaaaactgcactggacaatttaatatagcaacacagactgcaactaaactatctgctggcactttaatactcacaatgatcatataggtacttttcttgttggagatgaggaaactgaggcttagagtaatttgttctgacaagatcatatggttagtaagtagcagagtagggacttatctagacctatgcttttaattgtgttttactatctcccagacctcccatgtttttttttttttttaaggacaatcgcaatgtgatacttccttctttgaaagagataaaatacaataattgactaggaaaaaaaaaacttgggacatacactgcttccttggacatttcctcctggaagcctcccaagccacctcttccacacacaaactcaatcacatgcatcctcttttccttctgttgaaacttgtcccaactttggtcatagcatttatcactgtatttcaccattttaccatagctctttgagaacaggtttgtacttatttatctctgtatccccagcatgaggtagcacctatccatgcatgaaagtggaagatacctactaaaattgtattaaacaatttttcattttctaatgttattctgtacagttagagtgccaatatttggtggaaatgtgaaaaaactatcagaaactgaacattttctaatgtttacagaatgaagaggaacagtttatctgttgagaataaaattgtccagttgtcaggagcagcgaaacagccaaaagttgggttctactcttctctcaaccagactcatacacacacggttcttctagactgggggagtttgcctcaccatgtagtattacaaatttttcagtaacttcctttact

SEQ ID NO: 34410 - DNA, 2300 bp, Homo sapien
cccgcacaggcctcacaaagtgctaggattacatgcatgagccaccacgcctagactgcacttttatttcttgccagttgttgtctcaatacagttaatagaatgacttatatttcctctaatcatttaaagtatgacttctattgtatactacatgctgtatatatttgtgcctatttctgaatcatctgttttgtttcactaacctattctttcagtacattgactcagatccttgatgtattcaatgcgttggcattctatattgtatacattagatgcctccttgaaaggttgtgtgtgaagcaaaaacaattaggtgcataatctcattggcatcgtttagttattgttgtgtgacataccacaccaaaactcagtggcttccaatgacagccagttaagcccatacattcatagggtatactaagctggattttgtaggggcaactgtgctctgcatggcatccattcccttcccagggcagcaggatcatctgcctcacggcgatgtagaaacacaggaaggagtgtgcaaagactaaggccccagaagacccaggctttcccgacccactgccacttctgcctcatcttagtggtcaaagctacacagctaaacccaaaatcaagggtgaggaaagttccctttgcccccatgaaacatggcaaaggtgtggatgcagagagggtgaagaactggggctacaatcccaatctcccacagctactggcacataatttaaatggggaagcttccatagaaaattccaggtgctcatctaatattaagctaaaaaggagctgctaacatatatttgaaacacactgaaaatttaattccccagaaaagtacagggtaacataacatccatgtgtctatctccaataattaacaaattaatattttaacatatttgcttctgatttttttctttttttagaaataaaatattttagagtttatgtactctgtatatccttccacggttttatttctctcactatccagaagtaattagtaccttaaaggtagtctgtgcatatttttattatacatacagcattcattaagattaatatacttgttttcagattttacatattataaatagtatgatactatatatataattctaaaaatagctttttaattcaacagtatatctagagatctagctgtgttaatacatgtagattgtcttcatttaaattgttatattttactctgttgtatgactgtattattctgttcttgcattgctataaagaaatacctgagattgggtaatttataaagaaaagaggtacagaaagcatggtagcttcttgggacgtctcaggaaactgaaaatcatggcggaaggcaaagggcaagcaggcatgtcttacacggctgaagcaggaggaagtgagaacaggggaggtgctacacacttttaaacaaccggatctcaccataactcactcactcactatcaggacaacagcactaaggggatgatgccaacccattcatgagcactctagccccataattcaatcacctctcaccaggccccacctccaacactggggattacaattgaacatgagatttgggtggggacacagatccaaaccatatcaatgactatattataattaatcttttttcctttattgatggatgcttttaatggtgttaacttaccattatcataaacaagaaaacatttaaaaatcacatatttaaggtgaatacatgcaattttattaaaatattaaagttatttgcaaatattacacaggtgaaatataattaaactgagaattcaaaaacacctaagggatatattaaggaatatgttatgaagggctacacattattaatgaccaattttcttctgaaatatgtgctatcaaggaaataaaagaaagatctaccagcaggcagcactaaatattccatcattcgcacgaacattctcctacaagccacagcccagaagactgtcgatatgcacctagccttatcattttctgttaatatttagtcagtatttccaatataattggcttcttcttcagatcaaaggcttttacataggccctacctgcaaatcaaatagctatccatggaatattagaacttgacttgctccatcctcttaaactttttgtgtctcacactaaagaaatgagagatgcagaattctaaggctaaatagctaggaagtattcattcaaacttgaatattcttcaaagagagtgtgggggcaactctaatcagaggaagaaactaaaggaagtaaaacca

SEQ ID NO: 34411 - DNA, 2300 bp, Homo sapien
ctgccagctatgagcctcgaggttagctctactccccctccctaaccctgcatgcccaaggggtttccaagtctaatcaatgctaccactaaaatctcccatacacctgttccctcctctccactagcttgatcactccccatgcaggccctcagttgctttatgctctcagtaggccctcctccagtgcccacactctctcccttctccttcccaccttctttctaccagagttctaacctctccaagccccgcttgtctttttctttccctggctgccatcctaactcgccccttcccttctcagacaagcttctacatgctactcatctctccatcaaaccaccatattcgggctttggccatctgctctccacagccaagtccccagtggcctctctgcttctgacacagtgaaagccattcagatctgtcttgttggcagcattcctcactttgagcagcgccctcctactaggatacccctccttgactacaaccccacattctctacttcctgggctcttctgtcactggaggatgactcccaggtgtgaatcttcatcccgcgtccctcactcaagcccccgatcctcatatccagctttatcctcatgggatgcttcaccaggatgagtcataagcacctcagactcagggtgtcccaaaccactcatctacctggcaagcctgcactctgcatgtgcctcattctgaacatggcaccatcacctgctgcaatgtccagaccacaaacaccctacaatatccttgactctcctttctccccttctccctgtatacagactccaaattctattgagactattacctcctacacccctcacatttgcccagccttccccatctctgcctctaccaccatagttcaagctctcccatggtcccttcctggttacctgttcttcttgcctccttaagcctctcatgacactggccatgtcacttgcctccacccatcacccgctaggctcttagctggagtctgggccctgctaccttcctccccttcttccctacccttgactccacctccctgtgcttcagccaaccagataacttgagtttcgtgaatgcatgcctcagtttacctgattaactcattttcatctttcaggcctcagagcaggtatcaccctgtcagggccaggtgcctcttcttagctcccaaagccccagctactcttcatggaacatcattggcttgggctacggatcttcccaaattggagctttttcacaaagggcttaggtctcactcattctattaatccatctgtgtctccccagggctagcagtgccaagtaactgacaggtgattaatagatgcttgggtaagtatcacctctttaccatgtgacaatttgtttacctgccttgagctcctccagggcaggactcttgcctttgcagaatctatctggcaggtactgttgcagagatgtttactgaagaagggaatgaattagtaccaaggtgaggaccccacccttccccacgggctccaaaagcagcttagagcccaacaaaacctgccccacatttttggcgtttctgtggatcacacgatttactcatctgtctttcaatgagcatgacaggtggggtgggggtggagggattagagattgaggagctggggagggtggtcagctcctggggtgcagaaacaagtctgatgggccatggtgttctgggaatcagcactgcctcccctcacccctccctgcagtgttttgtagcctcaagatcagtgagggaatcttcgggcccccagcatgcaggaccgaagcccccgagacagctgtccctcagtcccaaggtccccatttggaagcagccacaggaggcctaagggacctatacccttggtttgaggaagactgtggcgagggagagagggagggagggctggcagtgagggcaagggctgggaaaactgagcacgggcacagtgcgggagcgggtgggtgcccagggcagccaggggcgcacgggttgggaggcgccaggcggcccgccctccttgcacgggccggcccagcttccccgcccctggcgtccgctccctcccgctcgcagcttacttaacctggcccgggcggcggaggcgctctcacttccctggagccgcccgcttgcccgtcggtcgctagctcgctcggtgcgcgtcgtcccgctccatggcgctcttcgtgcggctgctggctctcgccctggctctggccctgggccccgccgcgaccctggcgggtcccgccaagtcgccctaccagct

SEQ ID NO: 34412 - DNA, 2300 bp, Homo sapien
agcaagttggagaggctggagttgctggctgatttgatcagtatgtggacacataacttaggaagcaaaactgttggctatgagattacatatgtgattatgaaaaggaatcttgtaatcacaaattcttctgacgtatgtacagtgactgcaaaacagcaaataatttgttttgggaaggattttattggctgtttgaagtgaggagtatctctactatacaaaatatttaaaccaaattgttatgtcctataatgttcaacaaagcactctgcaaacatcagttctggaaaaaaaaaaaacgtatcctccaaggcaggattatatgcacttctgggagttgtaaacccatgcaggctccagaaatatttgccttccaagggctggaaacttctgaattaacaacaaataatcagtgagtgtgacaaagagttaaagtacacagactttactttctcaaagtttatgatgtagtaaagaagtttaagatggagacctgaaattgcaaactggtggccagtaggctaaatcgggaccatggatttgttttgtttggcttgcatgtagttggcctccagaatgtctaacagagtgagaggaagggagcggggtggggggcgggcaggagacaggcaaagagagagaaaaatagaaagaagttgctaaacagatataattgagattttcacataaaaatctaaatttccagctttgcttgaaaaatcagaatatctgccaacactgggtccttattcccacatttccctatggtaacagttggctggaatgaaatagcagtgacccctttggtctctggaactagacactcactctctggtctcttcccccacttccccttcactcctttactagccctctgtcaccatttcagatggccacccctaatgcagagacttctggacatttatttagtttcttctccacagaaataaacttctagagcctggagcaaaatagtggctgcgccatttgtgtgtcagatgagatgaccctggctcgggccatggaggtggcaattgaggtgtgagaaatggtcagatttaggataaattttgaagaaagagtcagtagaatttctgatggattggattagggtgtcaaagagcattccaaaatgaccccgattttgatttttacttattttaaaaagaaaacctataatagaacattggagagccagtattgaccttttcaaataaaaacaaaattattcaaaagctttttcttactagtactattcaaatcgggtaccctatgtggtaccaatattatattctaggaaatactgacggttttggaaatttggaggaaaaagcatcgagaagagctccaattacttagaaaagagagtccaggagatggggtggtgtatataagcctatggatggtgtctctgcaactcagtggccccgcctgtccaggggctgggtccccacgggatctccctccccacaaggaggtggagaggctatgtgtcttgaacaactggggttgcgatccagtgtatgggcagtcccactcctggaactccagggtgggcactcgctccatttccacaggccctcaagggttccaggattgccccgtgggaggggttttagtgctgcatctagtaagaagctgtaagatgctcagaaacatgttttgaagctactttgcacagaaagaagactcttcattcagatttgtattacagatcaataaaagtagctaagtcgtatctgaagatgtttttgtttacactttgtatgtgacagaaaacctccagttgtctgtgtcaaggacaattacttaattttattacaatgtatactgatttggttagtggaagcttctagcgcctactgtggtggtggtgggagctatctgattcccattcccaggcctggccatcgacgcgaaggcctccagctgatcggaagtcggcgttggccggcgcggagcccggcgcggaggcttctttcagccgcccgggcaagacacccctccctcggtcccgcagcggtcactccgcctctggcgcgcatgcgccgaccccagcgggcgtcctcccgggctccctctccctccctccctcatccgggtcctgggcgagcgggcgccgtgcgcgtgtcccgcggccgagctgctaataaagttgcagcgaggagaagcgcagcgacggcgtcgggagagcgcgcctagccggctcgcgagtgagtgagggtccccggcgcgcgcgggcgaggggaactgggggctgcaggctctgccccggcggactcgggccgaggcggggg

SEQ ID NO: 34413 - DNA, 2300 bp, Homo sapien
aaactggtggccagtaggctaaatcgggaccatggatttgttttgtttggcttgcatgtagttggcctccagaatgtctaacagagtgagaggaagggagcggggtggggggcgggcaggagacaggcaaagagagagaaaaatagaaagaagttgctaaacagatataattgagattttcacataaaaatctaaatttccagctttgcttgaaaaatcagaatatctgccaacactgggtccttattcccacatttccctatggtaacagttggctggaatgaaatagcagtgacccctttggtctctggaactagacactcactctctggtctcttcccccacttccccttcactcctttactagccctctgtcaccatttcagatggccacccctaatgcagagacttctggacatttatttagtttcttctccacagaaataaacttctagagcctggagcaaaatagtggctgcgccatttgtgtgtcagatgagatgaccctggctcgggccatggaggtggcaattgaggtgtgagaaatggtcagatttaggataaattttgaagaaagagtcagtagaatttctgatggattggattagggtgtcaaagagcattccaaaatgaccccgattttgatttttacttattttaaaaagaaaacctataatagaacattggagagccagtattgaccttttcaaataaaaacaaaattattcaaaagctttttcttactagtactattcaaatcgggtaccctatgtggtaccaatattatattctaggaaatactgacggttttggaaatttggaggaaaaagcatcgagaagagctccaattacttagaaaagagagtccaggagatggggtggtgtatataagcctatggatggtgtctctgcaactcagtggccccgcctgtccaggggctgggtccccacgggatctccctccccacaaggaggtggagaggctatgtgtcttgaacaactggggttgcgatccagtgtatgggcagtcccactcctggaactccagggtgggcactcgctccatttccacaggccctcaagggttccaggattgccccgtgggaggggttttagtgctgcatctagtaagaagctgtaagatgctcagaaacatgttttgaagctactttgcacagaaagaagactcttcattcagatttgtattacagatcaataaaagtagctaagtcgtatctgaagatgtttttgtttacactttgtatgtgacagaaaacctccagttgtctgtgtcaaggacaattacttaattttattacaatgtatactgatttggttagtggaagcttctagcgcctactgtggtggtggtgggagctatctgattcccattcccaggcctggccatcgacgcgaaggcctccagctgatcggaagtcggcgttggccggcgcggagcccggcgcggaggcttctttcagccgcccgggcaagacacccctccctcggtcccgcagcggtcactccgcctctggcgcgcatgcgccgaccccagcgggcgtcctcccgggctccctctccctccctccctcatccgggtcctgggcgagcgggcgccgtgcgcgtgtcccgcggccgagctgctaataaagttgcagcgaggagaagcgcagcgacggcgtcgggagagcgcgcctagccggctcgcgagtgagtgagggtccccggcgcgcgcgggcgaggggaactgggggctgcaggctctgccccggcggactcgggccgaggcgggggcgttcggccgcggacggagcggaaacgacccagggcctgtcgggcgggaggtaggccgagtcctggcctgccggggtcccggctggcggacacggtgcggcccagcggctgcggaggcctcgctggctgcccggggcgtcctgaggcggggccggggctggccctcgtcccagccccgctgttaccgcccagactttggagggaggcgtctgggacgccctggaggggaccccctgaccccgcgctgtcctggggagcggtttgctttcctaactcatcggatgtaccaccctggatacacacccttgataggactgcggtgctcggccgggcagcctgggctgctgcactgcgaagctgtccaatggcttgatgaatccgtgccgccgtcgctttgtgtttcaaagataaggatccgcgcttatcggtgggaattacactctgggcagttgtgaccggctactgcaatcagctggtagttagacctggtttctgccacttgccat

SEQ ID NO: 34414 - DNA, 2300 bp, Homo sapien
gcacggtggctcacacctgtaatcccagcactttgggaggccatagcgggcagatcacttgaggtcagaagttcgagaccagcctggccaacgaggtgaaactccatctctattaaaaattcaaaaaatgagctggacgtggtggtgggtgcctgtaatcccagctactcaggaggctgaggcaggagaatcgcttgaagccgggaggcagaattgcagtgagtcaagatcgcgtcactgaaccccagcctgggcgacagagagagacactctcaaataaatagcccagaactagctgattatttatgaaaaacctaagaactctgtaattaccccatctttccaggttggaaaacaacaaagctgttagaatattaaggtggcctatgagattagtcctaacaacaatctagtttttaacaattcttccaaaagagttctaaatctttacctcccatttagtaaacaaacttctcagattcagacttctgattagaggtaaagggtatgtgacaacaccaatgaactgcaaattccaatgactattattctattaacttcagaagtggaaaaacaaggtatgttaagagttcaagaccagcctggcgaacatggtgaaacaccgtctctactaaaaatacaaaaattagccgggtatggtggtgggtgcctgtaatcccagctacttgggaggctgaggcaggagaattgcttcaacccgggaggcggaggttgcagtgagccaagattgcgccactggactccagattgggcgacagagctagaacccagtggcggggggatgccatgggtcagcttccaagggtccttcatcatctgttttgatgggaaagcaccctatattgcatcccagcttccttgggccttttcttttctctagaatattcttttctctagaatatccaggtattcttttctctagaatatccagactggtggagacaagaatcattcctcaggctactagtatcccttataaaagggaatcttactcaatgtctttgaccctatgagaagacgggcaaatcataggctataagctgcttgtaacatttgaagaaataaactatttgccttctttgtggttagtgtacagagagacagagagacagacagacagatacaaggaatatagatcgtctagaagtaaaaacagggaagactgataaaccaagagaatagacacctatatcctcaagcgtactcaagtcagctctgaaattcacccagatgtgtggctcattgcctagaccaacatatacatctggtaataataaacactgatatgtcataaacaaaaagagtttctttaactctacaaagtactagtaatattaaaatttacataaagacaaagaatatatatgaaatagatttttttagatggtatttcaacttaagtaactgtattaagaaatgaaaaactggtattttactgcctagttttcaaaacactaaaatctttaatttgaccaagttacaaatctgttttcagtagagggagaaaacacactgcctccgttcaatgcaaaggacaaaaaagatcatcactgcaaatcataatgtttgggttcatgatgaaaacaggaaacagacaggctgcccaggtataattatggttgtaatctaatgtgccttcaggttcagccaagaattaaaacccagtgaagagggtaagcagaatttacttgcctctactttgctgcagaatgcaacttttaataatactcccagcaacatgttacataaccaacagtaaacaacaatctgattcaaacctcattagtaacaacattctgccactgtctcccactgaaattaatagctgactttgccagaggggaaagaaatccaacacattatcaatctacccatttctgtggcgcctaccacagtgaaccagacacgcagataatactaccagatctgtacagaacctacgaaaatattttattctttttttccagtttgctgctctcttcctccttttaactagaccatatcatgtggatgcctttaaaacctgagagtaaagtcagttgagaaggttaatctaacttttcttgcttatttcagctatgatctgaaaggaatggaagcacaaaatgatgaataaggtatttttaacaaagatacatgggtaaattaacagcagtaatgtaaaaaagactgagggagcaacaatgtggaaagggaaggaaaggaagctgtataggaacaatcacacaaataatcatcaaaattaaactttataaatctaaacatagtatctacaacct

SEQ ID NO: 34415 - DNA, 2300 bp, Homo sapien
acttgagaaatggaaagaagttaagtgtggttaaatgcaattaggtaggataatggttaagaaatgagtaaggagaagccaagggcctgatcatgtatgatattgtattcagaattctggtcttgaagctcctgtctttttgcctccctcttccttaactgtctctctgttgctcatacacatactctctcacacatacgtacactaccctatctagccccccattatattctagtgttcatgaatcagtcagccaggcctgtctcttatctagcctaggaaatgctatgttcatgtctgcctatatatatatttttttgtttgtgtgcctttgcctttgacatttcccatctcatctcagacaaccaaaccatggttttacttcctgacccacatggattttatcatacatccttgatgtagatgcaactgaggtcagcccttcttacagttcatttagtacataacactttatactctgtgacctgttagtgacaattatgctttcattctctttgttatatctctctattttaatgtggccagttttgtttgcctaggaaaaatcatcctacatagggctgggcaagacaaggcacaaggcatatccatacataaggaggatatctttacttccctgtacccttccccaccatggttccagcatagaaggctggatagctgccagtagttgatcggcatccagaactgtatctggtactttagtaggctctcagtaagtgtattttgaatgaatcagtttattgactgttgagattaaaccctacttggcataactttttttaaaaagccccatcatggctattcacaatacatgggatgtaacaaagaatcaataattatttgttgagtgtatgtcagttttactttactctgtgtttacattatctttatttactttatgttattgtctgggctttagctgagcacatacattcttttctggaaagatgcaccccagtccagaataatattgatgctagaatttttcaaagacaaagctatagcttttggcaattgtaggcacaagaaaggaagcatcttttgttacaccatttttccaaacgttattcttgttactttagtaggtatttatcgtctgtggttggctgtgcagcgatctgcaggagatcttacacattctttttattctttatttagaaatgggatctcactatgttgctcagactggacgtgattgaactcctgggctcaagtgagtctcccgaataactgggattacaggtgtgtgccactgagcctggtttttaccagcttctatcggtggagtgcctgtcacttccacctgtcatcatcaggagcttcttaatggtgcagaacagtggtttacctggagcaagctcattaaccaatataaaatatcacttaaaataagccgataggaattataaaattagaaactgacccttttaaaatgaatttattctctttaaatttattcaacatacttagttttacaaatagatacttgccattttactggcagttataatgatttatttgagggtttggtacatcttatacaaccgtgaatacaatttgcatctaataatgtgacttcagtagtatcatgatttttgtccaaaccttctcagtctgggaaacatttaaagagaataatgaccttagagaagagctggatttcttttaagacttctattcagatcaggacacaatcacgttcaaaattgacatagcatgtaacatggatttcagtgaagaaaagtacttcagaatcaaattttagaagagtgttttagggtttagtggcctaatcaaagggagtccagaagctatttttggataatacataggaggtagagcaacctggttttgcctctggttatcatttgacattgccagtgtcttacttgttcatattatggggaaggaatcgagtggtcacagaacttttggagaaaatttatcaattttttgtttactttgtaatgcttttctgttcttatttaataaaatatgcctttcgattatattaatttaaatttgtatatattgaattgatttaaactaggatcctttccccctttctctttcaggacttgacccaatgaaagaagcatatggcacttgtgaagataaatgttactcctccctttttaattggaacttctgcttaggacctgtgtatgacgtttcacctgtgatctgttctttcggtagccactgactttgagttacaggaaggtctccgaagatttgtgtcaaatgacgtcaatggccagcttgttttcttttac

SEQ ID NO: 34416 - DNA, 2300 bp, Homo sapien
gcctgccccagattccacttacagcctcccaaatgagctgccttgtgtcagtaagcccccctcctgggttcatacctggggttatggtggacctgagagaaagtgggggaggtaggccatgccacttcccatatagatcccaggaggaaattccaggccaaatcccaaactgagctacccaagtcccgcattcatgccttcccaggacccaggaagttactgacagcaggagcgtcacctccatcccaaccccctccatccaactcatgagctgagtctccccctggctgaaagtcctggtgaggaggcctgttctggcttcacataatgttctctagcgtgctgctggccgagaaaaatgctgtctgaaacaggtcaggtcttcagagaaagggactccccccatctcctgagtggcccactgccactgctgctgctatatcactgatacatggtggctgtcctgtgctaacacggataagccctggcccctctcagagccaactctgccatctggaaaatgaggcattgatggcagccatgtggaggggctcagcatcctgcaccctggaagcagaccaggcagccctctaggaccaaggggggctctgtctgggatggtgattggtagatggggcagtgctgaatactgtcaagccctgctaaaacccccacaggtccatctatgggactaagtgaaaaacacccaagagggcatttttgtacctcatttggcaaacactgtagagtcaggacttggaaccacagtttcaacttcgacaaagagctcacggaggtgattctgccgggctgagcagggatttgtgggtatgagctctggccaaggtctgccttgcacaccctgattgttcttgttatgctggtggccaggcatgaggtgcagtgggaagagagaataactaactcatctttctactggctctctcagccaatgtcaccaagctctccccatgtattgcacccctgaatgggagatgaggaaaagaggagaaagacatggatgtgaacttggttgaccctttgagggtctctgacaaatgagcagacaacagggctgggactagggtgaggggtgaggcatctaggggcaaaactgaaggagacacctactcccaaccctgcacttgcagactctgagagcgagtgtctcattcagtattgtgctctagacttctcacccacctccccctaattctggccctgaaagaaaatgacaggccagaggtgaggggtgggtgcttgttgagaagtgcaggggctgtggtggtccagggtggttgttcccactctagtctgggggtcctggaagactttgcagaggaagtgagcagttcagactcctgggaaaggagacacctccccactcaatccaactgattgcacacctctgtcctggccacctcgcctttccagacctgccaagggcaggggggcaactgccagcgccatgtcctccttttgcccctctgtgcccaggcagaataggcaaaagggagctgaacattcttgcacacggtgcgggatgcacacagaccggcaggacgcagccggagaggacacggggcccacagaatcagtcctggcttgaacatgcttgtctgggagcgcgtctgcacacccttggaggtggtgtgcccggcctgcgctacccagcagccagtgggcactcggaacaaaccaggccatgcctggagggagcctgtcaaggaggataatgaacgcaggtgtgcacgctcagctgagctttgtctctgagttggtttgcttacctcaacggtttgtccctgtttggcgtgtggctctgttcataggtctgtaactgtgtctttgcccgtcagtcttcctgtgaccctgtgcttttctctctttctctctctctctctgtccctgtctctgtccctctgtccctgagtgatgtgaggccgggctgggggcagtcgcagccgcgtcctctcttgccctcattggttcgcagccgctcccccgggcagccgccgccagtcccgcccctcccccgaacccccgcccgggacacgagcgcgctcagagccgccagaaagctcagtctcctgctcaaaacaggagcgcagcagccggagggagtggggacaagctcgctgaacactgggcgtctcgacagggaccagagcctgcaggactgttccgagacgctgcggtggcggcggcgccggaggacgcggaggactccctggccacccgccctccgtgcgctctgccaccgggcgctcagcagagaccccgggctgcggctgcacttg

SEQ ID NO: 34417 - DNA, 2300 bp, Homo sapien
agtcttttccccagcaatcttttatcaaagtgcactttaaaaaagtggatggtggttcagacgctcttcctaaaggtgtacagagctctctattaggatttatcacccacagttgccttttgagggagttgcccataattattctttttattttgtgcagataaagaagttgctccatatataatttaggagctttttcccaagggaagtgtgactcagctccaggcaggattagagtaccaagatctgatctgcattatttgctttataccagacatacggcccccaaggagctaaaaccaaaaaggtttgagcaggtcgaaaggtacaatgagcagaaaactaaatggagtccccaatttaaacattcacaaggctaattgcataactttttaaaaatctcaaaaaattggatttaattttaaagcctttctctgtgatcatttttgtttgactatttttaaaaatggctaaagtgaaatactgagtattgtttatgcatgaagacataacaaattaaaaaaagacaattctctgggaccatagaaaatagttaaaaacaaatatccaagtacttactctttaaaacggatacactcttgataaaatttatgccattctaatattctctgaataatgtgagtggaggtagagtagaaaagaaaaatagaaaatacaggtagaaccaattggagaatcaaaaaagtttaagatgtgcaagttggtagaggcttaggaaacacctggtccagcccctctatttcatagttatctgagatctagaagctgggacctgctcaaggtctcaaggctagctggagatggcatatccctgacttgagctcaaattacacagtagctgttattgtctctagtttgctgtttcaacactttggtaatgtaagtttgggtaacttacattgtccaagactggcaaatgatggagcccggattcctactctaaaccttctaacttcaaagtctgtctttcagcccccctactcttagtatcttcatctgaggatgaggagaataatagcaccttcctcacagatttgatgcaagaattacacaagttaatatatgtgaagctcttagtataatacctggcatatattaggtgcttaataaatgttaactgctattattagtagcattagtattaagctctacactaggccacactgggaaacagcaataagtaagaaggggacccagcatataagttgagctatttcttccatccatatagaaatccaggctcaatcttaagaagctaaggctgaattctctcagaagggttgcttcagtggccatcagaaagtgacaggattctagtcctgctccctgccacatcttgccctttaataggtgcctaggttgtgtgtggaccagaaagcactgtccccataaagaacagcacagaatgtagaaacggacacgtgtgatatgcatgcatgcatattgctgcagttttgccatggtgtaggagctcattcagggggagacatctgaaccgaaggcagccatatttgtgatggccaactctatggcacagcccttggagagctgggcataaaaagaggcaagagggaacagaataaaacctacattgacttatactttctacttacaaattacttcatttaatcctcctacagactctgcagcacatgtaagttatccacattgtacaggtgggaaaactaaagcatagaggggtttagtggctctctcgactttatataaacggaaataaaaccaatagcctcctgcctgcttcagccataccaccaccctacgccccagcctccatctcttattagggtccttctaaatccatttttcagctctgccaccccgtctccacccaaggagtatagaggcagacaactgagtcatattctaccacttgaaagaaatagtacaggtaacccagtgtgtctgaatcttgatgattaagacaatgatttgtaagattgcacaattcctcataagattccaagcatgatattctttgtgtatctcaaccatttttgtgtgctctactgctagggaatccgcaggaaagtaacagggcatctttgccttgtcccataggttgaggaacagcaccttcaaaaacatgcagcgccggcacacaacgctgagggagaagggccgtcgccaggccatccggggtcccgcctacatgttcaacgagaagggcaccagtctgacgcccgaggaggagcgcttcctggactcggctgagtatggcaacatcccggtggtccggaaaatgctggaggagtccaaga

SEQ ID NO: 34418 - DNA, 2300 bp, Homo sapien
aagtgcagacttggaagctttcctaaggaatgctgactcagcaagtggggcggtggggcaggaatcatttttaggaagttcgcttctctctccacccaggtgattttgatctagataacccgacggccttccttttgagaatgcctccatgctggcctgcgtcttggcctcatatcctcagtcccctcttctgtctcgcaccagcctgggcctgaaagctgattttagccctgcattaagatgtgaatgacccaggacataggcgtgggcaaggacttcatgtccaaaacaccaaaagcaatggcaacaaaagccaaaattgacaaatgggatctaattaaactaaagagcttctgcacagcaaaagaaactaccatcagagtgaacaggcaacctacaacatgggagaaaattttcgcaacctactcatctgacaaagggctaatatccagaatctacaatgaactcaaacaaatttacaagaaaaaaacaaacaaccccatcaaaaagtgggcgaaggacatgaacagacacttctcaaaagaagacatttatgcagccaaaaaatacatgaaaaaatgctcatcatcactggccatcagagcaatgcaaatcaaaaccactatgagatatcatctcacaccagttagaatggcaatcattaaaaagtcaggaaacaacaggtgctggagaggatgtggagaaataggaacacttttacactgttggtgggactgtaaactagttcaaccattgtggaagtcagtgtggcgattcctcagggatctagaactagaaataccatttgacccagccatcccattactgggtatatacccaaaggactataaatcatgctgctataaagccacatgcacacgtatgtgtattgcggcattattcacaatagcaaagacttggaaccaacccaaatgtccatcaatgatagactggattaagaaaatgtggcacatatacaccatggaatactatgcagccataaaaaaggatgagttcatgtcctttgtagggacgtggatgaaattggaaaccatcattctcagtaaactatcgcaagaacaaaaaaccaaacaccgcatattctcactcataggtgggaattgaacaatgagatcacatggacacaggaaggggaatatcacactctggggactgtggtggggtggggggagtggggagggatagcattgggagatatacctaatgctagatgacgagttagtgggtgcagcgcaccagcatggcacatgtatacatatgtaactaacctgcacaatgtgcacatgtaccctaaaacttaaagtataattaaaaaaaaaaatagaagtaaattaaaaaaaaaaaaaaaaaaaaaaaagatgtgaatgaccacgttccgggctggggcggccgggctgtcgggcaggcagcgcgcggccaccagggggcgccagagccttggctcgcgcgctcggcctcctccgcccgcggacgccgcgcccgagccagcgagcgagcagagcacatcgctgcgggctcacaaagcggccagacgctcggcggcggcgtgtggcaggagcgcaggggcgcgagccggcgatcagccttcccggcgaccgtgccgcgggagctcgagcaactcggactaggggacccgggccggcccccaaggtacgtgcccagaggaaccccgcgccccaacttggagtagttgggacctccccgcggccgcctagggggctggcagggtcagggcctggggttacctccgcgcgcctttcttacccccgagacctcagggcgctcaagggagacctttcccttagctgtcgccggggacccccagctgctggcagcccccaccccgcttgccggagctcgggtgctgctggagccctgttctcccctctcctgccccaaagccgtgtgcaccgcaccgtctgtgggagtgcggcgtgcggacccgggctccccgcttctggggaggggtaccaagcccctgataggagggcggcatctgtggggcactcggagaatagacgagacgggtcccctgtagttggacggcagcctcggattcgtgacgcagcctcctcgttcgtagatgagtcccccattcgtgagaggggtccctgggtctagaggcgcgacaggcgccccaggtgcgcgagcgctgcccgtgcccgccgcggggtccccgcctccgggctggggcgctgggacgcctgggtgcccggggctcgcggccgcccgccctcttcgctcatcgccctgcgcgccctgccccgcagatgccggcg

SEQ ID NO: 34419 - DNA, 2300 bp, Homo sapien
aggagagagtggggtgagaggcggggtccagatgtgcggggcctgggggctccagccaggagattggtctttatcaggaaagcattgtgaagaattttgtgttgaggggagaggggtgatgggatggtcagacttgttctgaaagagcgctcaggtgtctggggaatggggtgtagttgtacagagaaaggtgacaggccagtatcacttgtatacaggcaggggaagacattaagtcccttccagccctatttcaccaaacattgctggtatttggaaacggggtgggggatggggcaggaccagacttctgcttctcagtgttctgtccctgtagcctgatctgtttttcctctctcccctccctcccatctaggggaactcaacaggttagtgctggggccggttctcaaggggcaggacagtggtaagcatggcatagggcatgggagtgcagagatgcaggtgggtgcatgacttgggatgggcagtgcagatattcacttatccagggaatggcaggacggtggttatcaaactttgccatgcataaaaaacgcctcgggagctcattaaaagtgcagacttggaagctttcctaaggaatgctgactcagcaagtggggcggtggggcaggaatcatttttaggaagttcgcttctctctccacccaggtgattttgatctagataacccgacggccttccttttgagaatgcctccatgctggcctgcgtcttggcctcatatcctcagtcccctcttctgtctcgcaccagcctgggcctgaaagctgattttagccctgcattaagatgtgaatgacccaggacataggcgtgggcaaggacttcatgtccaaaacaccaaaagcaatggcaacaaaagccaaaattgacaaatgggatctaattaaactaaagagcttctgcacagcaaaagaaactaccatcagagtgaacaggcaacctacaacatgggagaaaattttcgcaacctactcatctgacaaagggctaatatccagaatctacaatgaactcaaacaaatttacaagaaaaaaacaaacaaccccatcaaaaagtgggcgaaggacatgaacagacacttctcaaaagaagacatttatgcagccaaaaaatacatgaaaaaatgctcatcatcactggccatcagagcaatgcaaatcaaaaccactatgagatatcatctcacaccagttagaatggcaatcattaaaaagtcaggaaacaacaggtgctggagaggatgtggagaaataggaacacttttacactgttggtgggactgtaaactagttcaaccattgtggaagtcagtgtggcgattcctcagggatctagaactagaaataccatttgacccagccatcccattactgggtatatacccaaaggactataaatcatgctgctataaagccacatgcacacgtatgtgtattgcggcattattcacaatagcaaagacttggaaccaacccaaatgtccatcaatgatagactggattaagaaaatgtggcacatatacaccatggaatactatgcagccataaaaaaggatgagttcatgtcctttgtagggacgtggatgaaattggaaaccatcattctcagtaaactatcgcaagaacaaaaaaccaaacaccgcatattctcactcataggtgggaattgaacaatgagatcacatggacacaggaaggggaatatcacactctggggactgtggtggggtggggggagtggggagggatagcattgggagatatacctaatgctagatgacgagttagtgggtgcagcgcaccagcatggcacatgtatacatatgtaactaacctgcacaatgtgcacatgtaccctaaaacttaaagtataattaaaaaaaaaaatagaagtaaattaaaaaaaaaaaaaaaaaaaaaaaagatgtgaatgaccacgttccgggctggggcggccgggctgtcgggcaggcagcgcgcggccaccagggggcgccagagccttggctcgcgcgctcggcctcctccgcccgcggacgccgcgcccgagccagcgagcgagcagagcacatcgctgcgggctcacaaagcggccagacgctcggcggcggcgtgtggcaggagcgcaggggcgcgagccggcgatcagccttcccggcgaccgtgccgcgggagctcgagcaactcggactaggggacccgggccggcccccaaggtacgtgcccagaggaaccccgcgccccaacttggagtagttgggacctcccc

SEQ ID NO: 34420 - DNA, 2300 bp, Homo sapien
ccatgaatatgggatgtttttccagtttgtgtaatctgtgatttctttaatcagtcatgagtgggtattggttcaacaacttaacattttattttacctcctcctcctcctttcattttgctgtatataatcctactagcacctttgcagctagacacagtactttataagttaacctttcctgggggatcactagagaatggatgagataatacgctcctcctcatcataccttatgtttctatgaaggtgtttatatcttttgaaagttaaggcttactatgtgccaggcactgtcctaacaagtactttttatgcctcaatccatttaatcctcactgcagccctacgaggtggatacaatatgaattgcacttatcagatttagaaaggaggtctgccagtggttgagtaatttgcccaaggtcatataattagtaatgctgactccagagttagctttttaaatccctaaattatcagtcttattcctctgaagtagtaggacaagtcttcagttgacaaagctgagcttgcctgtctggaattgaaagccaagctattagtgttcatgtctggagataacttatgtcccccactcccacttttcctcacttcaacctattccccaacatgtgaagaaaatgacttttcaaaaggttttccacttctactttttgtcagaaaaccagaagctctatgatcctttgggatttttcaggaagcagagcaacagccccttctcccctgctttgtcttcccatccattgtcttagaggcccaaagggaagggtctgagggcagacagaggcatcagtccactggctctttactgctggttcctgtggtcagtggtgactgattaccaatctgatcctggcgggaagactgtgtgacttctgagaagggaagccacattcccgcaatgttattcctttctctctctctctctctttttttttttttttttttttgtatttttggagattgagttgtgatctcgttttatagtaccaaacatatgaccacttcctcatcattctttaaaaagtatgctattttaatatttttaaagagcctttgtgtgctcactggtttcaaaaataaaatctgcatgattccatttaagaagtgtttgtgtttggagtgctatttttagagaatttttgtctctgctgattctgacaggttggcccttcctgaacgtggggccattgcctggaagtcaggaggcccgggacttggtgctgggtctgctgtcatttgccatatgaccttccttgggcaaatcccttcccttattctggcctctaattccttatatgtgaaatgagtgggttgtagggttgtagtaggtgttccctaagaaccaagtcgatccacaaatcccatgattcttttcccgtcataaacctctttcagacattttggtttctaaagttttggtagagtcttcgtactccctagaaatcctctgttgtgacgtaagggtgagagctcagcatgcctggggcagcacaccctgagatgtgtgactgctcctagggccgaaagcctggggaggcagccaggcacgaagttggagggcagacctgccttaggaagctcaggcttgtctctgtggagggagccgcctttggagactacagctgctttgtctctgccacgctgctgaaatggttattgctgggtggacatcacctggccctagtcctgtctcttacctacactggaggacctggagggtgacacctctattgcctgggagtccagtgtccctgggaggcacactgaccttgatttaggaaatcaaaaccaagcctttttcctgaggttactgtcagagccctggcctcaggctcccaggtcagcctttcttcagtgcttcactttcgtaagatttgggcaagtctcacctctggagttgggaacccacatgcatgtcgaggtgggtgtttttggctgaagacccagagaccaaaggccctggcctttggctgcctgaggccctttgaggtgccaggagcccctgtggctctaggtccaggaaacggctgcatgaatgtttatggatgaggctgcactagggcagaggcagagttgcctgagtgcctggaacgcagctcgcttcctcagcagggtgtgggcaatgccaccagatggttaggggaaaaaagaggccatctctcagggaatgcgtgttcctgctgagcatggaggaaaggaaggtgaggcagctttggaactcaacaaattttattaaacctgtcagttagagagagccattgttggtacaacag

SEQ ID NO: 34421 - DNA, 2300 bp, Homo sapien
attttttaaatgagtgagtgaagtatctcctgcacctgactgtgagctttgggcacttggggaacatgtcttgttgctgtggaatcctccatgcccaccacaggaggcggtgaataagtgaatgtctgaagaatgaacacaagcttgctaaggaggggtgagtgcaggcacatttttgctgaatgggctgtgacccttttcctaatatggtacacagctgggcaagactggttttgttgggagagacttggcacttgtgcactgagagtttgtcacatgtgtgtcccccttggcttgtcatgtgaaggaactggtctcaacttggagtggtgcctctgctaagtggaccaggctactcttaccttactttcagccttgggccaggaatttcacactgtagcccagaaaactagctaagttcagtatctggaaattttgagctgcattcccttttgagttgtcctaaaccctagctgcaaggcctttatttccttttttccccctttccttcatcaatctctattttaaaatagttcatcttgtctgtaatagttatttagctgtaacttcaataaatagctctgccagttattctttgtgtgtggagtttggaaagttcagtgttgagagaggaatctgtttggaattgcaatgaattgtcatgctggctccactttttgttaacgaacttgcctctgaagtagcggaagtgtcatagcaaaaccaaagtgattttacaaattggaagaaaaagtgcttctggggcattcttagattctaggaatggaagggacgggagaatcaagagaagaaagcagtgtaatgcaatgcccagcccaagccttccattaaacctggttaccatccatccttccacccatccattcacccgtccatccaaatactgttcacatgtgtttattacaggtaaaaaccagaaactgtgggcaagcaaaaagtaaaaaattacgtgtactacaacatctaggtaagagtatggtttatatctttttagattttatatttataaatgtatacatatacaaaatatatattttaacataagttcatttaatgtgtacagttgaatagtcttttttttttgagacagagtctcgcccttttgctcaggctggagtatagtggtgcagcctcaactcactgccaccttcgcctcctgggttcaagtgattcttgtgcctcagcctcctgagtagctgggactacaggtgtgtgccaccatgcctggctaatttttgtatttttagtagagagtgggttttgccatgttggcaaggcaatcttgaactcctggcctcaagtgatccacctgcttcggctcccaaagtgttgggattacaggcatgagccactgctcccagcctaaatagccttttttgatgtatgtatttttttttaaattgctattcatcttcctggaatgttctctcctccatcttttggcctgtctgactcccgttcatccttcattactgcttaagcatcacttcctcaggaaggccttttatgacctctttggcttaggttaaattcctttgctacttactcccatggtactttatacttctctttagtattactactcatcttattacttcctcaatgtttgatttccctggccaatcatactctttataagggtaagaactatacctttaaaattcaccaccatgtccctgctgcctagcatggtcttccatatagcaggtgatcaataaaaatttgtttaattgagcttagcaatatataatgaatatctttccatgtcaatgaaattgcagttacaacctaattttaatgccttcataagattccattatatatactctaattgaaaattcatttccttcgttggaaattatagttttatgtaatattttgttattataaataatgatataatgggcatccttgcatcttaatctttatgtacattcctgattattttactagaatagattcctagaataagaagtactcgattaaaaggtatgcacactttgaagacttttgagacatgtgccgcattgatctaaagaacagttgtaccagcttatgctcccatcagcaagatatctaagatttatatatttttaaggcccattggctttgcctaaaccttggtaaacagatactaaaaatctccagtaacattgcaaaattttgttctaattatcaggttcagcttcaaaacgtgtaaaatgcattgtgtactgagagtaagaggctgactctcgttagatccatttctatcagtgtgtttaaagccaaaaggaaag

SEQ ID NO: 34422 - DNA, 2300 bp, Homo sapien
attaaagaggacttaaatggagagatatcctatgttcatggataggagggcatagtatcagaaaaatgatggttctatccaaattgatctataaattcaatgcagttttttaatcaaaatcccattcgagttctttatggaatttgacaagctagtgaagacacttctcaaaaataataataggactggggactttccctgtcagatatcagaccttattataaagctacagaaatcatgtggtactgttacagagacagacaaactgaccagtggaataagttagtaagtcaagaaagaaatctctttgtatctggaactttaatatgtgacctaagatggcatgacagatgcatgagaaaaataaaaagttttaaatacatcaaacttatggagaaaattagatccctatttcatatcctgacataaatatcagtatcagggcctggcacagtggctcacgccagtaatcgcagcactttgggaggccggagtgagcagatcacttgaggccaggagttcgagaacagcctgaccaacatggtgaaactccccatttctactaaaaatacaaaaattagccggttgtggtggtgcacgcctgtaatcccagctacttgagaggctaaggcacgagaatcacttgaacccaggaggcggaggttgagccaagatctgcactccagcctggatgacagagtgaaactatctcaaaaaaagagaaaaaataagtatcagatgaaataagggcttaaataccaaaagcaaaaatgttaaacctttagtagaacatagaagttaacatttttctagctttatagtaaagaaagacaccataaaataaattatgcttatggaatagctcatcttttgaagaaaattttcatctttgctggttgcttcccctctctgattcaagtctcaagccacattttctggcttgagactttctttacctgctttaaacacacaactctaagcatcttcctttgtgcatatcttcctctgctcagctaacttccttgtgcacagaatccaaacagccccaaagttcagttatttgtggcttacgtttgcatgatgaactgatggtggggaagggagccaaaagaggagtctgttacggtcagacaagctgtgggtctgccacgctggtcgtatttgaatgttccaatagttacgaattccagtgtgagatctatagtgattctcaggcctctgaaatatactctaaagcatagaagcctctttctctagccagtttgcaaagttaagtggtagcatggatagaggctcactagggaaaatcaaaggagagtaccctcattgtcctagagttggagtgaactatgggtcctcaaatctatacaagtggagaaggttctgttttcctagtagcaaagcaaagcttagcctagatcaaaccggtaactccaaggtctcacactactcctgggagctgaatagtttcaccaatttggggagaaacacctttccttgctcattcttttgattccttatttccaccttccataaagttgaaagatgttgctcaggagttgttgggtaactagctggcaccccacagggatttgagtattttgtctttctctttcactttttcaagagacagagttttgctctgttgcccaggctggggtgcaatggcatgaaacccctgggcacaagcagtcctcctgcttcaacctcctgagtagctgggactacaggcatgagccaccatacccttgtctcttgatttcagtacagaaggcattgagattatggttgactcttgctagtttctacttactcagttagtctacatagatagcctttctttccataatacttataatcctttgtctttctatgggattacagtttcccaaaagctttcgctgttgttcgactgcttcctggagtgtagccaatgtgatttttctaaaacacagatttgtttacctgctttctgtcctactttgtttaaaaccctttgatggcttctcattatttcagaaagaaatccaaacttcttagctttgcttacatgacacttaaaaggctgcttggtcttctagttttttctcttgatattccctcttgtgctctcctctagttttactgaactgccagtactttgaacacactttgtgctttttctcctccaggtctttgtgcatactgtttcctctgcctggaatactcttctttctctttacctgactcgtttctgctcttacttcaagtctcagattctaggaagctttccatcaacctgctatcactgggacgagttg

SEQ ID NO: 34423 - DNA, 2300 bp, Homo sapien
aagtcagttaatgtggtgcctccagttttgttctttttgcttaagatgacctttcttttctaaatggcctcttctgagtgttctctattctgtctacctcctgtgaatcatgagtggtgaataaagtatgaaggtgtagtcgtatggttttgcagggaaatttagcagggttttatactggctcttaatagttatattttgaaacttgaatacatacaacccttacatatttccttttctgatcttttttctttgtctggtttgttagatgtggcatttccacaccttcctgtatggcgaatatgtaaacgtgggtatgtgcaaaggaggagtcatctctttcttatgtcccttttatgaatcacccagttgtgttcctggtggatgtctgaactctggcacggattccgagattcagtttccttatttgtgatgttcagctttttgtggtccctgtgattggcctcaagaggaaatatctggagcagggccacaaggctgattagaggaggaagggacatagagggaacaagatatgaggggtattgttgtgcaaggaagaagtgaagatacagccctgtggggtgtaaatgaaattatccaggcctcttctcacttgagaaagagtgagtgtgagtaatggccttgtctaagagaacactgaggtgccaggggaggtaatctttgagaataaccctgtagccagtttgagttcaggaggctatataaagttttagttacttttactttctgtcacctcagtgttcctctcttccttctgtggttttagggctttgtagtagtgaagaaatttaacaggttaaaatgataaggatgatagatttactgagcgtctcttcgtactttcacctacatcatgttatcctccttgaagccccctacaacacattggagcctagtatttcttcttaaacaatcacacggattactctgagaagaaaaacggaccatttaaaacatttttagaatcctgtgatcttggagctgaaagggactctaaagattgtctggtctgaccctatattgtgaatgagtagctgagcatgaggtccagagtgtggagaacactactcaggaaagtcactcacccagtgagtgctggtgtggattcggaaaagcccaggggtgccatgaggtgtcccagaagagagatgctcatagctgatttttttctgaggcattaggatagcttctgcaccactttttgcagctaattgtcccagttacctctaagcctctgtggctaggatatacagactggcctcatgccttccacaagattatgttttagtttgggaaagaagatttataaataatgaattagccaagactgtatattaggtgtgagatgacgatacaggaaagtatagtttgtgtattttggtggtgattgactgtcattggtgtgattagggaaggttttatgaagacatgggatttgactggactcccagaaagactaaaggactgggattggagaaggcatttcaggcagggagagttaaattagtctaaattgaagctcagcagctggagattacaggatgtgaaagatctttggctggatatgggggttcagtgggagacttactagttggagccactgcttaagttaaattccaatatgacagattttaggaagatattttaggattgtgctaagatattttagtattcattgtgatagctttactgcagtagtctttggcctcttgcagtaaaatagggtttgtttcagtttcacctatttgtactacctctctttttcgactagttttccaatttctctctgtattctcttaatttctctctgtgtttttctcacttctgtcaggtgcttttcccttaacttctccccatctatcagacactcagagctactacagaatttgggaggaggatttggaacataaactgtgacctacaagtgaatttccccaggtggatgataaactccactgcaggccacagaggggcctcctcattccagcaatctggccaggctgacagactcatagcctatgggagcaggggagggtgtaggggccagtatttctcgggctagtgacgaactgcctgattctttgcagcctagacagaggaggcaggagccccaggggcgggctaatcgcctgggctggggatgcctgggcagatgcagaggaagctggaaaggtggcagtgcacctgggtcgctggagctgccgccgttcctaggagaccaaggagcagcaagcctgcgggggagggggagcaagtgggttgctgcttttagcagc

SEQ ID NO: 34424 - DNA, 2300 bp, Homo sapien
agacctgatgtctaatgttcccttcttttgtgtccatgtgtactcaatgtgtagctcccacttataagtgagaacttgtggtatttggttttctgttccagccttaatttgcttaggatactaactagtctttggctctgaggttcagtgcaacttccaattctttcctaaatctttcctgaatacttgaggatacagtgaggaattcctcttaacttcttcagcgtttaccatatggttttggaggcttttggtcacgtaatgcctcatattaactatgtcccaccccatttatcttgcttggcacacaaaggctcaataaatggaagccattgtaattttcttccattcccatctgagtgagggcactaaaagcagtaacttaggggtatatgatctctctctctgtaaaacattcgtctaacccaacatctttaaaaagctaacattctacttttgggaggccgaggcgggcagatcactaggtcacgagtttgagaccatcctgaccaacatggtgaaatcccgtctccactaaaaatacaaacattagccaggtgtggtggtgcccgcctgtagtcccagctacttgggaggctgaggcaggagaatcgcttgaacccgggaggtggaggttgcagtgaaccaagatcgtgccattgcattccagcttaggcaagactccgtctcaaaaaaaaaaaaaaaaaagcaaagttaacattctaggccaggcgcggtggctcacgcctgtaacccagcactttgggaggccgaggcagatggatcacctaaggtcaggagtttgagaccagtctgaccaacatggtgaaaccccatctctgctaaaatacaaaaattagccgggtgtggtggtgggcgcctgtaatctcagctactcaggaggctgaggcaggagaacagcttgaacccaggaggcggaggttgctgagccgagattgcgccagtgcactacagcctgggcaacaagagtgaaactccatctcaacaacaacaaaaaagctaacattctagttcaaagaaagcaacacatagatgatgtaaattacacataaaaaaccattcactgaggttaaatgaaaatgtctgctggagtgtgccaaggggacctgaaagggcctcctctgagagggcatcgtgggagggcttcaaggagggcgggagggtggcagggaggcagggatgtcgcgcctcgtctggttcctaatgtctgaagttcttttggttccctgttgtctttcacaccgccgcctcgggctcgcttttgcgcagggccacgtggcaaagttttagtttaaccgcacgtcgggcccactgtaaacggttaataaccgccttcgtggaccaggcctctgccctccatctttgtgcgggcgggaggtggggcggggacgccaggtgtagcggacaagcggagaggcggcgggtagatccgggcccccaaccccaacagtcaagttttcaaaaagcccgcgcgtggcgccccagaccgcatccgttgggaatggcccccagcgcgccccctgctctctccccggcaaagccctgggcgggagaaggcgcgggggtggtaggccggctctgcacgccgggggcgccggggcaagcgcgcaccggggagcgcgcccgtccaacagctgccgaaaacggaagtgggtgcgaggggatcacggtgattggctgaactcagatgtctctcaaggggctggcgcgaacgccactgcggagttgggcgaggggatgagtaaaggggagggggagaaacactgggaacagccgcggtgctaggaggaaatgaatcgcggtggtgcgcggagggcagggagggacccatgtcaagggacagtggggcgctcgggaatgaaagtgggctggcagaagcggaagcgggagcggcacaggccgcgggcttgaatagaccgcggagggcggggagtccgtgatctagagcggcgctgcggcgcggtaggcgggattaaggggagcgaggcggggattggctggtagccctaggctgccgtacgtcggcggtgacgcacgcctcggggagggtgcgcgcgcgttcagcggcctctttgtgtggtgcccagataggggagcggaggtggcggcggcggcggtagcggtggccttggttgtcttccagtctcctcggctcgccctttagccggcaccgctccccttccctcccccttcctctcttccttccttccctccccttccctttttcccttccccgtcggtgagcggcgggggtggctccagcaacggctgggcccaag

SEQ ID NO: 34425 - DNA, 2300 bp, Homo sapien
acgtcaacctgtaatcaatctagctgtttctgtacctcacctccaatttctggacatcacttccctttttttgatctataaatttgttctgaccacgaggcatccctggagtctctctgaatctgctgtaattctggaggctgcctgattcacaaatcgttcattgctcaattaaactccttcaaatttaattcagcttaagtttttcttttaacacgtctaagccacagatcagttccttggatcctccctcctcggcctcccgagtagctaggactacaggtgtacaccaccacgcccagttcatctgtggtatttttatgctgttcctcattgtgttatccattgttgaaaccatgacagacctaactattcttaaggtgatttctttccagtaagaaactgctaagccttagatctcagaaagaacgtgagaagaggccatcataatttcaaacagcaaacaaaattgcattccctttcattcctattgctcagttccctttatcaatgttatttatgttgttttcttcaaactactaaagaataaaccaagatgaggagtacccccccacctccgcctttgctgtctttcaatgttttctctttgggccagaaatcccagcactttgaatggcagggaatccttcaagcctgttgtacatcccggtatgaataattctactgaatataaccaccctaaactatgctgagccatagaaccagagcctgcctttcctctagaagttagaagaagaaagcatctggaggaaggaagaattggaggaatgctttttaaatgaagttaattctgggtaatagctcactagacgctggctgccttccttgccttaatctccaaaatccgcaatgtaccccgaaactgcctatggcttcaatcccagagagtggaagaagtgaaaagaggagaaggcacatgctattccatagcagatatgttctgtaattctggcccccaaactaaaggctgtagactggctctgggcagtagagctgacaaattttattcaacatacatatactgagtacctactatgtgctctatgttggggctgagggacaaatttagatgtgtgttctcacttaatcttcacaactactcagatagatagagattatttatccccattttacagataagaaaacagaggaggaagggtaactgacctacaacaaagtcagacaaataccaagaagtgatgctccaactggaacctgtcttagtccatgtgtgatgctttaacaaaataacacagacaaaatatcacaaggttataaacaatagaaatttatttctcacagttttggaggctaggaagtccaagatcaaggcaccaaaaggttcagtgtctggtaagggctcttctcttccagaatggcaccttgttgctgtatactcgcacagcagaagggacagaagaggcaaactcacttagggtctccttataaaaggaatgagtttgcccttacaaagcccttttatgaggccctaatccattcatgagggcagagccctcatggcctagtcacctcctaaaagccctacctcttaatactgttgcattggggattaagtttcaacatgaattttggagggaacacaaacattcaaacaaaccataacagaacccaacttcaaacacagtactcaggcctccaaagcacaatccctatcctcctgactttttatagtccattgaagcaagtgtgtgcatactcaggtgaccctaaaaaaatacagaagttggccgggcatggtggctcacgcctgtaatcccagcactttgggaggccgaggtgggcagatcacgaggtcaggagatcgagaccatcctggctaacatggtgaaaccccgtctctactacagatacaaaaaatacaaaaaattagctgggcatagtggcacacacctgtagtcccagtctcctgcagtccctgtctcctgcctcgggaggctaaggcaggagaaccgcttgaacctgggaggtggaagttgcagtgagcagagatcacaccactgcactctagcctgggtgacagagcgagactccatctcaaaaaaaaaaaaaaagcagaagttgatagggatagaaacacatttggctgcttctatagttaacaagatgctgttacattccttgcctcactagctctgaagactatactagcgggacaaagaaagcacctgagatgagctgagaggagggtaaaggtacacagagatcccctggatatttgttctatgtcctctcaggggctttgctaccactagagaatt

SEQ ID NO: 34426 - DNA, 2300 bp, Homo sapien
attagtaaatgaatttagcaagagctcagaatacaagtcaacgtaaaaattcctggtattttaatataccatcaacaaataattagaaaagaaatagtattgatgaagttttaccttaaaaaaaaaaaggcagcaagatggaacaagtaggaaagaaataaagacacattacccaaaagtcttgtcacatcacctgggaataaacactattaatgttatgggatactttctttcagacattttcctgagtgttatgcacacatgcatgcgtgtgcacacacacataaattaaaatatttgtctttgttgttaagttgagaaatgtcatagaaaataggaagggttgataactggaattattaggaaaccaggttatctagtgacagtgtccagaagaaagggacactgctgctgtggaaaagcagaaagcatctttggagaccccaggatgtagaaaatggcctccaaatcaataactcaatagcttttacttttaggctgtatgttgccttattagagaaggatttggctcactgaaaaagataaagttctgccctgcattggcctttaagagagaatctggttcctctaatagaatcataatggggcctgctctcctggaggctggttgccctggaaggcctttcgtttctaaaagctgttccaagaacctgtcaaggcaattaattaaaagttaatagagcattttcttcgagtcccaggacttgctcagctctcttattggcacagctcttcttggcaaatgacatttgagctataaaagttcaccttgcccttgagctccttgtgaccaatgtgtgtttttatttgtcttcctgccagtgcaggtatcctaagctcttatatttcagatggaaatttagctttctgcttcttcagatgctaaatctagaggatatagtcctcatttactgttcagatccacacaccactttcaagcaaagatttgtcatcccagatgttattctacacctacagtttacaaatatctgttgagttcccctactttgtgtcagatgccatacttggcactggagctactacagtgaataaggtacaagcccggcctttgaggaatgcatgttccttgaaggcacacatgtaaacaggtcttcctggtactgcatggtaggtatacacagggtgtgggagcagtgactaggggatcctaatagccctggggaattagagaatgttgttgagaaatgtttaagtggaatcttcaagactcagaatttcatgacttattgacagtactataatccctgtgtaattaggattatgtctttatgttctcattggataattaatagaacataggtttgaaaacattctggcatttaataagtaaataattactgcctgacttgtttttttttttttttttttttttttagaggcagggtcgctctgttgcccaggctggagtgcagtggcatgatcatagctcactgtaatctcgaactcctgggcttaagtgatcctcctgcctcagcctcctggttagctaggtgcatgccaccatgcctggctaatttttaaattgtttttgtggagatagggtcttgctgtgttgtccaggctgatctcaaactcctggttcaagggatcctcctgccttggcctcccagagtgctgggattacaggtgtgagccactgtgcctggccctaacttggtttttaaagaagtaactttcaagatctatatgtattaaattctttttccatgcctaggacaggtctttgaaagttcacagtctagctgagaacaggtttatctacctaaaatagagaatagcaggaaacagtcaatgaccagatacaacagatatacttctgtcactaacatcacacatcttttcattccctcaggggaaacactatcccagcctcaacaaggagcttgatttgggcacagaaacaggagaaagagacctgccttgcctcccttatccaaccggaagtattcttcttcttctgtcttcaatttattgcatgatcacatttattgcatgggtggcttcaggaaggattttagggattcctggaaataatcagtcttgaaatactcccctcttcttccttcatctaggatgcttcctcttctctcaatatattctcacttatgggtataaaggtaagttgagtcctcctttgatattaactctgccttcagttacccttaactttcctttagtcagctttcaacctagcctgaagagaagcctttggaacccctgtgtacatgttgatgggaatgtaaattagtacagccatt

SEQ ID NO: 34427 - DNA, 2300 bp, Homo sapien
atggtatcataaaagaggacctacttacctttcctaaatcatcccttgatcccattatagcaaaaactttagccttgacgtaccatgaaggctatcacatgtaacacacggtaacctgggttgtatcttacaaagacctagagaagaggcaaagcttgaaagacaaagagtaagcagaactaaattcttcctcgagtgtagtatgcttagaacctgctgtaggcaaaattgggaatttagcaggttgtcctggatgtcttccctacttggctggtgaggtatacctcaaacttttagtgcagagagacctcaaatctattatttccttttccatgccctaatcaaaccctgttctccagcagaaccaaatgtcagtcacatataccacatttaaaattgcttagaatagataggctgggcatgtggtttatgcctataattccagtgctttgagaagccgacgtggaggatcgcttgaggcaaggagtttgagaccagcttgggcaacatagcgaaactctgtctgtccaaaaaattttaaaattagctgggtatagtgctgcatgcctatagccctagctacttgaaagtctgcagaggaaggatctcttgagcccaggagtttgaggctgcagtgagttctgatcatatcactgcactccagcctgggtgacagagtaagaccctgtctctaaaaaaaaactaataataaaataaaatgcttgaaggagtgtcttactcataataaatgctatatattggctattattacttttatcctatcacttgcatttgtattttaagtctctctaatttagatggaaaggttttgtctgtattactggaatttgaaatatcagtgaacagatgttgaagaatattttgggagactcctgaaataagactttgtaggcaaccacctactcaccaagtctagcatgctttttctactaagggctgcacgcccaggcagaaattatcaagctttctttgaacaccaaagaaaggtacacctacttggccagctgtgaaggattttatatggctcatatgtgctcaaacatctatttgctggattctaatatacatgttaattcaatcaagattggggtatctacccatgagggaggggaactgaagccaccccatggagataattctactcccttggcccaatcctcatgccacctaccctacttcaccacatttgctgattcgacattttattcttctgcaattatttacttccctgcacaaaaatggaaatctaaataccatgatggtctctgtgacaaaaagtgaaaggaaactaactgttaggaataaagggagatgaacatgcattgacagctctaattatatagattgcttatttgtttggttgtttcttaagtgtttcaaaactctttcagaataaaagtactaggcaaaaggggcatatgccatacagattcagaaaacttgctcaagaaacaccatcatgtttttccacctccctaccttcccagtgacatgtcactatgacctcggtctcctgctttgcccagactgccctccacctcggaacaaactgctagtactgagagacctcaaatctattattgaatcctactctcattaggcaaaagaaaaaagacttcagatgaagaattatgcaatacaaatcaattgggagcccatctatcactggtcttattcctggagaagtcttagtataatagatagaagaactccactcttgaaatattattttccctttagtcctctctcttaaactgggaaaattcaaagtccccaccataataaagaaataagagggttttttttctatttttcccatttccctattcactgcccttccctcacatgagcttgctaaagttcatagtcaaaattcacgtctgaaataaagaggcttgcaaaagaagctcatgtaatcccactccttaaataccactaagacacgtgagatattgtttagattgtggactcttactttgacatgccagcataggtagatggacaggcaagcacatcagatgtcactgtttggcagctgataaaagtcagtggtgctataatactaagcacagagccactagattagtctgtgagggaaggagatgcctcttccttcccttcaatagtgggttaaacccagctggcaccctctggaactacgggtaagtcccttctttattcctactacacttttaggtcttgtttttgttttttgtccaaatcagatgagtgtatacaaagatgattttcagataaaaagtttgaaagccacaacatta

SEQ ID NO: 34428 - DNA, 2300 bp, Homo sapien
ttagaattctgaatggtataacaaaatagtactgcatgtcttttttactgagtttctttctgttgctgttgctttttaacattttaatatcaacatacaaatttcataataccttggtttgatttaataccttttttataatatttcaaatacttgaatttttgtattaatatatagcaaaagaacataaaagagcaccaatgtttatctacaaaccacagagcaaaaaagttttagagggagattcagtgaaactagaatgccagatctcggctatacctccaccaaagcttttctggaaaagaaataatgaaatggtacaattcaacactgaccgaataaggtaggatatgtatttctagacttactatagtttatttgggtgaatccagttatactttttaacatgcattataaatggcatgcatttatctcaatttgtctagtttttaaaacactaaagaataatataataaaatatatattagataaaaatgtaagaaaacttcagtaagccagattccactaatcagaaatgtaaggcataaagtagactaggatttatctttttatcaacgatgatgaaagatggcccaaggaaataaatgacataaacaagattaaagggggatgttttcttttcttttctttctttacaaaaagcttcagcctttattaaacaaaggaggaggtaggagacagataacggaacaggtcaggacccctccattcccctatacatacgcataaatacaaacacagacacacccgagtgaatgacagggaccatcaggggacagattgaagagcagagggagacagcacccaaggggggatgtttaattcaagaaaaccaatagctatttggcaataaatagatacagctttggaattttcaaatgtttttttcttcctagtctgactgttggtcagagacatccacttcacagaaataattcctgtactttcatttcttaaaaatttttatttcagcttatatcaagataacactggaagagttactttactgataaaagatgtaaacaagaaagatgctgggtggtatactgtgtcagcagttaatgaagctggagtgactacatgtaacacaagattagacgttacgggtatgtcatactattaaccaaagtattataagggatttaactaggaagatttaataagaaatgaaaatcccagcagagtataaaatttgagatattttccccatatataatcagttttggttcttttttcttttcctgtctgataataaatacctagtgtgaccaatttggttagaacaggttttctgaatcaacttttatgtgatctatttcagcacgtccaaaccaaactcttccagctcctaagcagttacgggttcgaccaacattcagcaaatatttagcacttaatgggaaaggtttgaatgtaaaacaagcttttaacccagaaggagaatttcagcgtttggcagctcaatctggactctatgaaagtgaagaactttaataactttaccaacattggaaaacagccaactacaccattagtaatatatttgattacatttttttgaaattaatccatagctgtattaacagattatggttttaattaggtaatatagttaatatatatttataatattatttatcctttgactcttgcacattctatgtacccctccgatttgtgaagcctacaggaaatctgggtatatggatttgtaactgcagaagactatcttaaaatacaggattttaacatttaagtcatgcacatttaacaattacaggttataaattagtatcaactttttaaacacatctaatgcttgtaataacgtttactggtactgctttctaaatactgttttacccgttttctcttgtaggaatactaacatggtatagattatctgagtgttccacagttgtatgtcaaaagaaaataaaattcaaatatttaaaacggactgtctcctcttcacaaaagtctagatctgtaaaataaaactccactcagcaaaacctatgaataacaagttccaaaagagcaatgttatattctagaacagtgtgaagctcacttacagctcagccaattcctctagaaactaagctagacttgccatggtttgcacttcaaaggcaatcacaagaacttaaatcatgactgaatctactgaatttgtgattttgttttaaccaaacaggtttctaattcttcaggatttttcagtctgttatgctcaaaggaataagaatagtctctagagattacctgcttaattc

SEQ ID NO: 34429 - DNA, 2300 bp, Homo sapien
tcagcgtttggcagctcaatctggactctatgaaagtgaagaactttaataactttaccaacattggaaaacagccaactacaccattagtaatatatttgattacatttttttgaaattaatccatagctgtattaacagattatggttttaattaggtaatatagttaatatatatttataatattatttatcctttgactcttgcacattctatgtacccctccgatttgtgaagcctacaggaaatctgggtatatggatttgtaactgcagaagactatcttaaaatacaggattttaacatttaagtcatgcacatttaacaattacaggttataaattagtatcaactttttaaacacatctaatgcttgtaataacgtttactggtactgctttctaaatactgttttacccgttttctcttgtaggaatactaacatggtatagattatctgagtgttccacagttgtatgtcaaaagaaaataaaattcaaatatttaaaacggactgtctcctcttcacaaaagtctagatctgtaaaataaaactccactcagcaaaacctatgaataacaagttccaaaagagcaatgttatattctagaacagtgtgaagctcacttacagctcagccaattcctctagaaactaagctagacttgccatggtttgcacttcaaaggcaatcacaagaacttaaatcatgactgaatctactgaatttgtgattttgttttaaccaaacaggtttctaattcttcaggatttttcagtctgttatgctcaaaggaataagaatagtctctagagattacctgcttaattctcatagttaatgtaaatttgacagcccggtagtcccagctgctgggagaggttgagctggggatcccttaagatcaggagtttgaggccagactgggaaatatagcgagactccatctctaaaaaaaaaaaaattatgtaaatttgattacctatatatgggtgtttttcctctaataatttcaatttcagataatctgttactttagaaagcataattttgtgaacagctgagagtcccagtacaggaaagcccaaatccttttgttaaaactattctaaagctttttttcctctcgggcttctagttcactggctgtcagccttttgcgaggcctctcctgttcctctcatcgatggtagtttttgaccctcactactgtgtggccgttttgctttttatctacacataaaacagcatttatcgacagcagtctacatctctttcagggaaataacaaaagtggctttatcttttactttcaaaactggttagtggttttctttgcaggtttccctggggcctttggactggattccattttattttcctttttatcaacacgagaatccgtcctggtcttacatcctggagggcttttggctgccttaatttacagccaaattagtttggccttttctatagctggtttaccaaccttctcatctttgcaaagcttctgggtcagatgtgggtctgggccccaggactcctgtgtcggcctgacctttcacataatcactgcagagtttttcatctatttttacatcacgggggcaggggagtggaagctacttccagcaacagctctcggttaataaccagtttctgcaagtagcagcagcagcagcagcgtagggtcacggttaggaatttgggcttgggcatccaagacttggccccaacttccagtgaattacttcatttctcagcttctcggtttcttcaggcctaaaatgaggacaaaaatacctacctttcacggaggtggatgtggagactaacaaggcgataaatgttaaaggtattcgagagagagaagcccgtgataatgaatgactacgatttttaagcccacagccaggttattcccagaagttggccctccgcaccagaccccagcagcccgcagcccgcctcgggcgaaaggcctcccgggctcctgcggcgcagccgcgctgacgacttgtcgagtagctcgccgccctggaggagctgggggctcgcgcaggcgtcagagccgggcagcgcgcgccgcaagactagcgcgcaagcgccgcggcctcaggcgaacgaacgggcggtgtagtgcaggtccgccatggctgaggcgtcacggtggcaccgaggcggtgaggggtcctcttaaggagtgggagggacaggggcgatttggcagttccagacaccctgaaaggaactctgcggccccaaattcgtttgagagatgtgactgccgacacctt

SEQ ID NO: 34430 - DNA, 2300 bp, Homo sapien
tagattcctacccagcctcaccttagaaaaatatgctttcaggttgtctagttagaggttgcaggtagtagaggtcatgagatgagataataggctcctgactgggagcagtggctcacacctgtaatcccagcaaggtgggagggattgcttgaggccaggagtctgagaccaacctgggcaacatgagacttcctctctactaaaaatacagctgggtatggtggtgtgtacatgtaggcccagcaatttgggaggctgaggcaggggattgcttgggtccaggagtttgaggctgcagtgagccataattgcaccactgcactccagcctgggtgacagagtgagaccctgtctcgaaaaaaaaaaaaaagaaaatagcttcttgatttcattaacaaggcattctaaacactgagtagccattttagtgatgtataaaacttgctccctgacagacttttgtagtgagttttcatttatagtacatcaagcaaatccccctttatgtcatgaggatatcagcttgacttttagtgtaagtctgttaaataacttatctctgaagttaacttcgaaattgttttcaaatggatagataggtagattaactacatgtcttagcaggcatttcaggatgttttgcaactaataatcaactaaaagatttgttatgggaatgtggttttccttcccttcagtttttaatgtttctcctggaggtgtatgttactaataacacttctttgaaaaccacactgattaatattactcttctgcttacctgaagcttcttgggcagagtcctgcagtgtagtttactgagcttattaaaagatttgttaatagatgactagaattcacagaggataatgataccattagaattcacaaaggatgatgagaccaaatattaaacactttgccaaacaagttcttctctctctctctagtctaattgctggtcttttagcattatgcaaagaagagagaggagactggttctctatctactgcatacctatgttatctcagttaaactaaacttaacagctgtacaggtattattcttttttttttttttttttttttgagacaggatctcactttgttgcccgggctggagtgcagtggtgcaaacacaacccattgcagcctccacctcctggcagaagtgatcctcctgcctcagccttccaagtagctgggactacaggcactactatacctggctaatttctaaatttttttgtagagatggggtctcactatattgcccaggctggtctcaaactcctgggctcaagtgatcctcccaccttggcctctcatagtgctgggattatagccatgagccaatgcacctggcctgtacaggtagtttcttgttttatataaagaaacctaggctcagagacatggaagttgttcaccatcatgtgtctacaaaatgacggagttattaattgaatctaaatctttctgggactgttctttttgctcttttccaacatatgctatcgcttctctaaattagggagctcaggcaaccactatgttgtatacaaaaaaaagaagaaagtacttaagtatagtagcaagcttaaatcatatctttgattctttgatcttttgaaaatacttccatgtttagttctgagtatgtgaggaaatgaggaaggaatgggatggggtagggtgtccacacataattgaggaaaatggattatttgaatggtgtagtccttgaagatgtgtcctgtcacatatcctcctttgcaattcgtttatttatttatcttcagcaggaagattcttctccaattttccatcatcatctgaaaccgttgcaaggttttgcctttaggttacagatagatttttcagacagaagaatacctttcaatataggtaacctcttaagaggactgtactgctgcttctattaatagtctcttctgacagttaaagatgtgggaaattgaaataattgtttttgtcttgtagattaactgctgaagtactgatcgagttctgcatttcttcaatgaggaactacaggctgatcttctgccataatctcaaacagccataaatgacaaaagaatgcttgctcagtgagggtagctggtgcagaagccattttttaaacttaggtatttaagtactgaaaggtaagttttcaaaatggtaactatctcgtgctctataaatccatagagattttggaacttgcccctgtagctgctatttgatttaacttgaggttttatagttcttagctggcaccagatacattg

SEQ ID NO: 34431 - DNA, 2300 bp, Homo sapien
ttaaaattagccaggcatggtggcatgtccctgtagtcccagctactcaggagactagggtaggaatgctgctggaggccaggaagttgaggctgtattgagccataatccagacactggaccccagcctgagtgacagagcaagaccttgtctcaccaaaaaaaaaaaaaaaaaaaaaaaaaaaaaaaaggcaagggaatccttccctctgggagcttacatcttaggtttcatattcagagcaaagtatttattacagtcagttatgtcaacaagagcctgtgttgcatatgtggggcaggcggaggaggtttttaactctcttcggatttactctcaagacttttacgcacttatgataaagcttttgaagcaatcatattgctcctgttctccaagcatggaatcacaggtaaagctttcatttaagatatttaaagagagatacaaggctaaatgcacagactgcatcttcactgggctgctctgaaatcaggctctgttgatcctgtttggcagatttggaaacttttatttcacttcgctcaagtttaaataggctctgagaaattaattcggataaaacaattcaacccagtgaacagtgtccgatttgtaaaccatgatatgaatttattgacaaaaactgtacagctagtataactagtcctagttatatgccttggacaatcccttcttattgggtatgtagatttatttgagagactccctgaatgatggaaaggctactagctgagtttggaatcagagtatgggcctttgtatgctcttaacggagatccagaatttaggtttgctaggatataaactccacgaaggcagggatttactgacgtatcttaagagactagaacatagtaagcattcactaagtatctgttgaatgagtgagtgaatctgaattaagatttaactgccctgagagtaagtgttggttctggtcattagaatcagttgcctcgttcctggacagagttcctgggagcctcatagaacattcttattcagattcttctggttttagactctttgtggaccccacccttcggttatgacagcattaactgggtatgtgacacttaggttacacatggtttactctctctgatgaaatgtgggagacactgtggcctctgtagcccatttacagatcatttcatagggtaactttatttttttcaaatcttgtcccaagttctatgagggttcttgttttacattttccaagttactaacttccagctcaggtaggtaagggacaactgaattgtggtggctgctattttttgtgcaggtgttgatctaccggctgtcaaggagtccaaatggaagatctcaaagcccttaacagactataacaaagaagagattggctgaatattcatacccttgtgagttcaagggagttgtagggatggtctgggtagccatgcaagttcagagagctcattctttctgcctcctttcagctctgcctccgcagctggctgattttagtatacgaagctccctgtaagcccgcagcctatcgacttccacagtcccagactaaggcaccgaagccttactgttctctctggagtctaggtcaggtcctgaggtgaaggggtagggtgggggcgggcaggacgcaggtgcagccccgtggtcccggatctaactcacatctctgggaatgggaaccgaagtcaccgcttaggtctcccccagcggttttcggttcaggtctctgtgctcctcacctggatatgggcgccctgggggcctggcttcctccgcagagaccagaagcgatctctgtgttccggattttccctttatctttcctctccccagtgtcctctctgtttcccaacctccccataccgaggaccccacaacccgccccgggatggcgcctggctgctcgcaccctaattcaggaccccaattggtgggagaggaaccgcggtcctcaagcttgcaggacacagggccgctgcccggaatgctgtgggggtggggaccctcgccgccccgcccccaccagcggcctgccccgccccctcccacgcacgtcacgtccggcccggcctccgcccgccagccgctctcctcccgctcgccgttagggaggctctgcacctcagccgccgcctctgtcgccactctctccccctgttccgcgtctgcgtcgccaccaccgccgggggtatccggggggtcgcttaccgggctggccccgcgccacagccgtagctttaacctcccgtcagcggccgccccaggaagaggcttc

SEQ ID NO: 34432 - DNA, 2300 bp, Homo sapien
aacagtcagtttgcagaccgacgccaagcctggcccatacttggagtatgccctaaagacacctggggactctttggcccctggaactcctttggtggggggatctctgagctccacttcccacccaaaccaggtccaaagttctgggaagtgatctggatgttgtaatggtcacaggatggagtcagaactgtgactttccatctatgctttcctctgaacttctctagacttccttctccagccttaggaaagagcttcagcaaccaagaaggactttcccaccttttgttctagtccccaagcatacctaatggtgcccactaggggtcacagggtctttcgtttgttcatccaggtgccttcttaagctctaagaaccgaaagtgaacctaaaagacattcctggctgggtgcggtggctcatgcctgtaatcccagcacttcaggaggccaaaggcgtgtggatcacctgatgtcaggagtttgagaccagcctggccaacatagggaaaccctgtctctactaaaagtacaaaattagctggacatggtggcacatgcctgtaatctcagctactggggaggctgaggcaggagaatcacttgaacacagaggtggaggttgcagtaagttgagatggcacacttgcactccagcccgggtgacaagagtgaaactctgcctcaaaaaataaaataaaataaggctgggtatggtggctcacgcctgtaatcccagcactttgggaggccgaggcaggtggatcacgagattaagagatcgagaccatcccggccaacatggtgaaacccgtctctactaaaaatacaaaaattagctgggcatggtggcgcacacctgtaatcccagctactccggaggctgaggcaggagaattgctcgatcccaggaagtggaggttgcagtgagccgagatcatgccactgcactccagcctggcgacagagtgagactccatctcaaaataaataaataaataaataaataaataaataaataaataaataaaataaaataaaagacagattcccacctaaggagctgaagtcctagtaacaaagtagtatcagaaagaaaggcatcagggccacgcccagtggctcatgcctataatcccagcattttgggaggccaaggtgggcagatcacttgagcccaggagttcaagaccaggctggccaactggcgaaaccccttctctactaaaaatacaaaatttagctgggtgtggtggctggcacctgtagtctcagatacttgggaggctgaggtaggagaatcacttgaacccaggaggcagaggttgtagtgagctgagattgcaccactgcactccagcctgggcgacagagcgagagactctgtctcaaaaaaaaaaaaaaaagagaaaggcatcagtcttcccaaatataaccctgggtggccctaaggttggttctcagatatataaaaaatcaactaactggagttgtaaccctcagatataaaaggatagatttgctaggaattaaggaaatttcccagcagttgctagaatgtggtggaagggactgttgcagagatggactctgaagtgttcctgctccatagtcccacagctccatcacctcacagccttgaaggaagtggtagggatggcgcactcactggtttaggtaaatgagtaggaagcagccccagatggagttgctttatgattattaacaccttggggaggatggcaggacagagagtgggctctcactgacagatgaggacactgtagctccaagaataggtgacctgccttcagggttaaggacccagcctgctctggcctacatgattctgagaaatgggccaaagaagcaggaagagacaaaattgacatatagaagaaagaaatctcacgtataggagaaaagcagcctccttctcattctgggagggaagaagggctggaggggctgggcagggcggggcttttggcgaaaactgagtccctcctcccagatcccccactgggccggtggctcctgcagccctgccagttaggaacaaatgagaagagctgctgatttcctcccttggacattcagaattttctcacataaatactgaggaagaccctgccctctcctcacttctctggacttggccctgagctggacctggtccactggggtaggcagggcgatggggaacctgtttatgctctgggcagctctgggcatatgctgtgctgcattcagtgcctctgcctggtaagtcctttcccaaccctcactccttgcca

SEQ ID NO: 34433 - DNA, 2300 bp, Homo sapien
ctgtgggctctggagtcaggctgcctctgaattggaattcaggctgtgtgcctttcagtgagtacttaacctctttagatttcaatttcttcatctgtgaaatggagataataaggccgggggcggtggctcacacttgtaatcccagtactttgggaggccaaggaaggtggatcccctgaggctaggagttcgagactagcctgaccaacatggtgaaaccctatctctactaaaaatacaaaaattagctgggcatgatggcgcacgcctgtaatcccagctattctggaggctgagacaggggaattgcttgaacctggaaggtggaagttgcagtgagctgagattgctccattgcactccggcctgggcaacaagagtgaaactccgactcaaaaaaaaaaaaaatgagatattaatgatacctaccttacaggtttattgagaggattaagtgagttagtatagaaatacagtgtttggcccattgtaaacaggcaaatattaactgctgttgctattttattatctgatgagggttgttatctttgctactgttttcattaagaactggttagttcttcaagagaacgtgttaggttatcatatgttccacatgaaggtttgattttctttgttttttcttggccacctgcagacccatggacttaactagcctgaagagaaatctctctaagggtcggattcgcaccatggcccaattcctgcgagacctgatgctgatgttccaaaatgctgtaatgtacaatgactctgatcatcatgtataccatatggctgtggagatgcggcaagaagtcctggagcagattcaggtactgtatgcagatacctgtagcctctggaatcttgatttcagaacgcctatgagaataaaggtgatttcgaggtgactgtgttctcagagtttatttttaaaggtgattaaggccctgaaggattgataatgtgcctgctggtttggaaaaccctgagcctcagtaagtccagctctgatagtgaagtagtctaggaatgcaggcagcagtgaagagctctcaagagagctgaggatagacaagtaatgggaattcccgcttccagagcctcaagtcaagggctaaactccaaagaggctggagtcactgtgtattttttggttgcttcatctgttgttattaatgtacgttcacactttcccatctttaggggataagatatagtagctagaagacatttgtgggtttcttttctgggtagcatcatactttaaagaaaaaagtatagttgagtctatttgccaaaaaaataaacttgcaatactttagtgtttaaggttcataatagcttgctatgtgttccttaaccctttaggtactgaatatctggttagacaaaagaaaaggctcaagtagtctggaaggagaaccagctaacccagtggatgatggaaaacctgttttctaacctggagctgctatcctgactttttctagagtttgaatctctcccggaactctgacctagagaggatcctggtacttctttgccatgtcctcattttcttttccaacaagaataataccttaactcacaaccaacgagtcaaagatgcatgtggacataatataaagaaaaaaaggggaagctgaggtttggatttatgccataaatgttgcccacatctttgttccatcggcttgatttaaagacaattccattagatcttttctaagccttttactctataaataaatgtatttacacaataggaatattgctttttaatgactagataagctgggcatagagggcacagcatcatctggtgaaacgaaggtatctgacacgggtcatttacatataccgcctggaaaggaatggttgggggaggggttcttatcatttatagagtagggataattgaagcatccttcaaacgggaagaaggatgaaataagataaattatgagtaaaatgtcagaaaacatctagtgctctaagattcacaaggagaataaaagtgactggctggctccctttggttaaaacgaactggccagaagctgcaaggttccttgctgggattggctctctgcagccaccgtccccacgctggggcttcaggtctcctagcaacaagttgtaccatatgaggacggccgctgaggtgagtacttagagagggtcaaattcagaatttgcaggtgcaacccggaaagtccccgcggacctagaggccctgcttttcaattagcctgaccctatgcacagagaggtccctgcgggacagggtc

SEQ ID NO: 34434 - DNA, 2300 bp, Homo sapien
tgagatatggaggttgcagtgagccaagatcacaccactgccctccagcctgggccacagagtgcaatcttgtctcaaaaaaaaaaaaaaaaaaataggcctggcagtggctcacgcctgtaatcccagcactttgggaggccgaggcggacagatcatgaggtcaggagattgagaccatcgtggccaacatggtgaaaccccgtctctactaaaaatacaaaattagccaggcatggccaggcgcagtggctcacacctgtaatcccagcactctggcaggccgaggtggggggatcacctgaggtcaggagttcgagaccagcctggccaacatggcgaaactctgtctctactaaaaaatacaaaaattagctgggcgtgtccgcaccactgcactccagcctgggcaacagaaggagactcagtctcaaaaaaagaagaaaaagaaaagaaagtctacttacagcttaatatgattaactatagaaatctaccgatgtgaaagagtatctaacaatttctaagacccagaaaagctgacatcctagataccttaccaattttgatcgccacttctcatgacagaagatgctaaacatagcttctctcggatggaccatggctctgtggggccagtgcttagcagcttgtgttctgggaaagggagaaaaaaaaaaaagccttggaaacaaccactgagactgtagtgctaagctccaaaatccccaaaaagaggactaaaagcctaatacaaaacatcccaacttgttaggacaaagtgagctactataaccaaatcttgattttcacctctccaagtgaaatatcaccagtgaccggggtacctattcgttgcatgtgaattattaacattttatttcttaaaacgccatggcttgaagctccgctttattaagaaacagggaatgtcagattaggcagttctccctaaaagcccagttttaagaatactggactttattccagtttgaacttattcagggcttatttcccaggaacccgagcggccagcccctcctactaccccgcctccctcttagcataaacttgtttacttctctcagatcctctactccaaatgtcgggggtaaaagagcttttcagtccaaaaaaagaaaaatggctgaaatccccgagatgcaatttcctgagtggcaagaaaagctcatggttaaaagaccccacttccactgcctcacaaacgtcagacaaaaaaatgaatggctctttgaggtgccggttactccgtctggctcataacatcttttcgtctgcacgcccaagtttctagagtgcttttacggttaacccgcagagttcctaacacactaggattcactaagctgcttctctcacacctccgctctctccctgagaaacaagaccccagatttctgggcccccaaacgttggtcttcacgatgctgtagagcgcaggtctctgaaaaccctgggctctcaagcaacccacttctcccactccctaagcgtgtaacaaaaatatggtgcctagcctcggatctacaaaggcctttcacgcaaaacctgctcagatactcactgcccgttcccgtcgccatcttggccccgaagtctccaaccctgaggagagacggtctggaagggccgaaaccctggaattctgggaaatagtgtaccggcgttggttcgcggtgcctcctgggaaatgtcgtttttccccttaagacaaagcaagcaccctaaaccagttaccctgtgcactcctgttaagattgttgctaaggaaggacaggagttggctgctgaagcctcaagatttcctttaggctcttaggtaagaaatgtctaaggttcaaggaaaaaggttaagttggaagaatcccaggcaaaataagtgcgaatccacgacagttggtaacccggacccacattagaactcagaggtcaagcagaagcgaacgactggaattccagtcaggcccgccccctttccttacgcggattggtagctgcaggcttccctatctgattggccgaacgaacgcagcgcgtaatttaaaatattgtatctgtaacaaagctgcacctcgtgggcggagttgtgctctgcggctgcgaaagtccagcttcggcgactaggtgtgagtaagccagtatcccaggaggagcaagtggcacgtcttcgggtgagtgtgcggctgtgctggagcccgggttaccagctcttgcccgcgcggaataggctttaagaaatcggagctgcagccatctgtttttctcttaatgctgcatct

SEQ ID NO: 34435 - DNA, 2300 bp, Homo sapien
agataccttaccaattttgatcgccacttctcatgacagaagatgctaaacatagcttctctcggatggaccatggctctgtggggccagtgcttagcagcttgtgttctgggaaagggagaaaaaaaaaaaagccttggaaacaaccactgagactgtagtgctaagctccaaaatccccaaaaagaggactaaaagcctaatacaaaacatcccaacttgttaggacaaagtgagctactataaccaaatcttgattttcacctctccaagtgaaatatcaccagtgaccggggtacctattcgttgcatgtgaattattaacattttatttcttaaaacgccatggcttgaagctccgctttattaagaaacagggaatgtcagattaggcagttctccctaaaagcccagttttaagaatactggactttattccagtttgaacttattcagggcttatttcccaggaacccgagcggccagcccctcctactaccccgcctccctcttagcataaacttgtttacttctctcagatcctctactccaaatgtcgggggtaaaagagcttttcagtccaaaaaaagaaaaatggctgaaatccccgagatgcaatttcctgagtggcaagaaaagctcatggttaaaagaccccacttccactgcctcacaaacgtcagacaaaaaaatgaatggctctttgaggtgccggttactccgtctggctcataacatcttttcgtctgcacgcccaagtttctagagtgcttttacggttaacccgcagagttcctaacacactaggattcactaagctgcttctctcacacctccgctctctccctgagaaacaagaccccagatttctgggcccccaaacgttggtcttcacgatgctgtagagcgcaggtctctgaaaaccctgggctctcaagcaacccacttctcccactccctaagcgtgtaacaaaaatatggtgcctagcctcggatctacaaaggcctttcacgcaaaacctgctcagatactcactgcccgttcccgtcgccatcttggccccgaagtctccaaccctgaggagagacggtctggaagggccgaaaccctggaattctgggaaatagtgtaccggcgttggttcgcggtgcctcctgggaaatgtcgtttttccccttaagacaaagcaagcaccctaaaccagttaccctgtgcactcctgttaagattgttgctaaggaaggacaggagttggctgctgaagcctcaagatttcctttaggctcttaggtaagaaatgtctaaggttcaaggaaaaaggttaagttggaagaatcccaggcaaaataagtgcgaatccacgacagttggtaacccggacccacattagaactcagaggtcaagcagaagcgaacgactggaattccagtcaggcccgccccctttccttacgcggattggtagctgcaggcttccctatctgattggccgaacgaacgcagcgcgtaatttaaaatattgtatctgtaacaaagctgcacctcgtgggcggagttgtgctctgcggctgcgaaagtccagcttcggcgactaggtgtgagtaagccagtatcccaggaggagcaagtggcacgtcttcgggtgagtgtgcggctgtgctggagcccgggttaccagctcttgcccgcgcggaataggctttaagaaatcggagctgcagccatctgtttttctcttaatgctgcatctctgttctcacggtggtccttggggtgaggttagagaaggagccgagggatcctgacaccacctccacagcaccggcgggcgaggtgccctactttaggcgtagccttctgcttttggagccagatgtctgtggacttctgttcgcgttcagaaatgccgcctcaaacttctctcaattgttcattaagtgaacttctctcattcccttcccctttgccgataattggaggggaaaagaagtaggaagcgggacacggtgtcctggggcaagggacttattacctaaaattcgcggccccttctgtccctaaaggttcttctccctgcccactttttggtctctttttagacctaggctgcccctgccgtcatgtcgcaagggatcctttctccgccagcgggcttgctgtccgatgacgatgtcgtagtttctcccatgtttgagtccacagctgcagatttggggtctgtggtacgcaagaacctgctatcagactgctctgtcgtctctacctccctagaggacaagcagcaggtaaaggaactggg

SEQ ID NO: 34436 - DNA, 2300 bp, Homo sapien
cgggaggcggaggttgcagtgagcagagattgtgccactgcacaccagcctgggggacagagcgagactccatctcgaaaacaaaaaaacccaaaaaacaaaaaaaacccagatatttagagtgtctactatggcctaggaaccgagaagctctgatagtccatagtgagagacatcatcaaggaccatgctctcatggaactttataagtctctaagagaaactctataagagcacaaaatctgacaatgtatgttaatgtttagcataggacctagtacagtgtttctcaaccagggtcatttccactccaagggccatttagcaatgcctgaagtgcctgaagacattttttgattgtcacaaatgggaaggcactactgacatctagtgggtaaatgccaagaatgctattaaacatcttgaaatgtacaggacagatccctacaagaactgtctagccccaaatgtcaataatgctgtaactgagaaaccctggcctagcaggaaacctacaacaaattgaagctatggtgatactattaaaacctgaacatacattccacttacataatgcctatatgaccttgtgcaaattatttagcacaactgggcctcaaggcaaagagagataactattattccctgaaagattaactaagagcatgcatttgaggctatttcattaatgcaatgcaaattatagttcttctggacacacaactcaattttttttttacttgtcatgcccttaatttttttttctttttttcttttcatagccattttgtcctaaatgcccttaattttgaattgatctcagacctttaggattgctagtctttgacctcatactaccctgtatggacaattattggcctgaggatatcactttccgccccagccactccccagttcctttacctgctgcttgtcctctagggaggtagagacgacagagcagtctgatagcaggttcttgcgtaccacagaccccaaatctgcagctgtggactcaaacatgggagaaactacgacatcgtcatcggacagcaagcccgctggcggagaaaggatcccttgcgacatgacggcaggggcagcctaggtctaaaaagagaccaaaaagtgggcagggagaagaacctttagggacagaaggggccgcgaattttaggtaataagtcccttgccccaggacaccgtgtcccgcttcctacttcttttcccctccaattatcggcaaaggggaagggaatgagagaagttcacttaatgaacaattgagagaagtttgaggcggcatttctgaacgcgaacagaagtccacagacatctggctccaaaagcagaaggctacgcctaaagtagggcacctcgcccgccggtgctgtggaggtggtgtcaggatccctcggctccttctctaacctcaccccaaggaccaccgtgagaacagagatgcagcattaagagaaaaacagatggctgcagctccgatttcttaaagcctattccgcgcgggcaagagctggtaacccgggctccagcacagccgcacactcacccgaagacgtgccacttgctcctcctgggatactggcttactcacacctagtcgccgaagctggactttcgcagccgcagagcacaactccgcccacgaggtgcagctttgttacagatacaatattttaaattacgcgctgcgttcgttcggccaatcagatagggaagcctgcagctaccaatccgcgtaaggaaagggggcgggcctgactggaattccagtcgttcgcttctgcttgacctctgagttctaatgtgggtccgggttaccaactgtcgtggattcgcacttattttgcctgggattcttccaacttaacctttttccttgaaccttagacatttcttacctaagagcctaaaggaaatcttgaggcttcagcagccaactcctgtccttccttagcaacaatcttaacaggagtgcacagggtaactggtttagggtgcttgctttgtcttaaggggaaaaacgacatttcccaggaggcaccgcgaaccaacgccggtacactatttcccagaattccagggtttcggcccttccagaccgtctctcctcagggttggagacttcggggccaagatggcgacgggaacgggcagtgagtatctgagcaggttttgcgtgaaaggcctttgtagatccgaggctaggcaccatatttttgttacacgcttagggagtgggagaagtgggttgcttgagagcccagggttttcagagacct

SEQ ID NO: 34437 - DNA, 2300 bp, Homo sapien
cactcaggaaggaatatatctgctggctctgcacaggaggcaagtgggagatgaaggagaggcctctaaaaaactgggtctctctctagatctttgggccagaagtgggacaggcatccttcttcaacctaactgtgaaggagatggtaaaggatgtactcaaagggcagaactggctcatctatacatatggagtcactaactcagggaaaacccacacgattcaaggtgagtagtaagccttcacgggattcctgattggctggtaatggtgttgtttttaccttttgagactctgagttagggggagaagggcacttgcctcagctgtccatctttcatatgcctccaggtaccatcaaggatggagggattctcccccggtccctggcgctgatcttcaatagcctccaaggccaacttcatccaacacctgatctgaagcccttgctctccaatgaggtaatctggctagacagcaagcagatccgacaggaggaaatgaagaagctgtccctgctaaatggaggcctccaagaggtaaagcattggtatccatggcagtgggggtagggggtacaaatctcggggaagttttgtgcttaccttctccctgtgcccctccaggaggagctgtccacttccttgaagaggagtgtctacatcgaaagtcggataggtaccagcaccagcttcgacagtggcattgctgggctctcttctatcagtcagtgtaccagcagtagccagctggatggtatgtaccgtgactgggctctgccaaaaaatagtaggaactcactccctgttcctaatagctgccaggagtacagaccagaggttgcaatctaaggtctgccttccaaggcccctgcaggccaaaagagaggtgaactgctctaggttgatgccctatacattggcttcttctccagaaacaagtcatcgatgggcacagccagacactgccccactacctgtcccggcaaacattcgcttctccatctggatctcattctttgagatctacaacgaactgctttatgacctattagaaccgcctagccaacagcgcaagaggcagactttgcggctatgcgaggatcaaaatggcaatccctatgtgaaaggtaaaggaacatggggaaagctggcatgaaccctggagggcaactggggagagactggcaaaagagttggatgttcccatcttacacccctctcctttggccccagatctcaactggattcatgtgcaagatgctgaggaggcctggaagctcctaaaagtgggtcgtaagaaccagagctttgccagcacccacctcaaccagaactccagccgcaggtgagtagattgtaagaataaactcttcactgtgttccaggaaacattagtcctctgcctggtcatggaaaatgtgcaatgactttttgtttttcttaacttccagtcacagcatcttctcaatcaggatcctacaccttcagggggaaggagatatagtccccaagatcagcgagtaagtttatccatttagaaatttgggcttcttggccataaatgatagttgggaaagcatggaggaggtcctcaggggaactatgtgttctccttctttgggtacagagattcttagtgggccgtcccctctccagaattatacaaagggccagaaggctcataacatgtgaggcccttatgtcagatcctgtgcatcattctaggctgtcactctgtgatctggctggctcagagcgctgcaaagatcagaagagtggtgaacggttgaaggaagcaggaaacattaacacctctctacacaccctgggccgctgtattgctgcccttcgtcaaaaccagcagaaccggtgagcttttgactataattcctgggctctgcaatttgctaagagacttcctggacaccactggggatggtgctaggatacccaaagggctggtgttctgctcacagctctattatctctgattctctgccaggtcaaagcagaacctggttcccttccgtgacagcaagttgactcgagtgttccaaggtttcttcacaggccgaggccgttcctgcatgattgtcaatgtgaatccctgtgcatctacctatgatgaaactcttcatgtggccaagttctcagccattgctagccaggtgagaagctagaggtgtgatgggtgtgcgcacttggaactggtaactctaagaaagctcctagggactacttatggagtcaagtaagatattttttttccctctagcttgtgcatgccccacctatgc

SEQ ID NO: 34438 - DNA, 2300 bp, Homo sapien
ctcccgagtagctgggatgacaggcatgcaccaccatgcctggatatatatttttttaatttttaatttttatagtagtagtgatagggaggtcttggtatgttgcccaggctggtcttcaacagctgggctcaaatgatcttcccgcctcagcctcccaaagcactgggaatataggcccgcaaattgatttttttaaagggtaaaatgggctgggcatggtggcttatgcttgtaatcccagaactttgggagggcaaggcgagaggatcatttaagcccaggagtttgagaccagcctgggcaacatagggagattctgtccctacgaaaattacaaaaaaaaaaaaaattagctgggtgtcgtgacacacacctgtggtcccagctacttgggaggctgaggcggcaggatcactggagcccaggagtttgaggatgcagtgagccttgatcgggccgcggccactccagcctggatgacagaacgagaccttctttcttttttttttttttgagacagagtctcgttctgtcgcccaggctggagtgcagtggcgcgatctctgctcactgcaagctccgcctcccaggttcacgccattctgtctcagcttccagagtagctgggactacaggtgcctgccaccacgcccggctaattttttttttttttgtatttttagtagagacaggggtttcaccgtgttagccaagatggtcttgatctcctgacctcgtgatccgcccgccttcgcctcgcaaagtgctgggattaccggcgtgagccaccgcgcccggccgagaccctttcttaaaataaataaaataataaaataacaatttaaaaatagataacttctatataacacccagtgaatgacaaaatggtttcaaaaaaaattcccgaggggttggtaagatagtatactactatgaaaggataaaaaccaaaaaacgccgaaaatgttcatgtaatgtttaagaacattgggctttggagtaaaatctggtttatagtctagactctctccttggaagagtgatagaacttctctgagcttccgttttttcttttttttcttttctggttttgtttttttttttttttttttttgacggagtctcgctctgtcgcccaggctggagtgcaatggcacgatctcggctcattgcaacctccgcctcccaggttcaagcgattctcctgcctcagcctgccgagtagctgggactacagacacgtgccaccacgcccggctaatttttatgtatttttagtagagacggggtttcaccgtgttggccaggatggtctcgatctcctgacctcgtgatccgcccgcctcggcctcccacagtgttggattacaggcttgagccaccgcgcctggccgagcttccgtttttctttctataaaattgggatgatacgaatatcatagtgctgtttttaggattaaaccagattatagttgtaaaagagcagaacctgttgtaggataaaccctcaataaatgtgaaatgttaacaattattgttaaataaatgttacagaacaatgctctcacccccacctccccgggctacccggggtaagaaagggtagacaaagaggaaaaatcctccacatggggcgatacatcctcctattttaaggaagaatccagaggctaccatgcatctttcctagcatatacatcactttgtcattatctggtacagagtcggccctgaaactacaccctttctatttttcatccaatcacatcacccgtgaaaggcactctcccttctccaccctttcttgcccctactcccacccctagcttcccagtttacttttcccagtcactcattcccctcttccccgccccgcccagaggtcgtggcttctccctcgccccgcctattttctaattttcccgcctcagtagctcttggccatttggggatgtagttgtttcttttcccccgcctcttcgtgacgtttcagaaataagacctatgattggtttttccggagcaagagccggccaatgacaggcagatatttttggtgcagatgggcagccagtattatcgccgatgattggctggagtggcccgagtcgggaaaatggctgcgagtacctccatggtcccggtggctgtgacggcggcagtggcgcctgtcctgtccataaacagcgatttctcagatttgcgggaaattaaaaagcaactgctgcttattgcgggccttacccgggagcggggcctactacacagtagcaaatggtgagatgttggagtgggaa

SEQ ID NO: 34439 - DNA, 2300 bp, Homo sapien
tggctcatttgtcattgtccacaaggggcaatgctgcttatctagcaggtgttggcagtcacagaggacatggttggtggagagggtgtgctggagggctgtcaatattagtcttggagtcatatttatttgcagagcttctccaatcctcattaaaggcccaatgatatgaggctctccacccctgtacccagacagaaatatgcaccagacactttattttctctcatgaaaaggctggcctgttacaggtgggattggtcattgctcccagcccgtcagcttgatactgcattcttggtctattctgtggggacagccctggaatagacactgagtatctatcagagtaggcaccctgagcaaacttcctttcccaaaccctcttcctgcccataacatgatttggcttgggctggaggagggggagggcagaggagacaccccttgaccacctcacatctttgttggttcatgggtctcagccctttcctatcatcccaaagagcctgaaattgttacattttgctttataaattcctttcttaagtattgtcagtttcaaaaaaaaaaacccaaaaaacgattgtctgcctgtaatagcaggtgtgagagaaaatgaggtgcctggagcatatttctctctggcaatggggtagagggcctgacatcatggggcctttaatggtagccccccagcttcatgttccctcacctttctggagaggagggcttgggaaaggcacatggagatagggtggagctgggggaaaacaggccttgtacaaaagctgagtagccagatgttcacttttacagctcttctgtaaaactggcagggcagatatagattaaaacgaaggacaaactccatttaaagtgcattacagctcaggaaccagcaccccctgggcaggagaagggagggaagggcacagaggccacatcagtctccttccttatctagggccacatgtctctctcctagctttgccaagggtgatttacacccccagctggaatgactctctttctgggctgattacatcggcaaatgccccccagaggccacagcaggatggccatattcagaagcagcagccaataaatctcagaggtttatattgcgattctcagtactccctgctggccctctgccaggctggctgtggaagtaaggagggggtcaagttagagggttaggggatgaaaccctccacttcctttcatcaccctcttctccttctctctttctatgcgctgcttagttctcattcttccaagccattctgcttctggctttatcctgggatcttgtgggaatcaggcccaggcccaataaatacccttatccttatgggtagacgtcctgtgttctgggcacagatgtgtttctacctagttgtttaatcctgatagagtagcttgctctccgaaagtctcatcatgtgaaaaggatgggctcctaaatggtctctccaggcaccttcctcagtgagctttggtccaaggaaatctctgctatttagtggagagtttaatcttccatcttccctcacgacaccatcggggctgaattttggaatctaatgccccaggtctgctcccccagcaaagccattccacctgtctgcgacccatctttgcagcatcttgagcttaataaccacccaatcttaccctagaagacacttaggagaggaaaaaacgagatcatagatgtgcaaattctaagaaaaatactagaaatgcaagtgcccttgtgttggcttgttcaagttttgttacaaaatctcttttgtggtggtgtctgttctttgatgtgtgggtgagtgggatccagaaagtgagaaagggtgcttttcttggagaaatatttggttctcctagatggcgagtttccagcggcagcttccacaatgtcttgctagtcgaacttgtcagacagcaggtgggccgcctcggaaagagcaacctcttccgcaccaagcccggcggctcccggggcgccggccctcccccgcccccacccccgcggtccctcggaccagcgctggaggcgcgtggtgtggacgcgcgcttcggagttggagggcggcgcccaggaccctggtgggagagtgtgtgcgtcgcgctggagggcgggaggcgggggcgggaggtgccggtcgagggagccccgctctcagagctccaggggaggagcgaggggagcgcggagcccggcgcctacagctcgccatggtgcgccccctgaacccgcgaccgctgccgcccgtagtcctgatgttgctgctgct

SEQ ID NO: 34440 - DNA, 2300 bp, Homo sapien
ctaggtgtataagttccatttgagaaatctcagaaacttatttttggggctagatttttggagaatttgttttaggaatgctgcaactttgtcagagtgctcagattttagtatatttccatcacctgacattgaactaaagccacttggctgacacctttgttgtgaccacccacaactgcacttacttgaggacctggtgcagaaagcactggtagccaggtgtgcacttgccataatctatctgcttttgccaccaatagagaataactttgtctctacttcccacctgcagggaagtatacaatttcccacaaagtgtgattatactgtagtcgtcaaagcagataacaactcatcccacactcccttaatccccagcctgattttcaaactcacctggcatagcaaggttctgtgctaactcctacactcactgtctgtatcctagaggacaaagaatcttcacacatctcctttctggggaagcaggttctgcagatgaaaagggtattaggataaaaaccagctggctacactgtgcctctcagccactaccaccaccaagatcctgacaacagacacaagttgcattttgacttttgtttctcaaagcatgatctgcaagccgtctgcatgggtagcacctgggggccttgataatgaccccactttagacctatcgaattatcgtttttggagcctacatcttaaagagcttccaaggttattttgaacatttttattatggaaattttcaaatatacattgaagtaagaagtatggggtaataccttaccacgcaaagtatggtcgtaggaccagctacctcaccatcagctgggggcttgttagaagggcagaatcttgggccgcaaccgcaacccagacatcccgaatcagaatctgcatttagcaggtcctcaggtggttagtgtgcaaattaaaccttgagaagcacagatatgatggaccctcctgcccccatcactcaacagtcagggtcaatcttgtatcatcaataccttcccccagcacaggattatttaaaagcaaatccctaacattaggaatgtctttttgtttgtttcactctaatgcccaggctggagtgcagtggcgcaacctctgtctcccgagttcaagcagttctcatgcctcagcctcccaagtagctgggattacaggtgtgtgccaccacaaccggctaaattttgtatttttagtagagacggggtttcatcatgttggccaggctggttttgaacccctgacctcatgtaatctgcccgcctcggcctcccaaagtgctgggattacaggtgtgggccaacgcgtccggccaataatttataaatatcacctcgtcaatgttcaaattttcattaataaccaatctttgaggtcctctggattgcgataaggattataccaagatgatttaattcctccactttccctgcaacggaatttctttttacccacgtgagctagagtctctgagatgctgcacactaaaagaaacaccaaacaaagctcttggaaggggctaatgcctctcagcataaacacacacacccgtctcgccccaacacttgccacgccggcagcaaacgctccatctcccgtggaaggccagcaaaacttagaagaaaacgtccgcgaaaacggcacgagaaagaagcgaagaaaatgaaacgcttacaacaccctccacccaaaataatctctcctagtattaccctagtgaatggacatcactagtaaggcgcggtttaaatctcccggggttcgtggggctgagggaacgaggaaaacagaaagggtgtggagattggtgagagggagagccaatgatgcgccaggctccccgtgaggcggagcttaccccgcagcctgcctaacgctggtgggccaaacactatcctgctctggctatggggcggggcaagtcttaccatttccagagcaagcacacgcccccaggtgatctgcgagcccaacgataggccatgaggccctgggcgcgcgcgcggagattggctgacgcagcttagaggcgagcggggataggttactgggctggcggaaggtttgaatggtcaacgcctgcggctgttgatattcttgctcagaggccgtaactttggccttctgctcagggaagactctgagtccgacgttggcctacccagtcggaaggcagagctgcaatctagttaactacctcctttcccctagatttcctttcattctgctcaagtcttcgcctgtgtccgatccctatctactttctctcc

SEQ ID NO: 34441 - DNA, 2300 bp, Homo sapien
gctgaaacccactggagcagggtcacagatggggtttggcccatgagggcataattaagatgcagttcaaagcagtggctcaagaacaaaagactaaaaagggggcagcagggaaagagcaggacatgagtaaaaaatccttgggaactaaaagtggaataaggagatttaattatgggtaggagtgttgggctgcactgggaggccattttatagatgacgaaaggggatgtaaccttcctttgaaatgaggcctgaaacttgacttgcagggtttttttttttgttttgttttttttgttttgttttgggtctcagtttctttcaatgttttgcaaatgagccaatgcctacttttaactcaaccatttaattcataataattaaattattaatttaattaataataaaaaggtgaacagcttagtggtgaaaagcaagggcttttagactgctttttgagagtacctttgcctaccatgtgggcagtcacttaacttcttgggctgtttcatttgtcaaagagaaggttttgtttcatttgatgattgtaagaaaaaatgagaatatatatcaaagtatgtaggtcaagtgtggtggttcacacctggaatcccagcacttcgttttttgttcatttgtttttttttttttttgagacagagtctcattctgttgcccaggctggagtgcagtggcacaatctcggctcactgcaatctctgcctccccggttcaagcgattctcctgcctcagcctcccgagtagctgggattacagatgggcgccacaatgcccagctaatttttgtattttttagtagagacggggtttcactttgttgccaggctggtctcgaactcctgacctcaggtgatccgtctgcctcagcctcccaaagtgctaggattacaggtgtgagacaccacgccaatcccagcactttgtgaggccaagatgggaagattgtttgaggccaggagtttgagactaccctgggcaacatagcaagacgcctctctctacaaaaatagaaataaatatgctgggcatggtggcacacccctgtagttctagctattcaggaggctgagatggaaaggattgcttgagcccagaagttcaaggctgcagtgagctgtgatcgcctcagtgcactccagcctgagcaacagcaagaccctgtttttacaaaaaaaaaaaaatgtagcatggtgtctggtacataagagcaattattggaaaccatgtgtcccctacttcatggcccctaactctgctccttttgccaaggggaaataagcagtgcaaggtaaatctttccacccctattttctcagttagtactgtacctcatttttcctctactctttttcagtttgtagacttggtggctcctgcctcctcccctccctggctcagtgaggacgacccccgccactggctctactttccagctgatcacagctatttacctgtcccagtcttgagtaaggcacaaaatatttacagaaaacagatgtctttcagaggacttgctgctaagtgtaatagtgaagattacttgcattactgctactttccaatcaattaaaaaaaagaaatagaaaactttgtattacaaagagatcacaacacgaacgcattgtttaaagcctctcctttatccacttttttgcttgtctccctaaaccatctgtgatgctagctgagactcgaatttacataagagccagaaaccatcaacccaacctcttcacacactaacgtctacattcaatctctttaaaaaagacttaaattttggctcatgtgggaggtggtggtagtggtggagacttaataaaaggtggttttgtcttcctgaagtggaaatatagcgccgtcaacatcttttccccatctgcctgtttcctccttccctttctgtttaaggaaagtctaaccaccgcacttctccccacctccccgcacctccccccaggcaaacgcaagcaactgaaccgcctatgatgtcataatcacaatcccattacctcatcctgctgggggggagggggcggagagagaagagagggagtgaacagccctgggctatcctgagctttacaaagtgttctgggtgagggcaaattacagaaccaagtggaaacgtccccgcaaccattataagtcctgggtttttaaggttcaggccgatccggcagctgcaagaggggctcctgggactccgagcaggccctaatccgcgcttggaccacacttcccagcagccttcacgccgcggacgggtcctttg

SEQ ID NO: 34442 - DNA, 2300 bp, Homo sapien
tctgttgcccaggctggagtgcagtggcacaatctcggctcactgcaatctctgcctccccggttcaagcgattctcctgcctcagcctcccgagtagctgggattacagatgggcgccacaatgcccagctaatttttgtattttttagtagagacggggtttcactttgttgccaggctggtctcgaactcctgacctcaggtgatccgtctgcctcagcctcccaaagtgctaggattacaggtgtgagacaccacgccaatcccagcactttgtgaggccaagatgggaagattgtttgaggccaggagtttgagactaccctgggcaacatagcaagacgcctctctctacaaaaatagaaataaatatgctgggcatggtggcacacccctgtagttctagctattcaggaggctgagatggaaaggattgcttgagcccagaagttcaaggctgcagtgagctgtgatcgcctcagtgcactccagcctgagcaacagcaagaccctgtttttacaaaaaaaaaaaaatgtagcatggtgtctggtacataagagcaattattggaaaccatgtgtcccctacttcatggcccctaactctgctccttttgccaaggggaaataagcagtgcaaggtaaatctttccacccctattttctcagttagtactgtacctcatttttcctctactctttttcagtttgtagacttggtggctcctgcctcctcccctccctggctcagtgaggacgacccccgccactggctctactttccagctgatcacagctatttacctgtcccagtcttgagtaaggcacaaaatatttacagaaaacagatgtctttcagaggacttgctgctaagtgtaatagtgaagattacttgcattactgctactttccaatcaattaaaaaaaagaaatagaaaactttgtattacaaagagatcacaacacgaacgcattgtttaaagcctctcctttatccacttttttgcttgtctccctaaaccatctgtgatgctagctgagactcgaatttacataagagccagaaaccatcaacccaacctcttcacacactaacgtctacattcaatctctttaaaaaagacttaaattttggctcatgtgggaggtggtggtagtggtggagacttaataaaaggtggttttgtcttcctgaagtggaaatatagcgccgtcaacatcttttccccatctgcctgtttcctccttccctttctgtttaaggaaagtctaaccaccgcacttctccccacctccccgcacctccccccaggcaaacgcaagcaactgaaccgcctatgatgtcataatcacaatcccattacctcatcctgctgggggggagggggcggagagagaagagagggagtgaacagccctgggctatcctgagctttacaaagtgttctgggtgagggcaaattacagaaccaagtggaaacgtccccgcaaccattataagtcctgggtttttaaggttcaggccgatccggcagctgcaagaggggctcctgggactccgagcaggccctaatccgcgcttggaccacacttcccagcagccttcacgccgcggacgggtcctttgctgggggaagggggattccttcgaagaggtggtcgtggagggcggggcagcagagcaggtgaggggcactgtggctaattgcgtgacgcggcccgaaccgagtgggaggctgcagttgggccgttggagggagggagggcaggggcgatgcctttgtttaccttcttccgacatggcctcccccgcgggtttcaagatgtgcctccaactggggccgtccactttctgcgatattttggagggggtgactcgttagtgaggaaaccacccccatccctaaatcaaagcgccaggctcgttcccaacagcgctgtccgagagacactttgagagagacacgacacggagctgcgccctccatgggtggcttggggggattctgcgagccggagctgtccccctactctcctcagggactcgttggttcgcgccagcgccttttaagggcaccgtggggcgaaccgagcgctcagagctgctccggccgcggccctgggagctggaggaaccgcggtaggtggtggagggcaggtggcgctggggcctcggggcgggcacctcaaccgtccctccctccttccctctttcccctcccccagcccgaccgcccgcgcggccgggcctcgctggccgcctctgcggggagagcacgggacccggtgggggagggg

SEQ ID NO: 34443 - DNA, 2300 bp, Homo sapien
tatcagataacaggcttcaagcccacacaattacctgaggggccttgctcaagggaaaaggggaggttaagccagtgtcttgattttgttctatctattcccggaaatgagcagcaagctgacagcttaccagagaatgtgtgtagcattagctagtcaagagaacaaatcatcaagaaatctaattattaatccaatttgctaagagttttgacaaatcatttaatactccttggcctcagtttacccatatgtaaagtgggcagaataatcttaacctgtcacaggaacaatataacatattaaaatgtacaaaatgtaccatctgacctataaaaatcaggagtccacacagactaccatttctcgttcccgtttgtgaatcttcaaggcctcagaatgtcagaagtaatgaaatcaataagatgaagaaggcaatagggtccatctctctggctgaataccatcctccctcacctgcacactaagaaaagcccaagagggctcttccttctgtgaccttgggggcagatcactctacaaaaaagaggaattatctctaccccactcacaccttagaaggagggcacaaggaagagcaaagagataaacctggatgtacctggagttctctggaagaaaggtgcaagagaagtcaatcatcattacagttaactatcattttcatgcataattattaccaccctgaacaaaattctagcttccggggagctctcttcagctgcttcccctatattcttacgggagaagctaaagcttatatcacttctgctcttggtttcttaactctgctgccctcaaagatcaaccagagagggaacctaagtgcaggattttaccctagagaccccaggcctcaggctaaccagctatgaggagcagggaatgaagcaaactctccagcttttcatgaggcatttggacaaacagcaaactcccagccacctctaggatcaagtcaagacagtgaatttgtgtttttctgcattttaattgttgggatgtggccacacacagtggtaattggaacaatgcaactaccaccacgcaactgatactctcagcctgagtttcctaaaacaggccaggctgcgagggggaacagaacggaagccataaggaatcaaaccaggacacaaaagaaggcaaaccagctccgcgaggggcctcctctttctcaagcaggcattgaaaaaagtgtaagaagccctctcttgccgccttccttccccttccattttgtgtatctgaagggtagagacagccctgaatattcactaaacaagttaaaacttctcagtttaacaactggcacggggctcagcccttcacagagcagcaggccgctaggccctctcagcaaccccaccagacctaactctcagtccaggctttccctccaccagcagcccccaaaaataaagatcagacccccaccccatctcctattggatggcagtaacccctgacactcctgtttcagggatgctgaggttgtgctgtaccaagacaaggtaggatcaggtcaggccaacagggaggagagtcacaaaccctttggggaccttcccctcaggtcccagccccacacctcctggggagactgaagaaaaacatgaggaaggcagggagctgcatgaacaggtaggtggagatctgcctgctcttcttccatatggttctggtggggaaaggggtgacaagtggggaacacccctccccccacccccatgaagaagcaaaaggctaggcccctccaatcttcaacctctccctctgttgccctgcctgtccccgcggggtggggcatggggcgtccgctggtccccggggcgggggggggggtgcgccagggctcgctcaggggggctgtcgttcgcctcttcccactaggttccatcatctggccgcgggaagcgaactcaggacgcaggggatggggagggtctgggacttagcactccgccaccccctcccccaccgggtcccgtgctctccccgcagaggcggccagcgaggcccggccgcgcgggcggtcgggctgggggaggggaaagagggaaggagggagggacggttgaggtgcccgccccgaggccccagcgccacctgccctccaccacctaccgcggttcctccagctcccagggccgcggccggagcagctctgagcgctcggttcgccccacggtgcccttaaaaggcgctggcgcgaaccaacgagtccctgaggagagtagggggacagctccggctcgcagaatccccccaagccaccc

SEQ ID NO: 34444 - DNA, 2300 bp, Homo sapien
aatttgccaggcagcaagaagagtcaagttgcttagcttatgtcctggtttcctgcttcaaattggtggcactcatcattgaataccaatgaagtgtgtgcaggacaggactgacttgactacctggagcaggaatctttgcaggggtgcacatacaccctagaaaaagtgagggttgtcacctgccctggaaacaaaggaagggctttggggaagtggtgggcagtggcatgtggttaaagaagcttagaattacagggttttttttctttaaaactgatgtttcatttcacctactgcttgagcaggggtaaagtttgaacatctaaaatgactttgtttccccctttttttcttttgagtttatttttgttggatttttctgctattttctgtgaggccaagtgtgattttatttttcattcctgaagtcttgttaatataggaaagaacgtaaactccatgagggcaagagttttgttttattcaatattgtgtccccaacactttgggaagttcctggcacatgaaaagtgctggtcacatttgttgaatgcatttcccttttgcctttcccatccgtgaacttaggtacatttctgtctctctgctgtgagaaactagccttggacattggggcagtagttaaatctctgtatgggagaaaatcccagcagataattttgatagaaaaattgcaaggcagatagatcttgtatggattcacccttgttcccctcctaccaactacagcttatgggccatgtgctttaagaggtggctctcagcccagaaaaacattctgagtcaggcctcaggttggctgtgggagatggaagttaaaaagaagtggagggaggaatgtttccttggtgctccacagggttggttctagaatgattttcctatatgttttatactttagtaaaagtataaagtcaatagttggttacccctctccccaagcctttgttacaagaaaagtaggtcaagggtgtagacaaggttatggacaggagatagctggggtaggcacagaagccttggagaaagaaccagctaccactatttcctgtctgtagggaaaatcaaaaagtcacttttagaacaacagtcatgggttattactataccctttatcttttgtatccattttgtgtatactcagtctctgcatccatgagaccatggaatgtgctagtccctgatattgccagctttaaatgattgaggcaatttcctgttgcttattgtgggtaacaatctagccaaaaatctcagcatctcactttctctgcaggctccttttctaatcaggagctatcagtctcccacacctgtattaaatgcattcagataagagttacagaattttctttgcccccagccccactaattccatggtaagatggagtgctactaagagaacccctttactgttggtctatttccagttcccctaagagttgaatggagaaacacgtagacttaataacattggcagactaggaaggggaagaagttaggtcggttttaggaaaaacaccaagatgttggggggcacgttggccttcagtcagtggaaagagtggcattatacatccaatggaagtaatacattggccaattggaaaggaacctaagaagtgctggcagtatagaatgggatggtgctgttatgggccattgagaaggaagacattgtgtctcatggaccaatggggagaacatttcctacaagacagcaggtaggagctcatattttcaggataggaaatcaatgggggtattggagacactaaatagctcaaaacatccactctctaggtaccttgcccctcacccccttaccccgtaaatgtctttggtatccgaggagagcaagctaaagccctctcatatatacgactccctgaaggaagattgagaccagggatgatgccatggggaagctgaaggacccgcccacttccctaccccggccggacctgcaattcccctccagaccgcagggggcactgcaggccccggggagattggggcggagcgctgcgaggggccaggagctgtcgccccgctccagagcgcggggggcgctgtgcggggcccaggctgcggctccgctcccggccacggggggcgctgcgctgcgccggtggttggtggtggctgttggggggggtgggggggaacggcggccgcgggtggtgcggagggaggccttgcgggcggatcgggcgcttggcggcggaggtggtgggaggcggcgggcgggagcgcgggtcaggccggccccggcg

SEQ ID NO: 34445 - DNA, 2300 bp, Homo sapien
ctagtacttacagatcctcctggtaactccacagttgccagttgggagtcacatgtgtggggattctaatactgtcctgcattacttagtgttgccttaagaagtttcatgtgagtttgtttttttttttttccgagacagagttttgctcttgttgcccaggctggagtgcagtggcacgatctcagctcactgcaacctccgcctcctgggttcaagtgattcatctgcctcagcctcctgagtagctggaattataggtgcccaccatcatacccagctaatttttgtatttttagtagagacagggtttcaccatcttggccaagttggtcgtgaactcctgaccttgtgatccacccgcctcggcctcccaaagttctgggatggcaggcatgagcccccgtgcctggccgcatatgtagcttttgatgctgtgtccactcatcttcagaagtcagaatttatatagaaagtcaaagctggggccagccagggtagctcacgcctgtaatcccagcactttgtgaggctgaggcaggaagattgcttggctccaggagtttgagaccagcctgggcaacatagtgagaccctgtctctacaaataatcaaaaattacctggacatggtagtgtgtgcctgtagtctcagctacccaggaggctgagggagaattgcttgagcctaggaagtcgaggctgtagtgagccatgattgtgccacaacactcagtttgggcaacaaagtgagaccctgtctcaaaaaaaaaaaaaaaaaagtcaaatctaagcataatatttattagaaaaatgtagcttcatttaatgtaatctgctttcagagctgtataaatacagtgcctacttaagtatatttcaagaagtggagtatctgttcagggaagaagaaagcattgttgtgactacagcaagtgtctgctaacagatgtgagattactgctgactgttgcacttaagaatccacatgcagctgggtgtggtggctcatacctgtaatcccaacactttgggaggtcagggtaggaggatcacttgagcccagaagttcaagactggcctgggtaacacagcaagaccctatctctaccgaaataattaattttaatttaattttaaattttaaaaaaggctgggcacggtggctcatgcctgcaatcccagactttgtgagtctgaggtgtacagatcccttgttcaggagttcaaggccagcctgggcaacatggtgaaactgcgtctctacaaaaaataagccgggcatggtggcacatgctagtagttccagctacttgggagactgaggcaggaggatcttttgagcccaggatgtggaggttgcagtgagctgagatcacgccatttcactccagcttgggcgacagagtgagaccctgtctcaatcgatcaatcagtcaatagaatccacacgcaggaatgggagggcaatgtttttcagcattttatctttttgaatttttgccatatgcatacatcacctattcaaaaaataattaaaagttcacagtcatttcaatagaagtattaaaaatgtcttcctattggattatgagctttttgagaccaagaagtatgccagattcctttctgtattcctgaacctagtatagtaccttatatatggtaagccctcagctagtatgtgtagatacgaattagaaactaagagttgcaaatttcagtagggacatgactaaaaattactgaatgactgtgaatagttcatgcctccttaactctgttcctcctcttcagaatgtggctgagaccagcttcctggctctgaagatcagctattattgacacccattaaaataacttaaacacaagttagaattattcctagtcagttgttcaaaacagtggggtttatgttcatttataagtatagtgtgagatttttccaagtgtgacttccaaactgctttttatctcttgcagatctttgtagaatttgatggctgtaactggaagcaacactcctgggtaaaagttcatgctgaggaagttatcgtgcttctgctggaagggtctcttgtatgggcgccccgtgaggacccagtccttctccagggcattcgagtctccattgcacaatggccagccctggtgagtggcttttactgggtgggaacatgtctgagctttactcctataatataactatgacatgttagggacagagtatgtgtaagaactacatactttgtccttaacgtacatttattctgaagttactaatgcaaaaattaggagcag

SEQ ID NO: 34446 - DNA, 2300 bp, Homo sapien
agacagagagttttgctcttgttgcccaggctggagtgcaatggtgtgatcttggctcactgaaacctctgcctcctggattcaagcaattctcctgcctcagcctcccaagtagctgggattacaggcatgtgccaccacacccagataatttttgtattattagtagagatggggtttcaccatgttggtcaggctagtctcgaactcctgacttcaggcgatccacctgccttggcctcccaaagtgctgggattacaggtgtgatcaaccacgcctggcatttttaaatttttatttatttatttattttgagaaagccaccttggctggcgtgcagtggctccatctcgcctcactgcaacgtccacctcccggtttcaagtgattcttgtgcctcagcctcccaactagcttgggatcaaaggcacatgctatcacatctggctaatctttgtagtcttagtagagacggggttttgccatgttgcccaggctggtctcaaactcctggcctcaagtgatccacctgctttgccctcccaaagtgctgggattacaggcgtgagccaccatacccaacctccctgtgcattttaaagtttttctgctcccttgcaaagtacttttggtggctgaggcttctttcttctacacagccccaccctaccttaaaaccgcccaagatttaagaacacaattctgagtcccttcagaagaggtggcttcggccaggcgcggtggctcacgcctgtaatctcagcactttgggaggccgagacgggcggatcatgaggtcaggggatcgagaccatcctggctaaaacagtgaaaccccatctctactaaaatacaaaaaaattagctgggtgtcgtggtggacgcctgtagtcccagctactcgggaggctgaggcaggagaatggcgtgaacctgggaggcagagcttgcagtgagccaggatcgtgccactgcactccagcctgggcgactgagtgagactccatctcaagaaaaaaagaaaaaaaaaaaaaaaggcagaggtggcttctccgaggtggctgtttgtgtaacttgagtccaagggggcctattcattattgacatccaggagtttggactggttccaagcagcatgaagtatcatagttacaaagaaaagggacaagttaatagttaaaacaaaccagcgtctgagttatagtttcagaatttagggaaatgtatttatttttcacttgtaagggttgctgtctgcaggaagaaaattaggagactcctgagttttactgtcttactgagacagaccagagcagttatttcctaaactgtcttctgtgagatgttaattatgatttctttgttgatatgtcttccccgctcgttaggttaatgatgatttctttgttgatatgtcttcctcgctcgttaggcctcattccctctcagcaaccttgctttattcatatttataatcctagtgctttatgagatagcacttagtaaatgttggataaatactgaaataagcaaaaagatttgcgaggaatacaatgttttatggtcagataagtatgagaaacactggcctaaataagtttctttcctgtgtgacttctcagagcctttaatagcctattgtatgtagaaagatacataatatttcctaatcctaattgatcctagcattcttaatttttgcagaacatctcatgagaatagagttctctttttttgttgttcacaagagacagggtcttgttctgtcacctaggctggaatgcaatggcgcagccatacctcactgcagcctcaaactcctgggttcaagcgatcctcctgccttggcctcccaaagtactaagattacaggcatgatcaccacgcctagcctgagactaaggttctatagatattgtttggcaaatgttgatatacagctccttaggatatgatttttctcagctgattagatgtttgctattcattttaacattcagttgttttcttcttttatctttaccagatgggaacagatagccaaaaccagattcttttggaacatgctgcactgagagaaacagttaatgctttgatcagtgaccaaaagctacaagagatattcagccgaggtaagaacggatagtcttctgtccctgaactctgattcaggtgaatgatcactgttgagtgatagtatggaatcccatgcaaccttaaacatttgtacttatctcctttttgtgggcagagtcagatgccacatgaaagataataattattatttattaaaaaataa

SEQ ID NO: 34447 - DNA, 2300 bp, Homo sapien
acacttctgtattattattgaagagactgtctgctctgtcacccaggctggagtgcagtggtgtggtcatagcttactgcagccttgaactcctgacctccagtgatcctcccacctcggcctgccaagtagctaggactacaggcatgcaccaccacacctggcttattatttaatttaaatttttttttttttcagagacggagtcccaatatgttgcacaggctggtcttgaactcctggcctcaaatgaccctcccacctcggcctcccaaagtactgggagtataactgtgagccaccgtgctgagccaaatttggatctttagatatgtgttagtgtgcacgtggccactgcacactctgctccccatttctgatcagaggacctggtcttgtttccagatatcatttcccattcctgtggttggctggaccagaatgaaaaagccagtgcctaggctttcagaaagacttctggttttaggcttgtaaaacagctaaaatggtcaggtgtggtagctcatgcctgtaatcccagcactttgggaggccaagattggaggatcagttgaagccaggagttcaaaaccagactggtcaacatagcaagaccccatctcatataattaaaaaataaaataaatccagctgaagataataagatatcttgaatccatgaggaagacagcttgctcagcattaggaatgaatggttatgtttgtgtcacaatcccagtttacttcagtgattcttccagaagttctgtatgcctaccttctgtacttccattaacatacatccattgaagatgatgactctgccaaactactgcctatattatcctccacttaagaaagctttgccacaggccaggcatggtggctcacacctgtaatcccagcactttgggaggttgaggcgggtgaatcacttgaggtcaggagttcgagaccagcctggccaacatggtgaaaccccacctctactaaaaatataaagttagccaggcatggtggtaagcgcctgtaatcccaactactagggaggctgaggcaggagaattgcttgaacctaggaggcagaggttgcagtgagccaagatcatgccactgcactacagcctaggcgatacggtgagactctgtctcaaaaaaaaaaaaaaaaaaaaaacataacaaaaaaccaaagaaaactttgctggagcatcccctggatcccttataccccactgcttctaagccaaagggtttcctgagtgcagtggtaggatgcctgctccctgcagctcttagtataaatatttagccatataaagtttacattgatctgttagtttttaccttttttttaaggtataacttacagtaaagtatacaattccaaatgtttacactctttgggacggagtctcaccctgttgcccaggctggagtacagtggcacaatctcagctcactgcaacctctacctcctagaatcaagcgattctcgtgcctcagcctcccaagtagctagaattacaggcacgcaccatcatgcccagctaatttttgtatttttagtagagatggggtttcaccatgttggccaggttggcctcaaactcctgacctcaaagcaattcttccgccttggcctcccacgtgctgggattagaggcgtgagccaccacacctggccaatatttatactcttgaacactagagaatctacccctagagtttctcctggaggataccgtgttaatgtttactagaagagggaaaggggtgtagcttagtgcttaaaagtaacagaactttaggggtagatatacctgggctaaagtcttagtgctcccgtttaccagctttatgtacttgagcaaatggcctaacttcttctctcagcctcagtttgatcatcaaaaattgaagtaaaagcagctacgttattgaaatgtggtaaggattgagggagataatgtaaagaacactcttagcacaatatgtggcatatatgagtattctggtgttatttttattgttacatttttttcccagctctttacaatattggagacatggtacatgctgcccggggcaagtggggaattaaagcaaactgcccttgtatcagtcgacagaacaaatctgtattgagacctgccgtcaccaatgggatgtcacaggtaaactggtgtgtgtgggtataactaagtgaagcctaaatttttttgtaccaggaaatgcccccttttcaactctgttatgccaggctactgtaggattcctgaggaatcaggagatggagaagc

SEQ ID NO: 34448 - DNA, 2300 bp, Homo sapien
taatttcactttctgtattttaattttgttgaagggctgattgggatttccatgttcttattaaaaatctaacaaatctgtttggagtggactaaattattcgtgtaccaacccttctaaaatcaacatcagattgggagttgggttggaggtgggggattcatttccaggtcttcatgactgtgctacacccagatatttttctttgcttgttgagactgtgccatgttagaaaaaaggaaagtgccagggtgaggtcagtatggtttggggaattgggggtaaggggaaggggccacatgaattagagggtagaaagagagacatgtttccccatactttatgctttgtgaatggagtgggaaagttggggtcctcccttcctgtggcagagtctggggggaagggtcatggtgtgtggcctcagcaaagttggacagtctgtggtgggattcttaagcaggcagcctggctgcctacatgaaacgtgtggccatagatccaccttagagatggtgggagacactcatgtgggatttatcaagcagtaattaaagtgtttcattgtggggtgataacagactgcattccaattaggagatgttttctggagaggaagttgtaaagaatagcaagaggggttatcagaggctgcttttctggaacgttttgggaaacatcttccaaagtgtttgaacctggaaatataatttaccaggttagaaatagaccattgtgttgttcagggatactgagcttgaataagaccatgactctttgaaatacacagttctgaatgtgtcctttcagcccagatgggcacaggttgatgctgtggtcacccgaaggattacaactcaacataaagggtagaggaatgcagaagctctaaaatgggacaggaaaggagagcaatagggctgggggtgttggtggatggttggaggttggttgctttcctgaagatcaggaggcaggctagcctacattctggatataaatgtctttagaatcaggacattcactgccactagtgcttgctgatgggggtggaactggagccccaggaccctctcgcagcccctctgtttgaaaagaaggttgaccctttgttgtcagtaaccacattgagagcataaagctctgttccgctgcaaagcttaggagctgacaacctaaaaaagcagaccagcagcccggtggctcacaccagtgatcccagcactttgggaggctgaggcgggtggatcgcttgagctcaggagttggagatcagcctgggcaatattgcaaaaccccatcttggcaaaaaaaaacaaaaaacaaaaaaacaggaattagctggtggtgttttgggcctgtagtcccagctactcgggaggctgaggcgggaggatcattcaagcccaggaggtgtgctgagattgtgccactgcactccagcctgagcgacagagtgaggacctgtctcaaaaaaacaaaacatcatctggtcaggggagatcctctttcaacggggtgagaaggagtggggtggacaggtgcggctgtacctgtgactcaggagctcaggtggatgtcttcagggcctgtaatgaggagagtttgctagtcagcagttgggggatgtaacctgtttaaagtaggcttcctggggtcatcttagcagcatgacttggtggctttgtgactctcaacagattattgagccttaagcttctcattcccttatcttcaaaatgagggcttttatagcgcctgccttatagggtggtcaagaggattcactggcaacgcagtgaagctcttagcacaggggctggcacacagtaagcgcctggtgtgggcagggcaggaggtgggcaggggtcgatttcaggatgtaaccatggagacctccacgacaacagcctagggcttgaaacccaagaaagatgaacaagcgattcgaggaaggcagggcactgagggtcggaggcgcatgcccggccacagcaggtgccggggcgggggcgcgccgccgccgccgcggcggcctcccggcctcccctttaagagccgccaccgcccacggcccgccgctgcggcagggacctcccctttaacggcggcgctgggcgctccgctgcccccgcggcggctgctgcagcggctgctgctgctactgcggctcctgctgccgccgccgccgccgctcggcctcaggcagctgcatcctcggccgggccgggtccccgccccgcgccgcgcccggccccgccatggtgtcctggatcatctctcgcctggtggtgtgagtg

SEQ ID NO: 34449 - DNA, 2300 bp, Homo sapien
aaaaaaaaatttggctaaggtaccctaccagggagtggcaaaatggacattcagacacaaggccatctgcgctgcaacagcctggccttcctgcccttgcggcaggagtcctctgagaggcgcatcactcctgccccaatggacaactcggtagacagtgggagtgagccccccacctccccagcggacttgagacggcaggctccgagacgagggagtcctggttcattaagttggtttttataagaaaacatgtttggaggggggacagccacagagggattaagtccaagaaagttacaccctcccccacctaatccccctgaccccgacctccagaggctgttggggttcacagaggccctcacctcctcccttccctctcggtgtcgtcaagcaccctccttccccacattctctttctgctttctttttaaatccagaaaaaacagcacctcctctggattcagagctagagcaggaggagccttcccttcccggaatccctgttccctttggggtgagcaactgactgcgtcgtgggggcggggagggcttccctgttcgcgttcggccccagggagacctgcgggaatcgttctccctcgccaccacccaccccctgcttccttctccccctcgccttggccaggctcggggtgaggagtgttatcccggagtctgggcgcctcggcagtgacggctccccagggactgcagggggagcccgggctgcagcgcctgctcagttcgtgctcactgcgtcgaaggctcccccggcctggctccgcgcccagcgccgcatccgggaggaggagcgaggaggcggcggaagagcccgcgcggccggagtccggggctgggagtggagagggaacctccagggggcagcaccgagccgccaagccggtcctctcttcgcgcccagcccggggtccccagacagcccatagggaagcccctctttcggattcccgcagtgtgggccggccctccacctggactggataaaggggggaaagtgacccctcaccacaaggaccattatctcctggtgagaacaagaatcaggcctctcttggggcaatcagcttccccacttcggtcccccaaaggtgggctctttgccggcggggactagggaacagcctttcggttccgggggagcacaggggaccccaggcaccagcagccccatcccaccgacaggtggcagaggcaaggcagctcactgctatacagtgtcccaagaaccaagtggccgtgacttcctatcctcaatttcccagcgacacccggaaagacaccgtgccatagatcgaggcccggggtcaaggccccgcctctcctgggcggcccctgcccaggcgggcccagccgctcctcccccgcactcccggttcgctctcacggtccctgaggtgggcgggcgggccctggatgacagcgatagaaccccggcccgactcgccctcgcccccgctctgggtctgggcttccccagcctagttcacgcctaggagccgcctgagcagccgcgcgcccagcgccacacgccacgagccctccccgcctgggcgtccccggatcccgcgagcgctcgggctcccggcttggaaccagggaggagggagggagcgagggagcaaccagctgcgacccggaaatgccatataaggagcaggaaggatcccccgccggaacaacccttatttgggcagcaccttatttggagtggcccgatatggcccggccgcttccggctctgggaggagggaagaaggcggagggaggggcaacgcgggaactccggagctgcgcgggtcccggaggccccggcggcggctagagctctaggcttccccgaagcctgggcgcctgggatgcgggcgcgggcgcgggccctagggtgcaggatggaggtgccgggcgctgtcggatggggggcttcacgtcactccgggtcctcccggccggtcctgccatattagggcttcctgcttcccatatatggccatgtacgtcacgacggaggcggacccgtgccgttccagacccttcaaatagaggcggatccggggagtcgcgagagatcccagcgcgcagaacttggggagccgccgccgccatccgccgccgcagccagcttccgccgccgcaggaccggcccctgccccagcctccgcagccgcggcgcgtccacgcccgcccgcgcccagggcgagtcggggtcgccgcctgcacgcttctcagtgttccccgcgccccgcatgtaacccggccaggcccccgcaactgtg

SEQ ID NO: 34450 - DNA, 2300 bp, Homo sapien
gtccccaccctatgaaaatacaggtaatggggtcactgtataatacactggactccaaaaatggagtcgggaagccataaactagctgtggactctgagcagatccctttcacttttctttgcctcagtttccccatgtatgaaatggaggtcatacccccatcttcaaagtgtggacacagtttataacacatgcaaaaagtattcaaaaaccatacaaatgaaagcgcatgacggacatccctacttacatgtctcataagcaatctcaaacttaacaggcccaagatgaaattctcaatcatcccccaacacctactcctcacctttcccacctcagtaaatgtcaccacttcagtactctgggaaccattcttggttttcctcaaccaatccatcatccagtcctattcactttttttttttcctcgagacaaggtctcgctctgtcacccaggctggagtgtagtggtgtgatctcagctcactgcagcctcgaattcctcggctcaagggtttctcccacctcagcctcccaagcagctgggactacaggcgcgggccaccacaccaggctaatattttgtaattttgtagagacggaatcttgccatgttgcccaggctgctcgcaaactcctgggctcaagcgatcctcccctttggcctcccaaagtgctgggattacagccgtgggccactgcaccaggcccttcattcacttctatctgcactgtcaccaccctaatgtaagcgaaaatcatctctcacatgataatgaagcagccaaaatggtctctgggcttctcctgtactctctccagtccacaccagggctctaaaccctttaaactacccactgttcttgaaagaaaccaaacttctgaatctggcttaaaagaccctacatgacctcttcccctgctgctccctcaaaccactctccccgtccctgaccttgtgccagcacactggcgtttctgtagttctcaactgtattctgtttcctcctgacaaactcttaatcatcctttgggtctcatttcagagctgggtccccgccatacactctcagagcaccctgaagtacttaagcatttgtgtaattattttattacaaaaagtataaaatcacaaacttaaaaacccaatcgactataagctccataagggtaagtactgtcatctgtttggttcacctctgtatccccaggaaaacagggtccagcacacggtctgggctcaatatttgaacccagacgaggtgaggggggacaaagtagccacctaaaaatcctaactcaaaaagataaagttctaaccgtatgtggatgcccattttgtttcaactctctccacccccattctcaacggctcaggccaaatcatacatgggaccagatacctcaggtctccaagctcaggcagcccccgctgtcttccaccccataaagttctaagtccaaagtgagcccgtcctagctctggggcgagagaaaacaggcctctttcgcccctgcaggtgagggtcccggaccgcccggaggcaggttcctcatccagacctactggccaggactcctccacactattccgtgcagccatgacgcacgcagaccgcagcacttcgtcagcgaagaagccgctgagcgcgaggcgcttcttcgcggcttctcaagcaccgttcaaaccgcgcgtcgggcccaagtgcctagcttcgagtcgcaaagcctcagatgtccaccctattcaaggagaatggactgaaaagacgacgaccccggtcctctctctttaagaaccacccccattcgagcctgacgggggctctcagtaaactcgcgagagccaccggcttccgcccgcttcctcctctcgccttgccgggccggaagaaaggtggcacctcccaccccccagccttacctcacaaggcggcgcggacccagctgcagccaatcggcgggctcattgtaggctgcggggcagagagccaatgagaagtcgcggcggacgcccagcttctcctcactcgcaccggccccctcccttccgcctgccgccttccactccgcccctggcggaggaagtgatgtcacaggccccatgtgagcggattgcaacacatgcagctgcctggagagagggagccggtgtcctacgtcagagccgccgccgccgcggagccgccgccggggaggagcagccgctgccgcccaggactgggcccttaggtaaggcacagggagggaaaggccggtgacctttgtggcgagctgcaccggacgggaggagagggcc

SEQ ID NO: 34451 - DNA, 2300 bp, Homo sapien
gcgacagaggctaaagatggagtctcactctgtcgctcaggctgatctcgaactcctgggttcaagtgatcctcccacctcggcctcccaaagtgctgggattacaggcgtgagccaccgcctggccacccctgccttctgagagaactaaaaacaagagaaatgaagtgttaagtaactagtgaggataatatagtaatagctgacagttaagagtgtgtgggaggctttttaaaaacttttagaatctatataatctataacccatgttacgttagacttttgtttattttcttactcccactgccatcctcctcagaatgtaaactcttcagttagcttctttccctccccaactttccccaacatttccttcacagttcctcacccaggggtgactacttaataatacagatcttcctgaagagatagggggtctgaaacatttctctttttttgaaagcgggcttccaggacaaattgcttcatctccaaaatcaagttcaatctgtcatcagccattcgttcgtgttttgctttcgctgtattcctaccacctgggagagtgactgacacacggtaggcatgccaaaacatatctgttgaatcaattaattcctcttcttaaaaatctaaaactgggttgggcgcggtggctcacgcctgtaatcccagcactttgggaggccgaggcaggcagatcacgaggtcaggagatcgagaccatcctggccaacatggtgaaacccggtgtctaccaaaaatataaaaattagctgggcgtggtggcgcgcgcctgtaatcccatctacttgggaggctgaggcaggagaatagcttgaaccagggagtcagaggttgcagtgagccgagatggcgccactgcactcaagcctggcgacaaagactgcctcaaaaaaaaaaacaaaaacctaaaaactggtcacagggtagtgaagtagttgacatcctgccaccagcacaaggtttaaaaagggccagaggagtctcaagtcaggcccagcacagtggggagaggaagagcctgaagctcagctatttttcttttttttcttgagacggagtctcgctctgtcgcccaggctggagtgcagtggcgcgatctcggcccactgcaagctccgcctcccgggttcacgccgttctcctgcctcagcctcccgagtagctgggactacaagcgcctgccaccacgcccggctactttttcgtattttcagtagagacggggtttcaccgtgttagccaggatggtctcgatctcctaacctcgcgatccgctcgcttcggcctcccaaaagtgctgggattacaggcgtgagcgcccggccaagctcagctatttttttttccctttgtgcaggctaattggcctaatgttctgtgtgaatcaaacgcttcgtagttggaaacccaagacccctgtgataaaacgcaacacgaaattgtttaacgtctgtctgcatatccaagtgtctttcaagttgtgaacaacgggcgggaccaaacaacaaaagtactgacgtcctcacttcacaaagccacaagacaagatggcgccgtcctccaggagcgggagctgggaacacgtccacgcccggggggtgtgcacgcgcccgggctcgccccagggaacgctggcgtgcactcgggcacccagtgagcgccgcagttagtctccacccatgttttccgccactccttgcgcacatgcgctctaggttcttagctggatgtctgttgcgccaacaggctcctcctcccgcgcaactgacgcaagaagactgtaatcggttcgcaatttatcccgtgtgaccttgagtctttcctgtcgccgaggaccggggctgtccgagatacggccttcatatccctcttcctcccctggactctttctgagctcagagccgccgcagccgggacaggagggcaggctttctccaaccatcatgctgcggagcatattacctgtacgccctggctccgggagcggcagtcgagtatcctctggtcaggcggcgcgggcggcgcctcagcggaagagcgggcctctgggccgcagtgaccaacccccgcccctcaccccacgtggttggaggtttccagaagcgctgccgccaccgcatcgcgcagctctttgccgtcggagcgcttgtttgctgcctcgtactcctccatttatccgccatgataagtgccagccgagctgcagcagcccgtctcgtgggcgccgcagcctcccggggccctacggccgcccgccaccaggtgaggaactg

SEQ ID NO: 34452 - DNA, 2300 bp, Homo sapien
ttgggcagggacaaatatccaaaatatatgaattatgttctgagttagccaggtgaagtagagggacgccaaagccactctaggcagaggagactacaggagcaaagaccctgcagccagaaacaggacaggggtagttggacaagaatgaccttgtcagggtttgcctttttctttttctttttgagacagagtctcactgtgttgcccaggctggagtgcagtggtgcagtcatggttcactgcagccttgaactcccaggctcaagcgatcctcccacctcagcctcccaagtagctgggactacaggtaggtgccactacacccagctatgtttttgtatttttttgtagacaagggttctatcattttgcccaggctggtctcctgagctcatgtgatccacccatcttggcctcccaaagtgctgggattacttgtgtgagccactgtgcccatcctctttttcttaaaggttgttctctccccacttcatggtcctattgccctttgtcagcatctgttaactagcacaggcccacagtactttgaattacagtgggcacattcacccacagatgttcactaggcactccctaggggatgggcaatgtgctgggtgctgcaggagatacagctcctgctttccagaagtttatattcccttgggggagagggagatgtgaggagtagagggtaaacacggtaagggcaggtctccctagcaccctgctctctattcagcacaaggccagcagtggacatcgtcgtcttgcattattcaggtttataggccaatactgaaatctatcttattcatcatcccgtgagcaggggaaacatcattagggttttctataccaggatgatagtgagcatgtagtagtttttgtttttttgtgttgtttgtttgctttgtaattttgttttcttttgtttttggagtattcactatgaagataagaaagggtaagaataaaatgccccaaatgaccagaggaatagagatagaagtcaggtccctcaaatttgttggaggagggggacaagctgggaggggggacgtgctgggggcggggcgggaacaagcccaaaaagggacagctgctgcggtgcctcttttgtgtttgtaaatgtcctccccgcaaggtggctctagcctgtaatcccagcactttgggaggctgaggaggatttcttgagcccatgagtttgagaccagcctggcaacatagtgagactctgtgtctgtagttccagctactccggaggctgaggtgggagggtcggttgtccagggatttgaggctgcagtgggccgtgatcgcgacactccaccccagcctgggcgacagagggagaccccgtcttaaaaaaaaaaaaaagtccttgatcaagagggcttcgggtgtttccatctgtggagtgaggggacgggttaggtgaattctaggggcgcttccacctcacattatgaaaggtcctgagagtcagattctagttccactgtgtcccgaagctgtggggcctttccttagcctccgcttctccttctgtaaagccaggtagttggcctagatcacttttccagaagactgtgactccgggacacctgtgacactcttgaggggagcgtgcccagtacccctggtcgcgtctctgggattccgccggggtgggggcccgcgcgaggccgcccctgagcctcacctgtgcgcggagcggtgactcacctgccctcgcgcagccctctccgcccgcgggctgttccaggagtcaccgctcctcctccctctcaggggtcactcccggcctaagctcccactaggggccggggaggaaggaattctgaggtgggcggcggggaggaagaggtccctcgggggtcccggtccggcgttgccagactctcttcgcggtgggggccttccctttccccaaaagcggaggccggaacggccgggaggagcgggcggggcggcggcgggaggcgccgggaagagcgagtcggagggaggtgccaggaagggcgggcggggccgggacaggggcgggggccgcgggcggggggcgggccgggggcgggggcgtggggcggcccatttcctcctcctagccggactggagggagacaaagcagcgcccgtctgcttcgggcctctggaatttagcgctcgcccagctagccgcaggtaacttcgtacctccctcctcgcgggcgcggtctctcgggccaggccgagagggtccttgggccgggccgtcccaagctgggccccgcgagccgcgggcgggcgag

SEQ ID NO: 34453 - DNA, 2300 bp, Homo sapien
ggagtgttcccaccgaccttggaaactgcccagccaggaggccagagcacatattcgggcgctgcattcccacagattgccagagagaccaacggttgtgagggatctcagggagtttaagatcttggaatcaaggctgtttaacttgttgttatccatgaggagtattttaagattgggcatcgtttcaaacactgtcaagtcgatggctttgatttcatttccagtcaggtctagcttttctaaagtgccccaggtccactccatcccacatgtcaagttgctgattttgttccattgtaagaagagcgtgtgcagactgcttagccgtaggaaatgagcaaaattaatcttcgtcagctggttgtgctctaggtgaagctctctcagtttaattaatcctgcaaatccattgcgagccaaacttcgcaaacgatttgtgctcaaatccagaaactccagactacgacagtcccagaacaggcgtactgggatagtccgcagggagttggaacgtaaatgcaaggtctgcagcttccgaaggccatagaagagctctgggtgcagagatgacagctgattaaaagacaggtccaaattttgcaggttaatcagttgggtaaaagttgtgtttggcaagtaaaatattttgttggaacttaagattaattccttaagtttatatagtccttgaaaagcatcttcttttactgttgaaatttgattgtgatctaagtggagccaagtaagttgactgaagctggcaaattgatctctttcgagctctgtgatgtgattgtgcctcagggacaggcccagagagcccttgtctgtggcgtttggcactgagtggaagccctgagagtcgcagtagaagagcagcttctcgcagcggcatttgggtggacacgccatacccagggcaggcagcatttttaaaaccatactcattgcatatattgctgccagcataggggcccctaatggccacttgaaatgtaagcctgcagaatataatttaaggaaaacaagaagataggatatttttcagcagaacatatgggctatttaaaaaaaacaaccaccaccaacattatagcaaaagatttcactgcatataacttatttttcatttactgcagaaaaattaaccttattggtatgactggaccaaaacttaagccatttaaaaagaagataaaacatgtctctgtcatcatcgatatatgcttttacctaaacctcaaaatccaaaatatgatggtgatttccctcataaaatgtgaattcggtagcttattttaaaagcgtgattccttgttgaatgtacaagacatataaatgcacagacttacccattcttctgagcacattggaggctgcattcagtcgcggttgttagactcaacgcagtgagtctgtaaaaggctctaacatgtaggagcctttgaccagtttcctgttttctgtgtcccaggctttccaagtaaaattgaatccaccaggacgagttgttttttccttaggatatccctctggaaagcattggtttcattttctgtgattgctctgatccctaaatcagttttgaatataagttattaaatttctccacctctaactgctcagctggttaatcaaagcttcagtctcctttccgcagccgttagttctcttggtcttaacttgttgatggcagatgggtggcttgttgcagagaagagctcctggagcagcatgagtgcatttactgaaaagcttttccgagaaacggcacaagaatggatttgcttatgtgctgcgaccacacagaactgtatataggctgacgtcaccggatgacgtgtcttttgtttgggttttccagaagctttactgttataaagcaccatgctttgtaacagcatcggggtcgttgcaggaccccctgattacaataaagcgagaaagaagaactcctgacttaaaaacatgatattccttcagtgtaggaagcagcagtgaggttgtaataaaggctgcattcaagaagacccatctgaacagtgagttgggttagcagagtgatgatttttaatgcttgtgagagccagtgttagactgccgattctgcatagagagatcatctaaatgggcagaagcctgcacaatttatgaagtgctgatttaacaccagcctatgcaaggtagtgtcgctgcactggtagtttggaaagctattcagttgccttgttgtcatgcttggttaaaatcaaagtatgactatgatttgctttagatgtgttgataaactagctaag

SEQ ID NO: 34454 - DNA, 2300 bp, Homo sapien
ctcctatgagactactgtccttagaacttttgggggcaagttcctgtagaacagcagctctgaaacctagggtgagagaccctgtaggaatcggactcaaccttatccacagaaaaatgaacaagcaaaaaaatttcacaagacagtttatggaaccaggttaagaagttctagcctattgagagagactataggaaggattaaggtcagagggggagtagcattccccgggtctaaaccaggacttgtttccttcccttctttaaccagcaagaaggaacaaagaggacgtactagtgcaggctcattactaaggactcaagagtctgttcactggcaactttggcttgggaatttccattcagcctacaaaatgtgtctaagaaccacaatgccaatctcatcttctttgcttcctctgtcccttcacaggtgtcagacctgccctgtggtacgaagactctcagagcattcctgctgccttctgtctccctttgtacttcgtaggcatttttgcctcttgtacttctaattctaccttgggatcacttctaggaggactcaaaccacacacctgcactgctgcagttttcatagcacctttacacagagccctaaggaagggaccttggagtctcacagctctcactccagcacaacactacaacagaaaaattttacccaagacaattacttcttagatctgcccagtgggatgaatccctcagaaccaaaaaggccaacgatgttcttgtttcacagacaccatcagtagttttaaagatgtctgtccttaggtctgagacaagacccacaaagggtaagtgccaatgatatgggagaaataggtatgttgggtcaaatcaataaggcaagatgtagaaaagggcttacctttgtcaggcctgaaaatataacatctagaaacatcttttgcatttatataacactaaacatggagctatacatccacaactgaggtctgaaaagtgaagacaccattcaacagggagaaactggagttagggcaagcaaaatcaagtcaaaacaaaaatcccagtccaaagcatgagtgaccttttgtattcacaagacaggttctaacaacagcagtaggctcagttaagtcagccacttggtggctgggaactagggtgcaaatgctctattatttcagtgtcacaaccaccaacctcagtaccagcggaggcttttagttatggagtaggtgagattctgaggtaaaatacaaggggccatgtcagaatccagctacacggtatcacttgtcctaaatcatctctgctttgctgttagggcatgtgcattaaaatgactgtatcaacctgccttgtcctcccaggaggacatttaaagatcaactcagcattattttttcaatcagtatggcgacaaaacattgttataaaataggagaaagagaaatctttttagagttcccctgaaattctcaaagaaaaaaataaccacatgctttgttttgcaagcttcccctccccctttattcttcgtttataatgttaagctcttgatgacaaacaagccaagcccacttagctagtttatcaacacatctaaagcaaatcatagtcatactttgattttaaccaagcatgacaacaaggcaactgaatagctttccaaactaccagtgcagcgacactaccttgcataggctggtgttaaatcagcacttcataaattgtgcaggcttctgcccatttagatgatctctctatgcagaatcggcagtctaacactggctctcacaagcattaaaaatcatcactctgctaacccaactcactgttcagatgggtcttcttgaatgcagcctttattacaacctcactgctgcttcctacactgaaggaatatcatgtttttaagtcaggagttcttctttctcgctttattgtaatcagggggtcctgcaacgaccccgatgctgttacaaagcatggtgctttataacagtaaagcttctggaaaacccaaacaaaagacacgtcatccggtgacgtcagcctatatacagttctgtgtggtcgcagcacataagcaaatccattcttgtgccgtttctcggaaaagcttttcagtaaatgcactcatgctgctccaggagctcttctctgcaacaagccacccatctgccatcaacaagttaagaccaagagaactaacggctgcggaaaggagactgaagctttgattaaccagctgagcagttagaggtggagaaatttaataacttatattcaaaactgatttaggga

SEQ ID NO: 34455 - DNA, 2300 bp, Homo sapien
tcaatagcatttatgttttggggaggatgccaagaaatatttctaaggagtctttgatttcactccttggaaatctgtcgtgaacagcgagcacatccctgccttatgtcctgctcagtcatgagcacttagggaagctgagagggaggagctccccagccgtaggtctgtgggctggaggtgggcagcaggcctccaggtgttgctcaagtatggcctgagtgccagcggtatctctcagccctctttcttcaggtgtacattctaaagccactttcagttcatcttgaatagttggaaatgtccatcagggcccaccagggaaagggctccacactttcatcaaccccttctctcatttcttgtcttatattaataagaattaagcaggttctgtccctgcacaggtgtgattccaaagcttccacattagccttccacccctcgctgtttccttccacactaaaacttgtgctcaaaagtgggtcggaaattcaggctgccataagtttctgcaaaaaatgagagaaatagcccttcaggcgaaatgaaacctattaaagcattatcctacctatgccacagattgcctgttggaaatattcttggctaatgcactctgagaacttcatattctttttatgtaagagctctttgtgcttctgatcacaggcgatcatggctcagcttccccaggagcaaaaagcgaagattgcggaacaggtggccagcttccaggaagaaaagagcaagctggatgctgaagtgtccaaatgggacgacagtggcaatgacatcattgtgctggccaagcagatgtgcatgattatgatggagatgacagactttacccggtgagcagcaccccggccccaccaggctgcacaggggctactttcttccccacaggtcacctgcgcagcggctcagacagcccaggccatggggctttgtggacaatcttctttttctactccaactgtgaggggcttcacatacaataatccttgttctcttccctcttctcagaggtaaaggaccactcaaaaatacatcggatgtcatcagtgctgccaagaaaattgctgaggcaggatccaggatggacaagcttggccgcaccattgcagaccatgtaagtgacagacttgccaggtgggtctccaagctcctcctggggctcaggcagcccagcctggtccattcagggtaagtttcatgggccacagcacttttgccactcatctctaaaaatggttcttattaatcccagcatagatttgtaaggattctctagagcggatgtgtatgtcctggaatcttccatcgcttggtagccaaaattaacctctgctattgtctcttatgtctcagttccctctctccccctctgggcaggggccgagagcagccagaagccatgtggccagtgctgtggaaggctggtgtgcctagatgggcccaggtttcttcatcctcagcactgtgtttctcagccaccccgtcttcatccccctattccctcacactgataggtacaaaaatacggttcctaccgcctggaaattgtacaatacatttcatttggtgttttaagcctgatcaagagaagctctttctcagttacagtttttctctgtagttaacaagcctccccaccattttccctgaaatagccaaactctcagcctcatctaggccacaggatgtgtgagacacaagcctccttacacaagccaaagattgtaaaggcatccttgactcccacacaatcggtaatagggcctattgcttccattggccaaatgtatcttgacacaaaccagtcttgtcctttctgcagatctccatagccacttggactactgtggccgctcccgatttcctgttctttcctctctccacttccttctgcatccagctgtcaatactgtcatctgaaaatgcagatcacatggctctgccctgcttccatgactacttagaatacagctcatctccagtatggtctgcggggtctcagttcataccactctctgtggtgtactttgctccagcctcactggaagaaaatgtttgcttgctataaacacttgagaggtgctctgtgtttctccctttgggtaaagctttctaggctggtcctaatctgggagcctctaaaactctgagatgtggagcgagacaggaactgggcaggggccacccttttctctttgaccatccccaactgctttttttcttgctttactttactcacttgtcttccacctcagcctgcagtgagtggcttttgtcat

SEQ ID NO: 34456 - DNA, 2300 bp, Homo sapien
agtcttgagctagttaggcagaatgaacatggtctctgtccttgcaatggttaaggtctggaaggggagaaggacaactatataagaaagtataataatgctatgatcagagaagtacaggtgctctggcagcactgaatttgctgtagtggggagggttggggaaggcctcaaagcggaagtgtcttttaagctgtagcctttaggatgagtaggaatttgtcagataaagaggaggggaaatggcattccaagcagagggaatgacatgtgcaaaagcctggaggtgggagacgagatgtcttcagcattgtaagaaatgttgtataagaccaactctaggccaggtgcggtggctcacgcctgtaatcccagcactttgggaggccaaggggggcggatcacctaaggtcaggagttcaagaccagcctgaccaacatggagaaaccccgtctctactaaaaatacaaaattagccgggcgtggtggcatatgcctgtaatcccagctacttgggaagccgaggcaggagaatcccttgaacctgggatgcagaggttgcggtgagctgagatcgcgccattgcactcactctagcctgggcaacaagagcaaaactccatctcaataggcagggagaggaaagagatgaagctgctgatgttgatcagggctggatggtggcaggttgcgagtatggaatttggcctttattctgagggtcctggaaaaccattgaatggtttcaagcagggaaggatagggtcagattcatggtctggctatagagtaatccctctacattctttttttttttcttttctttttttttttcccaagatgttgtctcactctatcacccaggctggagtgtagtggcatgatctcggctcactgcaacctctgcctcctgggttcaagggattctcctgcctcagcctgccgagtagctgggattacaggcaccctccaccatgcccggctaatttttgtatttttagtagaggtggggtttcaccatgttggccaggctggtctcgaactcctgacctcaggcagtccacctgcctcggcctcctaaagtgctgggattacaggtgtgagccactgtgcctggccaatccctctacattctaaataaacatttaatcaagatgtatacttgtaatttgctgatcttttaccccaggatactttgacgttgcattaaagcctgaccatttactccaaatcactgtctgagcataggaacctgaagaattgtgtggagagcgtggcctgccgcaggcctgagtccctggtgtttgatcttagacgcacggcccaaggcaccattgccgagcctgcggtgttcagggctgctgctcccacctctgctgcagctctgcctgctctcacctcagagcctctttgcagcagcttaaaattcctcagccactgcaccttcttctgctccatgctctctacaaattgaaattttttatgacaatgttgtatcaattggaaaagttttggaaagtaggattgagaaataaagacttctttgccttttctccctgcaagggaatttgaaaaatatagaaattctaagttacatgttaaatatccttggggtttcctttccttctcttttgaaagtttttttttccattaaccaaatatccgacagaaatgcttgtgggaagataattccttttggctagagcttatactccacattgtgagctttttaattttctttccttggtggtgggttgggacccaactgtgcagttgcgggagctcatcacagtcctgttgctgggcaagttctccctgtgaatctgtgttttccccttgtacctacctaatgaaagccaaattagataaatttttaatcaaggagatgaatgatgagtttttccttagaaaagaaaccacaaggccccacagtactggatacaataaaatgtgaagtttttgtttgcatgtatgctgtttggcatggctttaatgtcagaaaaacaggaggtgttgttaaagtagcatttggaaagacagcattccagacagatagtgtgtttttctccccagtcgttcttctctttcacagttgatgcatgcctgtgtgttcccagcaccttgcactagtacacggtaggtgcttggagatatctgaatgaatgaaaaggagagttttgagcagggtcttctttttctcctgttgcccccttcctctgtcctcagtctatttgttcatttcttcattcattcaacatatattttttctttctaggctggtgtgggggccaatggttgg

SEQ ID NO: 34457 - DNA, 2300 bp, Homo sapien
ttcagaccatggcagagcttttcaaggtttggagaccaggcctggggtggcagtgggagacagactatccctttcctaccacatacctgagctggttagatccgtcccaaggagaaaggccccgctttgagcgctggcagctgtgttcagctggactcttctcttggcccaagcattcatttattcatgctattataagatttgagcttattctatttttaaggctcttactcttgtagcactttattaacatcttttttataactcgtgccagtcttattataatttatatgttcattctctaatttatcactcatgaaatatttgttgaatatttattatctgtacttatggtactaggcagtgacataagctagaattattcttaggcccagttcttctcactggtctcctgggtgttccaggggaaaagtgagctgttctctttccaaatcaggccctaggtgttttatctagacctttctcataaactggcactattcactgaactactgcccaggggcttgttctcccttcccatactagtaaccaaggtttgctcagtggctatgaagtcagtttcccatctgcttgaagtaaacataatcaagaaggtaaattgtctgctagaagctcatagagtacatggaaaagggaagggaagtccagaaataggttgtttgctattgggaaatacttgccatttggggaggtaactgtctggattactgttttctccactcatgaatgaccaggaatcactatgtgggggatctgagggcaggagggggcagtcatttttattcatcaggttaagcatgtctaggcaaggggaaggtctaaaagtggaatagtggaaagagaacaggacattggagacacttaaatctagctttaactcccagttctaccacttcctgactgtatgactttgtataactcctttagcctctttgagcgtcagcttctccatttataaaaaggggatgaccattctgctcagaggacgttataagtaaataaaatatatatgcagcacctggtacagaaagcatgatattcactggtacagcagaattacaactgcgttgacaccagcctgggcaacatagcgagaccctgtctgtaaaaaaaaaaaaaaaaaaaaaattagcctggcaacggtggcacgcgcctgtggtcccagctactggatggaggctgagggggaggatcccttgagcctgggaggtcaaggctgtgataagccaagatcctgccactgcactccagcctgggggacacagattctgtcttaaaaaaaaatcagaatcgcaagtgacctttattttattttattagattttgagacagagtttcactctgtcacccaggctggagtgtagtggcacgattttagctcactgcaacctctgcctggtgggttcaagcgattctcctgcctcagcctcccaagtagctgggattacaggcgctcgccaccacgcctggctaatttttgtatatttagtagagacgggggtttcaccatgttggtcaggctggtcttgaactcctggcctcaagtgatctgcctgcctgggcctcccaaagtgctgggattacaggtgtgagccaccgcgcccggccacctgatgctatttttaaaataactggtccttgtaaaaaatctacacaagtatataaagtgagtggcttaaaggtgtcctattttgcatgaatttgcgagaaattttattgctggagactctcggcttctgtcccaaactgagtcacaagaacttgatttatttttactccgcacccctctgattgctttctgagggtccttccgctagaaagaaattacattgttggaaaatcagacaggaaacttcgcagttccagcctggaagcaaaagcaggcgtgaagctatctcttcagccctccctccccccaaggggaggggcacgggggcagctcgtgcaagagtctgcagagggcggggctaggggcggggctcccacctcggtgcggggcggggggcgccgcgcgctggtctggcggcccgcgattgggcgaggccgcgagcggcgtgacagctgccagctcaccggctcagacggtcgccgccgcgtttgcgcagggggagctggtcgccgccgcggccgcctggaattgtgggagttgtgtctgccactcggctgccggaggccgaaggtaggggcggtgagggccgcccggccctggagctgggcggggggctcagggcgcttcctgggcctcctcctgccggcggcctcggcgccttcccagcagt

SEQ ID NO: 34458 - DNA, 2300 bp, Homo sapien
gaggataaagagaaaggcagggaagaagcttggggacctggtgtcacttgaggtcagctttaagttatgaggtcaaactcagagctaatggacttcccctagtcctttgctttccatctagctgcatctttttttctagaaatgttcccttttattttttgttattattctcaataattttgtctttgcaagaagaaacaaaaaagtagaaaaatagttgatattacaggtaaaaaaaacataaatcaacccatcaaaattaattcagaatttaaaaggatggaagtcaaaaaggttgactatgaaggatttttaagttggaaacaaaatcttcatctaggtttttctccaaaggtcattgaaagacctatagcccaaaaagttgaccacttgttcaacaggacatgaaaatatggcttacctcacagccttatttataatggctggccttccacataaatcctgccttctacctggactaatctgaatccagtcatcaccagattattggtccctctctccccaaaggtctgcatagctccctgtcctcagttacttcttgtctcttctctgaaagcacacatgcacattcacacacacacatacacacacacacacacacacacacacacaccctatctttccttttcatgaatcttcagggtagctctgccctctccactttgtgtgtttggaaggaaagaaagcgaaatatatgagatgccaatgcaatttctcctttagcagagctcggtaggacaattacccacccaatctgcctggttttatagctctcataaccttcctttatgaacacgctgtgacagccggatgtgggcattgattatggcagcagtcttcagccacattcctatttaactgcaaagcagagctcctgcctaccagcccagcactggtcatgtgactttttaaattactgtatttatgtaagccttttcccaaccagagcctatgtccaactgcatcaaaactggggaggatttgagcttgccacttcccctccagtggctctttggccctacagcctagggtctcttgctggaatcaaactggggctctgggctttcttaggagaggtctgcaagagttggggtgcacaagaagcatacctttttcattatgaaagagctgaggaaatagacaatgaaacatgttggcagatgccaagggcagtggcttggttcccaggggttcacctggcaatggtgccaggtgcaagagatcagcaaaacttacaggattggttgttgttgttggggggcgggtgtcggaaaggaatttgggggaattagagaatggagttgggaatcactgcttgtaggccttccactctggaccccagcagaatcatatggactctagccactgggagagggaagttttagtgttccaaagaaatcctggtagccttgcaggcagtctgtcctgaccaaggactctgcctgactgtgccatggtgcagggcaagtctagcagagaaagccagtgttcttcagttactgcagctcggcgaagaatcccactgcagggcactagggaggccggtcctgcagaggtcagcagtaggagtgactggcttaatctattcgaaaacctcctggaaagatcccgaagaccgtggaccaaggtgacctgcgtgggtgagcgatccattagccgaatgacagcgctgccgcagaaagccagaaaaaggatatgcgtgggaagcgcaaaagcgtgggctgggcctgcagcaacggaaaggcgccacgctcgtgagcggaaccagcgttccgggggcgctcagtgtgggcaggcaggaagcctggctccactaggacacacagattctctcctgagcagctgcgaactatgcgccccttctacccttaagagatgggatgggagtccaacaaacccagccattgctcagaccccagcccttctctcctctaagaagcaggttcacctctgccaccgcactcgcatttttttttttttttaaagcccggcctttcctaggcggggtcaagggccccgcccaccgaagccacgcccagtagccgccccggggcggggttcccctcggctcccggctgccctttcccctccggcctctgccggtgctgctgcgccctgcggagctccgaacacgtgcgcgtgagtaaggacccagaggggagagtccttggaggtttcccagcctggggaaagaagcagtgcagggtggcttctgccggggcacgggacgaaattggggttcgtcccctcgtgatcccgagcttggagggcatctgaaa

SEQ ID NO: 34459 - DNA, 2300 bp, Homo sapien
ttgcttttgttgcccaggctggcgtgcaatggcgcgaccttggcttcaccgcaacctccgcctcccgggttcaagcgattctcctgcctcagcctctcgagtagctgggattactggtatgcaccaccatgcccggttaatttttgtatttcgagtagagacggggtttctccatgttggtcaggctagtctcgaactcccgacctcaagtgatccacctgcctcgggtttccaaagtgctgggattacaggcatgagtcaccgcgcctggccaagtaacttcatttttatggctatgccatttcaggtagtgcttcgttgaggcatcaagactccactgaccagctttttcactttattgaattacataaccttttttttttttttttttttttttttgagacaatgtctgactctgtagcccaggctggagtgtgcagtggtgcactaggctcacggcaacctccgcctccggctcaaacgatcctcagccccgtcctccgtaccaggtgagtagctgggaccacaggcgtacaccaccacgcccagctaactttgtgttattattattattttagtagagacggtgtttcgccacgatgcccaggctggtctggaactcttgaactcaagtgatccacccgccaaggcctccaaaagtggtgggattacaggcgagatctaccgtgcctcaaatcacataaccttttaatgtctcagttttgtgatctaccaaatggtatcccacagtagccgcctctcaaggttattgtagggttatgtgtaaactgcttattgcattgcccaccttatagaaagcactccatattataatcattaactgtgctggaaaattcccaactctccagatgcggagttctgcaaggatggttggggagagagttgcagccagattaggtctccaaacaatttacttaagcctctgaaggccggagctcaaatccctccaacccgggtacctaaccagtacctcagtcccaagagtgtattgcattcagtcaaattcaccaaaaggcggcggtggtctttaggaaggaaaaggctcgcggtcctccgcctcaacgaccctcctgcacagaattcctgattttaaaaaccagctggccactttgggaggccgaggcgggcggatcacaaggtcaggagatcgagagcatcctggctaacacggtgaaacccccgcctctattaaaaatgcaaaaagaaattagccaggcgtcgtggcgggcgcctgtagtcccagctactccggaggctgaggcaggagaatggcgtgaacccgggaggcggagtttgcagtgagccgagatcgcgccactgcactccagcctgggtgacagagtgagactccgtctcaaaacaaaaaacaaaacaaaaaaaacagctggctgggcgtgtaggctcacgcccttaatccaatgctgagaggcggaggcgggagcactgcttgagccaaggagttccagaccagcctaggcaaaataacgagacaccatctctacggaaaaaataaaaataaaaaagttagctggccatggtggtgcgagcctgtagtcccagctactggggaggctgaggtgggaggatcccttgaggataggagttcgaggctgcaatgagccatgataacgccagcgcactccaacctgagcaacacagtttatttatgataaataaataaacatacctaaataaaaaccagccaaaatggtatcgttttccctttgtggccccaatatctggcgctttccaccattccttggcaaacagaacaaccagagagcataaaagtcgagtctaagccagggactctcgcgaatcccttctaaggcataccctatttaaactttgtattatgctattcaggaggttgacaaacagccttttcgggaatgggactcgaactcgtaagccacgtctgttcctccatttcccgcctcagctggatgacggagagggatctccgggattaaagaacaacgaccgcaggcgagtgcacgagcgaggtgcgcgcgctgagtagggggaggggcctggcgcgcgccgaaccagatcgagggggtgggggcgagctctctcgcgagagtgggtttgttcttgggctgcagccgctgccgccgcttctcgccagcgccgttgctgcgggggattgtgggagtctccgcgtcccgctcgctgggagagaggtacctctccttttccctctccctttccctaaggtaggcgtgaagcgggtaagagtcggggtcgggtggctgggggttctccgtgtccgccgg

SEQ ID NO: 34460 - DNA, 2300 bp, Homo sapien
gttgaggcatcaagactccactgaccagctttttcactttattgaattacataaccttttttttttttttttttttttttttgagacaatgtctgactctgtagcccaggctggagtgtgcagtggtgcactaggctcacggcaacctccgcctccggctcaaacgatcctcagccccgtcctccgtaccaggtgagtagctgggaccacaggcgtacaccaccacgcccagctaactttgtgttattattattattttagtagagacggtgtttcgccacgatgcccaggctggtctggaactcttgaactcaagtgatccacccgccaaggcctccaaaagtggtgggattacaggcgagatctaccgtgcctcaaatcacataaccttttaatgtctcagttttgtgatctaccaaatggtatcccacagtagccgcctctcaaggttattgtagggttatgtgtaaactgcttattgcattgcccaccttatagaaagcactccatattataatcattaactgtgctggaaaattcccaactctccagatgcggagttctgcaaggatggttggggagagagttgcagccagattaggtctccaaacaatttacttaagcctctgaaggccggagctcaaatccctccaacccgggtacctaaccagtacctcagtcccaagagtgtattgcattcagtcaaattcaccaaaaggcggcggtggtctttaggaaggaaaaggctcgcggtcctccgcctcaacgaccctcctgcacagaattcctgattttaaaaaccagctggccactttgggaggccgaggcgggcggatcacaaggtcaggagatcgagagcatcctggctaacacggtgaaacccccgcctctattaaaaatgcaaaaagaaattagccaggcgtcgtggcgggcgcctgtagtcccagctactccggaggctgaggcaggagaatggcgtgaacccgggaggcggagtttgcagtgagccgagatcgcgccactgcactccagcctgggtgacagagtgagactccgtctcaaaacaaaaaacaaaacaaaaaaaacagctggctgggcgtgtaggctcacgcccttaatccaatgctgagaggcggaggcgggagcactgcttgagccaaggagttccagaccagcctaggcaaaataacgagacaccatctctacggaaaaaataaaaataaaaaagttagctggccatggtggtgcgagcctgtagtcccagctactggggaggctgaggtgggaggatcccttgaggataggagttcgaggctgcaatgagccatgataacgccagcgcactccaacctgagcaacacagtttatttatgataaataaataaacatacctaaataaaaaccagccaaaatggtatcgttttccctttgtggccccaatatctggcgctttccaccattccttggcaaacagaacaaccagagagcataaaagtcgagtctaagccagggactctcgcgaatcccttctaaggcataccctatttaaactttgtattatgctattcaggaggttgacaaacagccttttcgggaatgggactcgaactcgtaagccacgtctgttcctccatttcccgcctcagctggatgacggagagggatctccgggattaaagaacaacgaccgcaggcgagtgcacgagcgaggtgcgcgcgctgagtagggggaggggcctggcgcgcgccgaaccagatcgagggggtgggggcgagctctctcgcgagagtgggtttgttcttgggctgcagccgctgccgccgcttctcgccagcgccgttgctgcgggggattgtgggagtctccgcgtcccgctcgctgggagagaggtacctctccttttccctctccctttccctaaggtaggcgtgaagcgggtaagagtcggggtcgggtggctgggggttctccgtgtccgccgggaggggacaacgacggcgacaggggctgcggggagccggcggcgcgcctttcttgctcgctcccgctctgcctccctccgcgttgcgtatgtgagccgcctgatcggcggccgccatgttaggagcgcagtggcggcgcaaccagccttctagggcggcggaggtgagcggtccgggagggaaacacgcggccggccaagggcccagggtgcggcgggagattttgggtgaagaggtgcgctgaccggccgagcttcctgcgcgtcctgggctcgttgtgggcgggggcgggacgactagcccgttacacgcgggcc

SEQ ID NO: 34461 - DNA, 2300 bp, Homo sapien
tggaattacacgttgtcatgggatttacattgtttgtcttgactcttttctgagtttttctgacattcattttctgtttgtcttaaggttatcctttacctttgcttctcttaactttttccttttgttgatccactgttttcctatgagctaccaaaaaatgtaattcagagctctgtagtctaacagtcacatttccttaaaatatggccgttttaaaaattttaaacataattgtaataccattatataatttctcttagggaaaaaataattcaaaagactgacttttcagtaatgcaaagctttggctacaacatgaaggtcaaagctgcaattaataaccctgatacttcaacatttttattttgaaaaaccctctaaaggatttgatttgtaaaaatatgtgtgaaaatttagagggtccaccaccatttacatagcatctcagccgccattctgtctggcatttataagacatatcaaagaaactttcatctgaagaagtccacttattctcgtctttattaatcttaaagcttaagtagtttacatagtggatcttgtctagaactattaatagtttctttggtgtattttctcaaattcatctttcttggtgtgcaaaaacatcttcctgtaactccagccacctcttatagcatttctgtgtcttttaaaacttgattatatctattttttaaaatccagtctaaatctttcttgcctgcaactttttttatacttcctttgccactgtatttgtccattgtatccttgctttaatctatcattggtgaaattgatcctgtaatagacttgtaactactggatattgtctggttttactgttaaagtttcacatattaagctaccagtgctgagtgtattggtgatcaaaaaatagaaaatttaagcaatgcctcatagaattctgtaccaaacaacttcagatttacctctgtatgtagttgtgattataaaattgtttcactgaagatgttatgtatatctttcaactaatattttatgacaatcgtgatataaaagatttggaaattcttatgtgacagtttctgaggtacaacaataatgatttaagaaagaaaacaatttcatctagaaacacgtcttgggggatcataatcagaacataaatttaccaggtgatttgggctattcttgtgaaaagtttacaggaaactgtgtaaccaagatctcattttcatttttacctgttttgtgctctagatgtgctgtagccctgagcattaaatgagtactgatggatgctgatttggggagttcccttctttaaatcacctgtatttcctgtacctaggttttttcttgggagggctcctattcctgtactgaccagagttagttctccttactttaaaagactagatatgaagtaaacactgcctgatgtaggatggtcagtaagaaggcaattagttgtataacttaaatttgggcagcaatccttaaaactataggaaatgacttatttttcttattcacatctatcttcacctcaaattgattttgctgtataaaggtctcagctattatgtttggtcttatatcttacattaggtacttgaaacctaagcttcatttacttgtgattttacttggttctttctgatagtgataataggtctcattttccaaagcacagtacaactgattcatctttgacttgctgaccttgatttttttgtttttagtcttctggaacttaagcatcatactatagggtgtatttttattcttctaaaagaagaaacccatctatatttttactgaaattttgatgtactcagacatctaacctttcaatttacatgtttttaaactcagtatgaaagtccctttaatagttaagctttagcatgaaatactactttttaaatatctatatgcaggctctgcatacatcaggaatctgtttaagatatgtaataaattccttgtaagtttgagatcttaaatgttttttttttaaatcaacatgatgcataagtttttttttcttaaaaaaacggcatctgcttaaagggatttatgactaaaattgcttatttttctacagagttgtctgctggttctcagcttgaagaagattctgcagtccttattgatcctttttcttggcgttaccatttttgaagcaaagttaacctagctttctagtttgagctttctttttggccgtctttaaaaaaatttttttttttaatctataaaatagacaagagctagttctacaatgtccaagtcattccagcagt

SEQ ID NO: 34462 - DNA, 2300 bp, Homo sapien
ctaatattttatgacaatcgtgatataaaagatttggaaattcttatgtgacagtttctgaggtacaacaataatgatttaagaaagaaaacaatttcatctagaaacacgtcttgggggatcataatcagaacataaatttaccaggtgatttgggctattcttgtgaaaagtttacaggaaactgtgtaaccaagatctcattttcatttttacctgttttgtgctctagatgtgctgtagccctgagcattaaatgagtactgatggatgctgatttggggagttcccttctttaaatcacctgtatttcctgtacctaggttttttcttgggagggctcctattcctgtactgaccagagttagttctccttactttaaaagactagatatgaagtaaacactgcctgatgtaggatggtcagtaagaaggcaattagttgtataacttaaatttgggcagcaatccttaaaactataggaaatgacttatttttcttattcacatctatcttcacctcaaattgattttgctgtataaaggtctcagctattatgtttggtcttatatcttacattaggtacttgaaacctaagcttcatttacttgtgattttacttggttctttctgatagtgataataggtctcattttccaaagcacagtacaactgattcatctttgacttgctgaccttgatttttttgtttttagtcttctggaacttaagcatcatactatagggtgtatttttattcttctaaaagaagaaacccatctatatttttactgaaattttgatgtactcagacatctaacctttcaatttacatgtttttaaactcagtatgaaagtccctttaatagttaagctttagcatgaaatactactttttaaatatctatatgcaggctctgcatacatcaggaatctgtttaagatatgtaataaattccttgtaagtttgagatcttaaatgttttttttttaaatcaacatgatgcataagtttttttttcttaaaaaaacggcatctgcttaaagggatttatgactaaaattgcttatttttctacagagttgtctgctggttctcagcttgaagaagattctgcagtccttattgatcctttttcttggcgttaccatttttgaagcaaagttaacctagctttctagtttgagctttctttttggccgtctttaaaaaaatttttttttttaatctataaaatagacaagagctagttctacaatgtccaagtcattccagcagtcatctctcagtagggactcacagggtcatgggcgtgacctgtctgcggcaggaataggccttcttgctgctgctacccagtctttaagtatgccagcatctcttggaaggatgaaccagggtactgcacgccttgctagtttaatgaatcttggaatgagttcttcattgaatcaacaaggagctcatagtgcactgtcttctgctagtacttcttcccataatttgcagtctatatttaacattggaagtagaggtccactccctttatcttctcaacaccgtggagatgcagaccaggccagtaacattttggccagctttggtctgtctgctagagacttagatgaactgagtcgttatccagaggacaagattactcctgagaatttgccccaaatccttctacagcttaaaaggaggagaactgaagaaggccctaccttgagttatggtagagatggcagatctgctacacgggagccaccatacagagtacctagggatgattgggaagaaaaaaggcactttagaagagatagttttgatgatcgtggtcctagtctcaacccagtgcttgattatgaccatggaagtcgttctcaagaatctggttattatgacagaatggattatgaagatgacagattaagagatggagaaaggtgtagggatgattctttttttggtgagacctcgcataactatcataaatttgacagtgagtatgagagaatgggacgtggtcctggccccttacaagagagatctctctttgagaaaaagagaggcgctcctccaagtagcaatattgaagacttccatggactcttaccgaagggttatccccatctgtgctctatatgtgatttgccagttcattctaataaggtgagttaactcaacagatgcttctaatttcttttacattgtagtgcctatttacctatatctttgactctaattctgtagtctgatgacattgagttgatcaagcatttttaaacttttgagaacact

SEQ ID NO: 34463 - DNA, 2300 bp, Homo sapien
gcgattctcctgcctcagcctcgcgggtagctgagactacaggcatgtgccaccacatccggctaatttttgtatttttattagagatagggtttcaccatgttggccaggctggtctcaaactcctgacctcatgatctgcccgcctcagcctcccaaagtgctgggattacaggtgtgagccaccgcacctggcctcatgcttaccttttaagagagtctgggttaggccaggccctgtggctcacggctgtaatcccagcaccttgggaagctgaagcgggcagatcatttgagcccaggagttcaagaccagcctgggcaatatggcaaaacctcatttctacaaaaaattcaaaaattagccaggcatggtggtacacacctgtggtctcagctactttgcaagctgaggtttgaggattgcttgagccagggaggttgcggctgtagtgaaccgtgatcatgccactgcactccagcctgggtgatggaagactgtgtcttaaaaagagagtctgagtcatctcagactatataaatacctattttgttatgttcagacttccttcagcctcagattgatagcttatcttcacagtttagaatatagatctgtaagtgctgccaaggtggttgacccaggagctagggcagaaccatctgcattcatttctttggggctttggactggcccagaagagtattcagtgaatgaaatagctctgaagaggaacaacccggtttctaaattcaagccttcccatggagggaattttttgtcttagtaaatactacaagcatatagtttttaaaagattcaaatttttcaggagaaaaggatagttatttgcacccatttcctagtcggtcatttgccctctccaaagggaagaaattagtttgtgtccctttttcaaagatagtatctacacatttgaacatccagatttgtaaaacacatactctcggccgggtgcggtggctcacacctgtaatcctagcactttgagaggcggaggcgggtggatcacgaggtcaggagatcgagaccatcctggccaacacggtgaaacccctatctctactaaaagtacaaaaattggccgggtgtgctggcgtgcgcctgtagtcccagctacttgggaggctgtggcaggagaatctcttgaacccgggaggcggaggttgcagtgagccgagatggcgccactgcactccagcctgggcaagagagccagactccgcctcaaaaaaacaaaacaaaacaaaaaaacaaaaacatactctcttctttacattgcttagtgtcactagaaatatatcttggggcttgtcaacgatgacaggaaggaagcatgggtaagaataactatggggccagtgcacccaggatcacggactacaaaattcttgaacccggaggtcacacttttctatcctgtgtggacagggcatttcctcctttagccacaaagaagttgcacatgtatttgtattttgcgtttgcatccagcttcaaaaagtgtgtttttgtgcctgcacatgtctgagtgcggatgtttgcatatcatttagtacgcctctgtgatttcccttagtttattatttttctgtgtcaggatcttgacgtgactcggtgcatgtcgctgtttgtgtgacattgtgtatcattcttggggtgtgtatgggtatgtgtgtgctatgtcattacctaaatattacgtttttgggggggtgtgtgatgtctgtgaaagtccacgcctgtgtatcttgtcagggtgctcttcagtccccagctgcctcactcattgcatatcatcattctcggaagatgggcgggtgtgggaacagtggtacgcccccattcctgccttccagagagaacgtgcgacagcgttcctgctacacccggcagccggccgtaggggcgcgctggaaaggctgctgcgcgtgcacacgtgtgcagccttggagacagacttcggggtcgcgcgttctcgcgcgcgctctctagtggcttcggagggcagagctgacagaacaagagggcggggttggcggcgacggaagtgaagtcacttccgggctggggtgtttgtttggactggagaagggaggcggcgggcgaagcgcacgtcgagcgggggagcggcgctgcctgtggagatccgcggaggccgacaggattcgttggctgccgtccccgctgctgtgcattgggtgaggggtcctctcgggcagagtggcgacaggggtgcggaggtcgagggacagcaagtcggcgacggcagaggggc

SEQ ID NO: 34464 - DNA, 2300 bp, Homo sapien
atagcttatcttcacagtttagaatatagatctgtaagtgctgccaaggtggttgacccaggagctagggcagaaccatctgcattcatttctttggggctttggactggcccagaagagtattcagtgaatgaaatagctctgaagaggaacaacccggtttctaaattcaagccttcccatggagggaattttttgtcttagtaaatactacaagcatatagtttttaaaagattcaaatttttcaggagaaaaggatagttatttgcacccatttcctagtcggtcatttgccctctccaaagggaagaaattagtttgtgtccctttttcaaagatagtatctacacatttgaacatccagatttgtaaaacacatactctcggccgggtgcggtggctcacacctgtaatcctagcactttgagaggcggaggcgggtggatcacgaggtcaggagatcgagaccatcctggccaacacggtgaaacccctatctctactaaaagtacaaaaattggccgggtgtgctggcgtgcgcctgtagtcccagctacttgggaggctgtggcaggagaatctcttgaacccgggaggcggaggttgcagtgagccgagatggcgccactgcactccagcctgggcaagagagccagactccgcctcaaaaaaacaaaacaaaacaaaaaaacaaaaacatactctcttctttacattgcttagtgtcactagaaatatatcttggggcttgtcaacgatgacaggaaggaagcatgggtaagaataactatggggccagtgcacccaggatcacggactacaaaattcttgaacccggaggtcacacttttctatcctgtgtggacagggcatttcctcctttagccacaaagaagttgcacatgtatttgtattttgcgtttgcatccagcttcaaaaagtgtgtttttgtgcctgcacatgtctgagtgcggatgtttgcatatcatttagtacgcctctgtgatttcccttagtttattatttttctgtgtcaggatcttgacgtgactcggtgcatgtcgctgtttgtgtgacattgtgtatcattcttggggtgtgtatgggtatgtgtgtgctatgtcattacctaaatattacgtttttgggggggtgtgtgatgtctgtgaaagtccacgcctgtgtatcttgtcagggtgctcttcagtccccagctgcctcactcattgcatatcatcattctcggaagatgggcgggtgtgggaacagtggtacgcccccattcctgccttccagagagaacgtgcgacagcgttcctgctacacccggcagccggccgtaggggcgcgctggaaaggctgctgcgcgtgcacacgtgtgcagccttggagacagacttcggggtcgcgcgttctcgcgcgcgctctctagtggcttcggagggcagagctgacagaacaagagggcggggttggcggcgacggaagtgaagtcacttccgggctggggtgtttgtttggactggagaagggaggcggcgggcgaagcgcacgtcgagcgggggagcggcgctgcctgtggagatccgcggaggccgacaggattcgttggctgccgtccccgctgctgtgcattgggtgaggggtcctctcgggcagagtggcgacaggggtgcggaggtcgagggacagcaagtcggcgacggcagaggggcctaaagggttccctgggtggttggccaccgagtccattgcggcctccgttgttcattgcctctttccaccaagtctgagggatgagcttgggccgacttcgtctctgtcttctccgagacatggccgtcgcttttttttcattgtcattattaatgatttggatctcgcagctctctatccgggtcctcagtggcgcgagggttgccgggatagcactttctcctgttcctcattctcccggtcctttatccctccgccgggtaccctttcccctgcccccctcccaccgcctcggcaacaaagcttattgtttctacccactttacgcctgcgcgtcgccacgcgcagcccctacttgctgcgcgtgcgcgcctcagccgaggctggggtttggggagagaggggcggagggactggcgggctcttggcgtcttgggggaacgctgcaaccgtcgacgggcctgatcagaagatcgtctttctcccgtttcttcgccatcgctaccccttatttttggttgtattgcagctcatgccctggaaaaaagaacctttggggtactgggaacccttaccctaggag

SEQ ID NO: 34465 - DNA, 2300 bp, Homo sapien
cgtatctgcagggggtcgggcttggtctccacagcaccctggggagttctgggaggagaagttggagagaaaagtgctggggagttgcagaggcttcaaactggtccagcaactttggaaattgggagcagtagccaagagggagaggagaggacaggcggacagaggaacagtgtggacaccggcaggcgggcggactcagtgctgtggcatgaagctgctgcccagctggagagcggtgctgccccttggcccttcaggcagggcctggccatgggcacagcgacccagaagtaggtgggctctagagtgctggggctggggcagcccagaggggaacagaatggggacctcaggcccagccctcaccagctgaggagcctgagttcttagggcccctccccatgtccccctctgccatctcaggccctagggccaggctgggctgggcctgccaggaggggagacaggctgggcataggactgccttcctgggctaggtgatgggcagtcacacagggcttggtgcatagaaaggccccacgctccatctaatgctcctgctatctttaaattctttatacttttggaataaaggcctcacattcttactttgcactgggtcccagaaattatgtggctgggaggggaaagggatctgtgccctgacacagagtgcagacccggctgggccagcctaggcagctctgcctgcagaggcccatctgctgcctgcctcagggaccctgaggggtgcagggtggtgagggcaaggcagctcagaccaacctgaattttaggattggtttctgcaaacttgctatctgcatggcttgggtcaaatcacatctactgaatctgtttccttcgctgttaaaggggttaataccgcccagcacaggggttacttgggacagtgcagatccatgtttcttggcacaaggccaaggccattcctcaataacgagaatgactatgatgatgatgataatgatgaactagttattaatcagtggggaagggcctcatacagggggttacataataagtgcctgtttccactccctctttctccgctcacctggggcttggtaaacttctggtcctcaccccctcgactctggccctctcttgggaaacaagaacaggtccagcgcccaggcgcagatgtgggcagggaagggcacatgtggcagaggcttgggtggcttttactgtcctagtgagagttaatacattacctctgcccgggcccccctttcgcaatccagagctgggcatctggttacagatttacttcaaacaatgcctgatatgtggagtaaagtcctcctccttggcctttgtcaagtcatcccctcttctcctcaggaactgctcaaacctgtgccccaaagatgagggcccaggaggacctcgagggccggacacaggtgctgggggctgggggtgggggctagggggggcagggggggtggggggctggagggcctgtgcaggccttcttcctggaggccagagataaacgttctgatgaacttgataagagtgactgtcccaaattgaatgtggcaactgggggatgggtggaggtgggggtgaaggagcctgcagctttgggactggctgactccaggttggggttcaggagaggcctaatctcccggccagtgacaccccaaggatctccagggggcagaggtgggaccggattggacttgtccacagtcttgagccctcttggccccctctcctgtggtctccaagacttctgacttaagggtccacttccctggctaaaatggcaggtcctgagggctctagaagctggcacagtagactcatccctgcgggaagcaatgcaaagtgggagaaaactgtggccaggccaagtggcacccgggtggatggactgttggggagggcgggaaccccgctctcagttgctgacaagccacttgggctgcctgattgattctggggcagaatggattttgcctgtccccatcacttcaccctaagctacttatctctgctgcctccagcatgaaaccaccagggacccctcgaccccgctacccacagagcctaagtttgacatgttgtacaagatcgaggacgtgccaccttggtacctgtgcatcctgctgggcttccaggtgggtcccccagggcctccccgccctcactctgcacactccccggggactccagcccctccctggccagcagggagtatcttgggtaacaggaagaaaaacctgaggtcagcacagtggctgtcagcaagcaggagtcgg

SEQ ID NO: 34466 - DNA, 2300 bp, Homo sapien
ccctgggtttctgaccagccagattcaacattttggttctcagtcctgctttctctggaaattcttctggctggggcttttccttagtaaagaagccctggaccccacctaggtctgggaactggagatcggtggcaccagaactttcagtttcgtttgtgagtgtctctgatctggccaagccctgggagagagacagaacattctaaccctcatttttagaaatatttttattttgcacgagagccatgtgcaggaagacaatctaatccccctttgacagatgcagaaaccgaaacttagacaacagaaggggtttgggccaagtccctggctgagtagtagtagggctgggaggggattcagacttaggggaccggagaggcgggctgctgggggaatggaggtgcctggggcaggccctggccactccagcttccctgggagctgcactcagccccctccatccttcacctgttccaggacctgcctgaagccccaccatccgtggccttcactcaggagagaaaccctagacaccaggaggaaagtcagggcccaagaaacccactaagctttcaggacagggtgtggagccgggcacccatgacgtggacctgtgtttctgtggggtgattagagaggctgcatcagctctgggtgtgtgggccccttcatgctactgtggatctgggaccgtgttctccaccttgttctctatgcgtgttgtgtggtttgggttgaattgagtgtccatggagccgtatctgcagggggtcgggcttggtctccacagcaccctggggagttctgggaggagaagttggagagaaaagtgctggggagttgcagaggcttcaaactggtccagcaactttggaaattgggagcagtagccaagagggagaggagaggacaggcggacagaggaacagtgtggacaccggcaggcgggcggactcagtgctgtggcatgaagctgctgcccagctggagagcggtgctgccccttggcccttcaggcagggcctggccatgggcacagcgacccagaagtaggtgggctctagagtgctggggctggggcagcccagaggggaacagaatggggacctcaggcccagccctcaccagctgaggagcctgagttcttagggcccctccccatgtccccctctgccatctcaggccctagggccaggctgggctgggcctgccaggaggggagacaggctgggcataggactgccttcctgggctaggtgatgggcagtcacacagggcttggtgcatagaaaggccccacgctccatctaatgctcctgctatctttaaattctttatacttttggaataaaggcctcacattcttactttgcactgggtcccagaaattatgtggctgggaggggaaagggatctgtgccctgacacagagtgcagacccggctgggccagcctaggcagctctgcctgcagaggcccatctgctgcctgcctcagggaccctgaggggtgcagggtggtgagggcaaggcagctcagaccaacctgaattttaggattggtttctgcaaacttgctatctgcatggcttgggtcaaatcacatctactgaatctgtttccttcgctgttaaaggggttaataccgcccagcacaggggttacttgggacagtgcagatccatgtttcttggcacaaggccaaggccattcctcaataacgagaatgactatgatgatgatgataatgatgaactagttattaatcagtggggaagggcctcatacagggggttacataataagtgcctgtttccactccctctttctccgctcacctggggcttggtaaacttctggtcctcaccccctcgactctggccctctcttgggaaacaagaacaggtccagcgcccaggcgcagatgtgggcagggaagggcacatgtggcagaggcttgggtggcttttactgtcctagtgagagttaatacattacctctgcccgggcccccctttcgcaatccagagctgggcatctggttacagatttacttcaaacaatgcctgatatgtggagtaaagtcctcctccttggcctttgtcaagtcatcccctcttctcctcaggaactgctcaaacctgtgccccaaagatgagggcccaggaggacctcgagggccggacacaggtgctgggggctgggggtgggggctagggggggcagggggggtggggggctggagggcctgtgcaggccttcttcctggaggccagagataaacgttctgatgaa

SEQ ID NO: 34467 - DNA, 2300 bp, Homo sapien
ctgggtctctgaggcagggcccctggacgggacctactacctgccggtgagcgggacccccaaccccgcacctcctctgctcctctgtgcgccgccctccagctcaggtcccacccagcccggcaagggttcattgttcccgctgtgaggccccgggccgatccccatggagttggagcccttggatgcctgggaggttctggcatccaagcccctaccctcctctccttccgtcgcctctgtctttaacccatcccagtcagtcgtcggacaggaagtgatcttcagagaatgaatctgagccccgaggctggtggagctggagtcacccaggaagtggctgcctacttcctcccccaacaaaattatgtatccctttcccaggcattcccagggcgtggtgtggtgtggtgtgtgggtgtgtgtatatgtgtatatgcgggcaagcaaatagggaaagtgaggcatccctgggcttgtccccaggagccgatcagaggaggtgctgtggctgccgtggggcagcaggaacgggagcagcaggagacagggcggggaactgtctgccctccctgatggtgggcccagctgaggtgaggctggccagtgcccctggtgaggtggcaggaaggactctggctgtcgagtctgctcttaggaagaggagctgagctttggccctggaggttactggggggaaagtggccagtacagcccaggccaggctggctccgagaaagagctaaggcgggggacagcaggtggaggcaaagcaaggaatacagggagggcctgggttgggggttagcctggaacttggggtgggaagatggggagcctggccctcagagctgagctgactcatttttgggccaggggtggggcttcagtcccccaccccctacatcgggagtaggtgaaatggtcatcaggaagctctgagaagagggagggttgggctcttgtcccacaggagcctcttgacccctctgtgtggccagaaggtgggttagggccagcagtagaagcgatacccctggtggagtatccagagggatctgaagctcttggcaggttccactccccagtaacagatgtggcaacaatggccagagaggggctggccctacagaccagtcacagcaagggacagggcccagagcctgcacttcagttgccctgagattccaggagcctctgagggagatgaggggggtctgcatgaggtgggaggtggtgtgcgtgggggtctgtatatagttctgaaccggaaatggctggcccttgccagcctggtgtgtgatgtgatgagtttgggaaggacagtttccatgagaagcagtggcagggatggggatggatgccttcgttgttccaggcctgtcagggggcccaggtccctagcagtccctgccctctgccctggactggaagctgactaggagagctacgaatcagaacaactggccattttctagctggagatgccagctccgatggcatggagggccctggggccaccccaggtgtctttacctcatcctggtgtgtaataaatcactgaccatggagccatcatggctgaaataactggtgtgaggtgcctgatttcctgccacagcctctcaacaccctccacagtgcccttccacgcctgggtatggcctgggtggaggggacctcagggctagggaaggagaccatgtgtgtcttggaaacactgtagcatccctgtctccctgaacttgcctcccaggaggctggcagccacacctcattccttctggtggttgagtggccagggagccttggggtcaatcaggcttgggtttctcagcatggcccctctagctatgtggccttggatttgtcacctctctctgagcctttgtgtcggaagaggcagaataaacatgacagtctcatttctcagaaaggtcaatgaaacaaaaaaagatgacggcagccaaccaactcttcccacaaggcactcagcacagtgcctgccacttggccagatcacaggatgtgggcagtatcggcccctatgtgttcctgcctaggcccagcccctctccttgcctcagtgctccctatctgtgaaatggagctgagatggctggagccagggtccagctagaggacaatgcccacgtggcatcttcggggccctggaggagggagtgggaggaggatgggaggggtgaggtgtcagttccccattggtctaggccaggtgttctgtggcggtccccacaccacacaagcacacacacatctgcacctcaaccacagactac

SEQ ID NO: 34468 - DNA, 2300 bp, Homo sapien
cggccgggcacagtggctcacgcctataatcccagcactgtgggaggctaaggttggccgatcacctgaggtcaggagttcgagaccagcctagccaacatggtgaagccccgtctctacaaaaatacaaaaaaatcacctgggtatgatagcagctgcctgtaatcccagctactggggaggctgagttgggagaatcgctcaaacctgggaggcagaggttgcagtgagccaagattgctccactgcactccagcctgggcgacagagcaagactccatctcaaaaaaaaaagaaaagaaaaaaagaaaaaaaaaagagaacatggtgaaaccctatctctactaaaaatacaaaaaattagccgggcatggtggcgggcgcctgtagtcccagctgttcgggaagctgaagcaggagaatggtgtgaaccccggttggggcagagcttgcagtgagccaagatcgcaccactgcactccaccctgggcatcagagcaagactccgtctcaaaaaaaaaaaaaaaaaaaaagagagagaggtcagcagagatggccttgtctccaagtccatgaaaataaacgcaagaaacaaaacaagggctcccgctgagagaaccacagggatggccaagtttgtcaggccccccggggggttttggggagcggcttgaatgacttaccctgagctttctgcctcctttcatagtcactggtaactttttttccaaactccttgttagtatagtcatttcctacttgggggtatcaaattccataacttccacccatgacgtgcaacacaaatgcagcacaacatcctggttaagaacatgaactccaggcccagcgcggtggctcatgcctgtaatcccagcactttgggaggccgaggcaggcggatcacctgaggtcaggagttcgagaccagcctggccaacatggtgaaaccccgtatctactaaaaataagaaaattagccaggcgtggtggcgggcgcctgtaatcccagctacttgggaggctgaggcagaagaatcccttaaacccggaaggtgaagtttgcagtgagccgagatcacgtccctgcactccagcctgggcgacagagcgagactacatctcaaaaaacaaacaaacaaaaacacggaccctggaaccaaactgcccatagcagaactccgttccacaacttactagagtgaccttgggcaagttattcattctcattctcatagagcctaggtaaaaaggggctgataggagttccatgagggtcacatgaaataatataaacataacggtgccacgaaatagtgaacacaatatatattcgctctgatgttctccaaacctaatcttatttgggtttccaagaaaaaaaaaaaagccttcaatagagacttggtgagtgtgcgtaatcaccgtatccttccctgacttcattttactaaactctcctccttcaagccctcttcagtcctcctaatctcttcagggtcctcctcctcgggtggtggcacatgactctagtgcagactctagtgcccagagcctggtatcagagtatgaagactttgatctcaggtgtagccattctcattttttatcttcgtctatcttccgtgcttaggcttaggacccctaagtactaagtgtgttccaggaggctggaatctcatacaatggaggaaatttggagattaggataaagatttggagaaagaggcatgagaagctaaagatgcaggagttgcctatgctggctcttgcttcgtggtcatgcagtttaacaggccctgggtgaaggctgagggctgctgttttgagtgttgcctgctcgcaggcaaggaaagtacaagccgggccctgccggcttctcaggactgcgtgagaaacagaagacgcaataaaagcgcaatttcctgtaaacttaaatgccttaagggttgtcagcagtttccccgctccaggcggctcctttaagaggcggcccctcgccccgctaacataggaagtccccgccccccgttgccagggtgctctgtggcgtcgcattctcattggtgggcgacggcgaggatcacccccgaggcagccatttccaactagctggcgggggcggaagatggcgacgcccctcgggtggtcgaaggcggggtcaggatctgtgtgtctcgctttagatcaactgcgggacgtgattgagtctcaggaggaactaatccaccagctgaggaacgtggtatgcagccagaggagtttggggagaggcggggccggatgcctcactggtgggg

SEQ ID NO: 34469 - DNA, 2300 bp, Homo sapien
gaaaccctgtctctactaaaaatacaaaaaactagctgggtgtggtgatgcaagcctgtagtcacagctactcgggaggctgaggcaggagaatcacttgaacccagaaggcagaggttgcagtgagccaggatcgcgccactgcactccagcctgggctctgtctcaaaaaaaaaaaaaagaggtagatatatagtactaggtaatatttatttagtattaaatgctctcaagcactttgatgaagactttatttaatcacaatatcaactctgtgaaatataattattagcccatttcagaagataacaccaagctatagaggttaagtacacagcaaaatcaaagctaaaccaaggcattttgactccagagctcatctctaatccagcagttctcaaagggtggttggggaaccccaagacccttttaggggataggtctgcaagtttaaaactgtagtcataatgatataaacatgttacttgtctttttcactaattttctcatgattatacagtggagtttttgagaggctacatgacatgtaattacatcatcactgtttaaaaattttttgttttcatttctggtatagtagatgtggattgatagaagtcatataaatgaaagctcttttgaggtcttcagtaattttttttcgcttcctgtaccatgcatatcagtaatttttaagagtataaaacgttgctgagatcaaaagttcagaactgccactctaatctaaactactgtctagtctaaactattattctatacttctcatctctatatgttaaggattgatctccaagataaattgttttttgtttgttttttagagacaggatcatgctctgttgcccaggctagagtgtagtggaacaatcataactcactgcagcctcaaactcctgggcttaagtgatccacctgccttggcctcctgagtagctggaattccagatgcaaggcaccatgcctggctaactttttaaaatttttcatagagatagggtcttaccatcctgcccaggctggcctcaagctcttcacctcaagcagtcctcctgcctcagcctcccaaagcactggtattacaagagtgagccaccacgcccagcccaaaataatttttttttaaagcaagatgtagaaaagtgattataatatgtttccatttaggcaagaaaaaaaatggagaggactatacctgtactctctgtacataggatccacagaaaacttctaatgatggttatccctgtggtgggaaactgggggacagggaatgatgaagcaggaaaatttttactgtataaactttagttctgttggctctttttcttctatcatgtgtatgttaactttttaaaaacacagtttagccaggcacggtggctcacacctgtaatcccagcactttgggaggccaaggtgggcagatcacaaggtcaggagtttgagaccagcctaaccaatatggtgaaaccccatctctactaaaaataccaacattagccagggctggtggcgcatccctgtaatctcagctactcgggaggctgaggcaggagaattgcttgaacctgggaggcagaggttgcagtgagctgagatcgcgccattgcactccagcccaggcaacaagagcaagactacgtctcaaaaaaaaaaaaaaaaaaaagcaaaaaatacagtttaaaaagatagccataggaaaaagagagaaaaaattataaacaaacagggtgattaactgtttcttctggctttgctgtcctgtagttcatctctcaggatcttagcctgaaccttggtgtaacaattagcatacttgttctactcacttgcagggatataggaagagtaaatagtagatgtaaaagtactttgaaaggcattaagttctgggtgggagaaggacattgttaatgaatttgaatgtttcattaacgtgtgcactaattttcttataggtttgttttgggtcccacagattggaggtaggatcgatgtattatcttgcaattagttgtacaaaagggacctttatagacatacatgcttgtgattttttttaggatcaagaaatgcagaaattactatgaaattctgggagtttctcgagatgctagtgacgaagagcttaagaaagcttacagaaaactcgccctgaaatttcaccctgacaagaactgtgctcctggagcaacagatgctttcaaaggtctgatcctgaaccaatgctcaatggtgcccttgtcatggttggtcataataagttgcttttagccttc

SEQ ID NO: 34470 - DNA, 2300 bp, Homo sapien
gtcaactggtttggtagttttcaaacatgtaggttttctttcctttagtagaccacaaaatacaaaacagaaaaaaacagagcttctttgattgaagaagggtgaggtgctagtgccttccctgctatgccttcctccccgctcccactcctcaatagaagattccagagacatctgcacattaagccttaaggattcctcaatttaaaaaccgctaattgaggccgggtgcggtggctcacgcctgtaatcacaccactttgggaggctgaggcgggcagatcacaaggtcaggagattgaggccatcttggccaacatagtgaaatcccgtctctaccaaaaatacaaaaattagctgggcatggtggcgtgcgactgtagtcccggctactcgggaggctgatgcaggagaatcgcttgaaccagggagtcagaggttgcagtgagccgagattatgccactacactccagcctggcgacagagtaagactctgtctcaaaaagcaaacaaacaaaactactaattgaatccaaccttctcgttttataggtgatgagactgaggccaaagaagaaggaaaaaggagatgttcaggatcacgcaatgatttgtggcaaaaccccagctattaatataacacctatacaacttctagaccagtgctttttccacttgaaaggccttgttatctgagttttgttttttgttttttttctgagacagagtctcactctgtcacccaggctggagtgcagtgacgcgatcttggctcactacaacctccgccccctgggttcaagcgattctcctgcctcagcctccctcccgagcagctgggactacaggcacacgccaccatgcccagctaatttttgtatttttggtagagacggggtttcaccatgttggtcagaatggtctcgatctcctgacctcgcgatccgcctgccgcggcctcccaaagtgttgggattacaggcataagccaccgcgcccggccgttctctgagttcttaagtgggcataatgtcagtgatgccagggccatgactgtaggcaagggctggaactgcatgccctttggtgcttttacccttccaagtttatgtccaggaatatacatctctccccaactgcctaagtaggtgctagttgatatcatgattgatttggtcttcttgggtaagacctcagttaattctgggtaattttttgtttggggatgaactgtagccatccacctatgaagaaagtgttgcttttattctttgctaggttccatccatacctggatgaggaacagcaagaatatttatttcctcatttcctttttactaatctcaatgtctggtccttcagaaaagaaacgaatgggctaaagagataactagactggaagagaggagaaaagtgtcagaggggtgttggagtaggatgggttggaggaaggacaggaacagcaaagatggaggctcttcatgccggccccaatacctttccatgtcttctttctccaccccgataccctctgatgtccagtgcctgaggagctggggcagtagggacatactgagattgccctccaaccccataaatctacatcacttttctattttcctgactcaagcttccaaaggctgggttccgcatccccaaaacccatctctgaatctccagggcctaccactgactgcacagaacaggcattagcgtatgcttcaaaaagacatccctgaggagcataatagtcatactgtcaccctctagcctatagtttgcgaagccctttccaggcaggacttcagtcgcccctccttggatgtccctagggttaggcagggccgaagccactatcccaactctacaaatgaggaaaagccaagagccgtgctgcaggcagctggcagctggcagcagcactcttccacagatctcctgacgaaggtcgagcacttctctgcgtctcccacggcctctggcgcagagcctgccgggagttgtagtccagtgccccgggagctcatatggactggactacaatgaccagcgtgccccgcgctccgcgcccccttctctttcagcctcgggcacgggggaggctcggcggacctgctgattgggaaccgatatggcggcgactctgggcagcggggagcgctggacggaaggtactaggtccccgcctgaaggagggatagggcggccttcgggagagatcagggatgaggatcctgaagacgcacaagggctgagatcctgggtctgaggtgatggatagaggcctgtgaaaagatgc

SEQ ID NO: 34471 - DNA, 2300 bp, Homo sapien
gcccggctaatttttgtattttcagtacagacggggtttcaccatgttgggtaggctagtctcaaactcctgacctcaggtgatccacccacctcggcctcccaaagtgctagaactataggcatgagccactgtgcctggcctttttttttaagtgcagttctgagaggtaaagtgatttatccgatatcacatagcttagagagaggaagagaaaggatttgaacccaggtttgtccagagcctggaccctagaccactgcaccgtggagcctgtgtttgttgttgttgttgttgttgttgttgttgttgttgttgttgttgttgttttgagatgaagtctctttctgttacccagcctggagtacagtggtgacaagatctcagctcactgcaacctctgcctcccaggttcaagtgattctcctgcctgagcctcttgaatagctaggattacaggcacgtgccaccatgcctggctaatttttgtatttttagtagagacaatgtttcaccatgttgcccaggctagtctcaaactcctgacctcaaatgatccacctgcctcagcctcccaaagtgctggattacaggcgtgagccactgtgcctgccctaagcctgtgtgttttattcttctgacttgcaggctaaagcggcagctcttccatatctcattgctatctcctagggcttccgctaggagactgatctggggctagaggcctccctctgtgcacacgagaatgctggaaatgtcacctctcagggctctgcctgcctctcagccctgaaagccatggtggaaaggggtggcgctgacatagacatctgaggaaagaagtgagggagggtaaagggtggtgcagtaagaggaggggtggggagggcttttggaggcgctgcccctcctggcctcctgtacaatgagagtgcactggactctccattctctggcacccacacactgcgggggccaatgacctgggtctcactcctgaatcaggtgggagatagggttagcaggaataacttcttgggcttccctgcctcagagctccaggcccggattcgaacttacaatcagcattacaacaacctgctacggggtgcagtgagccagcggctgtatattctcctcccattggactgtggggtgcctgataacctgagtatggctgaccccaacattcgcttcctggataaactgccccagcagaccggtgaccatgctggcatcaaggatcgggtttacagcaacagcatctatgagcttctggagaacgggcagcgggtaagtgtgcaggggagtgggggtctctgaggaggggtcaggaccccagaaccctgggccctagccaagcactgatgaaaattcactgcccttctctgagctgtagtgtccctagctggtcccaggtctgggcaggattcagctctgaatgataatgatgagtaacatttatcgagcacttactacaagctggatgctattctgggtgtgtcatctgatcacctcattgaattctcaccaccaccctatggggtagggactgttagcattcccactttacagaggaggacactgaggctcagagacaccgtaggaaagtggacgatttaaacttgactgtaccatgctcttgaccataaagctgccccagacgaaggctgtgagaacatctgaaggattcatgtgggtgcaggggaacccagaccagagttgaacccagagcctagccccagacctgattcccagctggagcagttgacagcctcgggtcttgccctaggatcttggaagaaggatctgtgaagggtaaatttagcccagccgtgtccctgatttcagagttgggtatcagaggcaaaggcaggccagacagcatagaccccattagggtggccacctcccaggactctatcgttacaggctgagggagtggggcctcagcccgtggcactgggggccagagcctggactggaccctccattctccatccgcctggcccctggcttagtctggtcttcctcttacctcctctaggcgggcacctgtgtcctggagtacgccacccccttgcagactttgtttgccatgtcacaatacagtcaagctggctttagccgggaggataggcttgagcaggccaaactcttctgccggacacttgaggacatcctggcagatgcccctgagtctcagaacaactgccgcctcattgcctaccagggtgaggggttggtagggtgaggggttgataggctggagggcaggaggagtcaggggtcccagggtc

SEQ ID NO: 34472 - DNA, 2300 bp, Homo sapien
tgatcagagttttatgtgtcacagaggccttcagaatgaagacccaaagacagagggcaaattgtctatttttacgtttaggttcattaaagtatggacacccttgttgaaatataattggacagaaagggtatgctctaatgctaatagaatgagtggggaaacccagcctcgcccgtctgtctagattcttcttggcctctctgagcgtgtgttccttctttctgagtgtggggcagggccctctctggaagggggattttataatctacactcaaacaatgtaggtcagaccttcccttcccttcccttcccttcccttccttcctttctctctctctctttttctttctttcttctcttttttttttttttgagacggagttttgctcttgtcgcccaggctggagtgcaatggcacgatctcggctcagtgcaacctccgcctcccaggttcaagcagttctcctgcctcagcctcccaagaagctgggattacaggcatgcgccatcacgcccagctaattttttgtatttttagtagagatggggtttctccatgttggtcaggatggtcttgaactcctgacctcaggtgatctgcctgccttggcctcccaaattgctgggattataggagtgagccactgcacccggccttttttttttttttttttgagatggagtttgactcttgttgccgaggctggagtgcagtggcatgatctcggctcaccgcaagctccgcctcctgggttcaagcgattctcctgcctcagcctcctgagtagctgggattataggcacccgccaccacgcccagcgaattttttgtacttttagtagagatggggtttcactatgttggccaggctggtctcgaactcctgacctcaagtgatccatttgccttggcctcccaaagtgcgaggattacaaggatgagccattgcgcctggcctatttttttttttttttttttgagatagggtatcactctgtcacttaggctggagtgcagtggtgccatcacaactcactgcaacctctacctccaggggtcaagtgatgctcccacctcagcctcccaagtagctgggactataggcgtgttccgtcatgcttggctaattttttttttttttttttgtagagatgggatctccctgtgttgcttaggctggtctcaaacttctgggctcaagtgatcctcctgccttggcctcccaaagtgctgggattactggaatgaaatcaaggcacagagcaagctgggctttggagcaacccaccaggcttcaagtccccactctcaattacttaaaccagttatttcacctccctgagcctcggattatccatctataaaatggggctagaattatacctacctgacagggtggctggtgaaatgatatacaagtgaagtgatatatgcaacacttggcataatgtctggaacaaggtaaacactttattattattattattattataatttaggttgatgcatggggattttataacctacactcaaacaatgtaggtcagatcatttttcttttcttttcttttcttttcttttgagacagtctcgctcttgttgcccaggctggagtgcagtggcctaatctctgctcactgcaacttccacctctcaggttccagcgattctcctgcctcagcctcccaagtagctaagattacaagcgcccaccaccacgcctggctaatttttgtttttagtagagatggggtttcaccatgttgctcaggctggtcttgaactcctgacctcaagtgatccacccatctcggcctcccaaagcgctgggattacaggcatgagccactgtgccaggcctgcaattacttttgctcctacctaatatcatccccacaaccgccttctgggcagaaaccggcaggctctcttggagaagtcacaggcgtggccatttcctgcaaagagccaaacccccattcctctgtgcccctcctctcccaccaagtgctttataaaaatagctcttgttaccggaaataactgttcatttttcactcctccctcctaggtcacacttttcagaaaaagaatctgcatcctggaaaccagaagaaaaatatgagacggggaatcatcgtgtgatgtgtgtgctgcctttggctgagtgtgtggagtcctgctcaggtgttaggtacagtgtgtttgatcgtggtggcttgaggggaacccgctgttcagagctgtgactgcggtgagtgtttctaaacacccttggtttgggggtagcaaaggg

SEQ ID NO: 34473 - DNA, 2300 bp, Homo sapien
actgagattacaggcgtgtccaggagcttttctaatacaaaagttattactgagaataactttaaaaaaaaaatctgtcggccgggcgcggtggctcacgcctgtaatcccagcactttgggaggccgaggcgggcggatcacgaggtcaggagattgagaccatcctggataacaaggtgaaatcccgtttctactaaaaatacaaaaaaattacccgggcgtgcttgcaggtgcctgtagtcccagctactcgggaggctgaggcgggagaatggcctgaacccgggagaagagcttgcagtgagccgagatagcgtcaccgcactccagcctgggcgacagagtgagactccgtctcaaaaaaaaaaaaaaagaaatctgtccagtggagatttttgtacccctcccatcacatttcttaggaagaaaatatctggggctgtgagatgttccattttaccctcaacctcaactatacccaccctgaaccactggatacaattttctctcactgggtgcacggtgcttctgtcctaatggtccaaccttctcagtaggtgaggcagtatgagctttgccactcacctactgtgtggcttttggcaagatccttcccttagttgggctccagttttttcttctctataaattcaggagctagaatcaatgatctgcaaggtcctttctggatgtagcgaaaaggagacatttagaatcagaaaacgccaggggtagatttcagaatgtgggcattacctcccagcaaaatattctttactattctcctgtgtaaggcctctagccctggcttggctccgtatctcacaccagtcatggtgtagggctgggcacagggtaggtgctcagtgatttagctttttgtctccatctcctaaaaaacaattccaaatattctaggtttgattttcagcggaccctcctgatgggtatctggagcacgaggttggttttttttttttttttggagatggagttttgctcgtcgcccaggctggagtgcaatggcgtgctctcggctcactgcaacctctgcctcctgggttccagcgattctcctgcctcagcctccccagtagctgggtttacaggaacctgccaccactctcggctattttttttttttttttttgagacgcattcttgctgttgcctaggctggagtgaactggcgtgatctcggctcacggcaacctccgcctcccggattcaagcgattctcctgcctcagcctcccgagtagctgggactacaggcgcctgccaccatgcccgggtaatttttgtatatttagtacagaaggggtttcactgtgttggccaggctggtctcgaattcctgacctcgtgatccgcctgccttggcctcccaaagtgctgggattacaggcgtgagtgaccgtgcccggcctaatttttgtatttttagtagagatggggtttcaccatgttggccaggctggtctcgaactcttgacctcaggtgatgcgccagcctcagcctcccaaagtgctgagattacaggggtgagtcaccgcgcccagccgttggttttaactatttggggcacacactgtgattttttttctgacgcagctggtacagtgcttgcttgtaacaatttgcaattcactaagctgagcagagtctggacacctcgaaggcacacatacatgccagtggctgagaacacaacattcaaatcctctccatctggggccttggtccggaaggccaatctcactgcaacccgagcggctatgagacatctccctcgtggcaggtgcccgagctgtagccacgcggcctctggaaagagatgtgctaagtcccaggacttcagaagagctctgtgaccttggccaagtcccttcctccttcaggagcgctgcagtgggcctaagtgcctcctcccgggactagtacggggacggtcgtgagatctggacaacattcgccttttaatatttattgatcttttgtgacacgcgcgtgggtttccatcagcaatgaagtcaacggtcgcggcgctggagcctgcagaactcgcgctctagatctcgcgagatctccgcccagggcttcgcagcgtcacgccctccggggccgtggcggcgacggcggtgcgtagcttactcacaggggcggcccgtatccctccgccgccggcgcggctcggccctccctcccctggcccgccaatccccgcgcctcccgacctgcccctcggtcgggcccaccccgtgctccgacggccccaccccggcggcgcagcccgcc

SEQ ID NO: 34474 - DNA, 2300 bp, Homo sapien
ccacctggccttcctccattgcagcctgtggatccctggcctcccgcctgagttgggggtgggggtggaggcataagtctgaaaaaaaagtgggtaatagtcagcagttccctaaagtagaattactacccaccctctgccatggaccccagcataaagctttttgtggggcgtgcatgacctgactctgtactggcgttaggcttcaggagatctgtggaatagagtttgacttcatggatcctaaccctctgagacctgctgctgactcccagggagcaggtcctccctcacagtctgtgcctcagcttccccagaaaaggtagatggaggtgagttaaatgcttggagatcctacacctgggcttttgcttcctttttccttgcacggtcagtgcccaacacagtgcctgacattcacactgaggcccagcatacctatctttaagcagtttggaagtgatcttctgggggtgatgggcgtcttaaaacggtttccatagcaagcaccttacttttactcacatgggatgtttgtttggaggggggcattaaaaggactgctggcaaggaggagagagactaaacgcctccccaagggagccatttcttggcatagtagttaagggagaccacttctcagcattcggaaggaactggttgggagcaggtgtccacgatgtctggggaggggtcacttcgtgtggtcttggatatcaggagtggcagagaggcaacacattccagatgagctctgccctttgacacctccccccaccccaccccggctgggtcaaggccccaaggccacatatagaaggcgtggaaggtgggcaccagctgctgctgccaggagatccatgctccataagccctcgcgccagcctcggagacagccaggctgcgcagagcagaggagaggaagcagcgaggtgggagacagtttcgcttctcccaccgaggccgcgcctgtggctgcaggcgcccggatcgccacagttaactccctgttatctgggccccaatcgatctcaggctgtaacgtttaaccctaggctgacttccccaaccgccctccccctctccctcccctgcttgggtctggggactgcgttttcttcgcctcgcagaggaaggtcggccttgcacaaatccgcccccacgaatcccaaagaattggagaaaacttccactttgggattatatgcagttgggattatatgagcccggggcttgcaccatgggtacgtgaggtgaagacatctgcagcagcaggattaattagcctaagatgggcatatggaggccactgatggagtgaaagcgggatatgcgggcccaactctgtccccactgggcgcctactctggcaaggctgagttttccttctgtctttcaatcagtacctattgagcgctgctgttccaagcattgtttcgggttttgagtgcgtaggccatggtctcagggcaccaaatgtacgtagtcgttttagccccgggactcaagagttgaggctgatgcctgcctgagagataaaatatcctttctcggatcagtttcctcacctgagaaatgggaacgggaatctccgccccttttctcccggggccctagtgcccactgaatccattaaggagctcttggaagggtggggtcttggaacacgcgtctacctcccaggaccctcgactaggaatctctggcccgccgcgcacctgagctggggggcgcggccaaattctccctcccggtcctcgaagcttctggccccgctctagagggggcagaaagatagcagatttccccggaggtgcgtctctaaacccagaccgcctcaccaaagcggggaggtcgtccttttttttttttttttgtaaagttgcgggaaataggcgaagacggggcgcgcaagggagctgagcctgggtggaccgcgtcagggcgcggggagctcgaggcgcagcggctgcagctccggcctcagagcccgcggcgtccaagtggcccgagctgcgctgggagggaggcggcgggaggagggaggggagccgaggtggagggggttggggggaggagggagcggcgagtccggtccgggttttgccggcagcccccgggcagcgttcatagctcctgcccgggcgggcgcgcggcggcggcggcagaggcggctgagcctgagcggggatgtagaggcggcggcagcagaggcggcactggcggcaagagcagacgcccgagccgagcgagaagagcggcagagccttatcccctgaagccgggccccgcgtcccagc

SEQ ID NO: 34475 - DNA, 2300 bp, Homo sapien
agcattcggaaggaactggttgggagcaggtgtccacgatgtctggggaggggtcacttcgtgtggtcttggatatcaggagtggcagagaggcaacacattccagatgagctctgccctttgacacctccccccaccccaccccggctgggtcaaggccccaaggccacatatagaaggcgtggaaggtgggcaccagctgctgctgccaggagatccatgctccataagccctcgcgccagcctcggagacagccaggctgcgcagagcagaggagaggaagcagcgaggtgggagacagtttcgcttctcccaccgaggccgcgcctgtggctgcaggcgcccggatcgccacagttaactccctgttatctgggccccaatcgatctcaggctgtaacgtttaaccctaggctgacttccccaaccgccctccccctctccctcccctgcttgggtctggggactgcgttttcttcgcctcgcagaggaaggtcggccttgcacaaatccgcccccacgaatcccaaagaattggagaaaacttccactttgggattatatgcagttgggattatatgagcccggggcttgcaccatgggtacgtgaggtgaagacatctgcagcagcaggattaattagcctaagatgggcatatggaggccactgatggagtgaaagcgggatatgcgggcccaactctgtccccactgggcgcctactctggcaaggctgagttttccttctgtctttcaatcagtacctattgagcgctgctgttccaagcattgtttcgggttttgagtgcgtaggccatggtctcagggcaccaaatgtacgtagtcgttttagccccgggactcaagagttgaggctgatgcctgcctgagagataaaatatcctttctcggatcagtttcctcacctgagaaatgggaacgggaatctccgccccttttctcccggggccctagtgcccactgaatccattaaggagctcttggaagggtggggtcttggaacacgcgtctacctcccaggaccctcgactaggaatctctggcccgccgcgcacctgagctggggggcgcggccaaattctccctcccggtcctcgaagcttctggccccgctctagagggggcagaaagatagcagatttccccggaggtgcgtctctaaacccagaccgcctcaccaaagcggggaggtcgtccttttttttttttttttgtaaagttgcgggaaataggcgaagacggggcgcgcaagggagctgagcctgggtggaccgcgtcagggcgcggggagctcgaggcgcagcggctgcagctccggcctcagagcccgcggcgtccaagtggcccgagctgcgctgggagggaggcggcgggaggagggaggggagccgaggtggagggggttggggggaggagggagcggcgagtccggtccgggttttgccggcagcccccgggcagcgttcatagctcctgcccgggcgggcgcgcggcggcggcggcagaggcggctgagcctgagcggggatgtagaggcggcggcagcagaggcggcactggcggcaagagcagacgcccgagccgagcgagaagagcggcagagccttatcccctgaagccgggccccgcgtcccagccctgcccagcccgcgcccagccatgcgcgccgcctgctgagtccgggcgccgcacgctgagccctccgcccgcgagccgcgctcagctcgggggtgattagttgctttttgttgttttttaatttgggccgcggggagggggaggaggggcaggtgctgcaggctcccccccctccccgcctcgggccagccgcggcggcgcgactcgggctccggacccgggcactgctggcggctggagcggagcgcaccgcggcggtggtgcccagagcggagcgcagctccctgccccgcccctccccctcggcctcgcggcgacggcggcggtggcggcttggacgactcggagagccggtaggtgtcgggccacggccctccctcgaccccccccggaggccggccccctccccttccccgcctacctccctctcctcccccggggttcggtgcgcggccggggccggagttcgctgcaagtcggcggaaagtttggctgcgcgggttcccccgaagttcaggtgcggagagccggggacggggaaggaggggtccgtatttgggaggggcggggggcgcccgcaccgtaagccgcggagccccggagcctgggagacctagcgccggtgatcgcttggtggccg

SEQ ID NO: 34476 - DNA, 2300 bp, Homo sapien
tgatgccccccaacccagcctggattccctgccagggccccccggctctgtcctggtggaatctgccatcttgcccagctcttcctcctcacccatttccctctgctaggaaggagccctaggtggtctggtgcccactggggagggacagggagtatctgactgttgatggcggctactcgcctcaccctagagacagagcttttcctttccccacacccggtcctctttggccactccttagtcctggggaagccccccctcccccccgcttggggcctcagtttccccctctgtaaatgcagagggttggactagatgctctcttgggacaggcttgagtcctgtgactaggggggttttggggttgcctggggacaaagatccagtgtgtgctgccctcaagcccagggcgtgatggggcccgccagatgtgcgcctcccccttgagcctccagctgctctggggctgggccctgtcctcccacccctctcttggggcatgctaggccacagcaggcagacagggaagcaaggctggagagccgggactgatgaggaaaccgccgccttgctccatctggcccagtcccttcagctgaggaggcagctcagacgccttagccttgaaacctgagtagagcaggccctgccccgggatgggctgccttggaaatatggaggtggccagaggacaggctcctgctgggctccattcccttgagggtcacgcctactcctcagtgccagcctgccccagccagaggtccctcctggcaacagcccaccccggctctctgggttctcactgagacctccacccaggccctactctgcaggccttgtgaggcctctgcccaccaccgcccccaatctgggagccaggccagagcaccacagtgaggcctgagtagagacaagaatgaggtctgagacgataatgattgtggttcgggggttgagaaggaagcgtgtgccagggtgtgcacaagcatgtcctctcactgtggcaggggacggctggtcctctggccctgtgctgctcgccctgtagcaggcggggagaagatccctgaaataagggttctgcactcattggcaaactgggttacacaaaggcaaccaggttcctttgcctgcaggacatgtcagagccttgaaataactgatgtgtattagtaatccccagatgaggatccaggggcagccttccagacttaatgatctgtaccatcaagcactcttctcctcagatggagaaggaagattaggatgtggaggtggtttttttcttatttttatttttttgacaggatctcactctgtcatccaggctggaatgcagtggcatgattataactcactgcatcctcaacctcctgggctcaagcagtcctcccacctcagcctcctgagtagctaggactacaggcatgtaccaccacacctggttaacttttgtattttttgcagagatagagtttcaccatgttgtccagggtggtctcaaaactcctgagctcaagcgatctgcctgcctctgcttcccaaagtgctgagattacaggtgtgagccactgcacccagctaataagcatctccaacactctcccaccccagcacaagaaggactgcctgcttctggcaggtcttcctagaccctagcagagcagatttgggctgtggaggcctggactagggcctccaccatgccgcttggtggctgtgtgttcatagactggtagttctcctaaatcttgtttccctcatctataaagtagattaccagccactgcttctagagttcttgtgggtcttaactgagatagtacaaataagaaatttctcaccaggatggatctggtgcttaataaatgcctggtcaagcacatggtggtcaggatgacaggaccgttgatagtggcggtggtggcgatgttgaagggggaggtgttcactgctgccctgaccctgtatcctcttgtgacagagtgaagacatttccacctggacacctgaccatgtgcctgccctgagcagcgaggcccaccaggcatctctgttgtgggcagcagggccaggtcctggtctgtggaccctcggcagttggcaggctccctctgcagtggggtctgggcctcggccccaccatgtcgagcctcggcggtggctcccaggatgccggcggcagtagcagcagcagcaccaatggcagcggtggcagtggcagcagtggcccaaaggcaggagcagcagacaagagtgcagtggtggctgccgccgcaccagcctcagtggca

SEQ ID NO: 34477 - DNA, 2300 bp, Homo sapien
acaacaattaaatagtgcattccatgagtaagtaatcattacagctggaacagccatggcccattgagtgcatctgtgtgccaggtcttgagcacatcagctctttcggtccccatcctagcctcacaaagagggggactgctaccatcctcattgggcagatgaggaagtaggagcccagaaaggtggtccagctgtgacttgagggcatgggtgccaagggtggggaatgtggtatctaagccctgccatgagcacttccctccacagcccctgctggtcgccacccttctctgcctacaggtagcagagggcaggggggtagaatgcaggacagcagggaagccaagctccctctgtgccctttaagatcctgggcacctgcacagagagtggctcccttgtttctgggctctgcggtaatgtcctagggtttgatgggcagtgaaggatgtggtctgagtgccctcttaattgaccagctgtgctcacagattcagatctcctgggatcatgagcaagtgacttatgctctccaagtctcagttttctcatctgtaaaacgggttgtaggattgttttgagaattaaatatgacacatgaagagcacttggtagatgcttggttgtcagaggtgtcaccatggttgatgaagtcccagctcctgctgttgcccagcttgaagggagggagactacgcacagctcagattccacacctccaattactgccaccctaagaggtcagcaaatcctcttcctgctccctaagaagagtccatgtttgtgtgttcatgggtggaaagaaggtcagagaagacttcatgaaggaaggggcatttaaggaggaatttgagggttcagtaggagttcactgagcacagcaggatcaaggccccaccgggcagagtgtggatcatctgctgaggtctggagatggaagcaactgggtgtggtgaaccccccaggggctggagtaggggagaggggtagaaagtggcctccagtggcagggcctgactctatcctgatttcccttctcccaggcactgggcctgctccccacgccctccttagatccctgtgggtgggggccctttaatgcctctctgagaggcggactcttactctgcaggtgcctcacagccaggaagttcttaatgtctagcccaggtacagccagtcaaccctcttcttcagttagagtcctgggctgaggggggcggcttcagggccttgacttgcccttggggagacaccgtgggacaggtgccttgggagatggtttcctctgcccagggcaccctctgtctctctctgtctccttatatctgcccagggaggcttccccttgacctggcacagggatgtggattcttggttggacccacccctcacctcccgcctccctcaggttctttctcctttgtctctttctcctctctcctgcctcctcccatcccactctgtcccgaggctccttctcaccccacagcccaggtctccgtcccgtcccgtgtgactctaggtctcaggggctcagtctccctctctgagattcttcaccttggccccccgcactccctgctcctcccttggcggcgtctcccgggggctggcgtgtgtgtcggggggctgggggcaggggtcactccctgaacagaccgcgggaggagggccaggacccgccccctccttcacctccagggcctggcgggtcccgagagctcaggttctagaccggtgggtcctgcctggagggcggaggtggttgggtctgcccgagggttcgaggacggcaggggcccagcgtggctaggagggggcagaaccccgggcgctcccctccccccctttcttaaagggcccgcgcggggcagagggggacaaggtgggccgcgctctccccggcacgctcggggtcccggggcgagcgctgcgctgcaagcggacagggctgggggccgcgcttccctccgggctccgcgcccgccgctcgcgcgcccgcagtgcccccgcccttccccgcccttcccgctcctccctcctcctcctcctccagctcacggctccgctccctccctcctgccgtccgtccccctcgctcagcctctccacatcgcggctccggcacctgaagggacgcgggcgggcgcgggcagctccgaccggcggcggcggggcgggacaggcagcccggcggcctccgatggccccgccgtgagaggccggacccgcggcggggaccagcagcggtgagtggggccgcggggctccgggacccgcccctccccgctggc

SEQ ID NO: 34478 - DNA, 2300 bp, Homo sapien
ctatcttccttatggtgatgttttgtgatttatgaggtctgtgatctatgaaaatgaaatgggggacactgaaggagccaagaagattggcttgatgcctttaagcgtgccgattttcagttattttcttccttctctccttctttcactggagatttgctaatccttattttatgccaggcattgtgttggaggtaataggaatccaaagatgaataggatatatatagtccctgacattaacgtgcctggcctgatgggagatgcagacccattaaatggctgcttgaaatacggtatgggccagtatcccaacagtaatactatgtgtgaagctcatggcaatacagaggaggaagggattaattccatcatgtatgtgttggtgggagtagaggtggatatgtaggaagggggatgcggtataatgctgagctgggccttgggaaaataagttttccatgtggtcaaggtggaggtgaggctttctggacacaagagacatcatgtgcagaagcacaccaagaaagagcatgaagtgctgaggattgctagagtggggggttggctctcaggatatgaagctggctaggcaaagggagcccatgaagagccttgctgaggagtttgaacttaacttctgagagcagtagcatggccaaattgtacttacattttatttttagaaggatcactctggcattggtaggactggagataggtgatgaggtgaaaggagtggagaccagttagaaggcttagaagttgtccaggtgagagatgatgagggcttggacttaaggtatttgcagcagagttggagtggaagtagataaattggagattattttaaaagagagacccaaaggccttggtgattaattggatgaggaagaataaaagatgagatgaagggacttattgtaatggattgatgtagtctaaaagaataaaacagtggcattaataattataggggatttggagtgaagtggaagaaataatgatgttggctttggatgtattgagtttaagatgtctcttagctaggaggaaaggtgtagctctctctacttcctttccagaatagcagtcctagcctaagtcactcatccttggaccagtttcctgtggagcccagtgcggtataaaattccccaagagctcactggcattcctgagctccacatccttcaaggttaaaagctgggtgttgaaaactccctggaccctcattgataggctaatggattatggacctgtgtgtgtgtgtgtgtgtgtgtgtgtgtgttttaaatcagatgctggctccagtgcagcaaactcttctgcctcttgcaagcatcagccttggaaacaaaacaaaacaaaacaaaaaaaaccttttttatggagcagcctctggccctgacaggctctggctctctgttggctcccaagaagccccccacctttcttagagatcagatttttaaaagatgaggttgtacagtgctcagccagatccccacgtggccgctgaagaaagcccagagtgttggggactgggccctttctcagctaccacctctgcttgggtgtcctcaatgctaagacaagacaccttgtggcccaactctttccaaaatgacggggctgggattctcccccacctcaagtcgaatatccagcgttcaccaggcggtggcaggaccgagcacgtggtatcatttaggggctgggctccagggtcctcctaggaaagaggacagcccaagaggcgagaggctggccggccaccctggccatggcaacctctctggctcctacagctgctggccaaaggcagggggcacgccctgcgtcccattaccacgttcataggatggtgccaggagcccgttatctcttcttcgccttctcctcacgcaccacccccactgtcatgccgataaatcccgggagcaaagggtggcacgattcctcccgcgcccctgcgggctgaaggcgggcactaaagcagtgcagtcccaagcttcccctgcagaagccgcgctccctactcggtccgggggcagagggggcgcgagagagcaagtgggcgggcgtcccatcctccgcatcctcctccaggtcctggcgcacagggtgggagcgctgcgctgcgccgcgctgcgcatcgcggcccgcttgccgcctgccccctgccctagctgggccacctccccgggctgccggtggagggctaagaggcgctaacgttacgctgtttccggttttccagcgggctctgtttcccctcccaaggcggcggcggctga

SEQ ID NO: 34479 - DNA, 2300 bp, Homo sapien
tttcccagatcgttctttaaaagcgtattccttttccatagctcacttaatcttgaaaatcatgcctcttcaatgctattttaatgtttcggattaaagatatgaagtaaacatttaatatatgaagagaacaatccacttgataaaaatcctcgcatttccaaaatgttttcattttaagcatttgcagaagttaaataaatgtagcagacattctaaattcgataaaaaattcagagaacccgacattttatgtaccccaaaggtccaaacagaaccgatgtaaatgtcaatagctgtctcccttccggctgatacttaaatggttttactagtactcaaagcaatgaaatcagcaactctctctccacactctagtcaacactccaatttccaaagccgcaattcgcaaacgtcagttgggcgggggcggtgggggatcttgaagtaatccaaaaatttcctttcccctttgacagtccaccaaaagatgtcaaaccaaatccagcctattgtaaagctctgggacctcccttccaaggacaccgaacacaagcttagacaccgctgcgaaaagctgtccaaaagcgcctggccggacagaaatgtaaggagcccaggccaaaacgaattagaacccccaacagagggtcccgcagacaccgcggaaaagaaggtggcatttattccggggtagacagctacgaaccagttaccccagccagtctctgggggctctccaacccaagttcaggtttatggcagatatattggttgggtgccttcccctacaaacatcacagcccgcctccggggcccaccgccgctcacagagaagacccctcagcttcacatccgttccttttgccctcggacaaaggcagaggagctgtggagctgacccagcgctgtggggcagtaaaaatgccttgttcgggccacccatctttgggcccggcttcatctgcgatgtcagcaccaaaggttttttttttttttttcctggttttgttttgtttttacaacgcatcctgggcgggtgtatgcatttggtggtagtggggtggggggaaccgaacagaggaggggttggcagtgaagcctgggttatagaactctccttcctctccctccttccagggttgccgtgcagggagtgtcagccacgtctagcgcacagtcccaggccccagggcgaaggcggccaggggaaatggggctcagggattgctaagcaaacgcatcactggtggtctccagcgcctgcggaggtaggatcgcctcttttcttaaggggcgtgttattttgttctcttttgaaagtaggagggggttcattcgtttctcgctgcggggggtgggagagaacgttgctgcaccgcctgggtctccaagagggagggtgcggggatgtctgcaatggtactataattattcctgggctgagagagcaagtaaaggggacggggcgagcgtcacctggagctgtggcagtggcagcagggaaggtcgcgaggggcttacccgggcgggcgggcgctgtcctgccgcaggtgagggagggcgcaggctggcgggagggagggcgcgcgcgagacaggcgcgaggaaggggggaggggaggagggcgcgcgcgcgcacacctgtcctggacagcggcgctagccgagctgcgcctcacttaggctctgcgggctgaggaggaaggagggcgggctggcgggcgggggcgggacgccgaggggaggaggaggaggcggctcggatggctggctcggctctcgctcgctctccctcccatgggcaagtccggctcacaccctgcttctcccgctcactcacagcccccttggctctccctcctcctcctccttcccctgcgggatccgctcgccgccgccgccgccgccgcagacggcaagtcgtggcagccagacgtcggcgcgtaacccggcgctccgtgcgtgactccaggcgacgtcagcgcgcgctccgcgttccccacccctcctcccaactccgtggctcgcgcccttcgctctcgcgtccctccgttttagctgccgccgcggcggccgccgagcgcgctctttccgcccccttctcgcgcgtgagcgcgccctatcggctcctggcgcgtcaacattccgcgggccaggccttggggcgcgtctgaggagggggatgtctgtggcctctccgcccacacttcctccacccaccgcccacagcgccccagaaggacctattactcgtttggcttctgaaggccgaagccaggctctggcggggatagaacc

SEQ ID NO: 34480 - DNA, 2300 bp, Homo sapien
taatgctgagtagaatggggctctttctaagagaaaaaggaagctgtgaatacctagcaggcaagtttgttcaggaggtgaagagatatggtaaggggggctttgagggttcaggaatcagcaaggcttattccctagcctgctcttggtttcttgatcgttagtccactcttttctaggaagctgggcaatcatattcccagttgtccctcgggctaagagtgagggaggcaagtctccttacttttgggggaagcgggagatgctcaatgggaatagaacccacaaatggaataggtatacttttctcaggatagaggcaacgatctgtgcttgagaaagccaggggcagagctgtgtgatctgtgtctctcagctgcctgtagaaggtgatgggggagagagtgggcgcattggcaggggggggtcccctggagataggccttagctttccccagagtgccagggctgcagactgcagtgagagagtacaagcactcaatacctatctggaaataagccctaggttatacgtcaggtctagtaaaagagaaatcaggtatctctgagctcctctactcctgagcccctaataccagagaagatcctttttagctatcaccgtccaaagactcactggttaattaatggtcagcaacttagctgtctgcataaaaaccagcgaccacttaatatgttacttttgggagtgggatctctccttgacacaagtttctgggaagagtaaaaggggcaagcgaacctgctttaatgaatcccgtaaggaactgcgtttcccaggaaattcctgacatttttagctcatgaatttccgaaagcctgcttggttttctcctccattctgggtccttccagaaaggaagaagagtgggctagggtctgaatgctcacagggcctggttcatccgcagagctggccagcaactcaggctgggctcagccctgagcagggtgccccccttccccaaatctcagaaggaggagggggaggcgggcgggcaggcagtcagtcgtggtcccaagggggactggctgcaggtttttgggtgagtgtggagtttctttttgattgttgcatgtggggaagggcagagtcgacgggaacagtcactgcgggcaccctagccctggtgcgtctactgtcctctgctcggctccccccatcggtgagtgcgcccgcccgcccgactgtgcggggctgcggttggggggaggggggagcgggatcatctgaggccagagccactgccgtgtgtgcggggagggggagcggcgggagagagaggggagggacaggctaggtgtctgctgctccacgccactgctgccggcgccccgacctcatccccagcagccccctctgcagctaagggttaccaccgcaccacctctcttctttgcctgcctcagcggccaaggctctgcggtaggagacaacccagccgggtggcgggtgggcctgtctaggtttgggtttgggtcttgctgaggcccgcatgagagggggtggccgtgactcggtgtcccctctttgcagggggctctgctgcgccgcgcaggcccctcctcctacatcctctttggggggtcactggaaagcagagcttaggcccactctctgtgcttagtatggcagactccttctcacccctagtcccctaactccccaggccgaggccgcctagggtctgcccaacagcgacagccacggtggtggtggtggtggtggtggtggtagcagtggtggcggcagcagcggcagcagcagctgcgacgctgcgcgtcctgctccctctcccccacccagccagggttgtagggtgagggccggtgggtgggcgccgcctggcgggcgggcggacggggggctggcagcggggagggggcgcaggtcacgtgccggcgggcgggtgggcgcgtacagtagggcgccctgctactgtactggggagtcagtgccctgttaccgggtctcgtctgtctcgtctctcccgcagatctcgcgagagtggctgactggctgtgggggttgcggcggcagcaggcggagccggggagggaaagcagcggcggctgaggcgactgaggcggcgggcggagcggcaggcggcggcggcgcggcagcggagcgcagcatcatggcggaccgagacagcggcagcgagcagggtggtgcggcgctgggttcgggcggctccctggggcaccccggctcgggctcaggctccggcgggggcggtggtggcggcgggggcggcggcggcagtggcggcggcggc

SEQ ID NO: 34481 - DNA, 2300 bp, Homo sapien
tacatgcttaaaaagctggaagtgaagtgggtggcaagtggcagctccctctttcatgtagttttccataatgttcatatagtttccttatggtctaagtgttacaactggttttcaagttgttatattgaatattcctttttggaattcagggttgaatcactttgagggggaagggaagcaagggcaagagactttattttaaccagatgcggtcttatgacctcaaagatgtgctctagaaagaaaataacaaaaagtgtacctgtgaacatattttttgtcttggtgatattatgcaacacagtgttcagaattgcaaaaaaatttaaaaattgatagttttatcaatggaacagagagatgtgtttttggctaaaattattttttgtaagttatttggttatttcattttatattccctttcccatagctttgtacacacctcatacttaaaaccaagtgagaggcctcttttcagatctggtttatttttggaatgcctgagtgtgtttccagattggggggggagaggtggtgttttactttttgacatgctcttagcatgttttgctagtcattctggatcttatgtttgcaaattctgttgaacattcagtgatgtatttgaaatgagaaagtcctttataacatagtgtgaatgtttgtggccaattcaattgtggaatcttatggctttgtttttactttgggtagaagtttaacttccattgttcagattttaggtttatctagtgaaattgtgccaggtagttgtctaaatatggaccaattttgggaaatgaagattaataagtgtatatttgattctagataatcctttactcaaaatcataagttaaagattcacatcattaagagttatctaacttttatgttgtcaaatctttaaatgtggatgatattcagcattctatctatgaatttcctttaggaaaagagaaaaattcagtctccaaaccttttcttggagacaaaatttaccacatatcgaaaatgaaaaaaatttagaaagcgatttgattattttttaatggagtttaaccagcttaattaatgatttttccagtttgaagcacttattttcccaatgtgaataaagggaaaagatcagcaatttgtccctggcctttttcgaggccatttttagttttctgcccccatttcccagtcctggtataaaatgaattacgggtatccctctaagtccctataaccctttttgggggtcacagatatctttgataatctgatgacagtgtgatggatcctctacccaagaaaaaaaaaatgcccatccctggataattttgcatacaacttcaggggcatcacacatcttctgaaacccaagttaaagatctctgctctaagtaaattgtagagaattttagtgcaaatcgttgataaaattaggaaccaactattggcttaaaacctttcatattggaattattgttagatggtggcccctactagcaaaatgtgacattgcaaccagcttcgttagacattataacaaccagagagaagggaaaaaagcaaagttctgaaagctatttataaggagtcagggcatctctagacatgggagccttcctggttcaaggcaggggtcagggtgcctgacaatttctagcagggtagagtttgataaaccacaatgctcaggatgccaaggggttagccattatcttaaccccttcctcaccaaaagattttagttttgtctgttgggaaacaagatgtcactagggaaaaaaagatttgccttacaactttgctggaacacatcagtttggtgacgttgggacactagtgttatttttgagaaggcgcataaaaccaaagtaaattattctctatgtagaacatttatttactagtaacatttgtttgcgtgtattcgctttgacaatttttaccagtaaatattggttttatttaaaactgggaatccagttgatatataggatagttgatacatctgttctttcccccatgtaaagcatagttaaaagatttatgcatactttttacttttctctcttaatgccatggggtggggagggtgggtgggggaaagatttttgagtctacaactgacaaaatgtcttcttcaaattaaaaaaaattgagaagcagcactttaagtctaactctacaccattttattgcatgtattagttttattaatgatttttggtgcatgcctttgggcttattcaaaagtgtacaataggaaagtatatttcctttcttagaaaggagatgttttc

SEQ ID NO: 34482 - DNA, 2300 bp, Homo sapien
cagcgccgcgaaccgggagtcacctgatcaccctggcaacgcgcgcggcgcggggcgaggcgaggcttgcgtcacagcacgagccccgcccccaactgctcggcctccaagcgccgccggaagcgctctcttgcagtcggcgcagtcgggaggcggggtcggtctccgacttcccaacgtgggcctcccagctgcgctggatacttaggactcccacaggcgtccccctcagattggattggttctccgagactccacccgataccccaactccgctagttcaggcgcctgggaggcaagaccagcgtccatgcggaaccctgctcagtgcgtggcatgaggggtcggctgtgggctgctgcctcctcgtgtcttgttggtccagacccaactagggttgggggcttacttcccgagctgtacctgagcggaatggggctgaggctgataactggattgctctctggctacttttccccataaaccttgcaacaagtagtcccgccagtactttagagtgtaatgagacttcattcacatcaggagggggaagggggacagaatcttctgtcctgaaggtttccttcttctgttccaacaggaagagaagttaccgaaaagctcccagagcaaggcctagaatgagcttgcaagtcctacttgcaaaaaattttttatttttcattttagaaattgattttctctccatattcctccccttgcttgctattaggttggtgcaaaagtaattgtggtttttgcattttttttttaaatggcaaaaacagcaattacttttgcaccactctaatataagtatatgcctacaacttttgttactctctaggcttcccagataagactatcagcttcgaaatgaaaatttaacatcccctggaggtctcagtgtgagagtcactgcctatttcacaccttcactatttgctgactttcatttcagttttactctcctcatccctgcactgccaagaaggtttcatatgtattgaaaccttccctctcaagagtttaggatcttagaccaagaagttagtttatagtcaacttcttgtgagcatcttttagtgtcaggcaatgggccatgggcagattgagatgtggttctcgaagatcaaacgtgtatgggtggtatgtctcacataagtacaacttgtactgtttattatgacttaatcattgtatttaagtggcactttttaattttcacacttaaagaaactcatataagtgggaaagaagacagctgtgaaaggtagagaagaaccatggctctagacagagctgtactaataggagagaagagattgaaaatgtgagcccaggtcccaaggagcacagaggcatggtcagaaggttggtaggaacaggacagaggcagccaggcctgaggtgtttggcagatctgaggagggcagggatagagggtgaggggaggagtggggccagaatgaggcttgagggattcaatggagggcgaaagtgctgggaagggaggagggattggaaagaaaggagaagtatgcagtggtttgggaaggagttgctgaaagggagggcagggtaaatagagacccaggaaagggtgctaagagcattaagagaagggaggctgagaggctacaaaaaaggactgagggggaggaagaagcaggtgggagactctggggcagcaaacatctcagaaccagtcagtaggtggtgtccttcagaggctgttggagaagagcagcattgtctgtttgcctctgaagagtgaaggtgatccatgcacaccccaaactacctctggaccatctgagggtaagagccaccctttgcagagcactaatgcagagggaagagcagaaacaggcacgtccataactacaccctgatagtactcaaggcagtcaggctttttggctggacagtttttcaggcctgtggtacatgcctccgtgcctctaatctgggcagggcaaggtgaggatggagtggaaggcaggggtaattcccttagaagggaggcaagcttctcatggcagctgggtcatatgaaggctgtgctagggaagaaaagatgctaggacacattctcagtacgctccctgaccactccccttttactgagttggtagggtgagggcgtaaccatcgaaggaaaaatagaacattcctcacccccacctccacatccatgctgaggaaagtgttattatgtgggtaaaaactcaaggagtgttgctgacagcatccaagaacagagatgaggccagggaatgcatctcacatggctcttt

SEQ ID NO: 34483 - DNA, 2300 bp, Homo sapien
actgagaatgtgtcctagcatcttttcttccctagcacagccttcatatgacccagctgccatgagaagcttgcctcccttctaagggaattacccctgccttccactccatcctcaccttgccctgcccagattagaggcacggaggcatgtaccacaggcctgaaaaactgtccagccaaaaagcctgactgccttgagtactatcagggtgtagttatggacgtgcctgtttctgctcttccctctgcattagtgctctgcaaagggtggctcttaccctcagatggtccagaggtagtttggggtgtgcatggatcaccttcactcttcagaggcaaacagacaatgctgctcttctccaacagcctctgaaggacaccacctactgactggttctgagatgtttgctgccccagagtctcccacctgcttcttcctccccctcagtccttttttgtagcctctcagcctcccttctcttaatgctcttagcaccctttcctgggtctctatttaccctgccctccctttcagcaactccttcccaaaccactgcatacttctcctttctttccaatccctcctcccttcccagcactttcgccctccattgaatccctcaagcctcattctggccccactcctcccctcaccctctatccctgccctcctcagatctgccaaacacctcaggcctggctgcctctgtcctgttcctaccaaccttctgaccatgcctctgtgctccttgggacctgggctcacattttcaatctcttctctcctattagtacagctctgtctagagccatggttcttctctacctttcacagctgtcttctttcccacttatatgagtttctttaagtgtgaaaattaaaaagtgccacttaaatacaatgattaagtcataataaacagtacaagttgtacttatgtgagacataccacccatacacgtttgatcttcgagaaccacatctcaatctgcccatggcccattgcctgacactaaaagatgctcacaagaagttgactataaactaacttcttggtctaagatcctaaactcttgagagggaaggtttcaatacatatgaaaccttcttggcagtgcagggatgaggagagtaaaactgaaatgaaagtcagcaaatagtgaaggtgtgaaataggcagtgactctcacactgagacctccaggggatgttaaattttcatttcgaagctgatagtcttatctgggaagcctagagagtaacaaaagttgtaggcatatacttatattagagtggtgcaaaagtaattgctgtttttgccatttaaaaaaaaaatgcaaaaaccacaattacttttgcaccaacctaatagcaagcaaggggaggaatatggagagaaaatcaatttctaaaatgaaaaataaaaaattttttgcaagtaggacttgcaagctcattctaggccttgctctgggagcttttcggtaacttctcttcctgttggaacagaagaaggaaaccttcaggacagaagattctgtcccccttccccctcctgatgtgaatgaagtctcattacactctaaagtactggcgggactacttgttgcaaggtttatggggaaaagtagccagagagcaatccagttatcagcctcagccccattccgctcaggtacagctcgggaagtaagcccccaaccctagttgggtctggaccaacaagacacgaggaggcagcagcccacagccgacccctcatgccacgcactgagcagggttccgcatggacgctggtcttgcctcccaggcgcctgaactagcggagttggggtatcgggtggagtctcggagaaccaatccaatctgagggggacgcctgtgggagtcctaagtatccagcgcagctgggaggcccacgttgggaagtcggagaccgaccccgcctcccgactgcgccgactgcaagagagcgcttccggcggcgcttggaggccgagcagttgggggcggggctcgtgctgtgacgcaagcctcgcctcgccccgcgccgcgcgcgttgccagggtgatcaggtgactcccggttcgcggcgctgggagcggccgtgacgtcaggcgcccggctgctcctcacttgctctgagacaggtgcggcaagtctactgcgggctggtccgggctcctcaggttcagacccgaccgttatccagtcggttcgtggagaggagaggtgaggtgcagcggacctggcccgacccagctgggaccagggcggggatcaggcacggacagggc

SEQ ID NO: 34484 - DNA, 2300 bp, Homo sapien
aaaatatcagatcctttttactctttctcaaattggggaggaatgagtcttcttttttttttccagaataatttattcacatccagtatccattttgtatttttttcccgtgatgcactgtgacaggtgttctaggtacaagaggtggaagaaccattattccatagttcttgatttcaaggagcttacagtctaagaaaaatgttttctaaaaaaaggtagacagtgttatatgccttgagagagaaatagatgttgtgaggggagttcagaggagagattatctttgctctgtgtgatgggggatgtagtgcccatttgctggactttgaaagacaaacaggacggcgattaacaccagtgatttattgagtatctacttgtgtgcatggagctatgtttggagctttttatcctgatctcatttatttctcacaataaccctgttaggtcaatatggtcactctcaaacatgagaagactgaagctcattaaaaataggtggcagatgctggacgtggtggcttgcctgtaatcccagccctttgggaggccgaggcaggcggatcacttgaggctgggagttggagaccagcctgggcaacacggtgaaacccgtctctaccaaaactacaaaaattagccgggcgtggtggcaggcgcctgtaatcccagctactcgggaggctgaggcaggagaatcacttgatcctgggaggcagaggttgcagtgagccgagatcgtgccactgcattccagcctgggtgacagagcgagaccctggctcaaaaaaaaaaaaaaaaaaaaaatgtggccgggtgcggtggctcaagcctttaatatcaaagcactacagcactttgggcgaccaaggcgagcggattgtttgagctcaggagtttgagaccagcttgggcaacaaggtgaaaacccgtctgtacaaaaatataaaaattagctgagtgtgggtggcgcgcgcctgtagtcccagcgctactcacgaggctgaggtgggaggatcgcttgagcgcgggaggtagaggctggagtgagtcgtgattgcaccattgcactcgagcctgggtgacagagcaagatcctgtctcaagaaacaaacaaacgtacaaaaaaaaaaaaaaaccccacaaaatatccaagtgacttgcttaaagtcacacaattagtaaatggaaccagacataggctaaaggcagaccaagccttgaatctagattaggctggttccaaattccctgccctttcatctccctaacagtttgttttctttctctctttctttctttttttaaaaaataaaataaatttcctaattatttatgtagcactttctcttagcataacagtttttagagtaggttaacttttttttccatttccaaaagtcaattattatctattctggttcaaatgccaggtccttttatggcagagattctcaaaaaagtgatccgcggaggagttgcaccattaggtcactggggtagtctgcaaaagtgcaaatttccagaccccattctcaaagattctgagtacgtttgagatgagacccagagaacctgcatttttttgtttttaaacaaacgtattcagcctctcttgagaaccactgtgcctagaatgtctttgggaagcttttggaagtaataagttcgttttggaaagaacactccagacaagctttccaatagtctttcccaaactgtcatgcctgaggttctggacttactcttactcattcctgagagcacagcgactagctgaaggactgatcgactgatgagggtttgacctcatctacatacatctcaatttagcagcacatattaagctagctggcaaactgcttaaagccacatgggaaatctgcgcgttgggctatgtctggaagatacggaggagcaagccagacctgaccggtcaggtagtgaagacacggaatccgaaacccaaatatttcaggagtcaattctcagagaaagataagaagcccggttagtccaactcatgcgcaggcgcagaagaaagaccggcgcacaaagtaagacgcgcccttccccaccctatttcagtccaactcccactgcgcaggcgcttacagtgcaccaagatggccgcccccgtggatctagagctgaagaaggtaaaagagggtctttggcaggcggaggtcttctttttggaggctgaggggactatagacaagaatatcaagtgaggcacgagccttgcagaaggaaggagggtccagtggactagggaatggtttcccagagtccta

SEQ ID NO: 34485 - DNA, 2300 bp, Homo sapien
tgccccccaaaaatgttcagttaatgtttatgatataattgagttaatgagattgcctcagcatgaattgtgattccttttctttgctcagagacatccaagattctgagaggggaagtgactgtcccaaatccaattcaagctttttatcttcttttttcaggcccttcctgtaaaacctggctgacacacaaacctagctggggtgaggctccaggtgtgatgaaagtttggagttgccccatgaatgggactgaggctgatgtgggggtgagaaggcggaaggacagagcatgtgaagggagaaaggcaggctggggcaagagagcagggtgtgactctggcgagggtgggggaaagggggtgatttgaccatgtgtcaggaagtgtttctctccaccctcccctggggagagccttgaccccaaggtggctttgttttggggaagcaggtggccaggcagctgctgagggagggcaaagtcatggcttgggcggtgaccatgcactgaggtcctaggcccgatactcatcacccaaaaggataatctaacagtggctcttagccaaataggtgacaggtgagcttctgtctgaaaccagcccaactatatcataaagcctcagatatggcctaggggaaggcaagcgatctagagaagtgagagaaaagaggcctctaaggaaatagagtggtcaagtgcttagtgattattattaacagcaacaataataatgggtcacatttattgagagcttatagtgtgcctggcactatactaactacttttatgtgttcccgcattcatttctcaaaaagctccctacaaagtagtcattattattattgttattattttttccatttgagagacgtcaaaactgaggctcagtgaaattaagtttcttgtccaaggtcacacagtaagtagcaaaggcaggattcaaactcaggtctgtagtgattccagtgcactatggaaacctaggcctaggttactggagcaagttaagagggcagggccagactgacccctgcaaaggtggggatagggagggacagtgggatagactgtgtataaatagcaggcctgtttttatccctacacacaggcagaatccggcaagtgctctatctggcacaatttcagggctctgaaagccaacccagccctgtgtcaaacaactctctccccagcacgtccctggaaactgaaatacctactgagacactcatttctttgggtcaggacagtgactccagaagacccctgcaaaagcacatgggttggaagagaaacacctagtgtctgtgaaacagcaatctaggttagccagctgggtcctatgggagggtggctcattttttatgttgaggaaaaaggtggcagtcaaaggcaaggaaaagaataaggcttgtttcacaacctgtgtctctccaatctcagaagcctgggaattacaacccatagttcaaaaatcctaatgtcccctgagggaagatgggaggaagccactccagagactaagagagtactaacttcctttgcttttgctggattgatactaagtgcctgcaacttcaactctggttatctcgggtttatgagaacggctggcattcacgtgtctaatttttaaatgatagatgaattaattattatttgatacttgccgtgttggtaggccaaaaggtgggcttctgaaacttagagggtgacagggatggagacccctggtatggggcttagatgaagcaagaggccaggcccggaacagaactcagctcagcagtcagtcacaaggctgcagagtgacaggcgtttggggaaaggtaggaaccgctctccgccacctgccggtcagtagccctacccacaatcaggccgcggctgcctcggcctggtcccaaaaattgtgaacgccgccctctcctcccgcccagtcctccgccgcgcccgcggggtcgggggctgcgctgccggcgccgcgagccgggcgagcttcccagcacgggaggagggagggggcggcgccgggcggggcggagcttccgcgcctcctggagccttattcccggccgcgagccgggcagcgctcattcggccgaaggagctacgcgggccacgctgctggctggcctgacctaggcgcgcggggtcgggcggccgcgcgggcgggctgagtgagcaagacaagacactcaagaagagcgagctgcgcctgggtcccggccaggcttgcacgcagaggcgggcggcagacggtgcccggcggaatctcctgagctccgccgccca

SEQ ID NO: 34486 - DNA, 2300 bp, Homo sapien
aacttagggtaggatgggccgggcgcggtgctcacgcctgtaatccctgcactttggaaggccgaggcgggtggatcacgagttcaggagatcgagaccatactggctaacacggtgaaactccgtctctaccaatacaaaaaaaaaaaaaaaaaaaagaaagaaattagccggacgtggtggcgggcgcctgtagtcccagctactctggaggctgaggcaggagaatggcgtgaacacgggaggcggagcttgcagtaagccgagatcatgccactgcactccagcctgggcaacagagcgagactccgtctcaaaaaaaaaaaaaaaaaaaaaaaagaaagaaacttaggataggatggaaaaggaagatttccgtgagtagctaacgtctgagatgagacctaggtcacagattgtcatgtaaggatatgggggaaaggctttccttacagagaaaatagatcctgcaaagatcctcaggcaggaacaggttttgcagaacaggtgaaggccagtgtggttagaaaggagtgagcgaggggaggctggtgtgagatgccgtcagagaggtgggttggggccagggtgtgaatcttgcaggccacgacaaggagcttgatttttttttcttcttcttctaggagtaatgggagtgtgttgggtgagtattgaaccgaagagtaatgtggctcaactgccttttgaaaggacatgtatggtgtggaggatggactttgggcaagggaggaagagtggaagcaggggggttattacaagagaccaggaagctactgaaataattcaggtgagaaatgatggttgtttgaatcagggtagcagtgctggaggtggggagatgtggttggattatgggtatattttgaagatagagtcaacaggatttgcaaataatggaccacattttcctttgctcatttagctccaggaactccttcacttacaccccctagtgggctcctccatcctcacagggcagatcccagggacacagctaaattagggaattcctaagtgttgttggacaaaagaatttaagactcgttagctgggcagccaggcacagtggcttacgcttgtaatcctagcactttgggaggctgaggcggatggatcacctgaggtcaggagtttttgagaccagcctggccaacatggtgaaaccctgtctctactaaaaatataaaaatcagccaggcctggtggcacatgtctgtaatctcagctacttgggaggctgaggcaggagaatcacttgaacccaagaggtgaaggttgcagtgagctgagatcacaccactgcactccagcctgggcgacagagcgagactccgtctcaaaaataaaataaaataaaataaaagacttagctgggcatggtggcgtgcacctgtagtcccaactaccttggaggctgaggtgggaggatcacttgagctaggaggtcaaaggtgcagtgagctataactgtgccactacactccagactgggtgagagagtgagaccctgtctcaaaaaaaaagaaaagaaaagaatttaagactcagacactaggtcttccaccattatcccatttaatgggcaggtcctctgcctgctatctcccttaccctgtctggcttccatggactcaattatttattaggtccctgtttgtccaaataggtgtgtctgtggccccaggggtgtgttggtgacacccaaaacagtcctgggtgtttggtatttatatttgatacaagtgaggggggcagcaaaatctgggggtaccaagtcctcagacccaagccaatcatttactcctgtttctttacacaaaacacagtgggatcagacctgataccacaggaaatgcacatacacattttggccccaggttgggcatttctggagagcctgggaaaggccagactagtcttacaaatactcttatgccagcagggggtggggtaagcaagtaggggagtaggtgaccggtagagtctggagtcagcaggccttgttctgtttgtgttgtgctgcagtgggggatgcattataaatgcaaccagccagagggcccctggcttcagaacctaggactgtactggttctgagattctgtgcaagcctcatggaaatgaagctgccaggccaggaagggtttgaagcctccagtgctcctagaaatattccttcaggggagctggacagcaaccctgaccctggcaccggccccagccctgatggcccctcagacacagagagcaaggaactgggagtacccaaagaccctctg

SEQ ID NO: 34487 - DNA, 2300 bp, Homo sapien
gctcactgcaacctccatctcccaggctcaggggatccctcccacctcagcctcctgagtagctggaattacaggcatgcaccaccatgctcggctaattttttttttttttttgagacgatgtgttgctctgtcgcctaacctggagtgcagtggcacgatcttggctcactgcaaacttcgcctcctgggttcaagtgattctcctgcctcagcctcccgagtagctgggattacaggcacgcaccatcacatctggctaatttttgtatttttagtatagacggggtttcgccatgttggccaggctggtctagaactcctaacctcaaatgatccgcccacctaggcctcccaaagtgctgggattaacaggcgtgagtcaccgcgccgagcccaatttttgtatttttggtaaagacgggatttcaccatgttgcctaggctgggctcgaactactgggttcaaatgatccgcccgcctcaacatcccatagtgttgggattacaggcgtgagccacggcgcccgctatagaatctgaatatttttaacccccctctttactgacaagataaagacagagatagagagatgcatatagggaggaagagatctccttagaggagggaagaccaccacagctagccttgttttgcaccacacagatctgattagaactagaattagttgggctggcaggacccaggggcgagcagagagttcctgaaggaagaggagacaataactagcaaaaatgagtctttcctgtaagtttgggactttgctaagcgctatattatcatctaatttattcataacaacaacccaatgaggaaggtactaatattactcccatttcacagaggagcgagttgaaagtcacaaaaatgaaacagcaaacgcgccgaagtcaggcagcaagtaagtggcagcaccagaactcgaaactgcctcggagcatgcactcttcaccaccccgttccaccttgaggtcggattccgcacgccgttcgcggcattcccaccttcctacgtgggacagttcccggtactgaggcatggcgctgtccagccctcaggcccgcagccgtccgcaagcaggagaacgcggccccgctgggcgatcctgcccgaaggcgcccgaactgcggcgcgcggccgggtcctggcgggcgggtcgagtctccccaaggcggccatcccaagcagctccccggatgtccctcagacccgcgcgctaggctcaactcagaaaggcgggaggcgcgaagcgagatcggccttgcccctcgactgtcccctcatcgctccccgtcctctattccctcccaaatagcccccggcaaataggttacacatcttcacctgtcccagaggtggtgactgctctagtgactgacgctacgctcctccaaccaggcaatggcaggaaggtggagccttcctaagactgatggcttcctttctccaatcccggtgcagctattctccggccatagtctcggcgcccagcggagagcgacaggtgggagctgcgttacttcggcgcctcttgcatccttgacgtagaagtttcaccaagcgcagggtgaagtctactccaaatttgaccaattcttgcgggtcatcacttcagcagtcattttattcagaagtggaaatttcccggccctttcccgtcacctcagatgagggcgggatcaatggtactcccacaggccaattgtaccacgcgacgtcccgcgacaaagtgaccgacactttatggcgccaatgaattctcccattgttcggggtcactatgactgaccacaaggccaactaatccactttaaggtcgtgacgcgatagtcaggcgggttggccaatagacataggaaaagagcggaagtcagctggtgaagagtgggaggcgggtgttcgcaaccgcctaggcctgcgcgggtcaacgcagcttggcggctgcgagccagcgagcggcgcgtgacgaagagcctgagcgacgggtcactttggccaatgatctgcagccgccagggtattgcagccagtggcgagtcgagggggcgggaggcagcaggttaggcagtgagaagttagtggcgctgctgggacgggggaaaggagacgcttcttcctcttgctgctcttctcgttcccgagatcagcggcggcggtgaccgcgagtgggtcggcaccgtctccggctccgggtgcgaacaatgctgactgatagcggaggcggcggcacctcctttgaggaggacctggactctgtggctccgcgatccgccccag

SEQ ID NO: 34488 - DNA, 2300 bp, Homo sapien
aaggcaggggaatcgcttgaacccaggaggcggaggttgcagtgtgccgagatcgcgccactgcactccagcctggcgacagagcgaaactccatctcaaaaaacaaaaacaaaacccgcccctttttccccagaacccaaaagaagttaatgcctaccatcccaggttgctcagacctaaaaatgtgtacacattagagtacacacagaagagttaaagaaatgaaggacttcactgcaaaggcagagtgaaggtgtccagccgggcacggtggctcatacctgtaatcccagcactttgggaggccgaggcgggcggatcacctgaggtcaggagttcgagaccagcctgaccaacatggtgaaaccccgtatctaataaaaatacaaaattagtcgggcgtggtggcgcacgcctgtaatcccagctactcgggaggctgaggcaggagaatcgcttgaacccgggaggcggaggttgcagtgagctgagatcacgtgtattctagcgtggacaacaagagcgaaactccatctcaaaaaaaaaaaaaaaaaaaaaaaaaagaagaggtttccacaggttgccccactttctccaagcctaaaacctccgagttcagctacccagctattccgaagctcagggatgccctggaacttccttttcctgtctaacttcacaaaaggtcccagaaggaggagtcacgtgatttttcagggtaaaagccgagagatccctaatactcaaacctgtctcaaactgaagagggagaataagaaccgtccttaagcacacaggtaagacacacacaaggcagaaggcaaataaacgtatccctcaactctgaggagaggcaaagaagagaaacgatctttgcaccagctctgtctctgtctctgtttgtctctctcagtaccaagggcagggactctggcaagaccccgccccccacccccaactccaaagcagggtgggcgggaggcagcctgaggagtccctgttcccgcgcgaagctcagagaccaaaggactccctattgtgggtctacgaatggtgacgggaacctgtcccgctcgagctaaagagtaagccgagggctcactaggccctcaccgcggccaccgccgccatggagccgaccgctgtcacagaagggctccaccagggaagcgggaggatggccccggcccagagcctacccaaagagaattcacgcctcacaatgtgtgggaggcgagggtcccggagccttacctcggacacttcgtcctcgtcactgccagaggcaccacctccacccccggtcctcagcacggcagccgccaacttgaaatccagcgccgcgtcccctccgcccgtaccgctgccgctgccgccgccgccgctgctgccgactcccgacgctggcccggcctccccaaagagcctcacggtgcggatccccagaccgacccctcccggcggaggcggctccgaggccccagctggggcggatcgcggagccacagagtccaggtcctcctcaaaggaggtgccgccgcctccgctatcagtcagcattgttcgcacccggagccggagacggtgccgacccactcgcggtcaccgccgccgctgatctcgggaacgagaagagcagcaagaggaagaagcgtctcctttcccccgtcccagcagcgccactaacttctcactgcctaacctgctgcctcccgccccctcgactcgccactggctgcaataccctggcggctgcagatcattggccaaagtgacccgtcgctcaggctcttcgtcacgcgccgctcgctggctcgcagccgccaagctgcgttgacccgcgcaggcctaggcggttgcgaacacccgcctcccactcttcaccagctgacttccgctcttttcctatgtctattggccaacccgcctgactatcgcgtcacgaccttaaagtggattagttggccttgtggtcagtcatagtgaccccgaacaatgggagaattcattggcgccataaagtgtcggtcactttgtcgcgggacgtcgcgtggtacaattggcctgtgggagtaccattgatcccgccctcatctgaggtgacgggaaagggccgggaaatttccacttctgaataaaatgactgctgaagtgatgacccgcaagaattggtcaaatttggagtagacttcaccctgcgcttggtgaaacttctacgtcaaggatgcaagaggcgccgaagtaacgcagctcccacctgtcgctctccgctgggcgccgagactatggccggagaata

SEQ ID NO: 34489 - DNA, 2300 bp, Homo sapien
gctgtgttacagtatagctcaatgtttttaggtctgaagttaaagattcattttgtaaaattatagtacatcattagataataaaataagttattttaactttactgtctttattaggctatatttatttggtgtccattgtgaaaattgatgaccaactagccagatatgccaaataatgtagtccagatactgtggtccttttttttataaatgtgtgatatcctagtggttaaaagcatggactctgtaggtatgtggcctgagtttgaaaccttattttttttgtttgttagctgtgtgaccttgaagaagtacttaatctttctgttcctgatgtttttctttatctacaaatatgttaatttttcctggctatacatatttgcatattacagtaatatatatagtatatatattatctgtatattatacaaattacatatatgccatacatgttatatgtatatacgtatatatgtatatgatatacattacatatattatgtaaataatatacatactacatattactcatgagtactcatgttcatatttacatatatacacatatgtacatttagcaaaataagaatcatactgttttgaatcttgtgtattttatttaattttatgaatattctcatgccattaaatatgcttcaaaaactttttttttaattttttatttcttctcacagttgagccagtggtcacaaaaacattgtttttaatgactgcatggtagtccatcatgtaaatgtacaacatgtatttcccaaattctgtattataatttttcctcatttttggaatttcagttaatgctgcagtgaacatccttgcacactaatttttgtctggctttcagaaaattttttagtgagctttttaaggtattttgatacacgtttccaaattgcttcccagaagggttgtatatattttatttaagaaaatacattttgaattaattttatttgaaattggagggttacatgtttatttttgtaagttgatttttgcttataccattcattcatttcaacaagtatgtattaaattcatactatgtgccaggtattcgtaggcccaacgtatagcactgtaaacaaagtacagtttttaacctcatggagtgttcctgtctaaaggtctccaggtatcagtgggttagtttttattttccctcatttcagagtcagaattgaataaattatttagaaaagaggaaaacttttctcttaatgacctatctatgctatcaagtttgttgttgttgttgttgttgttgttgtttgttctattctatctagtctatatggattttctcagggttatgttcatgtacttgtttcaataaaaagtaaatgctttttttttttttgagatggagtttttgctgtgttgcccaggctagagtacaatggcacgatctcggctcacagcaacctgcgtcttctcctgggttcaagcaattctgcctcagtctcctgagtagctgggattacaggcaccacctcaccacgcccggctaatttttatatttttagtagagatgaggtttcaccatgttggccaggatggtctcaaactcttgaccccaggtaatccccctgcctcagccttccaaagtgctaggattacaggtgtgagccactgcgcccagcccctgcttttcttttttcagtattaatttttttttttaatagatatggggtttcaccttgttgcccaggctggtgtcaaactcctgagctcaagcgatctgcctgtctggccctcccaaactgctaggatcacaggcgtgggccactgtgactggccttaatattgcttttcatgctctgtattagtcacagaatatacaatgctcttgaggaaacttcagtgtatgtgtgttatacctgtagtcatgtctgaaggtaaacagtcacaatgtccttcaaagtccattcccatactcccttgtttctataataatttttctgcttatatttaagttctaattaagaagtcatattaccttaaattgtagttattctaatcatattgatatcagtttcatggatattgcatctttatttcattaacaggttgaatcatttattttggaccaagaagatctggataacccagtgcttaaaacaacatcagagatattcttatcaagtactgcagaaggagcagacttacgcactgtggatccagagacacaggcacgactagaagcattgctagaagcagcaggtactttattttttgttttatctttttcatatctttaaaagtctagatct

SEQ ID NO: 34490 - DNA, 2300 bp, Homo sapien
ccatctcacaccagttagaatggcgatcattaaaaagtcaggaaacaacaggtgctggagaggatgtggagaaataggaacacttttacactgttggtggtactgttgactagttcaaccattgtggtagacagtgtggcgattcctcaaggatctagaactagaaataccatttgacccagcaatcccattactgggtatatacccaaaggattataaatcatgctgctataaagacagatgcacacatatgtttattgcggcactattcacaatagcaaagacttggaaccaagccaaatgtccatcaatgatagactggattaagaaaatgtggcacatatacaccatggaatactatgcagccataaaaaaggatgagttcatgtcctttgtagggacatggatgaagctggaaaccatcattctcagcaaactatcacaagaacaaaaaaccagacagcgcatgttctcactcataggtgggaattgaacaatgagaacacttggacacaggaaggggaacatcacacaccagggcctgttgtggggtcgggggagcggggagggaaagcattaggagatatacccaatgtaaatgaggagttaacggatgcagcacaccaacatggcacacgtatacgtatgtaacaaacctgcatgttgtgcacatgtaccctagaacttaaagtataaaaaaaaaaagacctacataaattttgacattaaaaatttgaaattaaagaaggatatttatggtgataggtagaattgatacccaccatgagaatattttattgttaattgacttactgtctatgcagataggccatggtaaaaattttttacaatgaatgtctttatttttacatcattacaaaatctttgcctcattgcaacaaggtgttgtgattaggaaaaatataggatggtgtcaatccagagacatttatgttggtgacataatcccaagtggtaacgacttcacataatttgttgtgttattttttgccatgcctttgtttctgaaatagatgtaatacggtttctacatttgaatatgactcctgagtttgagggtatgactgtatttgacctggcagtagtataatcttgttattttgaggtagcattgactatagatttcacagttttttgaacttcaaaaaatggaaatttaaaattatttggatttgtgactgttatgtcaccaagtctcattcttttggagaattttgggcttgctcaaaagttggttaaaataatttgaaaattacttaaaagcaatattgatgaacttttgataaggctcagatgagcatgataatatatatgctgtctatgctgaatcttctaatcttgtcttttttcttcctttttccaatctcttgctttcttctctcccacttaaaaaaatctcaaaacaaaaaatttctctccttctttctttacttctgaaaatctgcaggatggacatgtagaggtggcacgtttgcttttggatagtggtgctcaagtgaacatgcctgcagattcatttgaatctccattgacgctagctgcctgtggaggacatgttgaattggcagctctacttattgaaaggggagcaaatcttgaagaagttaatgatgaaggatacactcccttgatggaagctgcccgggaaggacatgaagaaatggtggcactactcttagcacaaggtaaagcagttttacttcttttagaaaaatcagttttctttggatgttttgtgttagtactggtgaagtttactacagctagcatatatatatatatatatatatatatatatatatgcatatatatatatatgcatatatatatatatatatatatatatatatattgcattgatgataaattaccctggaggaaaccacagaagcagagaagacagagatgattatcacaattcagaaaattaatatctttattataagtctcttgcaactaattttatctgtttttatactttcctaggagcaaatataaatgcccagacagaagaaactcaagaaactgctcttactttggcttgctgtggaggattttctgaagttgcagactttcttattaaggcaggggctgatatagaacttggctgctccacacctctgatggaggcatctcaggagggacacctggaattggttaaatatttgctggcttctggtatgtggctttaagatgccttattgctcagaaagacaaatacaaataatagtttatatgtggaatctaaaaacgttgagctcctagtagataatagaatg

SEQ ID NO: 34491 - DNA, 2300 bp, Homo sapien
acctaggctggagtgcaatggcgccaacttggcttactgcaacctccgcctcccgggttcaagtgattctcttgcctcagcctcccgactagctgggattacaggcatgcaccaccatgcacggctaattttgtatttttagtagagacagggttttaccatggtttgccaggctggtctcaaactcctgacctcaggtgatctgcccgcctcggcctcccaaagtgctgggattacaggcatgagccactgcacctggccagattttatccttttaaatgtacttgttttcctctgaattggataaaactaggtttattttcttcatattgcatttttgctgccaagtaaggcatatctttacataatatagtctgtaaaagctgtttacctcaaccacacagaaataaatagatggataaactctggagttctcttatgtttctttactaaagagaatacctaatcatacccaacaacaacctgctaagaatataatcaggcttatcaggaataggaacacattgattatatcctttctatgtcaaataatcctgtcatctaaaataatttcatgttgctaatctcaggatgtttattgctgcgttttacctttcccaaaaggtacttttatgcaagttaggattagattcagctggatattttctgaaaattagacaaactaatagtagtggttttacccactgacttatttttctcttaaataagataggtagaattaagaaggaagaatgaatatttctatagtcttaactttctagttgagatcttttggaattgttaaaggtagctgaactaaagttattttttccaggggtcaaaaataatttatcaaaaaagaaactaagaaaagactttgcatttagacatttttcaggtcatgttatacacagctattgaacaacttgcctttcagataacatatctggataatattctgtcttctctccatatctaggtcccctgactcttaaaatacacaatatgaagaattatatatctcttaaacattgcttaaaaaaatctgttttctttactttgagacctggctatattgccactttctagtagatcaaaaatgtctttgaaacattttgagttatatacagtggtgttatttgatgcttacattaacctgtatatatttattaatcttagtcttctagattttccattttaaaagtgatattgaatgaacgaactacagcttcatgcaacattgtggatgaatctcacaaatataatattgagtgaaagaagccagacgcaaaagagtacattgtatgattccgttcatataaagttcaaaaactaaaaccagtttggaagtcagggtagtggttaccattgggaggctgggtagtgactgaaagggagcacaagatggggcttttggtatgtggataatgttctgtttcttcctctgggtgctggttacacaggtgtgtgttcattttgtgaaaaaaattcaaactatacacttaatgatttgtatatttttttgtatctacattatacttcacaaaaaatttttaaatgatattgactatgaactagcttgatgtcaacctttgctaagattgcgatttatttttcttcaaaggtgccaatgttaacagggctacagccaataatgatcatacagtagtgtcgctggcatgtgcaggaggccacctggcagttgttgagcttctcttggctcatggggctgaccctactcatcgactcaaggtagtctacttaaaaataagtaaacaggctgtgtgcggtggctcatgtctatgatcccagcactttagaaagctgaggcgggtggatcacttgagcccaggagtttgagactagtctaggcaacataaggagaccccatctctattaaaacacacacacacacacacacacacacacacgtatgtatgtgtatatatatataaataatatgtgtatagttataaaaatatgtttgatctatcttagtgcttagtatttaatactgtttaaatgagttttgattttatatgagctgctaagaaactataaagaattaattatcatggcaattctttttcaggatggttcaacaatgctcattgaagctgcaaagggtggccatactaatgtagtttcttatctgttggattatccaaataatgttctgtcagttcccaccacagatgtgtctcagctccctccaccttctcaagatcagtctcaggtaaagtaaaatggagcttgtttgttaatataaatattcttcaacatgattagaagtttttgtt

SEQ ID NO: 34492 - DNA, 2300 bp, Homo sapien
atttatgctactatccccttttgctcactgttttctagttactggcctagaatgcactaaattttcaactgcctcagggcctttgctcactgattttcttttcctgaaatgatttcctttgctgttcacctagctcacctctctactcatctgttagctccaattttacatgtcagttctcaaagagtatttctctaacaccaaatctgaaaaaggtccctctgtttctcttttatagttgagttttgattttccttaccccaatttgtaattatatcttcaaacatgtacttaccattttaatgcctgtctcgccaactagactggtaggtccatgaggacaagagtcatgaccatctttttcagcactgtttatatacccagttgtttagcacagtgcaatttacatatagtgaaatgcatgaatcttaaggtacatggtttagttttgataaacgtatacatacatgtaacccataccccataaacatataaattatttctgtaaccctagaaggttccctcttgcccacttttagtcacttccctgccccagaggcaagcatttctctgatttgtatctccatcacactaattcttaaggatgttttagaaccttggtaggaagggaaactatgcaagcttggttacattaaaatagatatgctggccgggtgcggtggctcacgcccataatcccagcactttgggaggccgagtcaggtggatcacctgaggtcaggagttcaagaccagcctggccaacatggtaaatccccgtctctactaaaaatacaaaaattagccaggcgtgatggtaggcacctgtaatctcagctactccggaggctgaggcaggagagttgctagaacccgggaggcggaggttgcagtgagacaagagcgtgccgtggcactccagccggggcaacaacagcgagactcccatctcaaaaaaaaaaaaaaaaagatatgcttagaattgattacagatctttcaacccttgataatggcatttagaaagtgttttatttagattcaagtcctaaggctcagaaagttgtgatagtccaccttgtttagttagtgaagtagaggcaaagtaagactttgaaatttaaaaaaaaattacttattttaggactcatttcccttttacactgaggttcattttacatcaccaatgtttgtttaatagatttattctaggagatactgtttttctacaaaagctttttctaatttcagtgggattaaattcaggagaaatgttgtctagtccaccatccattcctgagcacacattcttgtcttttatgcctttctttttataagctgaatgctgatcttatttttataattttaattttaagcttaatattctatttggaagtatttgcctttttattcttaaattggtaggcatatatgcaaaatcaagggattcctttgtaattctgttgttttactttcttttattcttaagaataataatttttcttttcatgctaccttgtctaagattgttgtacttcttatagggtcatgtaaaagttgttcaatatttggtaaaggaagtaaatcagttcccttctgatatagaatgcatgagatacatagcaacaattacagataaggtaagtttaatatgctactgaagcacatttttgttctttgtggaatgatatgccaaagtgtgcagttaggaacttgttctttttatattctgaaaggttggtcacctgatctctttatgcgtttgtttctccatttgcaaaatagaggggtataatacttttgataaactattttgagatttctactgtggaccatagtcacagtgactacactaaggtactaaaccattagcctaatgagaaggcttcctaaggacatgcaggtttttagggaaatggtgtcttatttttgtgaaagattggactcaaaggataacttaatttggtttagtgacttttcagtttgaactttaacctctggactttaatgtgctcatcagcttaagttttatttggcctctttcattatatatttacataattctatttcctgctgtaggaactgttgaaaaaatgtcatcaatgtgtcgaaaccattgtgaaggctaaagaccagcaagctgcagaagcaaataagaatgcgagtattcttttaaaggaacttgatctggaaaaggtgagtgggaaaaataattttcctttttagaaattattgagggtgggggccgggcacggtggctcacgcctatgatcccagcacttcagaaggccaaggcgggtgg

SEQ ID NO: 34493 - DNA, 2300 bp, Homo sapien
gctttatttccagtcaagagaagagagcagaaagcaggctcttgctgctaaaagagaaaaaagaaaagaaaagagaaaaaagaaaaaagaggaacagaaaaggaaacaggaagaagatgaagaaaacaaacctaaggagaattcggaactaccagaggatgaagatgaagaggagaatgatgaagatggtgagaaacaaaccatctgaattaacgataaaattctcctttgtttatcaacttcattttgagtgctctttgctctagttaactctagttaaacatttgattactttattaatctgaaatggacaatgacttttatagtaaatatttgtaagtgttttgcattgtaaattaatgcagagaaacaagagggaaaacaagcgcataatttgaataaattcagttgtaatttaagtcaccttgtaaaacactgcatatatactaaaagcaatacagtgagaagtttgccacctttttttgagattcttctctaactcttcctctcctgattagaagtaaaatttctcagtttacttttagctgagattcaggctcaaggatatagaggcctgaaatgtcagtagagatgggtttagtactctcaaagagttatttattgtactgtctggcagtgcttgtagtaggcaaataattttgttctacttggattctaattctaaaatactatttgaaaaatgtcctaaattcaaattatattgtggtttgggttcatgagactagaattaagaatattaagaatattgggccgggtgcaatggctcacacctgtaatcccagcactttgggaggccgagagcggatcacgaggtcaggagtttgagaccagcctgaccaatatggtgaaaccccgtctctacttaaaaaaaaaaaaaaattacaaaattagcctgggattacaggcgtggtggcacatgcctataatcccacctactcaggaggctgaggcaggagaattgcttgaacctgggaggcggaggtggtgagccgagttcacgccattgcactccagcctgggtgacaggagcaaaactctgtctcaaaaaaaaaataaaaagaaaaaaaagaatattaagaatgttgctagtatgtgtgtcctataccaccttagacaagaaaatatattttatatttgttctaacaacaaataatagtaaatatttattaggctaacaagagcaaagattttttttgtgtgtttttttgagatgaggtctccctctgccacccaggctggagtgcagtggtgcaatctcggctcactgcaacctctgccccccaggttcaggtgatccgcccaccccagcctccccagtagcagggaccacaggtatgcaccaccatccccagctaatttttgtattttttgtagagacaagatttcgccatgttgcccaggagatcttgaactcttgagctcaagtaatcaatccacctgccttggcctcccacagtgctgaaattacaggcatgagccactgcacctggccacagtaaaagatttctttatttcagctgggcgcagtggctcacacctgtaatcccgcactttgggaggccgaggcgggtggatcttgaggtcaggagtttgagatcagcctggccaacatggtgaaaccctgtctctactaaaagtacaaaaattagccgggcatggtggcacatgcctgtagtcccagctacccaggaggcagaggttgcagtgagccaatatcgcaccactgcattccagcctaggcgacagagcaagactccatctaaaaaaaaaaaaaaaagatttctttatttcttagtgaatactggtgaaaggaaaatatgatgtaaaacactgaattattatgaattatcaaatatattctgtcagaatttgttttgagatctgtgactcagtatgatttttattctttttaacaatttcagtggagcaagaagttcccatagaacctcctagtgcaaccaccaccactacgattggaatctctgcaacatctgcaacattcacaaatgtgtttgggaaaaaaagggccaatgtggtgacaactcccagcaccaatcggaaaaataagaagaacaaaacaaaagaaacccctcctacagcacatttaattttaccagaacaacatatgtctttagcccaacaaaaggcagataaaaataaaataaatggagaacctagaggtggtggtgcaggtgggaatagtgattcagataacttggacagcacagactgcaacagtgagagtagcagtggtggtaaaagccaagagttaaattttg

SEQ ID NO: 34494 - DNA, 2300 bp, Homo sapien
tatttgcatgctttgattttatctatgtcatttttattgattatagtctaatttttggcatctgaatccattttaatactaaaataaatgatgggttctttgctctatttctgtttttctgactcattgattatttgatgtgccaaagtttaatacgaatatttcagcgtaactctggctataaaggaatagtctcttgagtttctatcttaaaacttatcttttattgtacttgctatttgtctcttcttagacttgaaggtgaagtgactcctaattccttgtcaaccagctacaagacagtgtcattgccattaagctctccaaacataaagctgaatctcactagccctaaaaggggtcagaaaagagaagaagggtggaaagaagttgtacgaaggtaaatagaattagttccatctttttagctttcatatattttccctttctcatgtgagatggctacctagttaattaatgaataatttgaatgtggttattattttaaactgcattgccacactaaatccagaatatgctaaagcaaaattagaagcagtatgtaaattttgcatgcatattttatatgacacaagaaattttggcttttttggataacctcagttgctttttatgtagttcaaatgtaaaggctttctcttgctttttttctttctcatgtctcagtaattctagaactaaagtactaataatcaactttagattcagaatacatgtcagctcatcattgacctgaggctttattttttattgctaagtatgagctgttgatactggtttaaaatgaatatgctagcatagttattctgtgtggattttaataatatggtattcattattttaacagggtcattgcagtttagttgatgtgtaatattttgggcagatttgaatgcttatattgtgagtgatttaaatataatttttgttttcaatggcagtgtaatttttaaaattaggttctctgaaactgcagagcaatgtaatttttaactttactaaattcaattcaatattacaagagatcaatttctaaaataaaaacttttaataatttcctctttagcatttaagaaatgttattctccaaaatgtccatgaacatacttactaagacatctttcttaataaagagacatttaatttcataagctcatgtgtattcttcattttataggtcaaagaaattgtctgttccagcctcagtggtgtcgaggataatgggaagaggaggatgcaacatcactgcaatacaggatgttactggtgcccatattgatgtggataaacaaaaagataagaatggcgagagaatgatcacaataaggtaattgtgcaaaatgtatactgctagttctgagtagaaattataagaagcatacctttgtcaggtatggtataattaagaactttatttgatggttaagattacctttttttttttttttaatgtttttggtcttgtttctgtttttttttttcccttaggggtggcacagaatcaacaagatatgcagttcaactaatcaatgcactcattcaagatcctgctaaggaactggaagacttgattcctaaaaatcatatcagaacacctgccagcaccaaatcaattcatgctaacttctcatctggagtaggtaccacagcagcttccagtaaaaatgcatttcctttgggtgctccaactcttgtaacttcacaggcaacaacgttatctacgttccagcccgctaataaacttaataagaatgttccaacaaatgtacgttcttctttcccagtttctctacccttagcttatcctcaccctcattttgccctgctggctgctcaaactatgcaacagattcggcatcctcgcttacccatggcccagtttggaggaaccttctcaccttctcctaacacatggggaccattcccagtgagacctgtgaatcctggcaacacaaatagctctccaaagcataataacacaagccgtctacctaaccagaacgggactgttttaccctcagagtctgctggactagctactgccagttgtcctatcactgtctcttctgtagttgctgccagtcagcaactgtgtgtcactaatacccggactccttcatcagtcagaaagcagttgtttgcctgtgtgcctaagacaagtcctccagcaacagtgatttcttctgtgacaagcacttgtagttccctgccttctgtctcctctgcacctatcactagcgggcaagctcccaccacatttctacctgcaagtacttctc

SEQ ID NO: 34495 - DNA, 2300 bp, Homo sapien
tacaaaattagctgggtgtggtggtacatgcctgtaatcccaactactcaggaggctgaggcaggagaatcgcttaaacccgggaatcggaggttgcggtgagccaagatcatgccatttgggcggcaagagcgaaactccatctcaaaaaaaaaaaaaaaaaatccacaactggctgggcacggtggctcatgcctgtaattcttgtttcggaggatgcctgtttgggaggatcgcttgggcccacaagtttgagaccagcctgggcaacatagtgagaccccgcctttacaaaaaatttaaaaattagccaggtacagtggcatgcacctgtggtcccagctattgaggacactgaagtgggagggtcacctgagcccaggaggttgaggctgcagtgagccatgattgtaccactacactccagcttgggtgacagtgagaccctgtgtcaaaaaaaaaaaaaaatccaaaatctcacccagaccaatactgtatcagaattatcattttaacaatatctccagatgatttatatgcacattaaagtttgagaagctggccaggtgtggtggctcacaccagcactttgggaggccgaggcagataggttacttgagctcaggaattcgagaccagcctgggcaacatggtgaaaccttgtctctataaaaaatccaaaaattagcccggtgtggtggtgggcacctgtggtcccagctactcaggaggctgaggtgggaggatggcctgaacccaggaggcagagtttgcattgagctgagattacaccactgcattccagcctaggcagcagagcaaaaccctatctcagaaaataaatagtttgagaagcaatctttttttaaatgagtgaagaaatcagacctaaggagaaatctgatgaagccagagctgagttaatattgataaatggatgcagtcaggtggtctatacttaatttttggtgaggggaagggacagtggaggcagtattgattttgaggaagccaaacaggacagcctgatgaattcaagatttccagcatatatacatcttcaccaatcccaccaccttgctccagcctgtcatatcactgtgtctacataaaaaaaaaaaacaaaaaaaaaactccaaggccaaactctctgacctttctttccttctaaagaccaagccctcctcactagccccctgcccctccttagttaactggcaaagagatcaaagggcaggccttctgactggtgatgcctcagctgtagcccccaaacttgactcatccttttattagtccaggtaccacttcttcagaaagatgaccagccctcactgaccttccccttcctgctgtgctccaggccatcaaggcatgtgtcacccaggctggagtgcagtggtgcaatctccgctcactgcaacctccgcctcctgggttcaacctatccttccacctcagcttcccgagtagctgggtctacaggcgcatgctgccgcacccggctaatttttgtatttttagtagagtctaggtttcaccatgttgcccaggctggtctcagactcctgggctcaagctatccacccgccttagcctcccaaagtgctgggattacaggccgtgagccaccgcacccggccttgtactgttactgtttatgggaggcagtacacagctgggcttaagggcacagtcctggaatcagatgcagtcagatttgaatcccagcttcccttcctgcaagatgtgtgactttggctaatcatagtgctttactatccaaaagttggcaaggaatgggtgaactaatacaggataaaaacgcttgccctacttcacctgcccccagctcccggctataaacagtaaatagctgagctgctgcagcactcaggcaggttggccagcgctgggccagcaggaactggaagctggtgtggggcctgggactttggacgcatttccagctttctctgaaccgggctggcttcctagcagatagggcgggaccgtcgggttgagtgacggccggtggcccgccctgggcgtgacgttgttctagtgttgttgccagcagctgcacgtggtcggctgagtccgcctcagactcagagctgcgctcctcgacctcaacgccaggcggttactttgctgctcctcccgctcgctatgtcaacgtccactagctgcccgattcccgggggccgggaccagctgcccgactgctacagcaccacgccggggggcacgctatacgccactacccccggaggtcagcgggccgggcaggggtccgc

SEQ ID NO: 34496 - DNA, 2300 bp, Homo sapien
gtgagaggtgagatcagagagaatgacagaagccaggtttgggggacctcataggtcagggtgatgagtttatctggaggcactaggaagcactggagcccgagagtgaagtcagggttatggattaggatgaccacttaagctatagtatgggtaaaagatttggaggacgtaataggaggtaggaaggccaattaggacacctttgagctgttcagatgagatgactgggagcagttgcattggggctggagtttgagttgtacacctttacccttgactagggaatctgctttgccagggactagtccccaccagtgagagatggaaaagaggcaacatagtggtacatgtaattaagagtttaggctctgcaatcagagagaactaggtttgaatgccatttctgcctttctctggctgtgtgaccttgggcaagtcatatactctctgaatctcaatttcctcttttgcaaaacagggataataacccctcataaataactgaattatacaaagcacttagcagtgtccagcctgccctccttaagtgtctgatacatgttttatgattttgttattgagctacctgggaatgctctagaaactccacatgtggctgactaccaaccttgttatcagacagaagctttggccagttccctgtcctgcagaagctttcagggagtctagaggcagaaagtagctggatcctcacattccccttctccctaggttcagtaccagaagtgtcttgtggcctctgcagctcgaggcaaggcctggggtgcccaggcccgtgcccgcctgcggctcaagcggaccagctccatggattccccaggaggtcccctgcccctccccctgctcaaaggaggggttggcggtgcaggggcaacccctcgaaagcggggtgtcttctcttttcttgatgccttccggctgaaaccctctctgctccatatgccctaaacttatctgggaaggctggggaagtaggctctgggtccatgcctaactctgtaccgttttattcctcaaggcctatagcctgtcactccttgaagccttctctgcctgtccctccgatccttgtccaccgtctatttattgcccaatttattgtttatacggatgactgggaggcactgcaccacaacgtaggaccctggctcccctttccttgggtccttgtgttccttgcccctgtccaaccctggacagttggctctacctcagtaacactttatagcaaaatcagtgcaaataaaaatccctcagtgacctcactggatgtgagtatattgggcctgggacagggctgggggctaacaccctgtgtgagatgagtgtctttgtgtctgtgcttgatgttggtggctctctgtagtcacatgacagcatgggtgtgatggagatctgacttcattcaacaaacatattttctaaggagttccctgtgccaggcactaagctgggcactgggaatgtaataaaatagtcaaggtcccaccttctaagactgtccgacagggaaacgaacaagagtcaaataaggcagaagatgtgatgtaatacacctacgaaatctcagagggttgtagggtcgtgggagctcaagtgagacacttaacctggcctgagacattccagaaggcctcctgaagaactgacatctgaactgagaactgaaggaagatgagtactagtgaggctaccggacgtgaatgtggagattgtgcagggcaatgcaagaggaggctgtagaagtcaacctggctagatcacagcggggtgtatgtggggcaggagcttctttgtttgaatttgctcctgagaggatgaggcctcctagagcactggctcctggacagcaacctcctttggtgccttgtgaccagggccctgatggttcattagatggagccttcgagtcttagggagttgccgcagggtccccacagcggctcccgacggttgtgaaccagcatccatcctccacggattccggcaacccgcctggccctggacgtgtctcaactggcccgcgtgaggggccgccccggaaatgacgcgctgccccgctggccaagcggaagtggagatggcggagctgtacgtgaagccgggtgagcgcagccggcgggctagggcactaggttgtcgccccggcctaggctgggggcggttgcggcgcttagtatggaccctctgtctcccccagccccagtataagctaacagtggagttccgggctcgcttcacacatccctcgcctccgcaggcaacaaggaacgcgg

SEQ ID NO: 34497 - DNA, 2300 bp, Homo sapien
tcatcgctgacctgggccgtcagagcttccagtgcgcagccttctggtgccagccccatgcagggggactctctgaagctgtgcaggctgcctgtatggtgagtcatgggtgggaatgggttggtgggattgccctgcagctgctctccactgtttacttgggctccgggtcggcagcctcttcagagatcacaaacctgggctgattctggttcattaatgttttggccctcatgttgtttttagtaagttttaattagttgccaatatttaaaggccaggacatttcacataataatcgctattcttgtttttcttaaaatatcaagagctctggcactcagttcacacgtgtaagtgtcagcatgcagccagagttgtgcagaagctgtgccctaaagagttggcattgttcctgtttgtctcatttaggtttatttcctggcatctgtgggcatttgagtgtgggttgcttatacttcgttagttcagtttgcccattcattcaacaaatatgggtgcctacagggtcccagacaccatagctgaccctgagaatttagtgctgtagagggcacagcccttgccttcacaaaacacttaggatagagccaagatagaccagaaataagttgtacaccactggttgatggaagaggtggcccctttaggggtcaggaaggctacctgtaagaggtgatagaaatccgacagtccaagagggaagttagccaggtgaaggggagtggggcaggtgtaccaagcacagggaaccttagctgtgaaggtgagagatattagtggatgagagtatctgaaagaatctagtgtatctggcatgcaagggggacgtagtgagaggtgagatcagagagaatgacagaagccaggtttgggggacctcataggtcagggtgatgagtttatctggaggcactaggaagcactggagcccgagagtgaagtcagggttatggattaggatgaccacttaagctatagtatgggtaaaagatttggaggacgtaataggaggtaggaaggccaattaggacacctttgagctgttcagatgagatgactgggagcagttgcattggggctggagtttgagttgtacacctttacccttgactagggaatctgctttgccagggactagtccccaccagtgagagatggaaaagaggcaacatagtggtacatgtaattaagagtttaggctctgcaatcagagagaactaggtttgaatgccatttctgcctttctctggctgtgtgaccttgggcaagtcatatactctctgaatctcaatttcctcttttgcaaaacagggataataacccctcataaataactgaattatacaaagcacttagcagtgtccagcctgccctccttaagtgtctgatacatgttttatgattttgttattgagctacctgggaatgctctagaaactccacatgtggctgactaccaaccttgttatcagacagaagctttggccagttccctgtcctgcagaagctttcagggagtctagaggcagaaagtagctggatcctcacattccccttctccctaggttcagtaccagaagtgtcttgtggcctctgcagctcgaggcaaggcctggggtgcccaggcccgtgcccgcctgcggctcaagcggaccagctccatggattccccaggaggtcccctgcccctccccctgctcaaaggaggggttggcggtgcaggggcaacccctcgaaagcggggtgtcttctcttttcttgatgccttccggctgaaaccctctctgctccatatgccctaaacttatctgggaaggctggggaagtaggctctgggtccatgcctaactctgtaccgttttattcctcaaggcctatagcctgtcactccttgaagccttctctgcctgtccctccgatccttgtccaccgtctatttattgcccaatttattgtttatacggatgactgggaggcactgcaccacaacgtaggaccctggctcccctttccttgggtccttgtgttccttgcccctgtccaaccctggacagttggctctacctcagtaacactttatagcaaaatcagtgcaaataaaaatccctcagtgacctcactggatgtgagtatattgggcctgggacagggctgggggctaacaccctgtgtgagatgagtgtctttgtgtctgtgcttgatgttggtggctctctgtagtcacatgacagcatgggtgtgatggagatctgacttcattcaacaaacatattttc

SEQ ID NO: 34498 - DNA, 2300 bp, Homo sapien
acactgttgaggcagttgacaggagccgcagaagaaacaagggacatcctcactcctgagccgctccagagtcgcttctccccggaactaaaaaggtcaaggagagtgaagaccacgcccggctgcagatcacccccacggccactcaccttgtcatccgccatcttccccgccgaacttgttgcgcaggcgcatccccgcctccctcgtgccgactgccccggccatctttacggagggcgaaggcacttccggagcatttttggaaagggggaggtgctttcctagtggccaagtacgcctctctcagatacttccacgtgaccccctcccgtcgagtctcaggctgcgtgtgagcgcactcacgaccggggcgcgatgatctcactcgtgcgcgagtgcgcgcggcgcatgttcggcgtgtcggtcttcaggcgcctgatgagttcatagttgggcggtggtgtcagcggtttcgctggcgttcgtgggcctcccccggacccacacacggaaacacgcaaccattcggggatccagacgcccgtttacacgcaccacccctgggcgggctgtgcggctcaggccctcccccgggaccggcccgtgtcccgccccgtgtcccgccccgtatttgtgcggcgccagctggccccgcagcctgcggcgcagagaggctgggcttgcaggcgcagtagctccagaggtcgcgctgggctgagagtgcgggccggcagaggctggcggggagcagccggggttatgctgggcaaggattacatgctggccatcattctggtcaactgcgatggtgtgcacggaggggcccggtgggaagaccaggagctgagggaggacgagggaatccgaaaggctactctggggctcaaagacggtgggggatacctctctgtgtagggaccagggggcgaatgaacccggtctttacatgtgatgtcttcaagattgaggagcctggatcttcagcctaagaactgacccattttggggatggagaggggattatgacagcatgttattctgaactcacaaatcatatgctccctcctctctaatccggtgttcctgtagatgacttgtggggggaccacagtctggaggtggaggctggcctgcctcctggctggaggaagatccacgatgctgcaggtacttactactggcatgtacccagcggtagcacccagtggcagcgcccaacctgggaactaggagatgcagaggacccaggcacggtaggtagagtgtgaggaggaggtctgagcccatgtgtggacctaggtctgctgttaaactgactaactcccactctacagggaacggaggggatctggggactgcggccccccaaagggagatccttctccagcctggagagttcactggaccggaggtaacgggtggcccaggcaaaatgaaaggcttggggttccatggtgttcaaaaatgcagctggacccatggtctgctttccagcccaggttctggattctgtcacatgttttgggttctgttacgttcttggctctgtcccaggttcttaactgtcagtattttgagttttatcccttgttctaagctcttgtttgtagctacatgtttttcatattcttggtcctaacctatcatgttctagaccttggccattaagtcctctgttctagggtctcttgtcccactttggggttctggtccacatattggaccctgttctattttgtgacttttattttttattttttgagatggagtctcactctgtcatccaggctggagtgcagtggcacgatcttggctcactgcaacctccgcctcccaggttcaagtcattctcctgcctcagcctcctgagtagctgaaactacaggcacatgccaccatgcccagctaatgtttgtatttttagtagatatggggtttcaccatgttggccaggatggtctcgatatcctgacctcatgatccacccgtctcagcctcccaaagtgttgggattacaggcgtgagccaccactgcacctagccttgtgacttttattctatgtcctgtgtctgggtcctatgtcctgaattttccctcaaattctgagtcacactttatgttacgttaatatgtcctgggctctaccctgctctggttttatatttctggtgctatattctgggtcttgcccctcatcctgtgcttatcaagttgtctaggcctcaccagtgtccctactgtaggaaatgtggtcctcttaacagctctgctctgtttcagtaactctctgtcctgg

SEQ ID NO: 34499 - DNA, 2300 bp, Homo sapien
aacagagcagagctgttaagaggaccacatttcctacagtagggacactggtgaggcctagacaacttgataagcacaggatgaggggcaagacccagaatatagcaccagaaatataaaaccagagcagggtagagcccaggacatattaacgtaacataaagtgtgactcagaatttgagggaaaattcaggacataggacccagacacaggacatagaataaaagtcacaaggctaggtgcagtggtggctcacgcctgtaatcccaacactttgggaggctgagacgggtggatcatgaggtcaggatatcgagaccatcctggccaacatggtgaaaccccatatctactaaaaatacaaacattagctgggcatggtggcatgtgcctgtagtttcagctactcaggaggctgaggcaggagaatgacttgaacctgggaggcggaggttgcagtgagccaagatcgtgccactgcactccagcctggatgacagagtgagactccatctcaaaaaataaaaaataaaagtcacaaaatagaacagggtccaatatgtggaccagaaccccaaagtgggacaagagaccctagaacagaggacttaatggccaaggtctagaacatgataggttaggaccaagaatatgaaaaacatgtagctacaaacaagagcttagaacaagggataaaactcaaaatactgacagttaagaacctgggacagagccaagaacgtaacagaacccaaaacatgtgacagaatccagaacctgggctggaaagcagaccatgggtccagctgcatttttgaacaccatggaaccccaagcctttcattttgcctgggccacccgttacctccggtccagtgaactctccaggctggagaaggatctccctttggggggccgcagtccccagatcccctccgttccctgtagagtgggagttagtcagtttaacagcagacctaggtccacacatgggctcagacctcctcctcacactctacctaccgtgcctgggtcctctgcatctcctagttcccaggttgggcgctgccactgggtgctaccgctgggtacatgccagtagtaagtacctgcagcatcgtggatcttcctccagccaggaggcaggccagcctccacctccagactgtggtccccccacaagtcatctacaggaacaccggattagagaggagggagcatatgatttgtgagttcagaataacatgctgtcataatcccctctccatccccaaaatgggtcagttcttaggctgaagatccaggctcctcaatcttgaagacatcacatgtaaagaccgggttcattcgccccctggtccctacacagagaggtatcccccaccgtctttgagccccagagtagcctttcggattccctcgtcctccctcagctcctggtcttcccaccgggcccctccgtgcacaccatcgcagttgaccagaatgatggccagcatgtaatccttgcccagcataaccccggctgctccccgccagcctctgccggcccgcactctcagcccagcgcgacctctggagctactgcgcctgcaagcccagcctctctgcgccgcaggctgcggggccagctggcgccgcacaaatacggggcgggacacggggcgggacacgggccggtcccgggggagggcctgagccgcacagcccgcccaggggtggtgcgtgtaaacgggcgtctggatccccgaatggttgcgtgtttccgtgtgtgggtccgggggaggcccacgaacgccagcgaaaccgctgacaccaccgcccaactatgaactcatcaggcgcctgaagaccgacacgccgaacatgcgccgcgcgcactcgcgcacgagtgagatcatcgcgccccggtcgtgagtgcgctcacacgcagcctgagactcgacgggagggggtcacgtggaagtatctgagagaggcgtacttggccactaggaaagcacctccccctttccaaaaatgctccggaagtgccttcgccctccgtaaagatggccggggcagtcggcacgagggaggcggggatgcgcctgcgcaacaagttcggcggggaagatggcggatgacaaggtgagtggccgtgggggtgatctgcagccgggcgtggtcttcactctccttgacctttttagttccggggagaagcgactctggagcggctcaggagtgaggatgtcccttgtttcttctgcggctcctgtcaactgcctcaacagtgtggagtggtgtggggagagca

SEQ ID NO: 34500 - DNA, 2300 bp, Homo sapien
ggcacagcatatgcctgagccgcatagatgccagtgcaggtgcccacagcaaagcccaatactgctgatgccctcagtttggccaccacatagccagccaggaatcccttgaggaacggggaggacaacagcgagccatcctgcagagaaaaatgcagaaggaaacttagctaggctccttcctgactgtccaggggctactcaagctgggattagagcattccaccaccagctcctcctcaccctggacaaccgtggtattttctccagatttttcccaaggttctggggccagaaaaagaaccaagcagttctgatcacacaatctcagaaccctggggtcagaaagctccaaccatagaactccaccgccacacaaggtcagagatgcccctagccctgccggtttctccagcctcatttcctagcatgctccccaactactgtagccaaatggacctcctttcacccctcatgtttataatgctacttcctaccacaaggcctttacatatgctgttctgcctggaatgttctttcctcccctcttcacctacttaaccactacttaagatattagttcatgtgccattcagaaaaattgtccttagggtgactgagaataggccctcaataatcacttgctgaagaaatctctaccatccatttaacactctcaagagcatgttgggcaataaagcctaaggcaggggtggggtgggacagtccttacctggcccactccactgttgacttcgtcttctacacgccgctgcaggctttccagctggttcttgagaaatgccaggtccttaagcttaggcagagaatcctaggacaagcgagaggctggctccagcagtctgactaagccccaccccttgctcaattccatcagaagctgggaattgggaggggatggggtgagccagaaagaccttttcctataaaagcttcctgagatggcagtggcaaagaaagacaagcattgaaaagcacagaattcaaatgagggccaggaagggactgacagatgggatctgaaccagtaacttacatcaaccttgacaagaattttatatagcaagcagtatgtaggaaaggcaggagggacagctagggacctttaattaggtccatcaggaaaccactactgactccattatgagctccttgaaagtcgtgaccagtctgtcttggctactatgttctagtgcctgacatttagtaaatgtgtgggtaatgctgagcttctagaccaatggtgagtaatggaccgaggcagtttcctggacaattttattgtcttggttcctggatgggctttacctctttcttcccaaggacatcccaaactgaatgtgagtgactggatgtgactgagaatgacaaaaaagactgtcggcaagtgtgtaagtaaatggactgagtgattttgatcgcatataagtatgaaattcagaatgtatgcaaaggagtgtttgaatgagggtggtgtgagtgtccgtgtgattggaaacatcgtgtcactgggaagaaaatttcgggagctagggaatggggtaaagtgaggagtgtttaagggtgaatgtttttgagtctgtgctagtaacgggttcgtgatggttcccaggaggggacatctgggggatccacggctcctcccgcctcgccgaatgctctccccacaccactccacactgttgaggcagttgacaggagccgcagaagaaacaagggacatcctcactcctgagccgctccagagtcgcttctccccggaactaaaaaggtcaaggagagtgaagaccacgcccggctgcagatcacccccacggccactcaccttgtcatccgccatcttccccgccgaacttgttgcgcaggcgcatccccgcctccctcgtgccgactgccccggccatctttacggagggcgaaggcacttccggagcatttttggaaagggggaggtgctttcctagtggccaagtacgcctctctcagatacttccacgtgaccccctcccgtcgagtctcaggctgcgtgtgagcgcactcacgaccggggcgcgatgatctcactcgtgcgcgagtgcgcgcggcgcatgttcggcgtgtcggtcttcaggcgcctgatgagttcatagttgggcggtggtgtcagcggtttcgctggcgttcgtgggcctcccccggacccacacacggaaacacgcaaccattcggggatccagacgcccgtttacacgcaccacccctgggcgggctgtgcggctcaggccctcccccgggaccgg

SEQ ID NO: 34501 - DNA, 2300 bp, Homo sapien
aggcagtagagcacagctgtgcttccaatcttgagattactcagcacctggtaggtgctggggtccatgtaacgctgaagatagatcaccaggttgttgttagcgccatagagcagggctgatagtgcgaagggagcagcctggcgccagggtgggggcccctggggccatgcttgccagcctaccagaagggagaaggcgcataacagtagcttggtcagctcagtcagcagcacggctgaggagggccggaagggcactcggccgtccacatggcacagtgccagcaatggggcatgggcaccgtacatggcagtggataggagtagcatcagggtccagcgggcctgcctgggacggcccaggcctggcatacccccatcctctacactcatacccacacaagaccctgggtggctaaggggcagcagggattgcaacacgtttggggaaaatcaagttatggagccagctcccaggaaggagaagccgtggaacattgccagagagaatactgaggatcagaggcatctaccaactccacagtcagggcttgaagagtaaggggctggtggtccttgaagccacagtcttggggcgagtcccatggagctaggaaggggaagaaggaatccagggtgcaggctgaggaactactgtccacaatctgcaggaagggaggcaaggatgaaggtggcaggaaagttggagatagcaaatggatgacagctggggaatccagataaagtgtctccacctgaaggctgagctgctcatcctgcctcttccatggcacctagagctagtcgggccccttgcgtagcaactgcaaatagtcccttaatgtcttctccacgttgggcacagcatatgcctgagccgcatagatgccagtgcaggtgcccacagcaaagcccaatactgctgatgccctcagtttggccaccacatagccagccaggaatcccttgaggaacggggaggacaacagcgagccatcctgcagagaaaaatgcagaaggaaacttagctaggctccttcctgactgtccaggggctactcaagctgggattagagcattccaccaccagctcctcctcaccctggacaaccgtggtattttctccagatttttcccaaggttctggggccagaaaaagaaccaagcagttctgatcacacaatctcagaaccctggggtcagaaagctccaaccatagaactccaccgccacacaaggtcagagatgcccctagccctgccggtttctccagcctcatttcctagcatgctccccaactactgtagccaaatggacctcctttcacccctcatgtttataatgctacttcctaccacaaggcctttacatatgctgttctgcctggaatgttctttcctcccctcttcacctacttaaccactacttaagatattagttcatgtgccattcagaaaaattgtccttagggtgactgagaataggccctcaataatcacttgctgaagaaatctctaccatccatttaacactctcaagagcatgttgggcaataaagcctaaggcaggggtggggtgggacagtccttacctggcccactccactgttgacttcgtcttctacacgccgctgcaggctttccagctggttcttgagaaatgccaggtccttaagcttaggcagagaatcctaggacaagcgagaggctggctccagcagtctgactaagccccaccccttgctcaattccatcagaagctgggaattgggaggggatggggtgagccagaaagaccttttcctataaaagcttcctgagatggcagtggcaaagaaagacaagcattgaaaagcacagaattcaaatgagggccaggaagggactgacagatgggatctgaaccagtaacttacatcaaccttgacaagaattttatatagcaagcagtatgtaggaaaggcaggagggacagctagggacctttaattaggtccatcaggaaaccactactgactccattatgagctccttgaaagtcgtgaccagtctgtcttggctactatgttctagtgcctgacatttagtaaatgtgtgggtaatgctgagcttctagaccaatggtgagtaatggaccgaggcagtttcctggacaattttattgtcttggttcctggatgggctttacctctttcttcccaaggacatcccaaactgaatgtgagtgactggatgtgactgagaatgacaaaaaagactgtcggcaagtgtgtaagtaaatggactgagtgattttgat

SEQ ID NO: 34502 - DNA, 2300 bp, Homo sapien
ctgggagctgtagacctgagctgttcgtattcggccatcttgactcccgaaaaacgccttttttttttgagacggaattttgctcttgtcgcccaggctgtagtgcaatggcatgatctcggctcactgcaacctctgcctcccagattcaagtgattctcctgcctcagcctcccaagaagctgggattaaaggtgtccgccaccacgcccagctaatttttgtatttttagtagagatggggttttgccatgttggccaggctggtcttgaactcctgacctcaggtgatccacccacctcggcctcccaaagtgctgggattacaggtgtgaaccaccacgcccggccccttcccaccttccatgacctcccagtagctgcataaattgaccttggcaaaacatcttgcggggaccaacaggatgcttgctgtaggagccccagtgagggctgatgtggggagggaagattctcagaagtctccggggaaggtaacccctgagctgcatgaggcctgcgccctggtggctcctctgggactcacctgaggcacaagtcggggtgcctctgtttccctcccccggagcaacagggccacactgtaccctcggcccagagagcccagtgtggattggacacgtgccagcagctcctgctctgcctcctgcagggacacacaggcacagtccactgactcaggtgccctgagcaaaggagctctggaggcagctggcactccaggatccaggggcctgagggctcccaccctcctctcatcaccctcccagacctccctacctgagcagcatcagggcccaggactgtcaaaggtgaagttttgttcctgtgggcagggctggggtcaaccatgatattcccatcttcccctgcactccccgccccactcccctcccccccaccccccaccccaacacacacacaacgcccatccacctgagtctctagagtcccaaaatgaagcaaacagaggtttgtgggccccaccaggtgtgtggggctacagctgtcctcagggcctgagaaaggtagactgcatatcagctctcatgaggaaaactggctctgggattcctgagttctgccctcaaactttgcctcagttttccaacctaaggtggcctaaccctccccctcttccaagaggctgtcctggactgcattccttctgagtataaatggggagggcatcttacctgaacccctccccgactccacttctaccaccacggtcagcatggcatgtgggttgggagagaccatgagggcccctcaaggaggctgagttgcctgggccaaaccagcccctgcgctcaccacctctccacagtccatgccctctatgcctctcagcttcccctcaataattcatgaatctcatctgagggctagggaggggtggatctggacctcgtaacctactaagggaagtgacattcccttctcttgtgagagaacactgcataagtttcttttatttttttccttttatgaaaactttcaaacatgtataacactggagagaatagtataatgaacctccaggtacccagcttcagaaattaccaaattctggccagtcttacttcttttgttctcctcccatccccagcggattattttgaagcaaatctcagacatcccagtattttatccataactagttcagtataccacagttaattttagaacgtttccatcacttcataaggaaatttggttccctttagctattgcctccctaacccaagcccactgcaccctccaaccctaagcaaccactcttctattttctgcctttacagattagccaattctggacatttcatataaatagaattatacactgtgtggccttttgtgtctgtttttttccatttagcattatattttcagtgttcatctacgttgtagcatgtctgagtacttcttccctttctactgtggataatgtttcataatagagttctgtcaccaacctcctggagtttggccaagtttcaccataaagggcattgtcctccgtgagactgcacttctgagaacagtctcaagttaagaggtccccaggccttcctcactccagatgtctacaggttttggtgttccactactccttcaggcttgacaattcactagaacagctcgcagaactcaagtaaatgctacagttactgtgtctgacactaattctctcacaccagctgagggtcctatgattcaattcaactctgatactgactacctggagttagtgtcaggtcctgtgagttaaaata

SEQ ID NO: 34503 - DNA, 2300 bp, Homo sapien
tgtcagacttcagtggcctgagttctctgaaagcagagactctgagaaagaagactagtcatcaagaccacactaaaaagatgtgtttctgtgccaaagactttactcacaaacaggtaatactatcatctccattttacagaagggaggcccaagtctcataacctcagtcgtaaagctgggattccaagactggctatctgactttgagtcagatataatcatatcttggtcctcagggatatcacagaggcctggcatggcaccagggcatggcccagtgcattggggtatgcccaacaggacccgcagggggcagtgatgagccttcttgtttggattggggacaaatctgcagctacttctttctcaattaaagaggaagtgggaatttaaaaaagactttctgccgggcacggtggctcatgcctgtaatcccagcactttgggaggccgaggcaggtgaatcacctgaggtcgggagttcgagaccagcctgaccaacatggagaaaccccatctctactaaaaatacaaaattagccgggtgtagtggcacatgcctgtaatcccagccgctcgggaagctgaggcaggagaattgctggaacctgggaggcggagattgcagtgagctgagatcgcgcccagcctgggcaacaagaacaaaactccgtctcaaataaataaataaaagtaaaaaagactttcaggccgggtgtggtggctctcgcctgtaatcccagcactttgagaggccaaggcgggcggatcacctgaggtcaggagtgcctggtcaacatagtgaaactctgtctctactaaaactacaaaaattagccgggcatggtggtgggctcctgtaatcccagctactcaggaatctgaggcaagagaattgcttgaacttgggaggcggaggttgcagtgagccaagatcacgccactgcactccagcctgggcaacagagccaaactcagtctcaaaaaaaaaaaaaaaaaaaaagactttcatatagttctttccccagaggtctagggatgtggacctgtgagggctgttgtaaatgcgtagctccttattctctgggacatttgttgtttttttgttttgttttgtttgctgtttttttcattttgttttgttttctgtttttgtctgttttttgcgaaactggtgagttactaattaatcctcattcaacatagtcccatcccttccttcctagggcacagagattgtactgaggggagggcaggagagagcaacgtgcaagtgggaaaactgattcaaaataccttgcttcacaatttcaggacagaaaatggatagtgtaagtgacccagagacttggccaatgtgtctctgttaaatacatccacttttaagaaagttagtactgccaggcacagtggctcacgcctgtaatcccagcactttgggaggccgaggcgggtggatcacaaggtcaggagttcaagaccagcctggccaagatgatgaaaacctgtctctactaaaaaatacaaaaattagctgggtgtggtggtgggcacttgtaatcccagctactcgggaggctgaggcagagaattgcttgaacccaggaggcggaggttgcagtgagccgagatcatggcactctactccagcctgagcaacagagcaagactctatctcaaaaaaaaaaaaaaaaaagaaagaaagttattacttaatcaaaggagcaaggaaaaaaaaaggaagggggaatttttctttagaccaacttccttttcttgaacctaattctaccccccttggtgccaacagatgaggttcacaatctcttccacaaaacatgcagttaaatatctgaggatattcagggacttggatttggtggcaggagatcaacataaaccaagacaaggaagaagtcaaagaaatgaatcaagtagattctctgggatataaggtagggggattggggggttggatagtgcagagtatggtactggcctaaggcactgaggatcatccttttcccacacccaccagagaaggcttaggctcccgagtcaacagggcattcaccgcctggggcgcctgagtcatcaggacactgccaggagacacagaaccctagatgccctgcagaatccttcctgttacggtccccctccctgaaacatccttcattgcaatatttccaggaaaggaagggggctggctcggaggaagagaggtggggaggtgatcagggttcacagaggagggaactgaatgacatcccaggattacataaactgtcagaggc

SEQ ID NO: 34504 - DNA, 2300 bp, Homo sapien
gattttatcctaaaaattatgggaattcagttttatgcagagaagtgaaataatgatatctttctcattttcatcacatataaaatgagaataatggtcattgtggtgaacattctgtaaagcaaaaataaaattctaaggccgccccccacaaccatctgaatggacttcctcctcagccagggctctttcaaaattaaacccgagtgaccgtttcaggccatgatgggaagtaggggttgaacgtgcctcattatacctctctaccgttaacatcaacacagactttaagtttgataagaaacattttacaacccattctctctgaagcctaggatttgaaggtttcctctgcaaataagaacttgggtctccacaatcctttatcttaacccagacattcctttctattgatttcaggtctttagagaaactcaaccaattgtcaaccagaaaaatttaaaatctacctataagctggaagccccccaccgccccacttcgagttgtcccgcctttctgttgtcccacaaaccaatgtctttctctctttccccctcccctctcttcccttcctcctttcctcttttcttttctttctttcttttctccctttctttctttctttctttcttccttcctttctttcttttctttctcttaggaataacgctcaaaatcctaagggaaattgaacactcgaacaaaggattattagcaaagcaattttacttctgctcagaggggtgtctgcttggccagtcgccatgagagcacacctgaacaaaggggcacgagagcctttattcctgacgcaagtcctgcccctgtaccctttccccattggccggggtcgggtcatacaatctgaactaatcccggttggctaaacatttgatttttttaggtaatgtgggcacgtaaaagaaagtggagaggaaaggggaaggggtgcctgtaatgaactagaaagttagtcctctttccaaataatgaaaggaatgtgagctggtactgataacgtctggtactgataacgtcttgtactgtggcgtgcctcggcatctaacgaaggcaaaaaggagaaaaaggaaaacaaaagtgtgtgtgggggggagtactatgaattaaagaataaaagattgatctaattatttgaagagaaacctcatcatatcccagatttctttctttctttctttcttttttttttttttgagacggagtttcgctcttgtaccccaggcaatggggcgcgatctcggcccactgcaatctccgcctcccgggttcaaacgattctcctgcctcaggctcccgagtagctgggattacaggcacccaccactactcccggctaatttttgtatttttagtaaagatggggtttcaccatgttggccaggctggtctcaaattcctgacctcagctgatccacccgcccaggcctcccaaagtgctgggattacaggcatgagccaccaggcccggcccaaccagtgtatttcttgaatgaactgaagtctcatatctccctaaaatatgtaaaaccaagctgtaccggaccaccttgggcacatgttctcaggacctcctgagggctgtgtcaagggccatggtcactcatatttggctcagaataagtctcttcaaatattttacagagttggactcttttcgttgacaattcaatgacgcttcaagcgtttttggcagctctcatcagtgggatccgcattaatagtgaaacggcatcatggcgcttcccgcagttcgggattgttttgaactttcatctagagcgtattgtgggtggggaagttgtgtttgctgagtagattgtgacactgctggcttgggtcactcgaggtcagggatgagagactttttttcctagaattggtaagacaggaaatcaatcagaggcagagcgacgcctctggctctggtctagtggtgcagcgtctctagccctcgccccgcccaccgtccccgcgaggcgtccactcgccgagccccgccctcacccagcacccaccccgctcctcgcgccctccccgcctgttcccgccctgtgctgaggctgcgcagtcggtgccatcttctacgcccctgggagcgttgtggctgctgtttccttcggctttcctcctcctgctccaccatgtggagccgacggcagggccgcctcaggcccacggtctgcggggtggaggagctacggcgccgccggcgggagcgggaggcaggtgtgggcggccgagggagcgcgggggtatatggcggtcggggataagtt

SEQ ID NO: 34505 - DNA, 2300 bp, Homo sapien
tgacactgctggcttgggtcactcgaggtcagggatgagagactttttttcctagaattggtaagacaggaaatcaatcagaggcagagcgacgcctctggctctggtctagtggtgcagcgtctctagccctcgccccgcccaccgtccccgcgaggcgtccactcgccgagccccgccctcacccagcacccaccccgctcctcgcgccctccccgcctgttcccgccctgtgctgaggctgcgcagtcggtgccatcttctacgcccctgggagcgttgtggctgctgtttccttcggctttcctcctcctgctccaccatgtggagccgacggcagggccgcctcaggcccacggtctgcggggtggaggagctacggcgccgccggcgggagcgggaggcaggtgtgggcggccgagggagcgcgggggtatatggcggtcggggataagttgagaccccaggctcggagccgcgggttctgggttgtggtcgtccttcccacgctcagccggctcctctgcccccagcactgcggaaggcgcggagggagcagcagctggtcagcaagaggctgctgagaaacgacgccccagaggaagctggagagggatgtgtggctgcgatcctcggggaaaccgaggtgagggggcaaggtagggtgcgctggagtccacgcccgctggcgccagactcccgggagtactcgaggtctgccccaaacctgaacgcaatccactctacacttccacgcatccagtgggtcaagccagaaacaggggaatcatcctgcacaactctttgacccacaaccccatatcgatccatcatcaagtcctagttgtttacctcctgaagagctttggagtctttacatgcctcaccatcgaagctgccaccaccacctcctctctggatactactgcagtctcctaaaaggtcaccctgcatctatgcttgtcaccgtcactacgtcctttaaaaacacgtggagaccaaaatctttcctgtgccttgcaaagcatagcatggtctagcctcttcctaactcaaattttatcagttttctcatcctacccaccgtcctctttttagttcctgcaacgatatatcggatttgtgtctcaagcccttggcattcgctacgtctaacgttcgtttcttttggtattctgtcttgagagcctattttttttcttttcttttctttttttttttttgagactctcgctctgtcgccaggctggagtgcagtggcatgatctcggctcactgcaacatccgcctcccgggttcaagcgattctcctgcctcagcctcccgagtagcagggattacaggcgcgcgccaccactaatttttgtattttaagtagaggcggggtttcatcatgtttgtcaggctggtctggaacacctggcctcatgatccacccgccttggcctcccaaagtgctgggattacaggcgtgagccactgtgcccggccacctacttgtttcttgtagaatattaatcattatctaatggtttgtctattgttatttctccaactagactttaattgcaggaaaacctagatcctgtgttgtcattgaaaacccggttgcctgcacattatctggcatatagttaagtactcagtgtttattgaatgagtgaatgaaaggatttattcagtaagcattgagtatcccctgtatttgtattatgtttacgtacatagtttaccgtacataccatgttgacatatatattatcaacttattcctaggtcatactattccattgtatgcttactttatgccaggacactgtgctggtcactgaggtacacaaagatgaaaggatagagtccttttctttgaggtgctcacagcccggtgaagaagacagatgtcacaagggaaggaaacatgaggaacaagagaaactcctaagtctctcaaaaagagctaacttcccagaggaaatgaggagcagaaacctgaagagagtgggaagctggagagggtatccaggcagaagaaatagcatgtgcaaaagctcggaaatgtaaaaaaaagaaaaagaaaaagctcatgttaggctggttgttgttagagtgtaggttgcatggggagaatggctagaggagtaggttttgccaggctgagaggtttaaatatccttgaaagaaccctgtatgaaggcaggatagatattgttattctcattttcaggtgaggaaacttaggttcaggtcccatatggagtaagtggcaggtatggtattagaactcagttctgattctctgt

SEQ ID NO: 34506 - DNA, 2300 bp, Homo sapien
gcgcgcgccaccactaatttttgtattttaagtagaggcggggtttcatcatgtttgtcaggctggtctggaacacctggcctcatgatccacccgccttggcctcccaaagtgctgggattacaggcgtgagccactgtgcccggccacctacttgtttcttgtagaatattaatcattatctaatggtttgtctattgttatttctccaactagactttaattgcaggaaaacctagatcctgtgttgtcattgaaaacccggttgcctgcacattatctggcatatagttaagtactcagtgtttattgaatgagtgaatgaaaggatttattcagtaagcattgagtatcccctgtatttgtattatgtttacgtacatagtttaccgtacataccatgttgacatatatattatcaacttattcctaggtcatactattccattgtatgcttactttatgccaggacactgtgctggtcactgaggtacacaaagatgaaaggatagagtccttttctttgaggtgctcacagcccggtgaagaagacagatgtcacaagggaaggaaacatgaggaacaagagaaactcctaagtctctcaaaaagagctaacttcccagaggaaatgaggagcagaaacctgaagagagtgggaagctggagagggtatccaggcagaagaaatagcatgtgcaaaagctcggaaatgtaaaaaaaagaaaaagaaaaagctcatgttaggctggttgttgttagagtgtaggttgcatggggagaatggctagaggagtaggttttgccaggctgagaggtttaaatatccttgaaagaaccctgtatgaaggcaggatagatattgttattctcattttcaggtgaggaaacttaggttcaggtcccatatggagtaagtggcaggtatggtattagaactcagttctgattctctgtccactccactgcaaggtagatgcttattagttgcattagtgtgaatgacaagttctgaaggtgtgatattggaaggctcacaggtgaagtgggcagagagagacttaggacttgctttctgtgaaccgtgtgttctcctttccctgccctgaactccaggtgcagcagttcctgcggcaagcccagcgggggacagaggaaaaggagagagagggggctctggtcagccttcgtcgaggcttgcagcaccctgaaacacagcaaaccttcatccggtcagtgtggatggtgtggtggagggaggagttggggctctgagggatggaccacaagctaagcagggctctggtactcactcacataggctggagggcagcatgcggaccctggtcgggctcctgaccagcaaccaggccctgctgcagcttgaggcggctcggtgcctgcatgagctctctcactccgagcagtccactgttgctgaggcctgcctgccagccacttcttacctcctcacctacctctccagtcacagctcagacttcatagtaagccctgtcccttcctatcttgttcttggtttagattttaaaattgtgcttttgggaccagtttgagctggcaggtaggaggaagaaaacatgtttgcccttatgcctacagccatggctacacccatcatctccccaccctcttgtgagccgcaaggatagctgctccagcgtccccatcacctcccctccccatctccccacacgcagcctggcatgaaacaggccaagcccagtgcttttgttgcctgttctcaggagctgtgtctgtatacactgggtaacctgatcgtggagagtgaggctgtgagaaggcagctcctgccacagggcattgttccagccttggctgcctgcatccaggtgactcctttcttcctccctgggcaacccttcctttgctcctccccacatgctccatctactttggttaggtagctccagcctctgccctgtgccaaggggctgaaagtctctgaagacctgatgacccagcttccagtcagatccttaccctgtctacttccagtccccccatgtggctgtgctggaagctctcggatatgccttgtcccagcttctacaggctgaggaagctccagagaagatcattccgtgagtaaaattgtctttagatgtgcagccagaggtgacccactcagtagtatagctcccggatgcctgaatgatttccaaagctgttgcacattttaaattcatgtgtctggctaggaagggctttgggtttggacactttcccatctgggcagggctttgggtttggacactctc

SEQ ID NO: 34507 - DNA, 2300 bp, Homo sapien
gtctttaactattctgcaccctggaggctaccaaagtaaaataaaagatctttgtctttatcttagtcttgttaagacaggaagagtattaaagagatatgatcaaaatacatttggtatgcctagaattaatacaataggtctcaaacacatctaggaagcccaagtccaaatagaattttggctgattctggatggccgcaatgggttgtttcagggaagctttcgggggcactgtaggcatttattattaactacggtgagcaatgtattgcatgggtccagcctcagctgggagcccattctctctctttttttttttttttttttgagacggagtctcgctctgtcacccaggctggagtgtggtggcacgatctccactcactgcaacctccacctcctgggttcaagcaattctcctgcctcagcctcctgagtagctgggattacaggtgcccgccaccacacccggctaatttttgtatgtttagtagagacggggttttaccatgttggccaggctggtcttgaactcctgacctcaggtgatccacctgcttcagcctcccaaagtgctgggattacaggcgtgaaccaccgcacccagctgggtacccattctctaggctcccataggctatctaacataatacccagcacaatacactaaagttactcgtgtctatctcctcctgtagtctactggcttttggaaggagaagcttttttccttctccaattattagtgcatgtctaatgtctactgtgtctcacagatatctactctgagaaccaatctgcttaaggtggtcactctcctccacctcctcccgtcattcccagggcaccatatagttaaaagctgtgattaaaatcctgttattcagtatgtataaacatttattgcatacctacaatgtgttaggcaacatgataggaaaatttcattttgcaatacattgccatgccagtcttagaggggtaagtgcattctaggaaggggaataaatgtaaaggctcaatcctgttaaactctagctgcatctaaagttgcagctagagtttaacaatagtgcaaaacaaagttttgattccgttttctaatctctacagtgagaaaagaagaacacgcttcctcctaactaatgaagattaaatgagttaggcagggaagcactcagcacagggcccagctctatgtgcaaaattactgagattctcacacactacctggactgacactggctacacgttatttggagaaactatattgactaacttctctcctgtctgaagcccattcttaactacaaaaacgtcagctcctggtccctacgcaggattcggtcagcctgcatacttatgttgcccggaatacaacgcatcatataaccctgcgaatataaatttcttcatggaaacaagatcaacagcaaggctaaagtccgagttctagtttctccacgggtttctgcacgaccttgggcggtcccttctcttctcaaacccttgttcccctaccggagccccagacccctggcgtcccgcactcaccgtagcgggcccagagcttgggctgcacatcggagcattcgcggattaggatgggtaggtcgggattcgccttcttcagctccacgtagcgtttctcaatgaagtccctgcggggccggagagagcgccgcgcgtgctgtgggcgggggcttccctcaacttcagggaggtcgaggtcgtgaccctggcgtcccgaagcccgcccgcctcaccacgccgcgcctcacctgacgccctggctgccgggcgagcgctgacataagtggatgcgaatctcacgcaggcccagctttgccccgactcctcgacttgctgcggccgccgccatccttgttaatatcgaagtcgccaattccaggtcttcaggccaagtgctccggtctgaccaaccgcggaccctaaagcctagcccataggctgcatgaggcaggggcggggtaaagcttggccaatgatataaaagtattgtaggaccgctgcgaggtcaatttctttgcgctcggggttggtcggagggaaaaacaggaagcggaaaggctgcgaacgcaaagcagtgtgggttgattctgaggtgcactgtgggaaagagcttgtcgctgcggtgttgctgttggagactcgattgttggtgacagcgaaagaacgataacaaaatgccggagcgagatagtaaggctcaggccatccgttatttcttccccatggcacttggggcacttggcgcattattgtagcttctgagc

SEQ ID NO: 34508 - DNA, 2300 bp, Homo sapien
ttcaagaccagcctggccaacatagcgaaaccctgtctctactaatacaaaaattagccaagcatggtggggcatgcctgtaatcccagctactggggaaactgaggcagaagaattgcttgagcccaggaggcaaaggttgctgtgagcagaaataatgccattgaactccagcctgggcaacgggaggaaaagatatgccaaaaaaggtaactgtggttacttctaagaaaaggactgaggctgggcacggtggctcacgcctgtaatgccagcactttaggaggctgaggcgggtggatcacttcaggccaggagttcaagaccagcctgacgaacacagtgaaaccctgtctctactaaaaatacaaaaaaaaaaatcagtcgtgcatggtggcacatgcctgtagtcccagctacttgggaggctgaggcaggagaaccgcttgaactcaggaggcagaggttgcagtgagccaagattgcatcactgcactccagcctgggtaacagtgagactccgtctcaaaaaaaaaaaaaaagaaagaaaagaaaagaaaagaaaaaaaaaaagaaatggactggaattggggatgttatcaaagatgattttatcgggggccaggcacggtggctcacgcctgtactcccaccactttgggaggcagaggcgggtggatcacctgaagtcgggatttcaagaccagcctgatcaacatggagaaaccccatctctactaaaaatacaaaattagccgggcgtagtggaacatgcctgtaatcccagctactcggaaggctgaggcaggagaattgcttgaacccgggaggcggaggttgtggtgagccgagatcgcaccactgcattccagcctgagcaacaagagcgaaactcagtctcaaaaaaaataaaaagatgattttacccttatttcctatgttttaatttgctattggaagaagtaattcctatataatgtgtaattacacaacacgtataaaaaaaaaaaaaaacttaacacctttcctgcaggaatttcccttctaatacccttatgcacttggcctgatccagttaaggctcacagagataaagggccagcgggtataattttttaccatccttgatgacaagacattcagaattctttcaccatcaccaccacttttctattcattgcccaactcatttccatggtcctagcacaaaatactcactggtggaaggagtgaggatcatccacatcgtggccatcgggggccaaagggttggagaacggctcacctgacaaaaaaaattgacgttaatttaatcagtctcttacgtgtcagatcctatgcaaaaatttgagatatagtagtgaacaatacagaacaaaagttagaacagcgacagtgtcaacacaatgtaataagtgctgaaataggaaactacaagaagctgtgggagcacaaagcagaggaccctaatcctgcgctggaggatcagagaagacttccggaagatcacgtctaaaatactacgtaaaagataaatacgcgcaacccaggattaagtatggggacaggactgggggaaagcgatccacgcacaaaagccgcccatcatcacttggagtaggagtgaggactggggacggagtttggagctgtcggcctcacttaggaccctgtggcttctccgggctcaagcgtcacacatacatacatacacacacacacacacacacacacacacacacacacacccggcttaagctcagaagctacaataatgcgccaagtgccccaagtgccatggggaagaaataacggatggcctgagccttactatctcgctccggcattttgttatcgttctttcgctgtcaccaacaatcgagtctccaacagcaacaccgcagcgacaagctctttcccacagtgcacctcagaatcaacccacactgctttgcgttcgcagcctttccgcttcctgtttttccctccgaccaaccccgagcgcaaagaaattgacctcgcagcggtcctacaatacttttatatcattggccaagctttaccccgcccctgcctcatgcagcctatgggctaggctttagggtccgcggttggtcagaccggagcacttggcctgaagacctggaattggcgacttcgatattaacaaggatggcggcggccgcagcaagtcgaggagtcggggcaaagctgggcctgcgtgagattcgcatccacttatgtcagcgctcgcccggcagccagggcgtcaggtgaggcgcggcgtggtgaggcgggcg

SEQ ID NO: 34509 - DNA, 2300 bp, Homo sapien
agtggtgcgatgtctgctcactgcaacctctgcctcccggggtcaagcgattcttctgcctcagcctcccaagtaggcactataggcactataggcacgcatcaccacgcctggctaatttttgtattttcagtagagatggggtttcactgtattggcctggctggcctcgaactcctgaccttatgatgtgcccacctcggcctcccaaagtgctgggattacaggcatgagccactcttcctggccttattttattatttttatttatttatttattttgagacgagtctcgttttgtcgcccaggctggagtgcagtgatgccatctcggctcactgcaacctctgcctcctgggtttaagcaattctcttgcctcagcctcctgagtagctgggattacaggcacctgccatcacacccggctaatttttttgtacttttagtagagatggggtttcaccatgttagccaggctggtctcaaactcctgacctcaagtgatccgcccgccttggcctcccgaagtgctgggattacaggcgtgagccaccgcacccagccttgacccacgttttaaacagaagatgtttaaaagggcattaagagctggagaggatggtgaagttcagtggaaattaactgaggagtatgttcctgactcctctctttaaatttcagggaagctggaagagaagaaacctcctgaggctgacatgaagtatgtatcctagcccctggcatctgatcagagggagggggtctgtacatttcttgtgtctggcattttggggaggtgctgacatgagaatctggagaaatggtcagggggagtgaaggtgtatgtgtgaatttggccagctagtgatctccattttcccagtatttttgaagacattggggattacgtaccctccacaaccaagacacctcgggacaaggagcgggagagatatcgggaacgggagcgtgatcgggaaagagacagagaccgtgaccgagagcgagagcgagaacgagatcgggaacgagagcgagagcgggaccgagagagagaagaggaaaagaagagacacagctactttgagaagccaaaagtagatgatgaggtgagatgtgggcccttagtaccaggtgatggagttgcccctctctggaaatgtgagcaaggttgggtaaggaattgtttcaaacttgggggagggatgagtaggaatctctcatggtaacactaacttcacattttgtgttctttccagcccatggacgttgacaaaggtgagttgtacacacagcatctcacagttgctctagcagtcctgctttcccctggtagggctcagagctggcaacggtgggattgggggacctcctggttctgggttcttgtaagaactgtgtcttgctttattgaataggtggagttccctccaccttcctgggccatggcagggcatatttgctcttagatataattcctgtggccctggggttctgaggaggtgaggtagaggtcaagtatggaatgttctggataccctaccctcatctcaaccagagtgactcattaattggagtttgtttaaaactttgttagacaaaagggttctatgccttaaaaatgttttttaagtgtgttgtggggaggaggttgtgagagcctcagttcaaggtctgggctgagttctcttttctcctaggacctgggtctaccaaggagttgatcaagtccatcaatgaaaagtttgctgggtctgctggctgggaaggcacagaatcatatcctttattttaatacgttcctgggttccagagaactggtctctttactccaaccccccctgcctccctgctccctcctaccctgcccctctccttcccttttacgctgaattttgacagaatgaaaccatcccttgttccttcccagagcacccataacagctcacagcccactcagaattttcatgttggggcttctagcccttggccccctcctggctgaagctttacagcaataggtagaatcctgtgtagtgttttctttaacatagcatatgctgaagaagccagaagacaaaaagcagctgggagatttctttggcatgtccaacagttatgcagagtgctacccagccacgtatgtgaaacctggttaaggaagggaggctgggatgattgggaaacaagttgggggtgaaatggaaatttgattcgctaagtcccagggctacttcttttttttttttttttttttttggagacagagtctcactctgtcacccaggctggaatgcaa

SEQ ID NO: 34510 - DNA, 2300 bp, Homo sapien
tcaggcctagtccctggggaaagatttcctggggattgctgtcagcctgatgggctgctaatctgatctccaggctatgaaggactgggctctggatgaaggcatctaatgaaaatcacttatgggtgggaaccaaaaccttttatgagtttatgtactatgagctttattaatgttgagtacaaatcactgtctccttggctaaaggtgtaaccttagggaagtgctttgggtttagagctgatatagtgtggccctgcaggtacaggaattcctatcctagaccagaagggtttggtgcccttcatcaccctgaaacatttgccaaggcccagaataggtctgttgacctttgaatcacaccattcccttcccttttcttcccttctgctcattaccagcactttggcctggtgctcatcattaggtgtcactactgcttcctggctggatgccacgctgccactgtctaccctgagcccaagatttgtggcctcaccagatccaagaaagctagaaagtcaccttagccattaccttgtctttgattatattcaccttggtaggacaggtttttgtgaggaagccagtattgtgcatggcatgtaagaggctgaaattgggccttgctgcaatagcacctagaatggctaatttcagacaaatgacaccatggttctatggatgtaggtaggcagtcccaattattaaaaatggtcacagagacatggcacaggtgaagacatctggagagtcactaaaagcaagacctggagattgtgggtttgaaattcagtttctgaggccaggctcgatggctcatgcccacagtctcagtgctttgggaggccaaagcaggagagtctcttgaggccaggagttcatgagtctatagctatgcaggaggatcgaaccgaagagttcaaggctgtagtgagctatgatcacaccactgcattctgagcctgggtgacagagcaagaccttgatttaaaaaaagaaattcaggggctgggcgccgtggctcacgcctataatcctagcactttgggaggctgaggtgggaagacacgtcaagagttcaaggccagcctgggcaacatactgagtcctcgtttctacaaaatatacaaaaattggccaggtgcggtggctcacgcctgtagtcccagcactttgggaggccaaggcgggcggatcacgaggtcaggagtttgagaccagcctggccaacatggtgaaaccctgtttctactaaagatacaaaaaattagctgggcgtggtggcatgcgcctctagtcccatctactcggtaggctgaggcaggaaaatctcttgaacccgggagacggaggttgcagtgagccgagatcgcaccattgcactccagccagggcgagactccgtctcaataaataaataaaaattagccaggcgtggtgccgcgtgcctgtagttccagctactcggaggatcgcttgagccgagcggtgatcgtgccactgcactccagcctgcgcgacagcgcaagaccctgtctcaaaacaaagcaaaacaaaaaagaaaaaaaaattcttggtaactgagcactgcttgtccagcccattgagtttctgtagacaaattgtaggaactggcacagcaaactggccacaaagacgttaggggcgtggacaccagctgcttgagctgcctgctgtcccagactcccgtatgtcatcgcgcagcgtgggattttgcggcttcctgacagcccaggctgtcgcttgacttgatcttgggtttcaccaagccacgaaggactagcgtccctctctcctatcccaagggcattaagcctgtctggatgaagtaggagaggaaagatttacacgcagttctcaactttacgtgacgtgactagggagggaattgacggtcgcaccgtctacctagcccaaacggggtcacagcaggacaaggaagtagccgatctcccagatgcggtctcttcgctccgctccacccgcaccagcagcggcccacccacctctcctgtaagaggaagaacgtcccggagacacttccggccccgccccccgaggcggaagcggagtgccaggctactcctcccgcagtgtgggtggttccgaggctgactaccctgcggcggcgcggctcgcagtccttctcagcatggaccgcacttgtgaggagaggcccgctgaggatgggagcgacgaggaggacccagactccatggaagccccaacccggatccgggacactccggaagacatcgtgctggaagctccggcta

SEQ ID NO: 34511 - DNA, 2300 bp, Homo sapien
tgcggcttcctgacagcccaggctgtcgcttgacttgatcttgggtttcaccaagccacgaaggactagcgtccctctctcctatcccaagggcattaagcctgtctggatgaagtaggagaggaaagatttacacgcagttctcaactttacgtgacgtgactagggagggaattgacggtcgcaccgtctacctagcccaaacggggtcacagcaggacaaggaagtagccgatctcccagatgcggtctcttcgctccgctccacccgcaccagcagcggcccacccacctctcctgtaagaggaagaacgtcccggagacacttccggccccgccccccgaggcggaagcggagtgccaggctactcctcccgcagtgtgggtggttccgaggctgactaccctgcggcggcgcggctcgcagtccttctcagcatggaccgcacttgtgaggagaggcccgctgaggatgggagcgacgaggaggacccagactccatggaagccccaacccggatccgggacactccggaagacatcgtgctggaagctccggctagtgggctggcgttccatccggcccgtgacctactggctgcaggggacgtggacggggacgtgttcgtgtgagagcggggcagggccggggcgccgggtctggaagcttcccgggggtggacctgggaacaggagagatgagagaaagttgcagggagacaaattttgcaagattctttgggtccaatttattcagtaacattcggctcttctatcacaccaatctgttgaaagaactggaatgtcgtgacagagcccagataccgtagtaggccaaaaagccctttaaggccttgttatttcccaccgattattatttatttacttacctatttatttttgagacggagtctcgctctgtcgccgaggctggagtgcagtggcgcgatctgggctcactgcaacctcccccttccgggttcaagcagttctcttcctcagcctcccgagtagctgggattataagcgcccgccaccacgcccggctaattttttttgtatttgtagtagagacggggtttcaccatcttggccaggctggtcttgaactcctgacctcgtgatccacctgccttcctcccagagtgctgggattacaggcgtaaaccaccgtgcccggactcctaccggattattatattgtgcccgagacaggctcagcaggcccctttaagtgatttttcaaaccacaaatcttggctcacgcctgtaatacccgcactttgggaggccgaggtgggcgggtcacctgaggttggagctcgagaccagcctgttcaacatggtgaaaccccgtctctactaaaaatacaaaaattagcccggtgtggtggcgcgggcctgtaatcccagctacacgggaggctgaggcagaagaatcacttggattcgggcggtggaggttgcagtgagccaagatcgtgccactgcactccagcttggacaatagagtgagacactcccttgattaaaacccttcaatggtctgcttttaggatttagtacaaatttctcaatcctgccttcaacgccctgaccatctgtgctcattcatccataccttttaaaaatacgtcttgggccgggcgtggtggctcatgcctgtaatcccagcactttgggagaccaaggtggggtatcacctgaggtcaggagttggagaccagcctggccaacatggtgaaatcctgtctctactaaaaatagaaaaattagctgggtgtggtggcgggcacctgtaatcccagcttctcgggaggctgaggcaggagaatcgcttgaacctgggaggtggaggtggcagtgagccgagatcgtgccattgcactccagcctgggcaacaagagcaaaactccatctcaaaaaaaaatctcgaaacctcagcccatttgcatgtgctattctgtccggaaaactcctttcccctcacttttacctactatctctgagtttccaggatctcttccctcttcctctctccccagactaaaattggttacctgttagatgctgccatggcaccaggtgccatggtacctttcccttaataatgaatggttggtaaccatatgtccatttgtgtaattatttgaatgctgtctccttcactaatgtttttcaaacgtctttgaccttgcctcacagagaaataccttttacattatatatgatgctctgtgatacaattgctgattttattctattattgtgtacatgtacacaaaatgctgatcgtagc

SEQ ID NO: 34512 - DNA, 2300 bp, Homo sapien
tgcctgtaatcccagcactttgggagaccaaggtggggtatcacctgaggtcaggagttggagaccagcctggccaacatggtgaaatcctgtctctactaaaaatagaaaaattagctgggtgtggtggcgggcacctgtaatcccagcttctcgggaggctgaggcaggagaatcgcttgaacctgggaggtggaggtggcagtgagccgagatcgtgccattgcactccagcctgggcaacaagagcaaaactccatctcaaaaaaaaatctcgaaacctcagcccatttgcatgtgctattctgtccggaaaactcctttcccctcacttttacctactatctctgagtttccaggatctcttccctcttcctctctccccagactaaaattggttacctgttagatgctgccatggcaccaggtgccatggtacctttcccttaataatgaatggttggtaaccatatgtccatttgtgtaattatttgaatgctgtctccttcactaatgtttttcaaacgtctttgaccttgcctcacagagaaataccttttacattatatatgatgctctgtgatacaattgctgattttattctattattgtgtacatgtacacaaaatgctgatcgtagcttactagtccgttatatgactagaatgtgaaaaaacactgttctggagtgtaatctgtcatcggttttgttctctattttatctccaacctctagtctagggtagatgctcaacacatgtttgattttgaacaaaagatacaggttagaggcagtggaaaagttgaagatgttatgcttatcagatttacttaatgaatttaaacctcaacccctcattagctgtaatggccttgagcgtgttaacttctgtattttcatctttgaaagggggaattatacctacccttgcagaggggacaagtttgcagtacagcacctaagcagctcttcaacaaatgtaggttcccttctactactatccatatttatggtgccaggcacttgggagttgccctagacatccacctttcttcacattccacacaactttgttgcttcccttgtcttaaaaaaggttctggaggaaaattcttggttctccccttccccaccctcagccatgactattgtgaaaaggttccttttccgaggattaaattcaaacttctgcttggctcatgtggtctcatgcccaccccagcccatctttctagattcagtcatgctactctcctgctacaaggaaccctcctcattccttatctctgctgcctccagtatctggcccttgctctctgccaggcaaattctactcttgtatgatccaacccacatgtcaccaccttagctttccagggctctcttctcccttcccaagtattcattcaatttgtgaatgtttattaagctactttttcacgttcagcactgggatagagaaaatgagcaggctcagttctgcctacctggaactcactggcaattaagcatgtattcattctgccctttttgaggatctgctctgaggcaggcacttgggggtattccataaacagtactcacctcaaagttgtttacaggctggtgcctctcccccacctccattttgatcttgcctctttttcagcacgtactctcaatgtactgtaattaattgtggctttctctagctcctgcagacctgaagtgcaagagcctgctctaccttactgatttttagatttctaacttctggggctggtcttttgtcattgatgtaacaaatatctcctccacagtggtccagacccaatctttgtccaggctggggctttcaaagatgataaagaggggttgggtgggatcacaaagaaatcttgcgcaaatataccttgaactaacatatattgaaaaaagcaggacctaacatttcaaactcactgaaaatggagaaatgagatggtaaactttttgggcttagaggtgtagaagcaggaactcttaggtaggtgggaaggctgctctgtctagttggtctctgcactcaatgcaacccaggctgggtctggagtcatttaccctccttgccctctccccagcttttcctactcttgccaagagggagaaaccaaggagctctggtcatcaggtcaccatctcaaggcctgccgagctgtggccttctctgaagatgggcagagtgagtactggggaagacaaccagcaatgtggtggaagggagcagtgagcagcaccatgacctgggcaccttttccccagagctcattactgtctccaa

SEQ ID NO: 34513 - DNA, 2300 bp, Homo sapien
agtgtaatctgtcatcggttttgttctctattttatctccaacctctagtctagggtagatgctcaacacatgtttgattttgaacaaaagatacaggttagaggcagtggaaaagttgaagatgttatgcttatcagatttacttaatgaatttaaacctcaacccctcattagctgtaatggccttgagcgtgttaacttctgtattttcatctttgaaagggggaattatacctacccttgcagaggggacaagtttgcagtacagcacctaagcagctcttcaacaaatgtaggttcccttctactactatccatatttatggtgccaggcacttgggagttgccctagacatccacctttcttcacattccacacaactttgttgcttcccttgtcttaaaaaaggttctggaggaaaattcttggttctccccttccccaccctcagccatgactattgtgaaaaggttccttttccgaggattaaattcaaacttctgcttggctcatgtggtctcatgcccaccccagcccatctttctagattcagtcatgctactctcctgctacaaggaaccctcctcattccttatctctgctgcctccagtatctggcccttgctctctgccaggcaaattctactcttgtatgatccaacccacatgtcaccaccttagctttccagggctctcttctcccttcccaagtattcattcaatttgtgaatgtttattaagctactttttcacgttcagcactgggatagagaaaatgagcaggctcagttctgcctacctggaactcactggcaattaagcatgtattcattctgccctttttgaggatctgctctgaggcaggcacttgggggtattccataaacagtactcacctcaaagttgtttacaggctggtgcctctcccccacctccattttgatcttgcctctttttcagcacgtactctcaatgtactgtaattaattgtggctttctctagctcctgcagacctgaagtgcaagagcctgctctaccttactgatttttagatttctaacttctggggctggtcttttgtcattgatgtaacaaatatctcctccacagtggtccagacccaatctttgtccaggctggggctttcaaagatgataaagaggggttgggtgggatcacaaagaaatcttgcgcaaatataccttgaactaacatatattgaaaaaagcaggacctaacatttcaaactcactgaaaatggagaaatgagatggtaaactttttgggcttagaggtgtagaagcaggaactcttaggtaggtgggaaggctgctctgtctagttggtctctgcactcaatgcaacccaggctgggtctggagtcatttaccctccttgccctctccccagcttttcctactcttgccaagagggagaaaccaaggagctctggtcatcaggtcaccatctcaaggcctgccgagctgtggccttctctgaagatgggcagagtgagtactggggaagacaaccagcaatgtggtggaagggagcagtgagcagcaccatgacctgggcaccttttccccagagctcattactgtctccaaggacaaagccatccatgttctagatgtggagcagggccaactggaaagacgtgtttccaaggctcatgggtaaggagagcagccaattctgtgtatgtgcatggaggtgaagggtaaggaccaggaggtccccactgggacagagatgctccaagaagttctacatctgtgtctctagtgcccccatcaatagtcttctgctggtggatgagaatgttctggccactggggatgacacaggtggtatctgtctctgggaccagcggaaggagggccccttaatggatatgaggcaacatgaagagtacatcgcagacatggctctggatccagccaaaaagctgctgctgacagccaggtacaacttcaaagctgccttgcctcccctcccctccctgtgtgaaatgtcttcctcaaatagaccttgcgtctaagcctactgctctactctctacagcggggatggctgccttggcatcttcaacattaagaggcgtcggtttgagctgctctcagaacctcagtctggggacctgacctctgtcactctcatgaaagtacagctggttatggtgggatggaggggtgtgtgctgggggcttagtctgaggcagcttccacattgttttctctatttccctgcagtgggggaagaaggtagcctgtggctccagtgaaggtaccatc

SEQ ID NO: 34514 - DNA, 2300 bp, Homo sapien
attggggtgggctcatagtagtacttctgtgtgaatgctttggtggacccttaaggtactacatggaccagcctgggcaacatgatgagaccctgtctctacagattaaaaaaaaaaatttttttttttttttaaattagctgagtatggtggtgtgtgcctgtagtcaggaggctgaggtgggaggatcacttgagcttgggaggtcgaagctgcagtgatcacaccacggcacttcagcctggatgacagagaccctgtctcaaaaaaaaaaaaaaggtactacatggagataagcttgaagttactgtaaaaaagctacctttactcttgccctaagttatttattctgatacgtcctatgtacaagtcagtcagttcagtcctcatatctactaaaagctacctttatgcccaaggtgctagatgagaagacagggcccctgccctggtagagctgagttgggcctggtctcaaaatcccgactagagcctgctttgtttgctccttgaaggtgttagcccagctctcttttatctgccccttccccaggctttggaggagaagatacggaccacggagacacaggtgcttgtggcatctgcacagaagaagctgctagaggaaagactaaagcttgtctcagaactgtgggatgctgggatcaaggtatgggaggcaagccccagggtggcagcaaacttaggtgtgctggacacaaactgaataaaagctcacccataatggatcctgccattacttctcaaaagtagagctaagaacagggtgccagcttggacaccctctgtccctgaggacagcagaagccagccttcatcttctgctcttgtcccctgcaggctgagctgctgtacaagaagaacccaaagctactgaaccagttacagtactgtgaggaggcaggcatcccactggtggctatcatcggcgagcaggaactcaaggatggggtcatcaagctccgttcagtgacgagcagggaagaggtgagggaggtgggcaggaaggctaagggacagagaatgtatgccattttggcaggcccatgcccattcaagacctgagaaaaagcctggcattgatattagtacaactcataaaagccttgagggcttaacctgttactgtggtcttagtagggtgagatctccatccctgcatataccttatggtttgttggctcccccaagaggcacactctagcctgaggtgtttaattaggttcctgctcccagctgagacaagcctgatgcctagagggctagaggaaactaggcactcggggagcagtggaatggaagatgcttataccaccttcttctcccatcctggccaggtggatgtccgaagagaagaccttgtggaggaaatcaaaaggagaacaggccagcccctctgcatctgctgaactgaacaaactatcagaggaaaggaagtgggactggcactatttgaggttaagacaaactgcatatgtacttcaattgctttgcacttttccgtttcagcggaagacctgaagagtggtcagaacagagcctttgatttttattatggttattttattgattattactggcaaaaacggccaggtacaacacctttttcatacaaggcccaggaggcttagtccagtctgtgctcctgggctacaaggacccagcctgagatggtcccatctgcagggccccgcaccagttggagcagatgcctccccaccaccaattgccaaaggtccaataaaatgcctcaaccacggagtctgcgtgtgtcagtgatgcctagccccgccttccccagcagaccaatgtagggatggaaaagggagaaaaacagtaaacttgtgaccctgaggttcttgtctccagcgtccaccctgcggcttgggagctcctcctcgggaggcagcccccgtacatacgcacccgcgactttgcagctttcacctgaaggtctgagcgaagcccgggcggcgcacgtgcagtggatacctccacccccctgggaggcggggtcgcgctcagagccaatgagagcttgcggggtggaggggtagggaagcttccagaggccggtggggaggaagttataaagagggtacgagggggccagctggagagccatgcagtccaagcgggattgtgaggtaagcggctggcgacttgggggccggcgagccccgccggagcgggggtcggctttagggaccccagtaccacaggagaggtgggggcgcgcttggcgatccgccattccaaccttcctttccctctcagct

SEQ ID NO: 34515 - DNA, 2300 bp, Homo sapien
agggataagaaaggcaaagtcaggactagaactcttggtccagtgctctttattttaaaccacagtgataggatcacagcagagaataaggaaattagctttgatacatcaaatcatccagactgatgccagggcttctggatgaatagggaaaatggctaagcactaaagccatataatcaccccatccagtaggaggagttaagaagatgatgaagtagaaaatgaaggaatagcccagtagatggaaaggaaaccaaaactggtgagaagcccaaagatgccggggtttacctctgggctgatgatcagaaaatgaaagagaaattctatgcttgagtgcaaccaggccttcctagaggacagagctcccagagtccccccttcagaaaggtgaatccctgaagaccgctggctaaccctctccctgcaggattttgacattgctgggaactttgatcccatgatccctgatgcagagtgcctgaagatcatgtgcgagatcctgagttcacttcagataggcgacttcctggtcaaggtcagagctgacaaggctgggagggcaaagttgggcctggcctctcacaagagaagatccttgtgcagagggaccagtagcctaagtgaccatgactattgcaggtcatgtaagaaaagagattcccccctcactatgcattggttccttgcaggtaaacgatcgacgcattctagatgggatgtttgctatctgtggtgtttctgacagcaagttccgtaccatctgctcctcagtagacaagctggacaaggtaacaacccaagtacttgacttcttttcccagatcccaccctgccttgggaaatggaaaacaagattgagagagagagaggtgcatgcctctatacccaccagaggaaggttagccccaggatgtaggctcatgggcagctactgctctaaaacggttccccgaggacagtacacacttgctctgtggtgcggaagctgcccaggggtccctgactggtgtctgtctgcctaggtgtcctgggaagaggtgaagaatgagatggtgggagagaagggccttgcacctgaggtggctgaccgcattggggactatgtccagcaacatggtgaggaacagaaccaagcctccccagcagccgtcccactgccctcagtcctaaagttgaaactgttctgtgttatgtatgtaggggagtgagtgtgtctatgcatatgtacacacacatgcatgggcgactagagtccaggcaagaaggtcaaccctccttaccttttttgtttccttgtcagcctcactcacaagtctgtctccccaggtggggtatccctggtggaacagctgctccaggatcctaaactatcccaaaacaagcaggccttggagggcctgggagacctgaagttgctctttgagtacctgaccctatttggcattgatgacaaagtgagtcaagttggggacgggatcccttctgagctctggggcttcaggtccctgatcttaatctggcactgaccattttcttatctccacagatctcctttgacctgagccttgctcgagggctggattactacactggggtgatctatgaggcagtgctgctacagaccccagcccaggcaggggaagagcccctgggtgtgggcagtgtggctgctggaggacgctatgatgggctagtgggcatgttcgaccccaaagggcgcaaggtgccatgtgtggggctcagcattggggtggagcggattttctccatcgtggaacagagactagaggtaggtcctaggaggtaggtagaagatagtctgagcaggtggtggcacctaagctatctgatctccaagggagcaagtggtgctgctttgggcagggagcatctcacagaaatggagaaaagattattgctctttttcacagatttctaccccattatatgtaagttttatggatctttaatccataatctttctgcactcaatcctctgctctgggtctctacttccttcagggctgtcacaaacctgggctggtgtatccaagacttagatcttcctcatgatacggaatacttaacattttactgccttgtgccaggcactgtgcttggtgcttttcatgcattatcaaaatataattgttactacagccctgtgagagtagctaattttattaattgcattttccagatgagaacactgaagcattatagatcaaataatttgcttaaggccatgaaacttgtaagtggtagggtcagaatttgaatccaggcagtctgac

SEQ ID NO: 34516 - DNA, 2300 bp, Homo sapien
gagtatctgggattacaggcgggtaccaccacatgcagctaattttttgtatttttacagaaatacaaaaaacatacaagaaacctacaacatgtttcaccatgttgcccaggctggtttggaactcttgagctcaggcaatctgcccaccttggcctcccaaagtgctaggctgagccaccatgcctggccaaaaacttactgattttattgaatcttgacccttgaggaccctatttttaaatatttgctatgacaaaatgggaagtacacataaagcacttctgcacgccaaggtagggaaaatgcttatgccattgttcaagttgcaagctgatctagctacttttttcatagaacatcttgttttatttgaattaacaactgaaagataaattatggtttttcaaacttaaatatttggcagacatttttacaacaataaacgaagtgagcctcgtcacctcaaggaaaacatctgacagtacttgtaggcagtgaaaaaattcaagtattcaggtgaaagttagaattttagaaaacttagtcagggcatggtggctcaagcctataatcccagcactttgggagaccaaggcgggcggatcacctgaggtcgggagtttgagaccaacctgaccaacatagagaaaccccatctctactaaaaattagctgggcgtggtggcgcatgcttgtaatgccagctactagggaagctaaggcacaagaatcgcttgaacctgggaagcagaggttgtggtgagccgagatcgcgtcattgcactccagcctaggcaacgagtgaaactacatctcaaaaaaaaaaaaaaaagaattttagaaaacttgcatcttccatcataagcttgacagcttcccaataattaaagagttttctactgggtgtggtggcttacgcctgtaatcccagcactttgagagaccaaggtgggcggatcacctgaggtcgggagtttgagaccagcctagccaacatggtgaaacgctgtctctactaaaaataaaaatttagccaggtatggtagctcacgtctgtaatcccagctccttgggaggctgaggcaggagaatcgtttgaacctgggaggtggaggttgcagtgagccgagaacacgccactgtactccagcctgggtgacagagtgagactccatctcaaaaacaaacaaacaaataaaaacaggccaggcaaggtggctcatgcctgtaatccaagcactttgggaagcagaggcaagtggatcatgaggtcaggagatcaagaccatcctggctaacatggtggaaccccgtctctactaaaaatacaaaaaatttgccgggcgtggtggcacgcgcctgtatgtagtcccagttactcaggaggctgaggcaggagaattatttgaacctgggaggtggaggttgcagtgagccgagatcacaccactgcacttcagcctgggtgacagagcgagactccatctcaaaaaaaaaaaaaaaagactttcttgatgagatctgaagtgatgtaaataaataaggcttcctgatattgtataatgaaatgtatcaacatttgaaagacctgttatgaaatcatgcacaggcaaaggatccattcattcaaagtacaaaatacagtagtggatttttttttgtaggaaaatatacgtaacataaaatttaccattttaatgatttttttttttttttgagacagagtctcactctgtcaccaggctggagtgcagtggcatgaccttggctcactgcagcctccacctcctgggttcaagcaattctcctgcctcagcgtcccaggtagctgggactacaggtgtgtgccaccacgcccagctaatttttgtattttttagtagagatggggtttcaccatgttggccaggatagtctcgatctcttgaccccgtgatccacctgccttggcctcccaaagtgctgggattacaggtgtgagccaccacgcccagcccattttaatgatttttaagtgtacagttcagtaacatgaagtacattcatactcataaccatcaccattatccacctccagaattttttcatcatccccaattgaaactctgtacccattaaacaataactccccacttcaccctccctccagcccctggtaactgctatcctactttctactttctgtctctatggatttgactattctaggtactagataagtgagagactaattgttctttttttttttttttaagttcattgatctagctttcaaattccacattgcaaccaatctt

SEQ ID NO: 34517 - DNA, 2300 bp, Homo sapien
acatcctcctatatactttaaatagtctctagagtgtttataatgccttagacaatgtaaaggctatgtaaatagttgctatactatattttttatttgaaatttttattgttagatttcaaaaggtttttatttgtttgtttgtttttagagatagggactcactatgttgctcaggctggtctcaagctcctgggctcaaatgatcctccccttgtggcctcccaaagtgctgggattacaggtgtaagccaccacactcagccagattttttttcttaatcgtttcttttcccctgaatggttttgatccacagttggttgaatctgtgaatgtgggaccttgggatatggagggctgactatacctatttaggcatctagtctcagtctcagggtaaataaacgacataaataactacttaaagttggtgtaataacaaatatgtatgaagtgccaagagcacctagatgaaggggtaaacagttctgtttatagaacttacagaaagtggaactgaactggaggatgagctcagaatctccaacctcattccactctactctccttaacttagttctagccatgtagatcatcctctagttcctcaaaactaccaaagttctttcccactttagggtttccatactctacctggacctatctttgtcacacttgtcctctggctatctcctactcattcattagatcagttagtatatcacttcctcagttagcctttctcagactccccagttctcccttatttttctcagagcaaccttaatttctttatatcatttttcacaatatgtaattacataaccacatgtggtggccgggtgcggtggcacacgtctgtaatcccagcactttgggagactgaggcgggcagatcacttgaggtcagaagttcaagaccatcctggccaatatggtgaaaccccgtctctactaaaaatacaaaaattagctgggcatggtggtgggcacctgtagtcccagctactcaggaggctgaagcaggagaatcgcttgaacccaggaggcagcggctgcagtgagccaagatgtgccactgcactccagcctgtgcaacagaggatactctgtttaaaaaaaaaacaaaaaaatctgtgtgggattatttgttctaagtctctctccttcagtagaatgtaagctccatgagggtaggctatattgtccaccatggtatatattcagtgctttgtatagtgctagagacatagcgctaaatacacatttattgaatgaacgaaggagtagcagcagcaggctgactcccctgatcacccagctggcctagtttctgccatcactttgccatcccagaatgactcaggtagagtccagtccagcccagcgcccagagcgactgtcctctcctctgcagcatttcagatcctcctcaatgacctggtttagggaggcagacataagcgccccgtgagtagagttagagactttctcagtggctccctacaggaatgatattaccttgggggttttgagcacaaatttctgtttgctttcatcaggacccagctgtgccttcagtttcaggagtttcgccacctcctcctcgatctgtggagggaaagaaggcgctgagctatccatctgtcactctcctccctcccccgccattcattcaatattcctccctcatcacatctctctgctcaggcctagctttgtttctctcgggacccaccccggatgtctccccacgcagcccactctcctccctacaagactggtcgcttccctcacatctctaccctatgtcccgaacaccctggctttacgtcctcccaggctttgccttggccctctcccctgctgcctaaatctcaccagctcggcgctggccttctgctgcttgaggcctcgcacgcgctctccctgaagtttcaccagctcctccagcgccgcacgctctgccatcccggctgtccacttgagccgcctgctgtctcgacctgcggtggttgccccagcctcagcaaggatgacttccggctatcgagtcgctgggtcgcacgcctagagagcctccgccgagcacaaaaattatttccggctcctcccggaagtgccgaagctggctactaagggaacttgggaggatcccacctcagccttcgtgactagtgaggtgcgcaaacgcccgagttttccctggtgcgcgggttccgcctttgcagtgccctccacccttcctggtgtctgacccgcctccttcccaggccttttgttcctgtcccggaaagcc

SEQ ID NO: 34518 - DNA, 2300 bp, Homo sapien
ccaccccaaagaatctatgttgtatttacaattacacgtgtaatatatatgaggtcaggtcttcaccacacaagcttcctcactgtatatggatttttttttttttttttgagacagagtctcggtctgttgcccaggctggagtacagtggcacaatcacggctcactgcaatctctgcctcctggttcaagcaattctcctgccttagcctcccgagtagctgggactacaggcgcgccaccaccacgcccagctaatttttgtatttttagtagagatggggtttcaccatgttggccaggctgctcttgaactcctgacctcgtgatccaaccgcttcagcctcccaaagtgctgggattacagacatgagccaccgagctcagccgcatttttaatattctcaaatactttaagaatctgagaataatgaaggcactgaacaacccaccactaccaacaccaaccattcaggggtagggattatggtgatcttctccaggtcaccgttcctactgaaagagcaaaaataatttttttttttttttcagatagagtcttactctgtcgcccaggctggagtgcagtggcacgatctcagctcctgcaacctccgcctcccgggttcaagcgattctcctgtctctgcctcccgagtagctgggattacaggcacatgccaccacgcccggctaatttttgtatttttagtagatacggggtttcgccatacaggtcaggctggtctcaaactcctgacctcaggtgatccaccccccttggcctcccaaagtgatgggattacaggcatgagccactgtgcccggacaaaaaaataataatttttaataaggtagcactggttatcaggtttagagagaggaaaactgtaacttgaagacaagggaaccagctcaaggacacagaacaagcctgtggaatgataagatatggatttcttgaatgagctaaaaaactcagactgataagatgctgtgattgaatatcaataaaagatctgtgccctattgttcacgatagcacaaagcatctgctaagagagcattagaatctttccgaagtaaggcaaaacttaatcagtgacattaccagcacgctgtatgcccttccaaaaatagaggatgtggtggttccatactatggcgattatctgccctaagagaagtccaagttcaagtacacaatcccttatctgcaattccaaaatccaaaactctctgacatctgaaaatgtttttctgagattcattttgaggtaaattctaagatgaactcagtctacttctgatctttagtcatctcatttactaggaatattcatatatttcgcttaaaaatgttactgtttgagtccaagagtttcaggaaaaagtgtggatatgaattaaaatactcccttactacatatccgtgtataagtcattcatttaatcttgcagcctccgtttcctcaactgcagaatggaaatcaaaactccaacctctcaagattgctccaaggattaaatgaccaggcatccaaatcgcttagttcagtgtcagtacatagtgggcactcgataaaaaccgattgtaacactactggaatacaggccgcgaggctatgcgttcagatctggagaccctgctgggacagaccagagataattctgtctcgctcacctggctttggcaacggaccgccccggtgcacgaagcgcagggcggtcgcaggagctggctgagcagcgaagcccaggccctcctgggaagaagtccgagcaggggcatcgcgcggcaggacgccggctttccgggacaggaacaaaaggcctgggaaggaggcgggtcagacaccaggaagggtggagggcactgcaaaggcggaacccgcgcaccagggaaaactcgggcgtttgcgcacctcactagtcacgaaggctgaggtgggatcctcccaagttcccttagtagccagcttcggcacttccgggaggagccggaaataatttttgtgctcggcggaggctctctaggcgtgcgacccagcgactcgatagccggaagtcatccttgctgaggctggggcaaccaccgcaggtcgagacagcaggcggctcaagtggacagccgggatggcagagcgtgcggcgctggaggagctggtgaaacttcagggagagcgcgtgcgaggcctcaagcagcagaaggccagcgccgagctggtgagatttaggcagcaggggagagggccaaggcaaagcctgggaggacgtaaagccagggtgttcgggacat

SEQ ID NO: 34519 - DNA, 2300 bp, Homo sapien
tatgctgaggactaagatccctggtaccctggaaaccaaaagcagccatagtgaaaacaaaaacaaaaaataagtccatttcagacaaggagttaaactacacttattatgtaatctcaggtctggagctgaaatctactgagttcaaatgactctgagccgcacctagtatctcaagaatagtatatatttttaaaatttactgtaaagaacattaaaaggggtcagagagacatgcaaggcagaggtcagtcctccaaggcactctaatgggatagggtaggcaaaaagtattacctttggggtcttgataataaaatttggtttctcttgatgtgctttcagttgggatgttaacactgcctctgcaacctggcagaagaatgaatgtgagatgtggcttctctggacactggccagacctgtggcatctctgaccctgttgaccaccaacctgcaaagactcttcaccctgagcaacaggaagccaaagcaccatttcatctatcccaatctcagtcccaccccaaagaatctatgttgtatttacaattacacgtgtaatatatatgaggtcaggtcttcaccacacaagcttcctcactgtatatggatttttttttttttttttgagacagagtctcggtctgttgcccaggctggagtacagtggcacaatcacggctcactgcaatctctgcctcctggttcaagcaattctcctgccttagcctcccgagtagctgggactacaggcgcgccaccaccacgcccagctaatttttgtatttttagtagagatggggtttcaccatgttggccaggctgctcttgaactcctgacctcgtgatccaaccgcttcagcctcccaaagtgctgggattacagacatgagccaccgagctcagccgcatttttaatattctcaaatactttaagaatctgagaataatgaaggcactgaacaacccaccactaccaacaccaaccattcaggggtagggattatggtgatcttctccaggtcaccgttcctactgaaagagcaaaaataatttttttttttttttcagatagagtcttactctgtcgcccaggctggagtgcagtggcacgatctcagctcctgcaacctccgcctcccgggttcaagcgattctcctgtctctgcctcccgagtagctgggattacaggcacatgccaccacgcccggctaatttttgtatttttagtagatacggggtttcgccatacaggtcaggctggtctcaaactcctgacctcaggtgatccaccccccttggcctcccaaagtgatgggattacaggcatgagccactgtgcccggacaaaaaaataataatttttaataaggtagcactggttatcaggtttagagagaggaaaactgtaacttgaagacaagggaaccagctcaaggacacagaacaagcctgtggaatgataagatatggatttcttgaatgagctaaaaaactcagactgataagatgctgtgattgaatatcaataaaagatctgtgccctattgttcacgatagcacaaagcatctgctaagagagcattagaatctttccgaagtaaggcaaaacttaatcagtgacattaccagcacgctgtatgcccttccaaaaatagaggatgtggtggttccatactatggcgattatctgccctaagagaagtccaagttcaagtacacaatcccttatctgcaattccaaaatccaaaactctctgacatctgaaaatgtttttctgagattcattttgaggtaaattctaagatgaactcagtctacttctgatctttagtcatctcatttactaggaatattcatatatttcgcttaaaaatgttactgtttgagtccaagagtttcaggaaaaagtgtggatatgaattaaaatactcccttactacatatccgtgtataagtcattcatttaatcttgcagcctccgtttcctcaactgcagaatggaaatcaaaactccaacctctcaagattgctccaaggattaaatgaccaggcatccaaatcgcttagttcagtgtcagtacatagtgggcactcgataaaaaccgattgtaacactactggaatacaggccgcgaggctatgcgttcagatctggagaccctgctgggacagaccagagataattctgtctcgctcacctggctttggcaacggaccgccccggtgcacgaagcgcagggcggtcgcaggagctggctgagcagcgaagcccaggccctcctgggaagaagt

SEQ ID NO: 34520 - DNA, 2300 bp, Homo sapien
acattcttcaggtcaacccacactactcctttctggttgtataagtaatgggagaagatgcagagtaaaacaaatctggaaaaacagtggctaaggagttagtatcactttctagtttatcacatgaggattctcttatgtttcaggtggccattaaacgggaaaattttgtggctgaaattcagaagcgactgtctgagtcttgatccttgcctgattcccatctgctgctctttgtagaaaaggtttcctctagaactgaattcctctggaattgagtgatggacttcacaacaactagccaggaagggtgacaagtaccttctgcctcctccattcttcctgggtgcagaactgtagaagaccctgaggactcctgggctagtgtgagcagctattctgcatgggtgcagatggctggatgtgaaagagacatgctctagctgcagaggcaaatttgaagtgccacggaacgttgtcaagaggtagtgagattgttgctgtgagcaaggctctgggagagtcacctcaggctcaggattctgaaccattgagatcagaaaccagatacttagccttctactgtagctacggaaccagattctggtgaatttgtccacaatcagccattggcctgtctggggagtttttggaagacagcaaagaggggcaatggctgctttcagctttgaggacagatgctatcctaagggcatggcagtacccatgttgatttgacatctctctagcccatccattgcttacagtagaagagtggggctgtatgcttgataatcttgaacattgaacttaatagatgacttgacaaggtagagatctgatattttgagattttggagaccatttcctgtgccagaatcactgctctattccataccgtgccatggaggctgttttagaagtggttggataacatgttaaataaaatattaagtgtagtagtttgggtaatttgttattgttatcaagggctttgtttgcatagaccatagaaaatgcttgagtgtacattggagaattctgtgaggtagaagtaacctccctgggatgatgcttctgtattcagtgatgagcagccacagtttctccctctttccctgtctcctcaagaggtagtttttttgtttgtttgtttttagacggagtcttgctctgtcacccaggctagagtgcagtggcgtgatctcggctcactgcaacctccgcctctcaggttcaagagattctcctgcttcagcctcccgagtagccagctaatttttgtatttttagtagagacagggtttcaccatcttggccaggctggtctcaaactcctgacctcataatccacccacctcagcctcccaaagtgctgggattacaggcatgagccactgtgcccggccaagaggtagttttgttgctaaaaatcaacatatagtgagccggtatgccacagtgcttcactctagagtgttgttgatgactggcctttccaaatccaattatgctgattaaattatgttctactataaagttccccagatgatggaaaaataagtgaaccaaagggtggtagcattgcttcaaggaaaagagcccaagtgcaaaacatgctttttatatgtgcgtcgggaagggtgcctctgttgcaaacgtttcagtgtagtttagggtcatatccctagtgcatgcaggtgaatgagaggcatctagaccccctaatggcgcttcggccttaaaaaaggtttagaaattcttggcagtggacgcaaagttgctagactagatcagagaccactgttttgcgaacctcagtttccttgtttgtaaaatagttgaactaaatcttgaccctttaatgcttgttttgaaatccaaggcaaaaaacaattgcaagcgcccttacttccgtgttgcttcatactcctcttgcgcctgcgctgtctccttggagcagaggcggggccaacaagcctgttttagaaaccctccagtccttagctcgtttagaacacaagactccaagcttattggagggctatcttgccttacggctccaagccgctttttacggcgtttttcagctcgccattcacttcgctgtgaagatggcgtcgggcagcggggtaggtgttgtgtctgaggaggaggttttgcggggtggggaatggtttttcagacctgaatagagacaaactcctgcacccgactggcttcccgatatctcctcgagatcccagggttcaggttcaagaactccccagtaataggccttggcagagggtcagtagaat

SEQ ID NO: 34521 - DNA, 2300 bp, Homo sapien
agaggccctcaccaaaggcagatgctggcactatgcttcttacgtagcctggagaaccgtgagccaaataaacctcttttctttatagattacccgcctcaggtattcctttatagcaatgcaaaatggactaatgcaccaccccagcagagagggggaggtggcaccgtgttattttctgcacagtccaggctgtccacatggtctcctctgataccacaactgtggagcttgctagcagttgggggaatgaaagtctcagtttcattttttggcctgatctgataccaccagaagtattgggattcctcattaacagctttgcaagagcgttaatctagattccccactcaacttttgctggtgtggggccacagtttttttctgtggtgattacctggagtaaatgattatctaggagctttttgtcttgctaggctgcctatttcctggtcctttgtctagagaaagcatgcttttttttttgagctttttgcatcagtacccaataatgtttctggttgttggcttcttctggtccaagtctggaatagataaggcaaaaacccagagatttcaccactgtgtcagtcttcaaaatttataacactttaaagtattttgcacttccaaatgttgacaatgttctctaaatctgctaacctttagaatgtttccaagtttaaagtttgcttcacttttagactaagagaatattcatgtatcttatgttgctctatcttttgtaataaagtaattactacattgaactgttaaaatatataaactgcttgttaaaaataaaatagctccatgttttgtctatatcttaattatcaagtaaacaaggatttaggctttctgattatgaagacatactggattaaataatccttattcacattaatgtccttaactattcttagtacttaaaatataaacattatggccattcctttaaaaaaaaactagtgatagcttattctgatcacatttcttagtcaaactaagatgtagctatgggattctgattatgaattggactgaaattgaaagagaggtttattaataggtaggttattctcaaattattttttaaatatatctttgcataagatttacatttttcttttgactatggattatataaagattctcagtacgtgtctctgatattgcgattcaatatccatatgatttttgttgtaatatgacaatgtttggtcttgataagaaaaaagcatggatgaaaatttaacataggaataaaagatctagtggacaccgattcaattaggaatactgagttttggaagtcagagttataagttcaatacttaggtcattatgttatataacaacaagggaaaatgtcacaaatatctttattctaacagttaaagtatcagaaaatgatgaagttgttcataccacattaaaggaattttacatgtgttcagaaattttccaaaaatgtcatctgtaagtacctgataactatatatacatgtgcatatgtacgtgtgtgtgtataatatcatttaaaaaaaaacacccaagctatcctagaataaggtgaatcatatcagtcaaactaccttattttaaaactttgacattcagttgcaaatatttaataataaaaatatataagctgataaatcgttttaaataaaatgatgtaaggagaggttaagtagatcttaaagtttctaattcaattgtaatatgtttgtaatcattactaaaagaaaatactggattacacactctccaatgagatttgaaatgttctgggtcttaaaaggacataaaattgaaaatgattgcatttaacaaattgcagacggatatagattgcattttgaaaatcaacgaatggatctaaaatttacattggccacatgatgtcgctgtacaccacaaagtcttgtcaatagaagggagctactgatcactaaaagtgaaggaggaagctccattttgtcaccgcctgagagaagacagaaacggtaaagagataaatgattggaaatattagataaaatggcatgattttgaagtaagaggagagcataagaaaggtgtagtccttttgcaatggtgttttctaggagagggggcctgggagcccgggatctgcttctttggcttctgctcctcgcagcctgggaggtggggagcggccagctccactactcgatcccggaggaagccaaacacggcaccttcgttggccgcgttgctcaggacctgggactggagctggcggagctggtgcctcgcctgttccgggtggc

SEQ ID NO: 34522 - DNA, 2300 bp, Homo sapien
ggtcaatgttggctatagattaaataataattactgggtatcatacatatgcaattgctttgcaactacataatgctgtaacgagcagttctgaagctatctgccatctgtttaagctccaggagaatttgggtacatgccatgacctccacttttcagttcacataaaaaccaacctcccacttttcagttcacataatttaggtggagctgatttcatttcctggcttcaagaatgagcaagtggacccatgtctagccaatgtgagaaaaatcacaattattgactaaaggaaatttacatcatccaaactgggctgtaggaagtaatatccaggatttttgctggactattagaaaagagcactttctggtaagagtcatcaaactggtaatttttagtctagaaagctactttggccattttgccagcagatgggaaaagtctatctgagaagaagttcagcaggggaaaaggaattataaatgtggagattattttccttatggaattatggaagggtgtagacccagctctgtctgaaaccagtaattaattacccatttccatgtatgagtcagtacaggattctctggtttatttttgcttaaatcggttaacttgggatttactgttagagtatgattaacataaatacacatttccatagatggtacaaatgagtatcttaagatactgtacatgagggaaaaaaattgttattggaaaaaaagctagcttttcttaacaagagctttgcttttctcttacggacattgcaaattttgcaattaattttacttctctctttgctctaggaagctgaaaacaaaattggtgacatggttagagtaactgaaggtgaccctttattatggattttgtatgctatcccactccttgattcattttatttcatcctcatcttatctttattctattttcatttttttactgtgaagggatcagctaaaaattaacaaaagaagatattctcaagtaattaacacaaaaaaagagatcgattgtattgttcttgcataaaagtctaaatgtaatggaaaaggaatattctaaagtaatagtacattatccaaatgagaaacaaataaattattaatttcaaaacatttgcaaacaattcaaaaatcaaaattaaatcacaaaacaacagtatatatacacatatattttcaatggactaaaatacctttgattactatgttcttcatttgaagaaatagtgaaaaatgctaatatatccaaaagaattgaaagcagggtctcaaagaaatatatgcacacccatgttcatggcagcactgttcacaacagtcaagaaatggaagcaactcaaatgtccacgaatacttgaatgaataaacaaaacgtggtgtatacatatgttggactattattcagccttaaaaaggaaagaagtcctgtcacatgttacaatatggatgaaccttgaggaaccatccacggatgcttgaatgaataaacaaaacgtggtgtatacatacgatggactagtattcagccttaaaaaggaaataaatcttgtcacatgctacaacatggatgaaccttgaggacattgtgctaagtgaaataggccagtcacaaaaagacaaatactttacgagtccacttacacgaaatatctaaagtagtgaaattcatagaaatagaaaataggactgtggttaccagagactggagtgacggtgaaaagcggagttgttgtctaatgggtatagagtttctgttttccaagatgaaaaatttgtaacaatgtgaatatacttaacattactgaaatgtacatttaatcatagttaatatggtaattttaaatattatgttgtgtgttttttaaccagagtaaaaaagggtaaaaaggtaatatattttagggcttaaaatagttatttttttccaagatgaaagctatgagtaaacttaaaccagaaaatcgactagttttaaatctacagaataaacagtagagccttccttttagccacatgatgtcgctgtccaccatagagtgttctctaggaaggaaaatacccagagcccctttgttacttcagagaagcggaggaataagagaagcagcaggactttaacagagactagaatatttaaatttttgcaaaacatgctcttctaatttgatcaaaacattgaggattggtaatggcgtcttctatcagaaggggccgaggggcctggacacggctgctctcgcttctgctcctcgcagcctgggaggtggggagcggccagctcc

SEQ ID NO: 34523 - DNA, 2300 bp, Homo sapien
tttttcaaaacattcttatttacattttttcttggttgtctaagtgacatctaggtggtagtagaaattattcactgatactttatctacaaaatggctcaatcttctaaactcatagttcctttaatattacctttatctcttaataatcagtatggagtctactctgctataaattctcatgtgacattccattttgcaattagtataactcttaaaggtactgaaaagtgcagtattacaataagttgtcaaaggcatctcattactatgaagtccatgaagtttaaaaattttaaatttatctcttattttcaaactagctaccatctttaaaaattcagcaaagtggtaactggaatattaatagctataattatttcttaggtccatgcttttcagaaataatgcttaaatgtttacttacttcttcataatatagcacaatataatcatttagaaattatgtaagtttgatattaacaaatatcattaacttacatttttatttatcttgcttgaaaaagttaattcaaaatattaatttatttattcatgaaaacaacaattgataatttatcctattctaaatatgaatgataaaatctgagtaagttgcagtcctggcttccatttcatgaatacacaggaaacaaaagctgaaatgaaaacttttcccctaaatatttaaatcacatgtttgatttcatttttaaatggtctgggtataagcaaaaatttgtacattattttatttctctaaatttgacctctttccataaattttctttgccccacttccaaatgcggcgagaattcatgcttctcattgaattcacagatatctttagaatgttttattgcttagtgttaaatatgttgagtaaatactggcttatgttcctaggttacttttctcccttcactgtttagttaaataatcaattctttcaagtaacaacttttaaaaaaactggaatctagaaattcatcaggagtggagatcatcaaaaacgtaattactttatattgttaacattttagtatatacaggtaaattcaaatacataaagagtgtggaaaaattaaacctaatatattcttaattgatgtgatgtgagtgtaacaaatatacaaatcacattcccacaataggaaacaaatttcctgtttgaatttctctgtaaaggaccgacttctgaaatctttatgtaagttacagtcaagacagttgatgaggctatagttcttgaaaaaggggcatgggagggaattacagacattctacaaatttaaaaaaccataaatgtacatattttaagaaattaacagttgctgtaataacataaaagtagatatatgtatgttttaatatatacagcacacacacacttttaaatacttcaacatctcaatgttttgatgatcataaatctgaaaggatctgatttttctataaaatgtaacttgggtggtaaagaggttaatggtaagttgtcttgaatcagattgaaatcccatcgtaccaagagataatatcgttttacttaacctctatgtgtttataaaaagcgaataatattaaaacttatttcagaggattgtgataatttaacgggataattccattaagacaaatagaaaagtggctgtcacatgggaaatatttccaatagatgtccactgttaaaacaggaatcacaatattttagtgtatgtcatgaattagcacaattgatagtgaattagtataaaagttctaaggaaatatttagataaaatataaggactttgaggagtgaccgaaggatattacaattgaaactagaaattttgggaaagttcaaacgacatacaaggaaaagaagatacgtttacatatttaatacttacacgtttagccacatgatgtcgctgtccaccacaaggtctttctccacaaaagaaataacagcgtgcattacgtattcagatactgctttgcttcatcctctctaaaatttaacaccgaggagtttaagaaatgaagataaggaactcgaattatttttaaactttggatcaatgtaaaggcaatctaatatttggaaaatacttgcaatgttgttctcctggcgagaagatcctggagcccagtgcctgctgctttctcttctgctcctcgcagcctcggaggtggggagcggccagctccactactccgtctctgaggaggccaagcatggcaccttcgtgggccgcatcgcgcaggacctggggctggagctggcggagctggtgccgcgcctgttccgggtggc

SEQ ID NO: 34524 - DNA, 2300 bp, Homo sapien
ccatctcaggtcagtattttaaaaatttagttctgttatcagcttcttgaatataatagagtcagccaaagtacttgtcttcccagatatggaacttcaatcttcaaatccagcttgcctcttgaaactattgtctaacaagactcttggcaaagacattttgaagactttggaattttcacttcacagatgtactgatgctatgccaaataaatattgaatagctaccaaataaacattgttttctattctgctgcattccccatctgtacattaaaatacctggtaaatgaaaatattacaaatgaaatgggtgaaaatggaattcttcctccttttttccaatgtgcttgatgtcaatgatcattttgtaaaaatatagtttgggtccccacatagtgaaagtactctggtttctgtttgattcagaaatttggtgggttttttgttgttgttttggtttttgtgtgtgtgtgtttgtgtgagtgtagttcttcaatagagagggagcgtaaagctattttcactagattgattttttgtttagacaaacaggatgaaaataactttatggatataggaggcaaggaaagtttttaaatggctaccattatgtctttatatattaaatttctttatgtaagaaaatgtattgtggtttatttattgggaagtcttcattccccattaatacccaggatgattcaaagatcatgattaccaagaattagaataaaaattaagctaaaacccaagttttcaacattgaacttgaaatacatcttaattggggaaatgtctagagactttttttgtatctttagaaaatcatagaggctattgaaacaccacattttcccaactagatatgcgatcaccttaaattaatgcattttattaggcaatggaaggaagcaaacattttctgcagggtaaatatttaggaaatattaggtaagtccctctgagctattaaacaattaagatacaactattccctttaaaatatatattccaaaaaaggacacacatactcaaatgcttataagagataaattaatgtaataaatggcccacgcgattccaccctggtgctgcagtttgtaaaagaagaaaaaatacctgttcaattggtttgatcatgacattcttcatgggtcagggaagttttaagtggttataaaatggggtaaattggctttagaagagtttagaaatgatgtggattacttatagacaggacaaaatgaacatgcttgtttattaaaaaaagctattggaagcaggaaatattcagtttggctaaaatatataagcactataggagaaaatagaagcttaggcacattacatactggagaacaagcaagtacttataaactgtaagagtcaaaatgagaataccagcgtttctcatgggagcaaatgagttccaatgaataaaattatttggaatgcttttccatgcaagctatttgctataacttcctgcttccttgcactttcagccctgacatgactcaaggaagacatctaattaaatgctgatggtctttgatccttttataaaacatctgcaaatttccctgtcaatagcttgttcttggcaccagaagttccctagagaccagtcccctcaagtcaacaacaccagaaatactagggtgaagagggtgttatcattaataaaaaaaaaccctggaattcttgggaacacaggaatctgtaatgaatttttctaatcaacagtttacagttacatgtttacaaagtgtatagttaggtctctgtaatacttaaaacctgtgttgaaaaaattatttctactgaagtaaaagttgcccctatggcgaaactaaggaccacactcaatcaatcagtggtacaatgtgtaccacagtagtacaaaatgtattcctattctccgaaacgactgaaataataaataaaaccaagtagtttacagtagagtgtgtgggggtttccacaattgctacttacggtttggagccacatgatgtcgctctttaccacaaaatacatgagagaaggaggaagaagggaaaattccttctattcttactggaaggaaccatatacactctttggagtctgaaatatggaggatgcagctgcacttgactgaccgattaaaagatttcccttgactttgagaaacgatatttaatcagaacaaaatactgtgcactaaagatggagttttcctggggaagcggccaggaatcccggcgtctgctgctcttacttcttctcctcgcagcctgggaggcagggaacgg

SEQ ID NO: 34525 - DNA, 2300 bp, Homo sapien
tctgtaacatttgattgaagaaaatagcttagaagaagattttttaaaatgttcttttcctgtggagtctcccatgaaattcagattggataatctatagttactgagaaaggaatattcaaaataagagttgatcactgtagcacaaatgcaagtgataatttaaaaagtaaatataatttaacagatatgaaagtgaatcaaaagtcaagagtcttgtttcctcctgaaatatctatataagtacatgagatattttttccagactgagaggagcatgtgaactgatattgttgatgactttttctccattgagtatatcttttaaaatactcagtatttatcataatactctgcagattacaatgtacacattgttaatactacattgttaatttgccttttaaatacttaatatttacttttttcaaaggttatctttgtgtattttgtataaaattctactataatttattccatagctttgtagttttacattatttactgttatataatagaaagtggctaacatcagctaatgctgttttctaaatatttattatcattttcttatgtttttaaccattgtgtattaaaatatttcaaaattatcagtatgaaaactattaggcaaatagtctgggaaattgatttgtgtttcaacgatccaaatattagtgaaaagtcatgataatagagatagtaaaaatcttataagggaactggtaaatatatctttaaagattgtatcagaaacaattctatgacaatatcttgtttctttacaagtttgaattccagaaatcaagtgaatttcctctgactttgcattttctggtaatttcttttttcttatcaagctatattttaaatgtaaaagtatccaacaatagaattgctaatctcttggtccctcttgtcttcacaggtaagggatattttgtaatatttaaggaattttatggagtatatatacaagcagaatgttagctatttcttcaatagaaaacttggtgatattttcttttgcccatatttattaagtgaagtttactaaattttctaggtcgtgttcaaatcataccatccagtaaacagttgggagattaaaaagtaattaaactaatataaagatagcctggttaataaaatgatattcttttcaacatgattatatttactggaacctaaacattttgtgaaatagtatgtcatatagacaatattaggattttgacttgttatgtaagtacaaaggtatgtattttacaatttttaataattgctttatcagtaatagcaacttgaagaaatgctatctagatgcttctaatttgaaaatagtgcaaagacgatttaccaaagtcgttctattatgcttttgatttctagaaagctgaaatatccccattacagtttttgagtcaatacaaaaagtagataggtgttatagataaagaaataggttttcatcgatttgaaaattagaactccgagaagaaactcaggtaagaatgccattaaaatagttttagttgtttttgaaaataacatcaacaaaatgtcactattaaacagtgaaattggaataaaaatttgttttatgagtaacacggagatagcatacaaacattccattgactaatacagaaaaaactcaaaagttttaattagatatgtttaaatagagatgagaaaagtcaaaactttaactcttaaaagttatttttatcagtttggaaatatataaactcctccctatataaaatacaccagcacaaatttctctagtaaggattggggtttcatgactttagatgtatttttctgtaatattttaatgacgcacttatattgacgcattttaagatagagtttaatgatatattttgactagagataagtgatttaaagaataagaatcatgtcattgaaagtgagaatacttgagaaatattgacgaatataagctaaataaagcaaaacaaaataaaacacttaccctttcatccacatgatgtcgctggacaccggaaggtttttctcccttcccagcctcaaaggaatacagtgagtagattttccttagacagaaaggaaaagaaccttccatttttggctgtgccaagaagctcagaaaggcgataatataaaaaatatatagttaattgggaattgaatttacaaaatacattgtgtggtgatgcaatagaaagctcataattggaacgagattgagatggtatattcccggagaggaagtctgggatcccggctcctgctgctctggcttctccttg

SEQ ID NO: 34526 - DNA, 2300 bp, Homo sapien
gttgtttattaaagctgtatgtttgagactacgctagacaggtgtcctctccatctgaaataatgagaaccatttgtctactcttttgaggggaaaagtatggatttataggtagtaaatagtccacactttacatgataaaatgtgaattccctatttctgttgctttgcctgtttcttttattctcatatgcattcaattttataagtacccttctatcatgctatttatatattcctaatatcctgagctactttgaggaagtcctagaaattgagaaatagtttttgtcattctataaatctaaagttaacaatggtcacattttaaaaaatcaagttttgtgatataaactatttatatatctctttatatatcaagtctttatgtatattttgtgcagcttgtcttttttataggaacctcttgttttggggattgtttttggttaagaaattgaaccctttgtttgcccaaaataactgcaatagaaagtcagtgataagaactactaaatagatccaggttaattattttaagatagaatttcacatggaagaaaaggctttgtgtcacaatcatctgtgaggcattttactgtatatcagaattttggagtaaggtgaagatgatcatgtcatttgaaaagtcttattggtgactctatttttctcctttgaaggaggggtttaatcacttcaaatggataacattaaggttaaattaagggcgaagttgatatttggccctgacttttatatgaaggtaacatttttgcaagtaaattgtagacgtaattaaaaaaacccagctaaaacaaaggtggtattgagaaagaggaagagcaagtggtctatattgtcagaaaaataagattcatattggagagtaattgaaaataacctgcaaaaagttgattacctaacatgtgattacatattaggttactagaagtttctcaagtgtcttgcaatttctaggtttagtaaaattcaatgaaagctgtactcataaagataaatatgatagcatgtgaaagacagatggacttaggtggatgtggaataaggcaagccagggaaaaggagtaatttaaaaagtaatataggtgacatgggaaatgctcatgtcattaaaaatatgaatttaaaaatttgaatttggggattattaataattgctcatgccttgctatttaacaaactattttctaggagtcagcatgtataggtgaaagtgacaattagaaacatagaaagaagggatgcagatatggatttgtaaatacctcaataaaagtcttattcaaaacttggaagtgagtgagaacaattaaaggaaaggatatgggacagggttgaagttgagagagaaaaacgagatcatttaggaacagctgaagaatcaaaaacagcaaagcacaatgggtagaaattccactagaatttgaagtggtgaagtatatgaaaagaaaatattttaagcaagaatcctaatataagctgcagataaattaaatgtgataaagaatatgctctagaattttatcttccatcattacacagaagaaccttaagagcatctgatatttattgaacaaagaaagcatggacttcaataatctataaggctttaaaaattcaaccaaaatttgataattttaagttacattttttccctagagcactatataatagcatgtcctaggaaagacagatgtgggcaagtttcttttctaccaagagtgtagaatagtttacatttctgatttaaaaagcagttccgttaacacttaaatttgctgaactggttgatattaatgttgcaaatattggtagaaaagttgtttagctgtgaataattagatcccttactttaaattaataaaagaagtcgggataacactgaccgtgcaaattacaaacgtgaggagggtttactataaaagtagagaaaagaagatactgttttaaaaatatatggtatagcactgttacgtgaattgatttcttaccttttggagccgcatgatgtcgctgtctaccatgaagttatagctagccaacattcaaatttcttctattactgcatcattccctgactgttgaatgatggcggacgcagaagaaatggattaataaattccggaacatacagtattttatctttatgcggaagatcttctaatggaaataaaaccagaggtatttgacatggtgtttaccccggaggatagattgggaaagcaatgtctgctcctcccgcttctgctcctcgcagcctggaaggtggggagcgg

SEQ ID NO: 34527 - DNA, 2300 bp, Homo sapien
tggtgtatttgcccacatttaaaagttgcttaagggccattagaggactgagttgtggtttgtgtttcctaatgtgagcattttccattcttgaaatggcagaaactggtagtggtattttctgttttctaaaagaagtacatgataatttttaagcgtgtaattaatattgcactaaaatttaaaaaaactaactctacatacttaagagtggcagaattgtctctgattatactgaagatcaccatttgtgtagctaatgatatctaacagcctcaaaacagcatactttcttaggaagtagagaactatagcgttgctagtgagtaaatgttttttaaaaagttcctaggagggtctttaagagtatcacactgtgcctgctgagaatcatcgaattaacaagacctggcttcaaatttaatagataaataaaggtaagtatcctacataaatacgatgatagtaaaagcaagaatattgtaagaggtgctagaaaggtacatcatagtgttattggaattggaaaaaaatctttgcctttttcccttgttgaaggagaccgtgaagagtcatgatgttttactggttataaaatggaaagagttttccctgggagaatatggagactaacaggtattcatgagaagagagtaacttaagtgagtatacagaaaattccaaatgtacctagaaatgaggaatagtccactttgggtaaagcacatggttcccataagagagagtgtgatataaagcaagaaaagtaatatgagaaaaaccttttgtataactttgagtactagacgagtaattttgacactcttcaaagtcatttgaaagctgtcaaaaagtgtgaagcaatacgaataaaaagtattaacggaagatgactgcaaggattaaatgaaggagaatgaaataggaatggacaggttacacaataagaagctactgcaatacaccaggagagcagcaattataaaaacttatttaggaaagcatctgaatacagacataattattttacatgccattgggaacattggagtgaaacattccagaaaacgaacacagtaaggtagatccaaaaaggatgaaatacctcaagacttgatcaaagggctgctgtatgtgagatggctgagcactgaaatttatctaataaaataaacttacattttaaaagaaataatacaaatcatatttgagattgtaaaaataggcatatattcataacacacaagtgttcgaaaggatagaatgaggaaacaaatataaaatgatgaactcctgaaacagtatatatagattctgctaaagcaaaaaattcagaatacttcctcctcaaaaagttcacatgatacaaattcttccccttcaaagattccccaaaccttctcttattttgttttcccaagagaagtgtctggatagttgctaatgtttcttgcctcctaaaaagaaaacacacacacacacaccgctttctaagtttctctttcatcaatcagtagattcttgagatcctgggtccctaaaagagtacaggatttttcttaacaagcgatactgaatcaagaatatgaagtttcctgggatctagatcaaaggaatttaaacttgcagttgtttaaattcatgttgtcacttaggtttctatctttatttaaaactgtgtgaaaaaaaagtttttctaaggcatgaggaagctacagttctggtaacactgagtattcaaaagccatcagtcgcctaagaatgcttctaacaatcatgagaaatgctattttaacctttaacaacaatgaagaaaaaaattcagagtttgaaataaaacttttcatctgattaatagtttgtaatggtttgtaattcttacttacatgatggccacatgatgtcgctctttaccgcaaattctttcgtaatcagcaaaaggaagtcattccttttcgcactggaaagacgctccactctctttcactctttggatgcacaacaatggccacacatcgagattgaaatgaagggataaaaacattcctataaattcgaaggcaagttttgctgactagaaaaacaagccaataatttgaaatggtgtgcccgaatggatacgacccagggggccgacatctactgctgtttattataattctagcagcttgggaggcagggagaggccagctccactactcggtccccgaggaggctaaacatggcaacttcgtgggccgcatcgcgcaggacctggggctggagctggcggagctggtgccgcgcctgttccgggcggt

SEQ ID NO: 34528 - DNA, 2300 bp, Homo sapien
taatctgtttttattgctttgcttttatgcttacatgcatgtatatttaaaaccttcctagcatattattaaagttttaaatatcctatttatattgggaaatacctgaagttgataggggatcctccttagccacctaagctgtattcatcaattattatgatgatgatgatgattattatttttgagacagggtctcactctgtagcccagactgcagtgcagtggcacaatctgggcttactgcaatctctgcctcctgggctcaagtgatcttcctacctcagcctctcaagttgctgggactataggcacacaccaccatgcccaactaatttttgtattttttgtagagatggggtcttaccatgttgcccaggctggtctcaaactcctgagatatcgagaaatactattttctttacaaattgtttgctactatttagagtcaactacagagatttttttgggtaaataatgtgatgacaaatttaaatcatttcacagaaaatacccttatttgcctttcctatttaacctacgtttttggtaagaattttgtagaaatttggaggagctcttaattgcctactatgaaggcattcatgatgaatccatggagaatttacttttgaggtggactttgaaagatgaatagaattttgacagaaaaagatgaagtaatagaagaaaaaccttgaacaaagagtgtgccaagaaggagacaacatattttctgtaaaatatgactcctattggaaagtggttagccttagcactgagaagattggctcatggtcacgtagcgtatctcccagatggaagtctaatgtcttgacaattagtcaatagaaagataaacttgttgaagattttagtgaaatcgagtgaaagctgtactaataaggacagaaattatcacacgtgaaaggagagatgggatgtatacaaattttaaatatggtaggcaaaggaaaagaagtcataaaaatacatatgagtaaatgtggagaatcactatgctataaaaattgtgattttttaatgatttgggttttgggtgattattgattagatattcttttaactttggtcgactcattttctaggcaatgttagggtatacaggtaaaaatgtcaggtagaaaatgaaaatagggggttgcagatatggagttaagaatacttcaaataataggctagtttaaagccgtggaaatagaaacgttaaataaaaagttggggaaaaaagtttaaaggcataattctggtaaatactcactttttggagcagaagaaagatgaagaactaacaagccaatgatggcaatactgctagagtttggcatgtcagagaaatcataaaggaaaatgttttaagtgagaggctgaatttaacaagctatagagatatagagaaatagtgtaaagaatatgcacatacatttttattactttagtaaataaaacggttcaggcaatttgacatttattgaataaagaaaagcaaaaatttaacaataagaacacaagaagataaaatgtagaaaagttagaattatatgctcacctcagagtaatatataccagtgtttctggtgaccaaataaatattaatgcatttcttccacacgaaactatggaggacagtttacatttctgatatccatgacatacaggtcatacttaaatttattattaattgatacgatatttgaaatattgggaagaaattcctttccttatgaagaagaaatccctagctgaaactaatgtaaggagccagacagtatgaatgcctctgcaattgataaagttaaggatttactattaaattatgataaagaaatagaaagtgcatagaagaacccagatattgcggaagtaattcatgtaatcattaccttttgaagccacatgatgtcgctgtctaccaagaagttctggttggtcaatgttcaaagtcttttctctgacagcatctgtctctaaaggccgaacaacgggagatgcagcggaattggattaaaagactctgaaagtacagtcgttcatctttatattaagataatattttctgataggaaacgactatttaacatggattatcactggcgaggagagctgggatcctggcgactactactcttgcttctgctcctcgcagcctggaaggtggggagcggccagctccactactccgtccccgaggaggccaaacacggcaccttcgtgggccggatcgcgcaggacctggggctggagctggcggagctggtgccgcgcctgttccgggtggc

SEQ ID NO: 34529 - DNA, 2300 bp, Homo sapien
aatatcataaataggaggattctttccaccacctagcattgtatttggcaatttatcatttaagtcattttagttctgtttttcttcaactctctgatatttgaatttggggttgtgctttcacagtgagaaagtctaaacctatttcttgtacattaatacttttcactattctaattatggtgatgcttttagctattaagaatttctgggattgaaatgtgtcagaagttagttattaagtattgtggattctgaagctctctaaatcaagtcctccctttaccaatttttgtatgtgtagccattggtaaaggatttgttattcagttccttggcattatatgtatgcatgataaatgtgaattctactttatagatttatttgtatcaagtaagttaatagttataaattattaataataaactctggcaagtgataggtacataataaaatttagttattaccattcttaagagaaaagaagttagtgattgcagaaaggcaacctaaaatgtcagaaagtcgttatggccttccatattaatcttatttttgtgtaaaactatcttctgtaaagtcattttttagattaacctaggatgtttcaatattttgaatgttgtgtggtggaatgaaaaaaatctaaaagttattacgagtttaggaaagtcaagttaacaccacctatgtgggaaaacagttttttggaaaggttaaagtccttccaaggaatgtgtagactatcttactttgatagttgtatgtttcccatatttaaaagttgcctgagatcctgcagaggcctgagtaggcgtttgagttctttgtatgtatgagatctttccattaatagtatttttcttaaaaagaagtatacaataatgttttgatgatgatttaaagtcaatttatgttgtagttctatgaattaagtaaaccatttatgtagagtgttgtaaatagccttttaaagtgctttctcttttttcttttcttttctttctttctttttttttttttttttttgagacggagtctcgctctatctcccaggctggaatgcagtggcgcaatctcggctcactgcaacctctgcctcccgggttcaaatgattctccttcctcagcctcccaagtagctgggattacaggtgcatgccaccatgccctgctaattttttgtatttttagtagagtcggggtttcaccatgttagccaggatggtctcgatctcctgacctcctgatccgcccacttcggcctcctaaagtgctgggattacaggcatgagccaccgcgcccagcctaaaatgctttcttagcaagtagagaagattgtaataaccagtcttcattaaacattaaataggacccttacagatctctaacagcatatcatcatgtcaggaattattactgagccccagcccctggctttaaaatttgaggtcaaataaagaatatgagtcacacaatgcaaggcaagataatgtaacaggtacaagaggtaaatcagaatgacgttgaagttgaaagacaatcatttcctatttgaatttttgaagaaatacttgaaggggcatggtgtgtttcagtggttttaaaataagtaagttccccccgggagaatattgagaatgatagacatttcttggaaagagaaaacataaggaaagttgaagacacagaaagcatcaatatgacaagtagaaaagtccactttggttaaaacacacagtctgcagagaatgaaagcaggaaaaccaatgtaagaagatctcttgatttctgagtaataaactaaagggccatgagtgattaaggaatttggccactctttagaattaattgggagctatttaactaccttgagcaaaataaatcacgacttttgaaagaaggttgaacgggaagacaaactcagaagctcctgcagtaatcaaggacagaagcaattgttaaatgcacctcttaggctgttatcagtagaaatacgaaataaaagataaatatgcaaaaacattaatggcacaataaacactcacggttttgcctttagacttgagatacactaaaatctagatttaattaatcgacttggacgttggaataagatagtaaaactcacaacaaaactttgtagaacttagtcaggaaaagaatctcaagcatagctttaaaaacagaaattgccccgagtactaaggatgagcaataatgaaattaaaacatattgtaataacattacacaaactatattggagactacaaagaagagattattcatagattata

SEQ ID NO: 34530 - DNA, 2300 bp, Homo sapien
ccttccttgagcccagcagtttgagaccaatgtagtgagactcatctctgccaaaaaaaaaaaattagccgggcatggtggcacacatctctagtcccaattactcaggaggctgaggcgagagaatcgcttgagcctgggacattgaggctgcagtgaactgtgatggcacaactgcatttcagcccgggagacagcaagattctgtctcaaaaaaaaaaaaaaaaagagtagtttaactactccctactttttattcaatattggacatctacattgggatatttatgttatcacttggtataaaatgtacattagtagaaattgagtttagtttttattattttgtgcgtggagatgattgatcaatggcaaacttattttacgctccagatagctaaaacaaacgttgatattttgatacataactcattacattttaattcagggtttataaaaaagtaatctctaaaatcagaatttgaatgaattttgatgcaagaggcattccagaggagtagagaagtatagaaacagaatttagtaggacacataaactgatggattaagtgacacccatttctgtcagttttcttattcataaatattgttgctctgtcattcagattttaataaaaaaagtttaaagtaattgacacatttaaaaatattctttagaaaagtcaaaacatcattaaataaaataaattaacccttgcataagaccaatatgtctgttgttaagttttcctttcttggaaagacagaaaactcaagtttttttcagcagcacagatatattacattttcattcctgaatatttgatttcaagaactttgagagagaaaaaaatatttttactgcaagtggtgatgaaaaacttcactgacattgataaaattactagatatatttcagaactgtgtcttttgggcatttgaaaagcgtaaatataacagggttgaaagcatttgcctctgaaagcagaaataataaatttcttaattactttattcagaattataattaagattctttttgcccgtgtaagatattataaaatgaaacttcttgtataaaggatttttctgtaatagtacttttctgttttcttaaatacagaaaccaccactctcagcctgtgcagtagcaataattaaggcattctataggtaataattttgcctgatgagccaaatttggtattgagcctcatgaaaacaaatgtggccaaattgaggcctgagaatagtttccatttatgaagcactcattctccttaaggtactattgcaagcacttactatattataattcactcaaccaccgtattactattaggccaaagttataaaattggaacatgagggagggagaggttaaacgattttcccaagtcatgtggctagtgagtaggataataggaatctaaatggagaaatgtctgatgttgaagctaatgatctctaaattctagtgatgactagatcttcggagttataaacacctcacagatagttgatgcttgacattagtgtctaaataaaccttattaaatctcaaaataatgagaaagagaagtaagttaagtgtcagaacttaaatggaactaaagttgtcatttaataaaatattagtatactcagtagtatgcaaatattaagggcattttgaaattcggctattgataatcatgtggttagggaagaaatcactactctgagagtctacatttaagaaaacattgcacgtgggatcaacatttattgttattaactataaagagacgtaatgtgaggctttgaaagtccatagacataaaaatacgtaaaaaaagaattaacatatgaatgaaagaaaagttgtgaactcatggaatcgtacttacacctaaagccaccggatgtcgctgtcgtccacaaaatagctttttagaacaaaggcatcagccagtttctcaaggactaggaagtagcgtcattctgagatctcagccatttcgataaaaaatagatataagaaataggacagaaaatgtcagatcgtatgtgcgttctagaccgctgattcgtcgatttgtaaaacaagagaaggataagatggtttccagatgtagctgcctgggggtccagtgtctgctgctctcgcttcttctcctcgcagcctgggaggtggggagcggccagctccactactcagtctacgaggaggccagacacggcaccttcgtgggccgcatcgcgcaggacctggggctggagctggcggagctggtgcagcgcctgttccgggtggcgtc

SEQ ID NO: 34531 - DNA, 2300 bp, Homo sapien
aaaatagatacacatctcagcttctcttattttatctttcaaattggaacagtcatatgtactttagaaattgttataagtattaaatgaaataatgtatttaagtcccttcatgatgtctaacaaatatattaataaactgctcaaacaatggtgatttattatcatgagttactgatcaatattggctcttgtcctatagctatggatgaagagaattccagcaccataaagtaggacagggttttcccttttctgaagatttccttaatgtttatcttcatagaaatcatcttctcagaagttatttttctaggtagacactactaattccttttcagcatttatattaactttaccctacctataacatggttatcctgcaatatgtaaatatactatttctttacacagaattaaaggccatctcatttgtaattagagccaaaaagagcaaagtaattttacatataatttgatacacatccttacagctataaatacgtgttctctgggatccctttaaagaaagcaattcacattaatatggtgtgaaggcaaaaaatattttgcatcaaatatatcaaaagtatacaatgttaaattctaaggtataattaacaccacaattgtcaagtggaagtgcctttattaatatcccatggttcttatacttaagttattaaaaacaatgacattttttggtagagatgggggtctcactatgttgccgaggctggtctcaaactcctggtctcaagcgatcctcctccctcggcttcccaaaatgctgggattacaggcctgagacaccctgccaagctcagcaatgccattctgaagaccatgcagcttaatgaacacagacaatggtatcacccttcatcatgtatgggaagactctcttatacttaaagcccaaataagtgtgaattttcctaccctaaaatattttcatacagccaggtaccaaaaatgaaagaaaaatgagtataatcggtgctcaaagaaatcttcccaaaatagtagaagagctcaacaacttaaactggaggacagcagcaattaagtcaacaggtaattaagtagagctgacattgttttgttttgttttctttttaaaaaagaacaaagttgttggctatctgaagtagttgaagattgtgaagacaatgacctaaaatgaaattataagaagattgaagacaaaaattaagaagtaaaatcacctttaaaggcaaggctaaaattccacccactgcaatcaacatctcaaaaaagatggatattgatcatgaagaaacaaaattgtttgtggacgaagctgcctcaaccctgctcatcaccatttgtgagagataaacttatcgattatagaaagataaacatttaaacatgttttaaactcaaataattatgatattaaatattgtcatggtatttttgaatacataaaaacaataaggaatggaggacacaaatcagaataagaaaatgaataggaataaagaacttgcttcaaaattgagaagatttgaccttctcataaggatcattattcatcatgatccttccggtaagatttaactttctcatttacaggaaacagccactcagtctaattcattattactattatcattatacttatcaactgaagaatattcctaaagaatgttcatggtgactgtagtaaaaagtgattaagatggctagacttccaatgtacttttttttttaagacagagtttcaccctgtctcccaggctgtagtgcagtggcctaatctaggctcaccgcaacctctgcctcctaggttcaagcaattcttgtgcctcagcctcctgagtagctgggattacaggtgcgcaccaccacacccagctaatttttttatatctttagtagagatggagtttcaccatgttggccaggctggtctcaaactcctggcctcgagtgatccgcccgcctcggcttcccaaagtgccgggattacaaataggcatgagctaccgcacccggccccagtgtactttaaataaagcatctcaaaagaaaaagcaaaagcaaaataaataaagcaatcaaattaataacttggtgaacattatcaatgtcactatgagggacattaataggaatgaaatactttccaggattacagtacttatattctcaaaaatttcctattgaagtccatctccaaaatctgaaccatgggagaacactaggactaaaagccgtaatgttgaccttgggaggcgactctccagagtaaaatctcctttgctgcgagt

SEQ ID NO: 34532 - DNA, 2300 bp, Homo sapien
atataagtaagaatcgtttaacatgtaagaaaagtcagaaaactgtggtttccaatatccttgtggaacacctaaactaaatactatataccaaaaatgacacccttctttctttactgtgaataaagacagtgtttgggacaagtatagatgttgatattattatttcagggaccctgaacttggccaaaggattcaagaaatgtttacaatattgcatacttcaataacaattttaaagacatagattcccatgaaaatcttcaaatgtgtgtaggtctttcagtcttcttcagtcttattgttggctgggaagctcataacaactgacaaatgatttgtgaccaaataactgtttttacttgactaagccatgatagagcagaattagcatcacggaataaatcctataattttgttaatacagtggttggataatgtaattctaatctgttggttttggagaacctcctggggttctgacaacggtgtcaaaatttatttatgtgttttcaagaaataatagcactaggtctgttagaatatcagtggatgacgtgcactagtaagacattaaactatgcactctaatacttatatgactaacaggacatacaggcagattgtatgtcctgactgatatagtaaaagtcaggcacaaagttccttaatcttcaattgattttacaaaatcagttaacaataactgtattgaaatgacttcttggtattagcctatacccagatattaggctgatcctcaaagatgagttcaaagggcgcataatctcttcactaggggctggttgagatggtgacatctgaaatatcacagccaaaatgcaaaagatgggtcattgattcatacactatatcaaactcttttatgacttggcgtttgttcagtactactttatatattcacaaaatactgtattgttggaaattaacacctaaattaacatattgttttaattcaaatatgtgatattatcatttttccagagtaaaccttctaaggttcatttccctacctcgcaagactccacattccatgtaacatcttcatccccaattcccataataaggtgattgaggatctgttgtttccttttgttcaaaataaacctgatgtgcttcaaatatcatgttgaatatactgtcatctggtctaatgttatgttttgattagaggctactatgattgattattttacagatgcgtaatggaattaacggttataaaagttgatatgtctcctttaattttttaatacagaattttgcatttacctgaattagagttctagtgttatgacaacattgggaaaagagtaaatatgaaaaaagtagaacaaaatctcaaattaatagttgaatatatatataaaatattagcatacacatatgataactttttcatatgcccttgcagtatttttagattggagataaaccatcaaaactatagaacaaaatatttaagctagagtgatatttattctaaatcactttctactctaaaattttgttgcatcttctttttttcctcctaaatcctaagggtatatgaaaagacaaagaaaattcaagcaagttacaacttcaggcaaagaaaactctcataagcaattcctgtattttacttagcattttctatgaaattccatttccacaagcactaaggtaatttaccatttagttgaattgtttgattaattttctatgttttaagcacaatatcaggtacttacagaaggtataattaaaaatcacttcccttgttttccatgaacttctgctcccaaacccaaaattctttcaacaagaaacaaactattttcatgaatataactgaattagattaaggaaaccaatgttggtgacttggaaataccaatatggcacaaagatgttcagggtgattttatttattttataaaatgataataaaatttattttatagttgaaaagcctatttctgtcatatcattgattctgttacataaagtgctaaattttgatatctcatattatgctactatggcttacattagaaataatatatgtcaaataaaaactcatctagatcaatagacttttcctttgtggattcttttttaaaactaccaagtttgagaatatgaatatatttgtttttcatattgttctgcaatgaatataaagtcacttataatcagaaagcaattaaatgtaaataacagtaaagaatgagaactatagaaaatagatatgaaaatgcaagcccacagagatgagaatagatcatgtggaacat

SEQ ID NO: 34533 - DNA, 2300 bp, Homo sapien
tttttatagagacaggatctcgctatgttgtccaggcaggcctcgaactcttgggctcaagcaattctcctgcctcagcctcccaaatagctgggattacaggcctgaaccactttgcctggcaagaacatgtagaattttagtcatattatttccataaagcagcatataagaatgcaaggcttaacttttttcttcaaacaatatgaaaacaagtattatcacaggaataaagacaaaagtaaagattgtttcatatataatgaatttatgatgaacgtttaacactgtaaaaaaaaaaaagaaaagtaaatcatgtcatactaatggagtattctagctttgatacaagcctgaagttaggaaagccaatggactaagtgcagtggcactgcattcccagctactctggaggctgaagtgggagaattctttgagcttagcagttccaggctacaggtcacctgtaaatagccactgcagtccaacctggacatcataggaagacctcctccctttagaaaaacaaagccagttgatctaacaatgtggaaatatcaaggcaaaactctgctaaaagacaaagaggagcaaatttaaataatccatagttattatggtcataattgaagtttagagatgaaggggcatgggtactttagtgaaaatagtaattatttctactcaagtgactacagaagagtcactcttgcatctcatttcttttaggatttgctaaccaaatattaagagaaataggacatttattggttaaagaagccagattattcatatgattaaaagactgaagatgtgtatcatttggtattttatgaacagacattgttatctaaaacaatattcaaaacactggttattcataaaactttcccttaaaaaatccgtgaaaaaaaactggattttaaataatttcacatacacttcctgataggtggaatctgtagaaaactcacctgtccggggtgatttgaccctggctcctgtctttccccttcctcctctttattcagacctagaggaagactggggctgaaggccatgaggtccgtcttaggtgggccctcctcagagcacaccctctgccgcctctgctgcgagtatgaccagctccccaccgcgcgggagcacaccagcgtgggcttccccggcgcgcacgcgccctcagtgggcgttgccgaccaccacagcgccgtatacagcagcagcgtgagtaccaggaggctggacaccacgcagatggcgatgatcaggtacacgttgacatccaccagcgcagcctctgggctcgcggcgcccgccaaagtccgggaagaggcctttggcgcctgtccgctctccaccaacgacaccagcacggtggccgtggccgtcagcgccggctcaccgtgatccttcaccagtactagaagtcggtggcgcggcgagtctgcctcgtccagggcacgcgttgtgcttatctcgcccgtgtacagccccacgcggaacgggatgcgcgagccgcccgccgccggctgcaattcatatgaaagccacgcgttgtagcctgagtccgcatccactgcgcgcaccttcgccaccacgtggcccgcacccaccgaccgcggtactagcttgttaactgcgcctcccgcgctgccagcctgagtcgccagcagtgccggcgcgttgtcgttctcgtccagcacgaacacctgcagcgtcacgttgctgctcagaggcggcacgcccgcatcgcgcgcgctcacctggaactgtagcagctccagctcctcgtggtccaacggctgcagcgcgtacaccttgccgctctccgcgtgcaccgacacgtagctcgacagcgcgcggtcgcccaaccgccgctccaccagcgagtaggacaccagcgcgttctcctgcgcgtccgcgtcccgcgccgacactgtgaagatgtggcagcctggtgggttgttctccttcacgaacacggtgtactcgggctgtgcgaacgcaggcgcattgtcgttcacgtcggccacctccacggataccctggccgtggcccacagagaaggcgaacccccatcccgcgcagtcaccaccagttcataggcccacacgttctcgcggtccagggcgctgtccagcaccaacgagtagtaattcttgaaggtggacaccagcttgaagggaacgtggggcgtcagcgagcaggtcacctgtccgttgacacctgagtcacggtcagacacgctgatcagggcaatgaccgtgctgggctgagcgtcctctcgtactgggag

SEQ ID NO: 34534 - DNA, 2300 bp, Homo sapien
tttcagactcaaaagtgattaaaccatcataccacttatgaaactttataaatataataaaggtgaatattagatagggcatacattactcatctccagatgaaatttttggaataactgaagatcttttaaagacttgggaatgttttcagtacaggttaaaattttgtaaattattattttatatcacataaataacaaatttgcattttagataattcaaattacttggactgatttctgcaaagttgtgtcttttatacttaatgccaagattgcattctatggtataaaattataatttcaatttattttctagtttggttgtttaagtattaagctaaacttagatgttcctattggcttaacaatttgtttaggtcaaagagtatgtgagaactacataacacactattattatttgtttctttttgagatagagtcttgctctatcacccaggctggtgtgcagtggcgcaatctcagctcactgcaatctccacctcccatgttcaagcaattctcctgcctcagctttccgagaagctgggactacaggcatgcaccaccactcctggctaatttttgtatttttagtagagatgggttttcaccatgttggccaggctggtcttgaactcctgacctcaggtgatctgcctgcctcagcctcccaaagtgctgggattacaggtgtaagtcactgagcccagcctattttttaaaattaaagttccttagcatgtatggtacattgaccacttttgaaaatgaaaaataggaaagaaacttggtgatgatattagacaatttaaataattagcctgatgacatcaaaattcaaatatgtttttaattacttaacgttttatagtttatttaagttatcttatacttgtagagccattcttggttactctttcctggtgttgtaaaggtgtcatatttcagttgcctttattattatatgcagtaggaatgaatggcaacaaattattggtttaaagattttgacttgagtattaatagacttacaaaatctatgtgtacttgttcacaatgagttgtaggatcttatctgtttttttctcttaaagctgatcttgaattaatgaataaactcatgaaaggtcttttgatgcccccttgcataacagtcaccattctgattttctgaagagaagcatgtcctaactactaaatgacctgtaggggaagatttagagaaaaagcaaaaggttgatatcaagttcacattctcttgactttagtcaatgagattaggctccaaaaccctttaagagatctttcgcattttagtgctccattgttgctttgggatagtgtgaaatttggaggcttcaactaaacattttacattaaagtgctttacttttgctagagtaaaactttccagaatctattcctgagatttgttttaacatgttatggaaatgagagcagttatgtgaaaagttatcacattcaagcatcaaggaaccaaacaataacgctctccatatttatgatgaattctaactttcatcagatttatgaataagacaatttatataaatgaaatattgtttggtattagacatattttagtttcttatcctttgttaaatacaaattcctaactttctctaaaatcttacgatggagtgcttgtgaaggttaaaagttattgaaacagcggaattgtaagctatataaggggaggggtgctgtatattattctgtatatcattttccatgataaagtgtaggttctggcctactgtatttgaaagatttctactttgaagcagaaaacatttttaagctacagcgtaataaaattgttgatgttttgttactaatatcatgtatattaactaaacccgcatttataaatgatccgtgaaaaataacccaaagtcgaaacattagaattaagagtgacccaggaagtggctaaaccgaaaagaacctcaggatctttcttgtacttacataatcagtcacatgatgtcgctctacactcagaaggtgaaacaggaaaatttttttctccgcacccacattccaatcattcacggaataggatcgactccataatgactgtgatgctggaaaaaatttactaaatatgtacttacagaaaagggtgactgctcataaaatacctcaggcaagcgatcccttaaaactgattgtcccaactcagaggccctcattttctgcaatggtgattatcggaccaagaggcccgggatcccagcgtctgctgctctcgcttctgctccttgcagcctggg

SEQ ID NO: 34535 - DNA, 2300 bp, Homo sapien
tatctgtttttttctcttaaagctgatcttgaattaatgaataaactcatgaaaggtcttttgatgcccccttgcataacagtcaccattctgattttctgaagagaagcatgtcctaactactaaatgacctgtaggggaagatttagagaaaaagcaaaaggttgatatcaagttcacattctcttgactttagtcaatgagattaggctccaaaaccctttaagagatctttcgcattttagtgctccattgttgctttgggatagtgtgaaatttggaggcttcaactaaacattttacattaaagtgctttacttttgctagagtaaaactttccagaatctattcctgagatttgttttaacatgttatggaaatgagagcagttatgtgaaaagttatcacattcaagcatcaaggaaccaaacaataacgctctccatatttatgatgaattctaactttcatcagatttatgaataagacaatttatataaatgaaatattgtttggtattagacatattttagtttcttatcctttgttaaatacaaattcctaactttctctaaaatcttacgatggagtgcttgtgaaggttaaaagttattgaaacagcggaattgtaagctatataaggggaggggtgctgtatattattctgtatatcattttccatgataaagtgtaggttctggcctactgtatttgaaagatttctactttgaagcagaaaacatttttaagctacagcgtaataaaattgttgatgttttgttactaatatcatgtatattaactaaacccgcatttataaatgatccgtgaaaaataacccaaagtcgaaacattagaattaagagtgacccaggaagtggctaaaccgaaaagaacctcaggatctttcttgtacttacataatcagtcacatgatgtcgctctacactcagaaggtgaaacaggaaaatttttttctccgcacccacattccaatcattcacggaataggatcgactccataatgactgtgatgctggaaaaaatttactaaatatgtacttacagaaaagggtgactgctcataaaatacctcaggcaagcgatcccttaaaactgattgtcccaactcagaggccctcattttctgcaatggtgattatcggaccaagaggcccgggatcccagcgtctgctgctctcgcttctgctccttgcagcctgggaggtggggagcggccagctccactactccgtctacgaggaggccaaacacggcaccttcgtgggccgcatcgctcaggacctggggctggagctggcggagctggtgccgcgcctgttccgggtggcgtccaaaagacacggggaccttctggaggtaaatctgcagaatggcattttgtttgtgaattctcggatcgaccgcgagaagctgtgcgggcggagcgcggagtgcagtatccacctggaggtgatcgtggacaggccgctgcaggttttccatgtggacgtggaggtgaaggacattaacgacaacccgccggtgttcagagaaagggaacaaaaggtacctgtttctgaatctgcgcctctggactctcattttcctctagagggcgcttctgatgcggatatcggcgtaaactctcttttgacctatgcgttaagtctaaatgagaattttgagcttaaaataaaaacaaaaaaagataaaagtatattgcctgaattagttcttcggaagttattggacagagagcaaacgccaaaactcaatttattgctgatggtaatcgatggcggtaaaccagaactaacagggtctgtccagattcaaataaccgtcctggatgtgaatgacaatggtccggcgtttgataagcccagctataaagtagtgttgtctgaaaatgtccaaaacgacacaagagtgatccaactaaatgcttccgatccagacgaaggacttaatggagaaatttcctatgggatcaaaatgattttgccagtgagtgagaaatgtatgttttcaataaatccagacacaggtgaaattagaatttatggtgaactggattttgaagagaataatgcctatgaaattcaggttaacgccattgataaagggattccttccatggcaggtcacagcatggtcctggtggaagttctggacgtgaatgacaatgtccctgaagtaatggttacttcactgtcgctccctgtgcaagaggatgctcaggtgggtaccgtcattgccctgattagcgtgtcggatcgtgactctggagccaatgg

SEQ ID NO: 34536 - DNA, 2300 bp, Homo sapien
atagacaacaggaagctgaaataaagctcaaagtgcaatatatcaagtatatgttagaagttaaacatgaagggaaaaagataaacagaagaggttttccaccagaagtagaacatttaaattagtgtatgtgcgtgtgtgtatgtatacatattttagttaaagaagtttgactatcttcatagtgtgagtgaaagaaacaagtaaaaaataagatactaaaaataagacaggcagcaggtgaatttagatgaaaaccatgagagaatagaaaataatttttaagagcatatggttgaccttaaaagcgggaacagtttttccttacaactagtagaaaatgaaaacagataatataaggaaaaatgacacaagaagagagcaattgaatttctgtttggtcacatctctcaatgtgtgaatcatctgaaagtgaactgatggaaatgaggttgagaatttgagaagagaggaaagagaatatggaagaatctctgtaagcaagagggaggagttaattatcaattcacttgagagcccaactgaggtaaaggtgagagtaaatttgaagagaatagtcatggttaagtgacaatgttgagcagcttaataggaagcatagagaaaatggattgtcagtgtaactgcgtgttggaggctaaaaagaatgttagaggagtaatataaataggtgaatgactctagagtgtctggaagggcatattttaaatggttgactatgtagtctaattatgtgaagaggtaaataaagaaatgtagggccagatagaaagaattagaagagaaatactatgttagtaaaagtaatggagcaggagaggatgatgagggtaagagaataccaaatactctgcctaaattttcagaggagagcagagctatggaaataaacccaacagtcatttcctatagagttgtgcacagaacaggccagataattattggagctatgatatatttttcattacaccatttggcctgggattttgtggcttggtagagatagttataacaatagataaaagtaagatcctcttcctcttttccttgctaaagatatgttaacatctttgtctagctgttgtttcttggaaaattaaagtcaatttaaatgacggcaaggttttactcagtgatgatgaagtaagatggagagagaaaatggaaactttaacctcctggttaaattctatttaaccaggacgccgattcgggctacaatgcgtggctttcgtatgaattgcagccggcggcggtaagttaaattctattaaatcaataggatattagttccaggcatattttataaaaacagaatccaaaaccttagagcattgttgtggctaaattattgtgtttatgcacatacacacactcacatacaaaatcccacacatattgactgaacactttcttttgaatataaatatcttatctacatctcaagtcacattgagggaaatttattaatatgatgtgcttattcaaaatctgatatatcagttaccaatatttttcaccttcaccgattttattcttatgtgattgttatgtttccttttggagtcaatggctgttgtgtgaggaggtcttgaaaaatattacaggaagaggacagtaccacaaaaacctacatgactatgcagaactaccgatcaattgtcccaaaacgagtgtcgaatattctttgtcttaaagttctgcatggaattcttacacatggaaaaataaatttgtggcaaaatgaaactcatcaaccaattgtcagctaatataaaatgttgagcagaatgcagtgatttgctgtttctgggaaggtaaacatttaatcttcaattacatatttgcagtgaaaatgtcaggaaatgcaaggggcaaaaaaatactacatcaatggaaaatatgaagactgagtcatacttacacttacacgttcatgcgcatggtgtcgctcttcactgagaacgtttccgcgaagaaagccgccgtttctttcttcctgcagaaaatatagcagaaagcggaatacctcttgcgaatccttccgcactaggaagccataaaaattgggccttgagagacagtttgaggtaaggcgttgtatatattgcagatagctctgaggtttttggagtgtaccatgctgtcttcctggcaaggaggcccaagaccgcggcaactactgctctggcttctgatcctcgcagcctgggagacgggtagtggccagctccactactccgtccccgaggaagcaaaacacggcaccttcgtgggcc

SEQ ID NO: 34537 - DNA, 2300 bp, Homo sapien
tggcaggagcctcagtataatggtgtgaggaacgaaatcattatagtgccaaatagagtataccatctctttagtacaatgtctttcaaaatgaggctgattgtgttggctttatatttgactccttaataattaaggcagtaaattctagctggagctaaatacctacaaggcctaaaacagcataatggacaacctggcaggtgtccttgctggaagatgacaagagtgctgaaaggagagtcctggtttttctcccaagacatgacatttgggggcttccattaaaaaattaccaagcctctgccactgtaatctcttccttaagtgcctatgattttttcacagtcacaggtctatgcctggtcaatacccagtggccaggtctctgagctgcgtgcagagatggcagcgacttggagggctgggaggagataaggggaggaaagatcacttttcatgacaacttacaacttgattccacttataagccatttattttcagaaacaagtaatgggtgaggacacaggccaggtccacaatttgtgcacttgagagattaaggcctccgagatcaaattaccacagcaaactgagacagaattattgtagggatgtttggggaggatgcagagagaagaggaagaagccagagacccaagaaaggagacaggaatagattttgatgaaaattgcttcctactctgtacccttgaggaaacaaagaggacaaataagaagcagcagtgataggaggctgggcgcttctctggaataacactggctaggtagtggagcattgatagtgagtgtgcttggttggtggaacgaagggatgtgctagttcaggcctttgaattctgggtgtcaggatcacaaccttggctcctttaactgtccgctctaggagggaagcatgccaaatgtcaggtctcactctgactttgttccagtccatagctagaaaatgacccatagaggaagatctacagatgacagaatactgggagatgaagagaaaggacgttttagtgagtgctttttttgcacatgaggcaatagatttcaaattcctgtggaagaaatgtgagaacctgggaagagtgaatattcagaactgagcagcagaggcaatgacacagcatggaaagatttcctctgatccttctaccttctcttttactgaagtgaatttgttgtctctgtgttgcctctatagcagtacaagaggaaacttggggacacagaagaacagaagtctaaggagtcttatatttaaggaagataagctgcagtcattgaaattgctggttattgtaagataaatcccagactcccacattttgcttaatgacagcagatttttttttttttttaactgcaaagcattaatggaatccaaattccagcctggcttaggagatcaacagtaacgctcttgatttaatggttttgcagactcttgaagacattgtcatccattaaagaaaaaattttaaattactcttgaaagaaaatgtcttgggtgataaatgtaaaagatttgaagcaagattagaaaaagcttgagagaagaatctctttaaaaattttaccagattttccccattgtcgccaaaatgggtcaaataatagatttgcctacagcttcatggagactatttttttaaacagagcattttaaacatttaaatattggttatttgccaaggcacacactgaaaataagggccacttggccgagagcagaattgagtcttggatcccaggatgctggttttaggcttgctcccggaaagagggcagcatttgccatccccctccttttgccctaggagttgagcactttctgcagtacttaagagtgtccagggaagatgtgggagtcaggtgaatagttcccatcgccagtaaccccagagcgcctccccctgcgttgtttccttttaatgttagatccgccgcctgggtgcccatacttagctaaggcccctcagtttattttcctgaattgcgcttggagatcttttcctggggagctgatagccagacttctaggggcttgactgcttttcccagactaatctccttaaagacccgttaagcaggggagagacggtggagactggatgaactggacagtgggggtagggagaaagggagtggccgtgttcctgcggtccgctgggatccggcaggtccagggtgaaggagatggggctggagaggctgagcagtccgggttcgctgtccgccacttcggcgcggaatcagagcaggacttgctgagccctcctac

SEQ ID NO: 34538 - DNA, 2300 bp, Homo sapien
aagaggaaaatgagagcacaccataagtgtgtctaaatacagacaaaaaagagtattgtccaatccacaaaaatgcccaaacatctttctgtcctggctagtattagtcacttcagcttacttaccaatcacagagttagcctcacccctttcctctcaccttctacataagaattatcaatatactcatcatagagttaactccacttatgatgacatccaatccagagcactctgcttcaaacctcccccaaatcatctaacacaagaccaaatatatgttctttctaacaccgtttcactgagatgctccatgactctctatggtgtacagcttcccttgttataataagtcagtaaatataactttgttcaactacaggtgtgtgtctgatggtctctagctaaaggacattgacaatatattggtattttatacggtaatggaaataaatgaactagagctaaagataacaccaatcttacattgagctaaaaaatgagggaaagaaacaaaattcaaaggattacctactgtacactttacttgatacatagttttgttttatttctactcatactcaagtaagatatatagttttcaaaagaggcaaaactaaactgtttaaggatgcacacttaagccaggtgttaaaataactgacagagattgagagattcattaattccctcatgtcaggatgtaattaatgttctgtacactttctactttcattctttttttcctattggaaaatatagttagatttccgttaagtggccataattttatagcacctgggacataaagtattgagcacaaatgagaaatcaaatgttttaggtaatgagcatgagacagcatcagaagacaagttctagttcttacactgccatgagtagctgtatgaattgggcaagtgacttcatcacttcgggccttagtttcttcatctgtttttttttttttttaaagtggagagtgggtgagaaggagactggatctcatctttctgaaatgtcttattaaacattctattatcctatgatcataaaggaaactcaacaaatatctcctatatttctattaggtcattttcaatatgtgtaagcaatcttattttatttgctttaaaatccaaaaccaaatatttatcttcatttgatttattcattatattatctgggaagcagagtagtgtactgattaagagcatagacttcggagtcagacaaaattaaattgagttttatttctaacatttgctaggtaggggaccttgacataacctctcccatctcactttctttgtctttttttttttttaataatgtctactccatatagttgttgcaagtattaaattaaataatgcatgtaaatcacttgtcatagtctcagtacatggaaatcatatccaataaatactactgccattataatcataagtgacaagccagctgctccctttgtgcacgtgtatacagatatttggaggggggcggagcgaatacgtagaagtagcatgatagcgtagtgcaaatcaagaggtcagttggcttagtcccctgtcagtgtacttactggacctcaagtttctgaaggagaatgtctgttcccattccttttcctactgaccacttcctccacattctctagctccctgcctcatatatttggcttgggcttcggaagactctgcaggatccttgtgcttctttcttggtctctggatggaccgcagagtgtgcagatgtagcttaaacttgttgctgttcgcccacagcttcagtggctccagacagctagcagatagaatgacttcagcttgaacgactaatctcattggcttctcaattcccaaggactttttttcctgaaagggaattaacaggtgagtctgttgttgctttggcaacaaactttcaacctctacctaactctccggaatgagaacatatctattaatacattcgctagactggggagttgagtcgctcaatgcaaattttctttcaagtgcaaaacagcttaatgggctcggctagcctttggtggtgctgcagttagaggctagtgaagcggagagcagctgttgcagtaacctgttgcagaaaagtgaaagtatatccgcaacagttggctctgattgcagagagcgcgcttgtgagaactgatggcgggtacgcgcagaaaatctttgcaaaacaggcaagtgggatctcttctcatttttctgtgcatatctgtgggggatgcgacaactatccgctattcagtggcagaggaaatggagagc

SEQ ID NO: 34539 - DNA, 2300 bp, Homo sapien
agacattccttataacaaatagttaaaaaagtaagtgcatttgtcaaaggaacttgagtgagtgtgaattcttatcaaaattgaggaaaagataatggaaagacagtgaaatttgattggggctggattttagataactgtagaatttttttaaattttcttaggtatgatagaaccattatgattatatgagataatattataattatgtgatacctgctgaaatatttagaggtgaaatatgatgtctgcaagttactttcatataagtcatcagaaaagcgggtgtgtgtacagaataagatagaacaaatatggtaaaatataaacaattgttaagtttggatggaggttagagttgtagtttatgtatagttcttttaactgttctatatatttaatttttttcttcatcccccaattttttaacccaatggatcttttagagacacatcctaatatttattattattattattattttgagatggagtctcgctttgtcaccaggcttggagtgcaatggcatgatctcagctcactgcaatctccgcctcccgggttcaagtgattctcctgcctcaccctcccaagtagctgggattacaggcacccatcaccatgcctggctcattttttttgtatttttagtagagatggggtttcaccaggttggccaggatggtcttgatctcttgacctcgtgatctgcctgcctcggcctcccaaagtaaaattattttttaaagcagccttagagtttacagaaaattgagcaaatagtacaaacagttcccctcacataccgattttctcccactcaaagtttccctgttatcaaaatcttgcattactgtggtacatttgttacaattgatgagccaatactggtaaattattaactaaatttcatagtttagtgttcactctttgtgttgtatagttctgtggattttgacaacggcataatgtcatgtatctaccattgtagtatcgtaaagtaccccatgtttaacctcttcatccccctccctcttcttcctagctatcacttgtcttttaaatgtctctataatttggcctttttcagagtatcatgtaatttgaattatacagtatcattgccttttcagactggattctttcactgagaaatatgcatttaagtttccttcatgtcattctgtggcttgataacttctttatattaacattaaaaaagaaacaaaaagacaaaattaaaaaacctaacaacaaacaatgacatatataccctgtttggaagcagattgaagaaaccatcactgaaaagacatttttaaagataattggggaaactggaatatttactggctatttaatattatgaaattgctctttgctagatgtggtaattgaattgaggttatgttgaaagttctcctaggcattagaaaggaaaataatattgatacatttacaataaggaaatatctggctgctcttggagagtttcatgaggctcagacacatcaaagttcaggaaaatgtgaagtgggagcagtgcaaagaaagaaatatgagtaaggagactatttcagtgcccattaaaatactcttatttggattctgtgcttttcctgggtctctgtttttcagctgggtttgagtgtgatgatggtaatctaaccaccactgagttgcacacatgcccaaactctgaataaaaatagaactttcttagtctaagccttctttccgaagcatgctaggactgagatcactcccttccaggttctgaaatttattttttccagtttgaaaaaaaaaaaaaagcttggatttgtgagggaagtgaagatttatttattcttgccctgtctctatgggtgcaatgaagagcctttcgaaacgccaataagacttcggtacactgagagacactacttgaaaatactcaatttcgattgccatcagcctgaaagaaagcactgggattttcttaaagtttaggagaaaataaatactcggaagagacgcggggtggcgctgcagccttagaagtagcagaaacaaagcacccagccgacgctccttacccagatactcagctaaagaagcagcaagcaggaagaggaggctttctaaggcggtcgctccgggaaatccgggccctaggattgtccactcatcccagtatcagcgagatacggggagatagagttagcgacaacgtgagccagagctggagcacgtttggtgagagaccagaaagcaatggaggccggagaggggaaggagcgcgttccgaaacaaaggca

SEQ ID NO: 34540 - DNA, 2300 bp, Homo sapien
ctgtttctcaacagctccctcatttattgaatgattcacacagtcactggaatattataggctcttaataaaatttttgaatgattgaaagagagaaaagtattttacctgtgatatattgatatttaaataaactagaacacttaaaggaaaacattttgctggaatcaaatactctttggtgtacaatgaattataattttgttattaattgaattggttaccattgtttgaacatgcagttatcattctgttgtcgctttccttcaacatatttttactttttctcttaatgcttaaattgagcctcctttcctgtccactggcttaaggaatacagatggcttttaattttattacttaaatttccttccatagttccctaaatgactcacccaactgttttcatttcttgcagtttactttctgatccatacattaaaacaaatcttaattcttaatgttactcagtctatctttatatttttatatcatttttacatacatttgaatgagctatcctattaaaattttaatattaactttgaaggtcttgttttgagattagcaatggtgtagagcgctgtgttggtatcaaaagtctctgatcaaccaactcattacctgtaggattttggatgagtcacaaagtttcttttcttctacccaaatgatagcaggtatttgaatagcttgcagttatactcaatataaagacataaaagtgaaattgctgttatttttagtatcactagtattaagagcaaacattcttgataattgtgtagaagtacaaaagcggctacattgaacacatatttgcactgttttatttctgtaccaacaaccttgcaatggcttccttttgttcttagaataataaaatccaagcgcccattatttggccttggtttaccttttcagccttcctttccacttactcttgagacattaagttttgtattcactgtacttcattcattatctattaatagctatgctttgctctctcagggccttcacacattctacagtcttagcctggcacacttctcctatttcatgtttcagattaaatggtgcaccttgggggaaactttcttaatcactctccattaagttaggtccccgtattgcatactttcagtgcactcagtaccttttctatgtagcacttttcacactgtttaaacatctgtttaaagactgtacacccactagatggaaaattgttgtaagatatacagacattgtcttgttaccaccacttgcctaacttctacaaactcaacaattatctgtggaaataaactaatacagatgaaatgaataattgtaaatttgctctgaaataagaagagaaagcactttaagtgttccttgagcatgataatctggaagaaattaggtatttgtagtcctctggatccatctctgacatgatatattttcttttttaccaccttgcaggaggtgtcttttccttgtatttttctggtatatgcaattcgggctcatttcacaaagtttaggaaaaaaagaaaaacataaataggatagtgaagcatgctatcatctagagcaaaaatcttttgaagtttgtgtgtaattattacaaaaggggaggggtaaactagtatgtgtacacttccgttaaatcgtgtaaatgaggactctaccaggaagaatcgctgctcgtagataaaagtgcattttatttccctagattgcatttatttaattcatataacatgagaaactcctccagtagcgtcaactagggttgataagaataatcgataaagcaaaataaaaacaccttctccaagattttgtaactgcaagcgaacgcatggtggcgctgttgactaagaaggcgaattaaaccacaggcattgtgcatgctcggtgacgcacggatccagtgtggtaaaccagcggttgagagcccaggcagatttttgagccagcaagtctgagcctctggaaaggcttattcactaggccgtctacaaaggttgtggggcaaaagactgtttcccagctctgtctgaggttcagcttggcgacattccctggaagagcgtgacggaaagtgcaatggaggcgggaggagagcgatttcttagacaaaggcaagtcttgcttctctttgtttttctgggagggtctctggctgggtccgagtcaagacgctattctgtggctgaggaaaaagagaagggctttttaatagccaacctagcaaaggatctgggactaagggtagaggaactggccgcgaggggggcccaagttgt

SEQ ID NO: 34541 - DNA, 2300 bp, Homo sapien
tggctcacgcctgtaatcccagcactttgggaggccgaggcgggcggatcacgaggtcaggagatcgagaccatcccggctaaaacggtgaaaccccgtctctactaaaaatacaaaaaattagccgggtgtagtggcgggcgcctgtagtcccagctacttgggaggctgaggcaggagaatggcgtgaacccgggaggcggagcttgcagtgagccgagatcccgccactgcactccagcctgggcgacagagcgagactccgtctcaaaaaaaaaaaaaaaaaaaaaaaaaataggactggataggacaccacttttaccttgaagcatttagatatcatatacccatgtattttcttgaaattaaaaattgtctctcagattcataacacttacatctcagaatttatgaaacaaatagttgttccaccagatgtcttactaaacaacgtttttgtgtcaaatggaaaagaacagtcagttttttaaatggcataggtttaatttttttcctcagtcatcatgaacacactttagataaaccaaagggtaattacccatattagtctatatttgtgtccatattttggccaatataagcacataaaatattgaaatattaattgcaaatgtcaacacagaaaatgaactaaattactttcatttgagtactatatccctaaaaagatgatatattactatttattaaagaaaacacattcttgtctatccttaaaactttgttaactatagacaaagctgctttgggcatattatagaacacattatatgaatatattcaacaagggaaattataaaattggtggtttggaactctctctacattgctttataatgtaaaatttgaatggagttattttaataagctatttgaaatcactattaaaagacagtgaatttctttttgctccccattagaaaaaaaaaaggcggaattaagactgcgttggcaagccaggatgaaaggagaatatgcaaggattaactacagaaaaagtagaatcaatatataaacaaaatgttctatcgactaaggattctcgattgaaatacaaaacattcagagccacacaactactttccagtactgttaatgaaacctaagccatccctggatttgatattttgctctattcttgctacttgccttgaaccagaccaaaaaagacctctccaatggacaaagcagtaaaaaaggactttccacagattaactaagacgaggctcagtagatccttattaacacttaactgaattcaaagctcttcctgaaactgggatttgcctcgctaaccctctctgcaccctgagcaacgaagttggggataattggcttcaggaacttgaactcatttgtcccggagcctccagtcagacacacctcgtactggtagctctgggacagggtcccggtgccgctcacgtccaccatctgccctggaaaggggccctcgggcaccgagcagcgacccaccgaggccgccctgctcctcctgcacagccgcaccgccacgaacaggagcaccgaaaagaggaagagcgaagacaccgaggccaatgccaccaccaggtagacggtgagcaagtcggcctgggcctgggccggtgccgcctccgggagaggcaggtagggctgggagaagccgtccaccaggagcacatgcagcgtggcggtggccgagcgcggaggctcgccattgtccttgaccagcaccaccagcctgtgcttggccgcgtcgcgctcgctcagcagcctggcggtgcgcacttcgccattgtgcgcccacacgccgaacagcccgggctccgtggccttgagcagctggtacgacagccaggcgttctggcccgagtcgccgtccaccgccaccaccttggtcaccaggtagcccggctcagccgcccggggcaccagctcggtgcagggcgcggagccgttctgcagcgggtacagcacgaagggcgagttgtcgttggcgtccagcaccagcacgcgcaccagcgcctcgctgctcaaagccggggagccacggtctgtggcgcccacgcggaactcgaacgcctgcagggcctcgtagtccagcgacctgagggcaaacaggtggccgttgtccgcgttgatggagaccagggaagagaggggcaggtgcgggtcctggggcggcagcagcgagtaggttacctgggcgttggtgcctgagtctctgtctgtggcgctgacactgccgatgtgcagggcggggctgttgttctcgcggacgaacagggtgtaggag

SEQ ID NO: 34542 - DNA, 2300 bp, Homo sapien
aaaatgagtcaacatacgcaaaatgcttagaaaaatatctggtgtatagtggatatatatgttaatgttattgagatttcatttacttttggattgcaaaaggaactgaaaagacccaattcttactctatgtcaacatgtaggaataagtaaacaaaatatggtttgaattttgtcctgaatgcattaacttgaatctaactaaaacctggttactatattagaaacaattttctctttgatttgcccaggagatttgttttccagttatgtctaaaataatactctttctttttattcttttcagtatatatttttattgtttttcatttaatagtgatgcatagtgtatcttttctgatttactttaaatgtgaaagaaaattctaagatgttaatattattattactgccattgatatatcccttataggaattaattaatagaaatagaatcaaagtaaatttagttatataatgcttagcatgtattatattctcaaaattctgtattcagtttcagacatgttcaaggctgaatatatgatctgacaataatctgcttatatagataaaaacatcatttgagtggattaatttattaattcaactggtatttactaaataaaatccatgtatctttcacaatttttactaatactttctatcactatcagaatctgaaatctcagatttcatgctttaaaaagaattaatttaacatgaattataaattataattacttatatgaattggataactaaataaaataacaagatatttaaggggagaaaatcttatatgtggcaagataagtggtgctccattcagtgtattaattgcaaccaataaattggttaactgtgtctcagtggtaccattctttcttattgtttgagagtaatcacagtagctacacactgtggtgggatccattttatacacaagtctctttacttcaccatatctgagtagagacagcctaagtcaccctttggtcacagaataaaatattttaaatcagtgcttcttgttttccccaaaattagctggtcaaggaatatgatatctgggatacaaaaggtgagtgtggtaacaggcaaactcattgtaaaatatagattacatctatcttgctaaataagctcagcttaaagcctttatcttcacaaaattctgtgactgttactcacttttgtcttgacattatcctcataatagtcacatagaataatcaagtcctgttaccctctgagcttcagttttagtttccttatcttttatttcctctttagttctaagaatctgtgattctaatactatttgccttactcctaggttcaatgtaggttcacactataaattacttgatacaaaacaagatacctgtctattcacctgtattactatttgcacattaaagtaggaaaatagaacctttcgtttcaaaggtagtcgcgctttagaccatgtatagagaacatcttaaacttttgcatcatcacaaagtcctcacattcttagaaaagaacatttataactactaagaattgaattgaaagtgtataaaaatttgtctcctgtggctggattatgtaaagaagaaatggagttctttgaagtttcactgataagcgtgtggggagtctgagatatcttcttgatttgtgctcatgattattctggttcgtgcactgtaattaaataaccttttaaattatgcagtttaatgtaacaaagtttgtaaaaattctatgctcttaaaaatggcttttattttaaaacttcccaaatacgttgtcttgaagttgttaatttctcaatcaagacgcagggtggcgctgcaggctaagttgtgaataatgagccctaaaaagctcgcgcgtattcttctgtgtcgctagacgcaatcaaaaacacacggaagaagcgttacaagcagtgcaggtttaccaacggcttggggcagcgatatactaaacaaatttaatattaaaagcaactgtgtgacgattcctccaagcaagaaattggaattgaatgtctcaagtctcgttgcggttgctgaggggattggatatagggacctggactccaacatgaagaagctagggagaattcatccaaacaggcaagtgttggcctttattttgatggtgttcttgtctcaggttcgcctcgagcctattcgttattctgtgttggaggaaacagagagcggctcctttgtagcccatctggccaaggatctgggcctgggaattggggaactggcctcccggtcagcccgggtgctgtc

SEQ ID NO: 34543 - DNA, 2300 bp, Homo sapien
cttgcattgggttctaggggagggagggaggtataaataagtggagcacaggggatttttagagcagtgaaactactttgtatgatattataaaggtgaatacacataattttaaatttgtccaaagccatagaatatacagcaccaagaatgggccctaatgtaaactatggactccaggttataatgacgtgccaatgtagattcatcagctgtagcaaatgaaccactctggtggaggatgttgataatgggtgaggctgtgcttgtgtggggacaggggcatatatgaaatctctgtactttactctcatttttgctgtgaaccaaaaaccattctaaaaatttagtctacttttaaaaaactggagaacttacttctcagataacaaaactcatgataaagctataataattaacacaatgagttattgtaggataaacaagattgaataaaacatcttcagagctatggttacctaatttataacaaagatgacatttcaaaaacaatggaaaatggattgtcttttaaatagatggtgcaaaggtttaaagcattcagatacttacattttaaaccttttgactccaaactcattcacttgaaaagttaatttcaggttgattatagctttaaatatgaaaaatggaataattaatctttcaaaatacatcatacaagaatattttcatgaccttggagtatgtgaacatttaaatagaacacaaaaaaatgctaatcatacatgaaacttattgacaaatctgactaaaggtaagaaattttattcatcaaagacacataatagacttgaaataaaaaccatagagtgggaaaagatatttgcaatacatatatcttaaaaaggacttatgcccagaatatatgagaaacttctgcagatcaataagcaaacaggcaaatgcctccccccaaaaaagtaaaaaggtttgcataagcccttcacaagattgtatcctaatggctgataaacatgaaaatgtgctcaaattgtttaatcatcagggaaaatgctaactaaaattacaatatcatatcaccatacactaaccagagtggtttaaaatggaaaagatagcatcaaatgttgacaagaatgtggagcaactggaactctcatactttgctggtattagtacgactacttgagaaaactttctcattatctgctaaagcaaaatatatgtgcacatcttaatgcatagcaatccaactcctttgaatatattcaacataaacacatatatgtggtcaccaaaagactagtacaaggatgtttataccagtactaccccaaagagcttaaacctggaaaacaatgttcatcaactggagaatgaataaataaatcatagtatattcatacaacagaatgatataaagcaatgagaataaaacaaataagaacaagatgccacagatcaatttgctgaacataatattgaggagaagaagccagacacacgagagtaacaatctataactccatttgtataaagttaaaaaaaaaaaaagcaaaaaaaacctatgacaacagaagtcaggacagtgcttatcttttggggagagggtggtaaccagacaatagcaggtggggacttgggtttgggtagtatttttaatctaggttctacttacaggagtgtgttcactttgcgaaaattcattgagttatacacctatgatttgtgccattttctgggtgttattggtgtttacttcaaagtgaaagtaatttttcttaaactttaaatttctatagatattcctgatcacttatttaatataatcaaataagaaacaccaaacaaagtgtatttgtgtactcaagggtacttttatggagattaatatataattttagtttttttctcaaaagtattttctcactgaaaattaactccacaacatttatttagaactttcagcaactaagagctggagataccatcgggagagcttatgtgacaaaagggtatggatacacgtcagttagaatttaggatgaaatggcaaatactatatgcaatagtaaattaggacgcctggtggcgctgcaggctaagagtgtggatagtgggctctgcggataactcagacgccattaagctggggaatccaaactctaaaagaaggacgcattttaggtaagatctagtggctagatcttcagggtgggcttcgttcttgtggaaatcagtcaagaaagatcggattcgcggttatttatgcaaatcatctgggtggattgtgtacggagttaaactgcgccttc

SEQ ID NO: 34544 - DNA, 2300 bp, Homo sapien
tgagaacatgtttacgaatgcaaacttaattcaactctactctagtcaatcaaatcaaagcaaaagagggcaacacagagaaacattctcctgaaacaatctaacgtaatccattttctataaaaaggcagtttcttgatagacccaactgatatctttttggggtactttgagctattatcctctttctatataactaccaatgttatcaaagacatttcaaggatctaaatggagtttgacaaatactgtactgctgataaatttgctctgacgtaaaaaaataattcaacaacctatattcgaggatgcctggtggtgcttcagagaaacagagtgaataaaagactttgtggatgccgttaagctggaatcagaactcagaatgctcaccgaaagaaggaagcatttaagattgagcaggaaataatggccttgtttcagcaaagagatgacaccagtccaatatgtttattattgttggtttatttcataatttcattttgttacattctcaaggaacagtgtgttcccagtagcatctatcaagtgaaccctggaggctggtcacattcataatcttttgtttttctggctacatagaggtgattttgaactacaagatcatctcagctattcagagtttagattttatttagccttatttgttttgcctagcatttatgtatttgaaaatatcttgatttttaatcttctatcaccttggcccttacctgaagtgaactttgtttgaactcaattgatttcacctctcaataaatatgaaattaatctgaaatgaattgaattgtttggcatattttacctcttctatgtgcactaatctatttcacacattttcagtttgtttagagatacatgttccaatgtatctgagtagaaactagtgagatgggaatggatatagccataatattccatcattgaattccatggcattcactcaaatgtaactcacctgttttaacagtaccttaatttggcctgtatttattggacttggtgttctttttgctgtgagaagacggtgaaggtgattcttgaatgtttgttttctgtgttgcatcatgtttgtacaacacggtaatatatttggaccttgattaaataatgtaagaggggaatttgatcaaaaaataaaatgcacaagactgttaaaacaatgtctaattctatccatgcaaaaatggagtagaatcctaaaatgcttatgacaactacttgattgcttctagtccctcttttaaatactttaatttacttagatacatgtatcatacgtacttcttggcctcagttttcctcctaatagcctaattgttctttttactgtgcaggcataactatataacaaagtaggttttttttttcatgccatttatgagtcatataatttagataatttattgtttattttaccattattgttgctaacaaacttcgttgttttgcattgtttgttgggacaattaaatagtgtacctcttggactaatagattaaatagttcatcagagataaattgcactgctgaagcatcaaaggagaaagactgaagtgtagaatctgcacttcaatctttctccttaattagcaccaccagggaatttgattcaagttctagaggggagtgaacccaggaattggcttaaaaacaaaaacatacacacaaaaaaaccaacgctcgcaagcaattatttatgcatgcggtccacgcactcagtttgagaaacactgactcgacttaaaagtctttataatgctcagatttctgaaatgctattgacctgaaaacatctcatgaagttattagtttgaacgcgtggtggcggtacaagctaagagagtgaatgaaagctctgcagactcggtggactccgtttcatccagaagccaagtaaaaatacagaccacgtttacagctaaagctgagatagatgtgtccgggaaggcagtcgtcgccagacaagttgtaagaacgaatttaaaaatctctgcaaagacatccgagagggtcgacggtagatgtggtgattgggagctgaaaaggatttttcttccgtattcagacataatagacatgatgcaaactaaagtacagaacaagaaaaggcaagtggctttcttcattttattgatgctttggggagaggtgggttctgaatcgattcagtattccgtattggaggagacagaaagtggcacgtttgtggccaacttgacaaaggacctgggactgagggtgggggagctggcttcgcggggcgctcgggttgtttt

SEQ ID NO: 34545 - DNA, 2300 bp, Homo sapien
cttcgctcactgcaacctccgcctccctggttcaagtgattctcctgcctcagcctccttagtaactaagattacaggcgcatgccaccaaacccagctaatttttgtatttttaggagagacagggtttcaccatcttgaccaggctggtctcgaattcctgacctcatgatccacccgcctcagcctcccaaagcgctgggattacaggtgtgagccaccacacctggctgactattttatttttatccttaattgaagtggaactgggctgaactaaattacatttgactgtgttttgtgtccagataagtgaactgactgtcatggatgattaccaactgattaaatgagtgtggggaacatttactattttgtgttctcagatatataccctattctccttagaacagcattcttccttggtgagattccttcttccattgttctcactccagtcacttggctttagttggagcagtagtgtttttcaatatccccatccccctaatcctagagaatgtacactggggtagtatactgtccaatgcagacaggtcaatacccttccccagacagtgtatttttgactttgtcaactttgttgtcttctttacatctgtagaaaagacattgcctagattctgagcttatattgattttttttttttttttttgagacagagtcttgctctgtcacccgggctgaaatgcagtggcacaatctcagctcactgcaacatccacctcccaggttcaagtgattcttctgcctcagcctcctgagtagctgggactacaggtgtgcaccaccacacccaattaatttttatatttttagtagaaacgaggtttcaccatattggccaggctggtctcaaactcttggcctccagtgatccacccacctcagcctcccaaagtgctgggattacaggcgtgagccaccacacctggcctatattgatttttaataagacaaaccaccattttctctaaatttcactgggcattgcacataataaatttatgaaggaaaaaaagtcctaaatggtggccaggtatggtagctcaagcctgtaatcccagcactttgggaggccgaggcaggcagatcacttgaggccaggagttcaagaccatcctggccaatatggtgaaatgtcatgtctactaaaactacaaaaattagcctggtgtggtagcacgcacctgtagtcctagcttctcaggaggctgagtcaggagaatcgcttgaacctgggaggtagaggttgcagtgggccaagattgaggccactgcactccagcctgggcaacagagtgagaccacgtctcaaaaaaaaaaaacaaaaaattcccaatggttatgtagaccagagactaacaagaaacaatatttttattttctttcgggagttacaggcacattacaatatgagaatgaaactagattttgaaagttcatgatttcttccagtacaatagaacaaattagcatttttgtaatagaatgtaaattccccaagagcaagaatttttatgtttcatttactgtattatcccaggaagctacatgaatgtccctacaggtaaatacttgttaataaatgaatttgcctggagcagagttttgtgtactgaacctgcacctttataaggaagatgaatatagatacagacattacttttgctgtaacaaccattcttagctacctgaacaaggcctcataatagccgggggaaaagggagtatataacaggctatgacctaaaaggcctgctatatgttttagctattacagtatacagtgtgctttgaaatgaaaattatctgaagttgtaaagcagaacgcttggtggcgctgcaggctgagtgaaaaactgcagaatcagtgtctccttaaaagctgtgcgggttttctggcagctccaaaaggaaacactttttcactactggggataggtttcagagaggcagccatcccatgtcggtcaatgttaaaaagaactaactcaagatatttaaatcaagatagctgagttggctgtaaagcaattattttgtgattaaatactgcatcttttggaccctgaggaatgatggagacgccgctccccaaagcaccagagaaaaggcaagtgaccgccattattttcttattactactgtgggaggcgggcagcgctacgattaagtattcagttctagaagagagggacagcggctcttttgtggccaacttagcaaaagatctggggctgggtgtaggggaactggccgcgagaggcgcccggat

SEQ ID NO: 34546 - DNA, 2300 bp, Homo sapien
agcaatcctcttaacattgtatcatcttttcaatcatatgaacctattggaggatgtgttctagtaatgccatagagtaaactgaaaaagggcaagttataaaatcccagaaatagcaaacacatccagaataaaaggcaaagaattccaagaatgacagcaaagaaaaaaatccagaatgatagctgtgcagtaggcacagaaagcaaccacccaatttaaagaaaaattgaagtctcaggaggaatggaaatgactatggggaaaattgcactgacaggcaattgtatctgtgggatgaataagtgatagggataaaaaaaatcaagtaaatgaaaaggcaagataattattaaaatcacaaaaaaattgaaaaagaaaacataattaatacacaataatgttcccaatatatggtaagtaaaagaaaatctaaaatacctaaaatgtaatctaacataataaacagtcaattgataatttctaaaattaattaatcaaaatatatcagaaaacagattagtgactgaagagataactaaaagagttttaaaatggctacctcttagaaggggaactaagaaaagtgaggaggaaaagggcagaacaagcctcttagtgctatttaattttggaccaaggtcatatattattttgaaaaaaatgcatttcaaaatatcagtaaagtagagctcttgcaagtctcaccaagaataaaaaggagttaaaatgctaaacatcactaataaaaatagggatacaattaaaggtaaataacgcaatgaaaacaattccaagaaatttgcaaactagataaaatgattttcaaaataaaatgcaagttacttaaaaatacaaaacctgaacagattaataaccaaaggtaaaatgtaaatggtagtcactgatctactgcaagtgaagtcaccaaacccaaccagtttaaaagacaagctggaattaagcatgtagaaacatataataatataattattaaaactattgtataaaatagataaaaagctccctaacacattctatgatgccagtataatagtttaataccaaggccataaaaggcaaacacgcactaggtaaacaacattaactagaaaaatcctaaaaccatgttgacacatcatatctatctgtgcactaaaacaataatacattatggttaaatgtcatttatatcaataactcagtaatttagaaactaaagaataaatgtattatttcaacagctatcaaaaatcacttcaaaatatgaaagaataaaaagaaaactttattgattcaaaaaaggaatatttaccccaaattgagatcaaccatcatagttgaagatgaaatgctagaagcacttccacaaatgcaagattgaccaacttgctactactaattttaagagtattcattggacattggagattctagtcactgaaattatagaggaacaataatttcttatgtaatacttaaatcaggtgaaggatgaaggttgggtttgggggaggcataaagtgttccaagaaatatcacaggtaaagagttaagacctggaaagtggaataattgtttaattcacaagaaattgggaaaagggtcaattattctgccatattcacattattattgttaaatactttacaaataaataaaatgtccccaaccaatatttgttgacttcaaggaggaggtttcattttctcatatatatttttactatccatttttaaaataggagattttcttaggatttcggtggggagtcagagtttagtttcatgctcctagatttaagaagactataaattaattcttctacgaatccagattatcacaggggaaaacgacatcagctattacttactagcattactgtgaccatttgaggataaagatggaatgaaacagcaaagataccggggacaaatcattcttgttgcagaattccttcaatccgccatctttttgttctagtcttgataacgggaataacatccacaaaacgcaaggtggcgctgctggctaaaaagagagagagaaaaataatttcacaaagaaaggatgttacagattccagagcaaagaggcaatctgaagagaaaagcataggaaaggaaacagtggtaataggaattggggtaaaatgaggatccttccccacaaacattgctattattcagctcatttcaaaggattccgctgctgccatttgtgagagccgctggaggctgagtgaaagtcattttgaaagactgatccaaagaagaatggaggccagagtggagcgtgct

SEQ ID NO: 34547 - DNA, 2300 bp, Homo sapien
ctgagcatccatcccagatctgtctgactctgggtcagtgaccctgctccgattccatactgttttctgtcattagatatcacctggcaagtttctgcctaattaaggagaagtcttttatcatatttatactgctgtccaatcttttctatatttagaaataataatgtacatatttatctatggttttattttcttatacaccaaaagtcctgcttttctgggtcaattttcaactattattactaatgctctgatctgtccaaactcaagcggaaaacaaaattgaaagggcaacctgtgccttctcctttcttcagaacatatgactttcatttcccagaaaaaagattaatggtcctgagtaggaatattacataattttgattgcatcattagttaattattttcttcatattgtagattttctgcagtcacccatacttaacatttgtaatacattttcctgatttgaaagtttgtttttaaaagttttctattaattatagtgcactattgaatcaggaaaatttaagaaaaagaatagttagttttaaatgcataatatcaaagagaatcatagatgatcattaaatttttagaaattctcggaagttaaggagaagcactgttttttataaaaatttacaactgatttttatttttaaaatatctagataatttttgcatggttgcattctgaaaatattataaactagtgctggtaactctaataaaggtagtattactatatatcactggtgggatagaatctagaggcaaaaaaacctcacagcagtaaaatcttaaaatgctttcatggtcttagggtaaaattatctaatttctccaacaaataaatagcatgaaaaacaggaggagagaagtctacagtaggaaagatcttacgagatctaccaatcaaacgtaatgtgtggatcttgtctggatcttcattcaaacatcagcaatgactttgaaacacttggaagagtttgaatatagatgggtattaagtaatattaactgaattttttaggtataataatggcattgtacttaagggtatttttagagtcacttaaagttattatgcatttaaagaaatgtacaatgaagtatttgtgggtgaaaattcagtttgtctggaacgtaaagatgttggagggatagcgtcaagaattatggcaagacattgataatagttgatgctagtactgagtaattgcaggttaattttactcctctccttttatgagatatgaaaaatatcaaaataaaagctttttaaaattgatgctattagaagagaaatagaggtaacaaaaaaggacacgcttccccagaaataaaatcaccactgctgttacacattttgtctctatttagacaagctctccagcctttccctgtttaccttcactgtttgacataacttctctacctgagatagtcatgttcctgtactattctaccatgtaattttgaggtgtttttctagttatagcaatggatttatgcagagtcacctacctggtggtatcaaattgccatataccgggtacatagtttatttttaagcttaatctctctttgaatcagtttcctcatgtgtaaggtggggaaatcacaacagccctatgtggtaggtgctattattatcctcattttacagatgaggaaattaaagcagagagattaaataatttgttcgaggttcacagctactaattattcctatggttcatggaaataaaactataaagatctaaatgttgcccatgttaactactattatatttgaaattctttttgccaagctagactgttacctaaatatttcctttttgcccaaaactcagttagcattgttgaaagactaacgcaatttctccttcgggcagttgtctgctcagtaacgtccggcgatattaaccgtggtgttgtaactttacatagtcccagggtacatacaggcagagttgggaatattacatctattatcatcccacaaaatgtaagatcctgtgaggacccgtggtggcgctgcaggataagaaggcacaaaccagaaccgcagctgcagctccattaaccggcaaaaagcagcagaacctggaagtccacggggagcttggatgccaaagggaggacggctgggtcctctggagaggactactcactggcatatttctgaggtatctgtagaaaaccacagcctcagatactggggactttacagtcccacagaaccgtcctcccaggaagctgaattcagcaagaacaatggaggccagcgg

SEQ ID NO: 34548 - DNA, 2300 bp, Homo sapien
tcaccgtcactgacttagggacacccaggctgacaacacatctcaatatgaccgtgctggtgtcggacgtcaatgacaacgcccccgccttcacccaaacctcctacaccctgttcgtccgcgagaacaacagccccgccctgcacatcggcagcgtcagcgccacagacagagactcgggcaccaacgcccaggtcacctactcgctgctgccgccccaggatccgcacctgcccctcgcctccctggtctccatcaacacagacaacggccacctgttcgccctcaggtcgctggactacgaggccctgcaggcgttcgagttccgggtgggcgcttcagaccgcggctccccggctttgagcagcgaggcgctggtgcgcgtgctggtgctggacgccaacgacaactcgcccttcgtgctgtacccgctgcagaatggctccgcgccctgcaccgagctggtgccccgggcggccgagccgggctacctggtgaccaaggtggtggcggtggacggcgactcgggccagaacgcctggctgtcgtaccagctgctcaaggccacggagcccgggctgttcggtgtgtgggcgcacaatggcgaggtgcgcaccgccaggctgctgagcgagcgcgacgcggccaagcagaggctggtggtgctggtcaaggacaatggcgagcctccgtgctcggccaccgccacgctgcacttgctcctggtggacggcttctcccagccctacctgccgcttccggaggctgccccagcccagggccaggccgactctctcaccgtctacctggtggtggcgttggcctcggtgtcttcgctcttcctcttctcggtgctcctgttcgtggcggtgctgctgtgtaggaggagcagggcggcctcggtgggtcgctgctcagtgcctgagggcccctttccagggcatctggtggacgtgaggggcaccgggagcctgtctcagaactatcagtacgaggtgtgcctggcaggaggctcagggacgaatgagttccagttcctgaaaccagtattacctaatattcagggccattcttttgggccagaaatggaacaaaactctaactttaggaatggctttggtttcagccttcagttaaagtaattgatttcatattatatattttaatttttatgatcaattcaaaggaatggttttctgtcaacttagcataaattttaaattacactacatttgcccatagtatttgtcttgttttcactgttttaaaaaatgatatctcatcttctcttcattagtatatccagtggactctaatcataattctttaacagtgcaatttttgttaaaatgtacatagtaaaatgcacagatctgaagtgaagaaattaatgtaactgatctttttaagcctttattttttgatttctaatctaggtaaaatttagttaaaagtggtgtagagaatgttttacatttattgccttttaaatgtttccccaagtcctaagggagttgacatattatccccttttttaaatatgagaaaactgaggcttagaaaggtaacttggctgtgagctgtggctcacacctgtaatcataacactttgagaggctgaggcaagctgaaccctttgagctcagtagttcaagaccagcctgggcaatggggcaaaacactgacactaacaaaaatacaaaaattagccaggtgtgattgcgaacctgtagtcccagctactcaggaggctgaggtaagaggatcccctgagcccaggagacagagactacagtgagccaagattgtgccattgcactccaggctgggtgacagagtgagacctcattcccccccacaaaaaacgattaactttcttataattctgaaataataaaggtaaaaatttaaaatataatctaagtctagccaatatgctatatggtcaggcattaactgatagcattgtttttctaactaaggaagtgaaatttatgttattcctactcctactccatgaactaaactctcatgtgaaaatataagttttagtttatagtttgtttatactactctgcacaaatatacccatgttcttatcaaagctctaagtatgctgggacagatactacaaatgaactttatgatgagcgaattaacctgatttatagtcctgtactttctctacgtgccatatccattattaaagaaatgagtctaagtaggaagtagagttaacctatagtttcatttcttgaatttcttattctctttcttcagtctttttcagttaacctaca

SEQ ID NO: 34549 - DNA, 2300 bp, Homo sapien
ctccatttttcatgttacttctcagtttcctagaacttcaagtattaaaataacctgttgcatgtattaggcatatttcctatgttacatttcttttgtctattttcctttcaaaattggtatttttgttgggctcaattttcattataatacttttcttaaagtttctttctttcttttcttttctttctttttttttttttcctttttgagacagggtcttactcttgtcacccaggctggagtgcagtggcacaatcttggctcactgcaacctctgcctcctgggctcaacggatccttccacctcagcctcccaagtagcttggactataggtgcatgccaccatgcctggctaatcttttgcagcgatgagattttgccaagttgcccaggctgatcttgaactcctgggctcaagccatcctccctcctcagcctcccaaaattctgggattacaggcataagccaatgtgcccatccaaagttttatttatttatttttttgagatggagtctcgtaaagttacctttaaaaaaaaagttctattttccctgtattggtatctccttaaataaaataaaatattcctattgtaagtgatatgagaaatctttaaccagccttatctaaaaataaaaagagaagccattgtaagacattcagtatgtgtaaatgtgtttgtgtttgtagacaaaaggcaaaggtattatgtaaaaatatttaataatttattctttctattactgaattaaaaaatcagaggtccctgttatatttttaatggctaacaactcaatctcattaagttggaaaaaaaacttatcaaagagacatttacatggtttggcttttatattcatcatagtatacattggcggtatctagccctttctctgtaaaatatccctatgtttaatctgtatttcttgcttattatatgtaaagttgagcttctttctagatattaggcctttgaataaaattctatgtgagtcagatttaataatttgttttcactttcaatagtgttaggataggtgttagtttgatctgttctttacctccgcttatttggttcagagaaattagggcctactagatttccactaaaagggacttgaaaataaaggtcagtcccttctttaattctgcaagttactttaaagctaatctaagaaaaaaaaaaacaaattgcaaagtatgagtaaattaaagaaaacaattttcaaatggcagagatcgaaaggcactgaattttgtttcatgtcctactcactagtttatttatgcatgccttaatatagccagcatttagtgagtggctaatttgccaaccaaagatgactaagacatagttgttctcaagtagttcacacattgatgaaggggcaaactggcctgaaacaagaagcaataatatttatagagtaaacatagttgtatgcataagttttagagaagcacaatggaaagacagcctaatgcttggttctggactacagagcggtgattctagttaggcaatctgagatcttgaagacatttgttgaagaagatgtgaaacaagttttttttattgttgttaatttttggtgttcctatgcccaaagcttttgagacagtgaaattgattattttggtggttccagaaggcacccacaattttccctttgtttgcgtaagagttgtgtcagaggcgaaaggcctaacacagctaaatctaacacagagttgaacagggttactgctagaaacattttttcaactgttcaatttttatcttttctcatgaagcaatgaagaatttttaaataaacacaaaaattgggcacagccatttgactgtgttggaagccacaaggtggcgctgcagactgaagagacggaggaacaaaattgaccagaatgctacggaagtccttgacaaaaaggaaacactgagacagatgggctgagaagaagagctgtcgagtccctgattgggaaaggaaaaattaaaaaccctagatctctggtacacataagtctgggtttgcgattgctatttgtgctggggcagtgtgattgagactgacattgaggaaagaagcagctatgaagaccagggggttcagctttccaagacaaaggcaagtcctgtttctttttcttttctggggagtgtccttggcaggttctgggtttggacgttattcggtgactgaggaaacagagaaaggatcctttgtggtcaatctggcaaaggatctgggactagcagagggggagctggctgcaaggggaaccagggtggt

SEQ ID NO: 34550 - DNA, 2300 bp, Homo sapien
cccaggttcaagcgattctcctgcctcagcctccagagtatctgggactacagttgcatgtcaccacgttcggctaatttttgtattttcagtagagacgggtttcatcatggtggccaggatggtctatctcttgacctcgtgatccaccccactcagcctcccaaattgctgggatttacaggcatgagccaccgcacccagcctacaataattttcttaaactttaccttttattttaaagttctagtttcccggcattgatagttccctatttgaaatataatgtttctcttgtaagtgatatgataaataaacccctaattagccttagaagaaaaaccactgcaagatattaagcgtgtgtaaatgggctttagtctggaaaccaaaaaaaaaaaaaaaatttagtcattctataggatcatgtgaaaatatttaatttgctccttttaattctgtataaacaaatcagaggttcctgaggttcctgttaaatttttaatggctaatagcccagtgccatccagttgaaaaaacaacagcaatcacaaagtagaggtttatattgtgcggcttttatattcagctattagagtgttattggtagtgtctagccttttcctccacgacattccttgacttaatccatttgggcctattatagacaaaatagagcttctttctagatataaggtctttgaggcagggctcagtggctcattcctgtaatcccagcactttgggaggccaaggcgggcagatcaccttaggtcacgagtttgagaccagcctgaccaacgttaagtaaccccgtctttactaaaaatacaaaattagccaggcatggtggcacatgcttgtaatcccagctactcgggaggctgaggcaggagaatcgcttgaacccaggaggtggaagttgctttgagccgagattgcaccattgtactccagcctgggcaataagagcaaaactccatcaaaataaaataaaataaaatataaaataacttaaaaagaactttgaataaaattctatgaaaaaagacactagaatgctgttcttaattttaatagtgttaagataggtgttagtgtggtctgttctttacctccctttatttggtgcagagaagttagatcctgctaaatttcaattaagaggggaccttaaaataaggatcaatctcttatttaaccctgtaagttactttaaagctaatacaagaaaaacaaagacaagtgaaagtaaggaaacagaaattgcaaagagtaaatgaaagaaaaaaactttcaagtggtcggaattgaaaggcactggaaaacgtttcaggttctacccatctgagtttatttatgcatgtcctaatacaggcagtatttattgcttgtctgatttgtcactcacagatgattaggacatagttcctatccttaagtagcccacacattgaagaagaaatagatttgcatgaattaagaagcaataatatttgcagggcaatcatagttgtatacacaagtttttatgagagaatagaggagggacagcttaaatgcattatacaagattacagagtgatgattctccttaatcagtgtgatgagattttgaagtttgttgaggaaggtgtgaaacatattttctttgtctgttttggtgttcttatcccgatgtttctggaaaagtaaaatctcctgttactttggtgatcccagatgtcagcaacattttccctttgattcttgacattgtgtgagagttgtgtctgagatgaaaggactagtagagagctaaatttagcacagtgaggtggacagagttattgctagaaacatattttcaagtgttgaatttttaacttttcccaaaaagaattgaagaatctcaacaatgtgactatttctctgtctcaacattaatttttacaagacaaacgaaaataaacatgaaaaatttaaatgaggcactaaaggaaattgtctgaatacacacacccaaatgggtacaactactgaaatctggtggaggccacacggtggcgctgcaggctaaagagacggtttgggaattgctctgaggatgctatgcaagtcactaataaaggaagacacggacagatgaacttaaaagagaagctttagctgccaaagattgggaaagggaaaggacaaaaaagacccctgggctacacggcgtaggtgcagggtttcctactgctgttcttttatgctgggagctgtggctgtaaccaactaggaaataacgtatgcagcagctatggctgtcagagagt

SEQ ID NO: 34551 - DNA, 2300 bp, Homo sapien
aaacccccacatatcagtacatgtaagtctttatctgcgcctttcatattccccaggatagaattctacaatattcaatgttttgggtgcgatggggaagatgtcaggcatatatcttgtgtcctacaatctgagagtatcatggctaggagtctcacaatacagaaggcagtgttttgcctaatctccctatctttagtttcatacctcctactttcactcagctctgcctggggtttccaagactggagatagtataatttctccagaatataatctaatttctccagagtataagctttccattctctggctctcagttattttcttgtctctgtatgatggtgaaaagaccagagaattcaactatcctacatacatactttcaactaataacttcttttttaagcccttacttgacttcagccttcttatacacctggttcctccaagtctggtacctactaggattgtgtagggaaaacccagtagtttatttttagtatctccaatgaaggaactttattttagacatttcttggaactattgtcaattgctctttcatctgctttctatcatcaaataatttgtgtatttacttatgtattcttagtctttgtgaattcataccttttattacttttctgtcattttagagaggggttaagaagaaggaaggataattgtatagtcaatccacatactattcaatttctactcttctgcactgataatttttcaaccatgtatctagttcacatttttgtgaatgtaatttgaaattagaatttttaaaagcagacttcttagatgtcctccattattgagagtactttgagatgtctaacagtggataccattggtagtttccaagcacctattccaactatctccctcattatgccatgcactttggctaggactgaaaccacctcaagtttaaggggcaatctctgcctggattaaaacaaagggtcaaagatggagtctttagattctgggactataatctctacctttaatcctatacatcttgagacactgatttcttcagtaacaggctgaagtgctctcagttggtctaatcagaatgaaggctaagattttgttctattattgaggaagaaaatatctctcattctgtcttcttgagctgaaaaacaaagcagatagccatagatgttgctggaataaatcttgggaaactgagggagggcagtcttagaaataagcctgctttaaatgaaactaacatgcttgtgcttgtgtatttattattttttgagaagctggaactaaatcaaggattctcataatgtgttctactcccaatatcttactttactttctagcagttcacaattccttgctaccaaggaaatctatataaatgccttcttgtgctatcataactatcaaagtatgtcccatctcatggttaatccagtttcatatcctctgagaggacttctaaaatgacccatgtatagtttgccttttcattaccacctaaggaaagtcaagtagtgatagaattttgtacagcttaaaaatattatggttgttttatgtttccagtcttctcagaaagattacaaaccactgggagccaggaatcacatcttgtatttctgtattcaccacaactaagcacgtttggttgtatggagaagggggaaagataaatgctttaagatgaatattaacagcatatcaaactaaagagaatatgaaataattattacagaacgtgcaatatatttgtaatcacttgaacacaatgaataaaacaatatttgtttccggaggacatataagtgaatggaatttaggtagctttcaccaaactgtgaaaatctatggagacacttggtggcgctgcaggataacatcgtgaaaaatatattcactggatggcgttgtgaacactgatatccagtgcacacagagaatcagaagacagaaacaacaagccttcaagagggtgacctggaaaccattcaacagggttaaaatccttagaccacagaggatttggtggacaagtcagagacgcgttccgcagagctgaagcctttcttcaagaagcctacaagaaaggaactatggagaaccaagggacacgcactcagcagataaggcaagtcctgcttctctttgttttgctcggaatgtctcaggcgggctctgaaacctggagcttttctgtggcagaagaaatgcagagcgggagttttgtaggcaatctggcaaaggacctggggctgaaggtgagagaactgtcctcacggggggctcg

SEQ ID NO: 34552 - DNA, 2300 bp, Homo sapien
gttatgttgcaggcatttcctcaaatgccttggctatcttctcgtattttagaaggatgatatatcaaaatgctgacaatcaactctgtgagcgaacagtacctgttgatggcagggcttcattctaatataaccatgctaggataagtctattaccttatgagatgccaaatattaatatgtgtcttcatttgggctttcatattctccaggttagaattctacaatatacactatggggatagactaggggtcaggcatacactttgtgtcctacagtctaagagtattgcatgaaaagggattagaagtctcaccatgcaaaatgcaaaggtttgcttactctccctattttcagtttgacacctcacacttgtgctcagctgtgcctagatccccaagactagagaaagtcccattaaatttctccagagaataaactttctattttctggctgtgagttatgtttccatctatgtagggtgatgagaagaacagagaattcaattatcctctacacatacttccaactaataacttttttccatccttaactgacttcagtcttcttaaacatctggttcctccagatcttgcgcttaaaagagattatgtttcttgtgagtatcttcaatgcaggaactttactttaggggcactttttggaactgctaagttaattgctcttccacctgctttctgtcatagaaaaatgtatgtgttcacttgtgtattcttaatctttgttagttcctaccattttaattacttttctgccattttagtgcatatttttttttaaaaagagaggttaattgtgtgtgctcaattcatctacttttcaagttttacccttctgtaccaattactatttcaaccatgtatccagcttacatttttaagaatattaattgaatttaacattttaaaatgcagacttgttggattcttctcccatccattcttagtgcactttaagactttctatagtgaatatcactgatgagcccttagcatctgttgcaaacagtctccctcattttgtaccaatgaggtactttggctaggactgaaaccttcccaagcttaagaggtggtcccagacaggattaaaacacagtaatggccagagacaggtctttagattctaggactaaaatctccaactataattctatacctcttgaaacaatgattgcttcagtggcagacacatgatcttacttggtctaattagagtgaaagttaggtttttgttctatgtttagggatagactcttactttctcttcctgggctgaaagagaaaacagatagctacagttgtggctacaataaattttgggaacctaaggcaagtcagctttaggaataagagtctgctttaaattaaactaacttgctcatgcttgtgtacttatgaatttttttgtaaattatgaaaaactggaactaaatgatgggtttacataacatgttccaccccaatctcttgcttcattttctgcctgttcacaattcattgctattaaggaaatctacagaagtgcctttttatgctgttgtgttgacctatatatgcctcatctcatggttaatccagtttcataacttcagaaaggatttctgagatgacctttcctttaccttatcacgtaaggaaagccaagtagtaatagaatttcattcagcttaacaatcacttataccctgcttgtttcaggcttacaattgtctcagaaacactatgaattcctgggagccagggatcacatcttgtatctgtgtttaccacaactgaacacatttggttgtgagaagagtggggaaagacactgaataaatgctttaaaacaaaatcatcatcacaaactataaagaatataaaacgattattatggaagataaaatatatttttaattacttcaacagaaggaattatttaaacgcaatatttatttgcttctggaggacatttatgtaaataaaatttaggtagtgttcatcaaactgtgaaaatctgtggagacgcgtggtggcgctgcaggataatatcaagaaaaaaattaccctggaggatgttgtagaccctgttatccagtacacgcggagaactgggaagacagaaagaacaatcctttaagggagaacctagaagccattcaacaaggttaaaatcttcaggcttccgaggatttggtagacagatcagaggcacgtttcccacaactgcgaagaggcgctgaggcaattctgcaagaagattttggggttttggaaaagaagctatggaaaacgg

SEQ ID NO: 34553 - DNA, 2300 bp, Homo sapien
aaactgagcatccatcctagatctgcctgactctaagtcagtgactttgctcccattccatactgtttttgtcattggatatcacctggcaagtttctgcctaactaaagagaagaaaagtttttatcgtattcatactactgttcaatctttatttagaaataaactttatctatgatttcattttcttataaaccagtaatcttgcttttctgggtaaattttcagctattattactaatgctctgatctgcccaaatcttaagtaaaaaacaaaattgaaagagcaacctatgccttctcattgtctcctgaacatataactatcatttcacagaaaagattaatggtcctgattaggaatagtacataattttgatggcattattagttaattattttctttacattgtagtatatttccagagtcacccatgcttacatttgtaatatattttcctgatttgagagtttgtttttagcagtttttcttacctatactgcactgctgaatcaggaaaatttaagaaaaagaatagatttaaatgtgtaatatcaaagagaaatatagatgatcattaaatttttagaaattttggggagttaaggagaagcattgtttgttaaaaatatataaccgattcttatatttaaaataggtaatttttgcatagttgtgttctaaatatattataaactagtgccagtaactctaataaagctagtattactgcatatcactggtgggatagaatctaaggacaaaaactcacagtagtaaaatctaaaattgctttcatggtctcagggtaaaattatccaatttctctgacaaataaatggctcaaaaaataagaggagtgaagtttacacaaggaaaaatcttaagaggtctaccactcaaatacaatgtgtggatcttttttggatcttgattgaaacaacagcaatgactttgaaaaacttggaagaatttgaatatagatgggtattaaataatgttaacttgatttttaggtatgataatggcattgtacttaagcatatttttagagtcatttaaagtcatgatgcttttaaagaaatgtataatgacgtatttgtgggagaaaattcagtttgtctgggatgtgaaaatgttgaagggatagagtcaagaattatggcaaaacattgataatagttgaagctagtactgagtccttggaggatcattatactcctctcttttatgagatttgaaaaatttcaaaataatgtcttttaattgatgctgttagaagtggaggtaataaaaaaggacatccttcccagaaacaaaatcaccactgctgttacagatattgtctctatttagacaaactctccagcctttccttgttcatttcctttcattattggacataacctctctacctgagatagtcatgctcctgtattcttctaccatttgaatttcgaggtgtttatctagttatagtaatggatttatgctagacttatgatggatttatgccatcaagactcagttacttgatggcatcaaattgctttatacttggtatataccttatttttaaggttaatatctatttgcattagattcctcatgtttaaggtggggaattcacaacagccctatgtggtaggtactgttcttatcctcactttacagaggagcaaactaaagcagagagattaaataatttgttcgaggttcacagctactaattattcctatggttcatggaaataaaactataaagatctaaatgttgtccatgataactacaattatatttgaaattctttttgccaagctagactattacctaaatatttcctttctgcccaaaactcagttatcattgttgaaagactaatgtgatttctcctttgggcagttgtctgctcactaaagtccggcgatattaacggtggtgttgtaaccttacatagtctcggggtgcatacaggcagagttgggaatattacatccattatcattccacaaaatgtaagatcctgtgaggacgcgtggtggcgctgcaggataagaaggcacaaaccagaaccgcagctgcagctccattaaccggcaaaaagcagcagaacctggaagtccacggggagcttggatgccaaagggaggacggctgggtcctctggagaggactactcactggcatatttctgaggtatctgtagaataaccacagcctcagatactggggactttacagtcccacagaaccgtcctcccaggaagctgaatccagcaagaacaatggaggccagcg

SEQ ID NO: 34554 - DNA, 2300 bp, Homo sapien
accaaattttctttcaagtaatttcttcaacattccctatggcaatataatctgcatggctgtagctgggtcactgtcacatctgggttctagctcgcttggaagaaagaggcatatccagatgatttctgttctataactggaaggggaagacagaaattctgctcacaatccatctgtgagaacttaattcacttggccacactcaaatacaagggaggctgggatgggcaatctaccttcatggccacatacctgggcacagttctattactatagaagcaaaggaaaacagattttgtcagacatctatcagaatcctccacaatgaccatctttttaagcccactggataattgtcatacttatttttcttgatttttctgaagcatttgcagccattgatcttccttatctccttaaaatgctatttgcttttgatttcatgattttgaactctgagccttctttatcttttcaaatatacttcttgccctgtctcctctaaatgaagatgtttctcagagttctgtgccaagcctcttttatacttatttgacacacttttgcttggttatcctagagcattcatggtgtgtatatatatatatatatatatatatatggtgattgaaaccatgaatgctatatatatatatatgctatatatatgctctctgtatatatgctatatatatgctctctctctatatatatgctatatatatgctctctctctctgtctctctctgtctctctctatatatatacatatatacacaccacagttcatattgccagctcagatttatttcctatgctttggttatatgcaaacacacacacacacaccccaccaccacgcaaacacacatcctacaggcacttacctcaatatcagcatgttcaaaactgaacacttcatctttttccaccccaatcatgtttttttttagcattccctgtcctagtgaatgacaccactagtcatccagatgcccagtccagaggtgtgatatcatctctgagtctttcccatttttctccccatgcaacctatcaaccaacagttgaaaacatttcatctcctcatacctttctattcatccctcttctctccatccacactggcattatcctcatccagatcatcatctcttatctgatctccttgattctccagtcactccccctgaaattaattctccatactgcagccaaactgattttttaaaatgcagatgtaatcatgttaatcagatatttaaaacccatctttgtacttgaattacctttaggataaattcaagaatgcatgatatgacctgtataatgattcatgttctcaccatgcttttaaccctaatttcattgttagaccctccccttccatagtttttaaagtccaaggcatacttcatttctctgtgttcctcaaaatgcccatctgaaatattcctccttctcctggctagttccttcagatcacaatgtatttttcattacctcaggaaagctttcactgatgtcccaagtccgactttgatcttaattattttatttttgacagacacttaaccagcacttacaaaccactttgtaaatattaattcattagatgcctacgataataatcataggagacaaatattattaccccattttacaggtgaggaaacaaaggtatctataacttgcccaagcttatagatagtaagtcacataaccaggattctaatattgataatttggttccagatcccatattcccaagcactaaggtatgcagcctcctaggtacaagaagtcttttctaggtatttctatattactttttataaatgcatacattatgacatacttcgtttacttgtctgccaatttttctagcttgtgagctctgtaagagcaagaattatctctaacttatttgtgccatgtccttctttatatttttaaaatataaaagtgaaaaaagtaatgatattaccaactatagctgacaacaagtatttacaagagtgaaggagataatatatttgtaattactcgagaaatgacttaaataaaaaattatttcttcagttcagaatattttaacagatcctttagtgccgagcattcaaaacagtgataatgcagtgtatggacttttctggattcaaattcaaacaaaccaacagcaaaggacattttggagagaactggggaaaaccaaatgcagtataaattacaccaaggaattattgctcaagttgttgattgtgaacgttttattacaattatcttttagaaggcct

SEQ ID NO: 34555 - DNA, 2300 bp, Homo sapien
gaaagaagtagcataaagacattttatctcttaaatgtgacttcttatagttttcctctttgcccatcccttgcaacaattctgggtccaagagtttgacctatctctgtttctagccttcttcatctctaatgacattcacttctactctagcttagtcacctataaccatggcctctctctggagatggtaatctctgaaaactacatcaagtctgaagtcacaaattcaaatatacttcttttaatctgcaacttattatctttcctgaagagctttaatcaccatttatgccaaatgtgactctatagcccaaacgtctttcctcaactgcatttatgtaatagaagctaatttatataactgtctatatggatgctcaaactcatccgtttaaaattaaaactgttcccttcctcaaaactaaatataccttcaccaaccagctccatatctattcctctttcttctgctcttcctgtgtttatcagttaatagaaccaacagtcactcagttccctaagcctgaagacaaagtacatttaccttcatgcctttctaccccactccttctatgttgatcaccacacccctattgttttatcattctaatacaaccccttcactgcatttctagttgaggccaatgtttcctcttacttgtattattgcaaccatttgtaatcaatctctcacctttaatcttattcctctctaatttattctcaactctgaaacaggataatctttttaaaaagtagaaacataatcatgccactttcctgttttaattataatccctttaataaccctgcatttctactggcataaagtccaaatactttgacatagttaaaaaatatatgcttatctttccaatttcaactcttaccacttctctcctcttgctctatgtcttagccatattgattttatttcctccaaatacttctctttatttgcatttgcacaatcttgtttttagttttcctgaacaattttaccccatacccaatttttgtttaaagtactcctattaatttttaatgtatcaacttagagaatactttctccagaaaaatctgtcttgtatttccaaattctggttagatgaccatcatctatgcccttgtagtagcatgaacttcctttatcatgacattcattgtgctctatttaaaatacatggtcatttttctgtctccctcttgcatggcaggaactatgtctgtttaccattctatccctaacacttatgaccattccttgcacaaagtatattctcaataactatctgctaagctaattaattaatagatatataaacatatttaaaattgtgcctctggaaagcctgggtctgcaaatgatgaaattcagtttcacaactaaactgaggtctaatttgttcacattttaaaaaatgtttaactggacttgcttttagattgaaaaccagaaatgttttattttactcactacttctgagcatttattttctactcctgccagctaagtctcctactgagtatccctaaataaatcgtaccatttatgcagctcaaaatgtccaacctttccaaagcaactgttttcatataccaggttcattttcaagtacatgatgtcattcctcttttcgaagagtagttgtggagagagctaagacctctaattctcatttccaattttactaaaaatctgttgcctactaagtcaattacatgtaagagtattcttcactatctttagttgtttaatatattgtcttcacagagagatcataactcgtttgaggcaggggctacatcttaaatatgcttcttatatctactacagctatagcagattgtggctgatgatggaaaggtaatggcatcacatatcacaaaaatgcaactcggaaaataggcatatagaaggagcatataatttaaatttatagacaaacacacaagaaaaattaatattttgtctgaaacgtattggaatttatctaaaacctgaatatctgcagagtcgcatggtggcgctgcaggataagacggtgaaatttttgtaaccgcagatgctctggttttccttaaccatgggaactgaaagcgctggaataccaggagaaaatagtctttcaaaaggtagggcaccatcaacaccttcgcgacaggattaagagtttctagattcccaaaggtccaggctgataggtgagaggagcaactttaagagctgctagagactgagttgaaacgtttacgccagaaagacgtttggctaaggagctatggagccgggaaag

SEQ ID NO: 34556 - DNA, 2300 bp, Homo sapien
gatttcaaacacaaaaataagatgatcctagctggcctaatctgattctctctgtttaaaaaaaaatggctttaagaaccagatacaacatagtctctttgttaggaacataagcagaaagtggtgtcatatttggctaaacacttgcaaagaaatacagaacatcaatctattgagagacaagaaaaaataaggtaccaaaagaatgaccttgtcatagattttcctgttttagattttccagtccctcccaagtctttttcccttaggttgctggagacaaatttgtgctctttaataaatttccctctaattaagagatctaagtgaggtttttgttgtcaaaagcatgtttagatattcctgcattgttggtaagttagacctttcttcctattgggtttttattgtggcttttcatattagtatgacaacatttgggatcaaggaggttgtaaaatattagtagtctataagggacatgcactagcttttgtcagaatatacaattttgagaaaaactgaaggatctttccaatggtacagtctttgaagtgtttaatagaaattcttagaacattttattatataagagttttgaatatcgtaagtgtcataataacattactgtaaaaaaaaaaccttgacaatgaaaaatgtgtgtctaaaagagacataatccttatctttagggtcatcataatcttgttatgttctttctttctgtcatataatatatcccttgcttatgggtagctaagttgttttgccacttaatgaaatgacattttaggtcattctgagttatttcacattactatttaaagggcataggaaatagctaccttatgaacatgttgtctttgtttatccatcttatataatgaacttgaatcccagaagaagagggaatttctacagtaggaggagaacctatctgtcagaatgtttaaattaattgtgatttattaatggatccatttaacaaatatttattgagcacgtaccatgtgccagggattattttagatattggggatgcagcagtgaacaaaatgaagttctaacatgtgaggttgaaacagaaaggaaacaactaaataagtacatctatactacgtcagataataaatacgagagagacaaggcagggctgggtacagcagctcatgcctataaccccagcactttgggaggctgaggcaggaggattgcttgagctcggaaatttgagaccagcccgggcaacatagcaagacctcatctttacaaataattaaaacattagccaggcatggtgatgcgcaactgtggtcccagctacagttgctgaggtggggggattgcttgagcctgggtagtcaaggctgcaatgagcagtgattgtgccactgcactccctcctggacaacagagcaagaccccatctcaaaaaaaaaaaaaggaaaaatgaaaagaaaaaaaagaaaaagcaaagtaagagatataggaagtgccttcatatgtatttttccacagtttaaaattttcataaaatcataactctctgactttatgtagaaaggataccacactggaattaacgtgtagctttttcttgatgtaatccaaccaatgggagcacaattctggtacataggctgtctagaatttgaaagaaattaaagaattcattttgttttgctgataaatttttaagaaatcacgtggctttatgttattattattacaagatgactgatcactattatgtcttctttcacttctcaatttccctcagaacactacacccagactacaggctctggagggtggggaccatgtctgggttgtttactgatgtatttcataatttggcacatagagaccaataatactcctttaaatgaagaaattaataattaccattgcgtgatattgtgattacatcatttcctcccaatttccaaactcctaatagaatagagaatagatcaattgtagcaattcgtttcgaagcaaagacaacgcatggtggcgctgcaggctaaggcttcaaaaaaaggaaaaggaaaaagcccatgaaatgctactagctacttcagacctctttcagcctaagaggaaagcctgttagcagagcacggaccagtgtctccggagaatgctattctcctacatttccgaacaggttatcaacgcacagatcgatcactgcctctgtcccatcgctccctgaagtagctctgactccggttccttgaaaggggcgtgtacagaagtaaagatggagcctgcaggggagcgctttcccgaacaaa

SEQ ID NO: 34557 - DNA, 2300 bp, Homo sapien
ttccaagttgattttatagtgccgtgttctatcttcagaaatgataaggactccacgttccaccagttcccagggctgcaaccccagatccttggggatgttgccatgtgatagcatttctccagctctgcaggaaagcagtagcacatctccagggctaaggattcccacagtgccctactcccctccttgccccccaggaaagtgaggagcgtgggcagatcgctgagggttttctgatcaaaagcagtcactgtctctcatgtagcaaccctcagatcgtttcgttaccggacaggggtcccgatccagacccaagagattgttcttggatctcatgcaagaaataatttggggcaagttcatagagtcaagtgaaagcaagtttattagagaagtaaagaagcaaaagaatggctactccataggcacagcagtggcctgggcggcttgactaaggatacttacagttttttattgaatgtaagctaaacaaggggtggattattcatgaggtttctgggaaaggggtccaaagttaccggaactgaggattcctccccctttttagaccacatagggtcacttcttattgttgccatggcatctgtaagtggacacggcgctggtgggcgtgtcttttagcatgctaatgcattataattggcgtataatgagcagtaaggacgaccagaggtcacttattatgccatcttgattctggtgggatttggctggcttctttactgaaacctgttttatcagcaaggtctttgtgacccgtatcttgtgccggcctcctatctcatcctgtgacttagaatgcctgtcttcctgggaatgcagtccagtaggtctcggccttattttactcagtccctagtcaagatggagttgctgtggttccagcgcctctgacagtttgtcttctctactttattttttgtagggggtaaggggtgtctcattttgctgcccaagctagccttgaactcctaggctcaaatgagcctccctccgcagcctctccaagtgttgggattacaggcatgagccaccacacctggcctgtcttatctactttaaagcagttttcttgtagattgaccctctgaattcagggtctattcaagtgagggcatcttcttttcgggttgtttgtttttgttttttgcatggtaagaagcgtgggataggccgggtgtggtggttcatgcttgtaagccccaacactttgggaggccagtgggtggattgcttgagttcaggagttcgagactagcctgggcaacatggcgaaaccccgtctgtacaatacaaaatttagccagatgtggtggcttgcgcctgtagtccctctagtctcagctactcaggaggctgaggtgagaggatcgcctgaggccaggagattggggctgcagtgagccaggatcgcgccactgaactccagcttaggcggccgagtgagaccctaagtcaaaaaaaaaaaaaagagagaaaagaaaagaagcagggctgactgattaggacagcatttcttttgccgccagctgaactgcggcgtctagagttcccggccataattgcaagaatttatcgaaaagctttacatgttttcttggttttggttttgttttgagacagagcctcaccctttcgcccaccctggagtgcagtgtgcgatcatagctcactgcagcatcgacctcccgggttcaagcgatcctcgcttcattctcctgaattgctgggaccacaggcgcgcgccatcgcgcccgggtattttttcgtttttgtagaaatggagtcttgccatattgcccaggctggtctcgatctcctgggctcaagcgatcctcccgcctcggcctcccaaagtgctgggatacaggagtgagccaccgcgcccagtcgcagtacactaaaagtatttattcggtccgcgtcccccgcctgcgggtgcagggatggcggctccaggctggaggcggctgggggcccggccagtgcgccaggagccgcaggaacgctagtgagccgcgcgctgggccggcagcagggggttattttagtgcgcggggagggggcggcccgcggcggagcgtagggttgagcggcttcccccgcactggggtgagagcccagaacaggcggtagagccaccccaccacccccaactccattccccgcgctcgctgcggctggacgtgaaaagccggtctcacgctctggggagttagtcgccttccactgggaccctcagacgagtgagcgaacatgaagtccggtcctggcat

SEQ ID NO: 34558 - DNA, 2300 bp, Homo sapien
ggactgaaggagctagatacattaagaaaacctcagttaatccttttaactatgtctggcaatattccatgtaaagaaaggtttagaaactaaaatacacagtaattttggaaaatgaaaaattgcatacaatttatctcaagttaccttctatgataagaatatttgagcatcataaaactcatagggaagatgctgagtaatatttggattattttcatgtataatgacctcacattgtatatggttaaacaaaacacagccaggcgaggtggctcaagcctgtaacagaaaaaacttcatctttgaaaaagaggaaatagatcattctggaaattacaagtaagtcagctaacattcttcaacacattataagcaaagagaaataatttaccgttatctggaagggcatactttctcttttaaaattaacattaaaaaccaaactaacgtcaggtcattttaatttcctcccacaacagtatctcattctagctaaaccacattcacacacactattagtaaacctccccacctcataacaattagaattgtccttgactagaaaggaaatgtatgtaaagtggctctatctcattttaaaatgacaaagaatgtattttctctcagaaatcactacaggatttgagactatgatctttctagacagataagttttttcattcaattagcaaatattttttgtgtatctcccacattctggtactaggcactgggacacaatgaccaggatagaagaagatcactatcatggagctttcaatcatacaagaataaagtgaattttggaaatgttaattacatcttaagagaattctcttaaatttaggggcaattgttaatattttagaggatagaaatgaaatattaatggccttgatgctctcccagatattttaaaaataaatggaaataaatagaaataagtaccaactgttacccagttatgttaaaatactaaaaatatgtgttgatgaatacctgactattgatagaaaagacaagcagaaaacagcaaaatagtagaggtggagttaaaaaaaatgtcaaagtaatttaaaattacttgtacatgagagacaggaaacaatacttcaattatatctactttaaccagatgctcagtctatcagacaattctgtccaaaagaacacttccttctctgtttacatttacatctaaatcaagcacataaaaaggaatcacccttgtttccccagaagtattatagaacacaagtaaaaccagaggcacaattcccctacagggaattatatttaaaaatacagactttgggccatgcgcgctggctcacacctataatcctagtactttgggaggccaagacaggcagatcacctcaggtcaggagttcgagaccagcctggccaacatggtgaaaccccttctctactaaaaatacaaaacttaggtggggtagtggaacgtgcctgtaatcccaactacttaagaggctgaagcaggagaatcgcttgaaccccagaggtggaggttgcagtcagccaatattgtgccactgcactctagcctgggtgacagcctgagactccatctccaaaacaaacaaacaaacatatatatagagagagacttatatagtaagctgcatgtcctcctcactccattgatttgggtactttgaaatccattgtatagtagctacacattcttgtattggcaccagataggctagactctagggaacatccgagatgtttccagaagcaaagacgcttactgcaaggcgtcccccatctcccggaatcacccggaagtctagaagccatccggccccacagcgatcccgtaaaagtgctggcttagcgggggacgaatctgtgtctttcttggaacttccaagctctaaatagtttgaaaccaacagctcttccgaaacactgtcatttccatcccggaaaaacaagttctcgcgaaaagatgagtttcacgctgggcagcgtaattgcgctattgcgcctgcgctagctggggctccgcccttccgcccggaggggctgtcactcacagccgcctcccgccccgcgtcgcgacgtagcacttccgtttttgctgggtaggcgacccggacggagggccggcgaggtgcggggtctggtgatgcgagctgcgcctctcggcaagatttcgcgctgcccatcccgggccctttcatcagtaatcggtagtggatcactctgccaagcggcaggaagaattaaggaaacgacaaggagacgctcggctctctcccgcttgg

SEQ ID NO: 34559 - DNA, 2300 bp, Homo sapien
atgctgtttctcctcagtgtgactctggccatctctctgaacctgcaatgccccctatagctccattgcctggggctgttttcagctggatctctggtccaagcccggatatggagttgtctccaacttaaagaaaggaaatttgccctgttcctacaacgtatgtgtggttttagatatttttaaaatcttaatttctttaactcaagaaacagctttgaaccaggtattctctgcagtgccagcaatgaagctttgttttatttttgtttttgtagaaacggggttcactatattgaccaagctggtctcaaactcctggcctcaagtaatctgcccaccttggcctcccaaagtgctgggattgcaggcgtgagccactgtgtgtgggcagcaatgaagctttaaatgttgcatttgattcaaatgtatttgtgtgatattttaacatttttattttatacttaccatccttttataaatcactcctgcgtgtttttggttgctgaaagtagggagctctacaggtttacttactagttcttatgtatattttaatttacctcattagctcacaatttctttggggaaaagtttatgcctattaatgtgtattctgaaaagttacattctctgttaaagagttacttccttgcaatattgaagatgatttattgcacctttaaatttctactctttggctccatgtacttgtctttgagaagctgagaaactgtagatttggttaagaactaaagttctctttccaaaaactattattgagacctttcattgttttctttctttcctcatttttaacttttctcagtcatggtgtccatgggttggctggccgaatttgttcctgaaattatcagactctggagtacagatagcatgcttctctaactttggggtaaagataagtaagtcactctaagcctgagacattttaattagtaaccctttgctaatagtgcagtgattaaaaaaaaaagaaggccacatcctcaactggttaaaaaatactgttaagagaaaaccaacttctcttggagaaaatattaagtgcgattatagaggaatacatattataagagcctatctaaaaataaagatgagaccatttttcttttcagctgtgaagaataatatcatagactttgtctctgaaatttgaaatctaaattatatattcatgtgacttttcaatgaaattccaagagcccagttttatttttttcaaaatatattgcctttggtgaatcttaagaattttttaaaaacccacataatgcaaagacacttcaaaaaaaaaaaagaggaaaaataaggatagggttaaaccatgctcttcaaaatcccaaggtttctgataaatattcaaatcataatgggaaggaaatgggatggtatgatttttttaaagtctagcttatattctaaaagattatttttccctctaatacttttcaccctccagtcaaaggggagctgctctatgtggcctgggaaattaccaagtggtcaaactttactacagaaaaagtggagagatgattttgtcctcattgtaatgttaggtttttactataattccctgaatagcaaacttggaaagcagataacatgggaatacttggattctcctgtatatttcaatttggtgacatttaggcacatttaaagaagtgaacatatagtttctctttttcatacatatattgtagaattatttccttgacaatagactaaaacttaagaaaataacaagttaatgagaaggttttcagtatttgctaggaatgcagtaactggttaggactgtgggcgccgctgttcactaatctggtagatacaggcagtacacacaggtcaggaggaggaaaaaaaaaaaaaagaaaaagaaaaaagctctcgtgcctcttagaacctccataaccgccagattgaaaactgactgtccaagactgcctaaatcctacttctggatgactctccagtcagaattctcctgaaaattgggttaatttcagctcagaaaagcagaaacgatacccttggtactggactggaagaaaactacgaagtgagagagccatgaagattcagaaaaagctgactggctgcagcaggctgatgcttctgtgtctttctctggagctgctgttggaagctggggctgggaatattcactactcagtgccggaagagacagacaaaggttccttcgtaggcaacatcgccaaggacctagggctgcaaccccaggagctggcagatggcggagtccgcatcgt

SEQ ID NO: 34560 - DNA, 2300 bp, Homo sapien
tagaagaaaacaggaggaaaccttcataacattgatttttggcaatgatttcttggatatgacaccaaaagcacaagcaacaaaagaaaaaaattgtatactggactttatcacagttaaaaactatatgcagcaaagaacaatatcaatagagtgaaaaggcagcccacagaaagagagaaaatgtttccaaatcatgtatctgagaatggatatccagaataaagaactcgaactcaacaacaaagaatcccaaacaattggatgttaaaatgagcaaaggacttgaatagacatttctccaaagatgatatacaaatggccaaaaccatatgaaacaatgttcaacatcactagtcattagggaaatgcaaatcaaaaccataatgagatactactccacattcattagaattgctgtcataaaagaaaagaaaagaaatgttaacaagaatatggagaaattggaattcttgtgcattgctggtgaatataaaatgacacaactgctgtggaaaatggtatggtgactcctcaaaaatttaaacatagaattaccatataatccagcaattccactctggttattacccaaaagaagtgaaaatagggacttcaacagatatttgtacacctatgtttatggcatcattagtcacaatagttgaaaagtggaagtaacccaagtgtccattgacagatgaatgggtaaataaaaagtggttcacacatacaatgggctgttatttagccttaaaaaggaagggaattctgttacatgctacaatatggacgaacttcaaagacatgatatcaagtgaaataaacctgttataaaatgacaaatactgtatgattcctcatatatgaagttcctagattagtcaaattcatagagaaaaaaggtagaatggtagttgccagggactgggtgaaaggcaatggggagttgctatttaataagtacagagtttcagttggggaggatgaaaaagttctggaagtggatggtggtaatggtcacaccagaatgtaatttgaatgtacttaatgtcacagaattgtatgcttgactatggtcaaaatggtaaagatgaaacaagagtaagaagacatccactgcattgtattttacacccttggaaaatgaatatcagaaaaagaacttgacaacctcaaacaattttgagtgactgattcctagtgtggtgaaaaaccccttccggctctagctttatcaaatagacctgctttctgtttctgtaatgttccatgctgtctcttaccttcaagcatttgttcagaggttctagaacacttcttcagcctttttcttgattcaatcctactttttatgattcagcttcaatcatgccctcaaaaagacttttctgaccccaaatctagactggatacccctcctaggtattcctccatcacccagtgtttcctacctcatatcacagcagttaccatactctattatactctctttactttcttatgtcctcctccaaccttcacgcttgagaccagggcctgtgtttatcatgttcaccatttctagctccagctgcaatcatgcaaagtgggaggcacatgtacccaattaagtgtctgatgattcaataatttaaaggcagattttgaaggtaaatgcaaagccatcaaccataaacgttcaaaatatataaccttagaagaaaacgtagctaacgtttcttaattgatcttactgcttctgattatacaataagagatggaagatgtttggagcaagggcagtggtggcattgattaatgccttgagcagtcaataatactttcctagcaactattatcaagatcatgttcatttataccattcttattaatcctgataaaaagattcctgttttgaaagatctaattctagggtatcttagagctgtaagattctttaaagcgccttgaaagtcaacaaaggcaaacaaacaagaagtaacttaggttttcctgagcaggtgcagaaattatttaggcctctgagcgtcgctgttgaccacctaaggagtaaaaggcagcgagacatccaatccagcaatacggctcccacagcacaagggggtggaggtttggccctaaagcttcaggacaccaaagaaattcagtcgaacagcccaccagttctctccatagggacctgggtcccgtgaatgctggttatctcacaccctgaggaataaagattggaatccgcactggatgctggaagttgactcggagaaaattgcgacaggagggaaatggcggctctgcaa

SEQ ID NO: 34561 - DNA, 2300 bp, Homo sapien
tcaagtcctttcttcttttaagttatgactcttactctatatttgaatctgtatatgaacagtgaaacatgttagttggctagttctttctcattcagtcttaatacatttctttcagtttggcagcaaaattgttttccttaacttgcatgcccttccctgttaaaaatatggaaatttagaaatatacattccttacagtgtttcaggaaggtatgtcatattattttggcttagttttaaaaatcacattaacctctaagctatatgcttcttgaagaagtgactgacttatcatctgctctataataaagctgtagagtggtaataaacaggtttctcctttttttttatctttctcatacgtgggaaccatactgtattttaatctttaaaataatatatatcctcaatatagttttgcttaaagaaaagatacaaaagattcatatcatacaattgcccagaaccaacttctttatacatctctcttctcaaggtttctactcacaatagctgctagaaatgttcccaatccctcacccaatcccagtgcccctctgatcaattttcttttcccattcctcttcctatattggcttttagtatgttggttatgtatttaataacagagaataataagcacactaatgttctatgtaactggcatcattttttatttttatttgaaaattatcatgtaccaattgagccttttattgaatgataccatatttctcaaagtgctgtgattctttccgttgcatttgatcaagaaaaaattttctgagacaaggtgttgttttggttactattacataattgtctatgagtaaaattggaactcactgtggaataatatgtcataatagctttacttgtaagtgaataataaagtataaacaggaaaattaaagcaaagttatttttagtgtgtgtagtaactccacaagaataaatgtcttatgcatagatatgtaatgcatcatgattgaaacgacaaatatattgtatttatatttctgtgcttggaaacttatggggaaagagattctggaacataaaagcttatttctactagtttcagttggttttgaaaaaacatccttacagtctagatttaaacaaaggaaacttctttcagtaccctgaaggtctgtgatttctctctcacacctaggcattgtcatgctgttctctcccacatccaggccttttcactgatccactcctctcatgtttcctgggaaagcgtttgctaacattaaaggcccaattgaaggcccccctaacccccttggcttctcccattatggtaattatctcagtacactgcaattccctgtttgcttttatatccttataatctctgtgaaggaagctactgtgtctatattgttcaccttaaatccccaaacatattgtctgatgcctaattatgtgtttgtttaatgaatattaaataacaacaaatatcgaaactaagttatcaggtcaccaagaacaaacttaaagaaatataatgtataaatatggctgatttctgtgtgtttcttttctttttttccttgtctcagctcttagagagttaagagtatagagagggaaaggtcaaagaggaggtggatatcttatcaaataaccctgataaatgtagtaagtataagaataaacacattatcaaggttcagtggtggaagaacaagtggtggtcatgtcttttaatagttgtgttggtccttacggccagttctttgttactgtgtgtttcttaaactgaacaattcaaaaaagttaactccactatgtttgaagcaatattggtggcattaaggttagtgcatggattcccaagaaagataacttgaggtgacactgtttaacatatatcgattcaattatgttcaatcaacactagtcctcttatctctgacaagaaggatttcagatcttggataattcaaaaataataatgtgtctgagaggatgcagtaaacggttaggcctcttagtgtcgctgttgaccactcaagaaggagaacgcagctggagaactagtccaccatttccttgctcctaaaatgcaaagaaccagcaaatcagactcagaagatccggggcggctgccaacctcacctcttagtcaaccagctgtttgacctgtgaattaggcccgtaaaagacttcgtttcttgagaaaataagattggagtccgtcgtaggaaactggaaccgaattcagagaaagcgattcaccgaaaaggaaatgaccaattgcctgagtttccgaaatggcagag

SEQ ID NO: 34562 - DNA, 2300 bp, Homo sapien
ccaaaatatgttttattagaactcaaacaaaagaatagattcctccctcaatatattaggaaaaggcacatttaaatgtatgagacaacagggccagaacacaaaagctgtaagcagagtaaggtgtattctcactgaaacatggaaatacatcacagaatttaaaaggcccatagccaggggaggacttctgagcctaggactttgagacctacttgggcaacatagcatgaccctgtctcaaaagaaaaaggcacgtaacttttaacatatcatttttagaaaaaaaaatgtttatagtattagtatcactttccctgtaaggagaaaaaaaattaattagctgtgtcaggggaaatttggatgctcaaagataatttctaagaattctatatgaaacatagcctacatatgtgtcatgaaaatacactgagagtatggaacccatacaattccacctacttgtacaggtaatggaaggtctcagacatcccattttcactaaaaaggatttatttttatttttttgaagaatgggcaagaatccactacaacagaaagggaggagaagttcatagtaaaaggaatggaaagtataaaggcatgatgcaaggaaacaagtgaaaaggtatcttaagaaaacagataataggctgtttcgaatagagtatgagtatgggtgagcactgcaaaatagtagaataaattgttgagttggatctcatttggtaatgcatttgaaataaagggatttgctttgaaccaagactggttctaagcctggaactacagaataagttccaaaattgggtgtctaagaactctgaatacctctccaatatttaccagtggtcaagtcaaactcgttttgctcattaatggtataagtcggctggagctgagaattggcattatagagaatgtttttgagacagagtcttgctctgtcacccaggatggacttcagtggcatgatctcaactcactgcaacctctgcctcctgagttaagtgattctgctgcctcaacctcccgagtagctggcgttacaggtacccgccaccatgcctggataatttttattttttttagtagagatggcttgcaccatgttggacaggctagtctcaaactcctgacctcatgtgttcttcccaccttggcctcccaaagtgctgggatcacaggtcactgcacccagcctagagtatttaatatacattcatataaaaaagaagcactggtttcataaaacaaatgtacattatatgagattccacttcataaaagcatgtatgtgtaccccaacactaaattggcccttttaacaaaatatcagactttgtcctacttaactggaaagattatctatattttataaagaagagaaataacataatagtaaggctgtgatttcctcttttttgcaaaaactatttttgaaaagtattactgaattgataacatatatatggagagatttaaaatactagataagggagcttattccaatgaatttacagaaaggtaggtattttagtcaactaaaaatataaataaaaattatcaattcacttatttggatacagcagtcatgccagagtttataaatatagtgaaatcactgaagatttttttttacccccaaaactgaaaaaaatggcagtgtaccttgtgaattttttaaatgaaaaaagaatacgaaatgatgaaggcccttatctgatgatgacaaactagaaaactgaaatgtaaaggggaaaatgtgagtatgtgtttccctccagcaaattaaagacagggtacatagattcaagaggttgcgctttgaggataaaaagctgggccctgtgcagttttccaagacaacctctgggcgccgctgtcgaccaaaaggaagtgaaggcttctcaattctgcaggagcgtcaggcagggtgccttcctgctttgtccggtgcactgagcacagacgctgctcctgttcaccctcgagcgcctaactaataagtcctaagctcaaatcacagaagtccagggtgctgccatttctttttgaaaaacatcccagaggaaagaagctccgcggagagttcctgaaatgcagagagccagagaagccgaaatgatgaaaagtcaggtactgtttcccttcctgctgtctttgttctgcggggccatctcccagcagatccgatacacgattccagaggagctagccaacggctcacgggtggggaaacttgccaaggatctggggctcagtgtccgggagttgccaactcgaaaactgcgggttag

SEQ ID NO: 34563 - DNA, 2300 bp, Homo sapien
atagatggagattgctttcttgattgctcagtagtcttggcaatttaattttcaatctttactgttggcatttctgtatggttggcaaatcttgctaaagagacctgtttcctagatgttaacacttagtaatagcagtgccttttcttagttgatatgcaatactatattttcaagtcattttattcttagctctttataaatgtatttagagttcttcccacccaagttaaagttcatcaattacattaattatgtaattgatgtaattatgtattaatgtaattatgtaattaatgtaatcttcatcaattacattctagtttgtctttttgcagcaacatgtatgtttaatacagccttccaattattaagactcttaacactttgtctcatcacaagtagcaaatattgtccaattttatatttgcatcactaactttgagtcaatattattcccactctataatttcagtcaatgatatttcataattttcttaaccattcctaaattatttgtttttatgctctttctattttgtctctattaaaacaaagaatgtaatgaacatttgggtttataaagcgttttccatacttcttgtttctttagtgtagatttctgaggaattagttaaatctataaacatgttgagatttttttaatgcatactgtcaaatttatttccaaacatcttatttcacctctcaatcatccgcagtttgtgcggtctttgaggattgtgaaaaacacgtttaatctactctctcaaagtctgagggtttttaaattctgtatagctaatgcccttttgtatgagtcatttctactgctaattgttaagtgaggaataagcttaagaactgatgtactgctttatctcaaattttcacagattagtaaattactgtaagtattcataagaaagaaagcgatggcacatgcaatgataatccatgttcggctaccaaaacatttccttttactggctatttctaaaatgagagctaaagtaaagttagaaattgtaaaataatactgaatgtgtcatgtgaaaaaatcactaaactattatctgcactttatagttattcagtctaacttttctttttatttcttttttatttttaagatcagagttatttacccattgttttaggctttgcatttgaactggtcattcatgaaacattgaaaggtttcataaaaattactactctatgaaaggtattgttctaaagattgagaacacattgtgaacaagatagtcatatgcatagcttgtggccaagaatctactgtacacaaaattaaggagcaaattctcttcccaaacctattatcctatttgtcaatctcatttgtacagggtaaggctaactcttgaacagtaggtgagttttttgcaagggaattgaagcattgccccaggttctagagggtcaactcctgtgaggaaacttgttactgcataaattgggactaaagccagacctccaagttcctgtcccactgtcttttcacttatctgtctcatccatttttcaagtccacctttgtctttaggagagataattatgtccctcacacaatacgctatactgagaatgggctgtggggatgaacaatgtgaaaactgaaaagaggaagaacacatcttaggaaaaaaatcgtcatattttctctaagaaaataaataacttcataaagtttattgtacaggaagacttggatcattcttgaattttcattgcaaatcaaaaacaggaatttgactttattatcttgggagaaataggaatagaaaagtgtataaaaaataaactttttttaaccaagaataaattgcagtaacaggttaagactctgggtgtcgctgttcaccaatcagggggaaaagacaaaccagaaatttaatcagaatcacaagatttctgcagcacaaagcactggctctggagctttatgaaagcttcaagcggaagccctgagagctctggctgtgaatgcactttattttggacccagaagatcctggggctcctcaggcctcgacagagggaaaaccgaagcacaggcgactccgcggcggggttgtaatggcggcgcctcctgctcgcccagaccacacccggctgctccagatctgccttctcctgggggttctggtggaaatcagggccgaacagattctctactcggtgtttgaggagcaggaagaaggctcagtggtgggcaacatcgccaaggacctggggttggcgccccgggagctggcggagcgcggagtccgcatcgt

SEQ ID NO: 34564 - DNA, 2300 bp, Homo sapien
tctcagtgctcttcttcctcgcggtgattctggcaatctccctgcgcctgcgactctcttccaggtcagatgcttgggactgttttcagcctggtctcagctccaagcctggacctggggttctccccaattacagtgagggtacattgccctattcctacaacctgtgtgttgcctcacaatcagccaagacagagttcaattttctgaacataaccccggaattggttcccgcgcaagatctcgtctgtgacaatgcctcttgggaacaaaatacaaatcatggagccgctggggtcccttttgcctcagatactattttgaaggtgagctttaattaatttattttcacttctggttttattgtttcacctaatttgggtaggaagttccactgcgtatttctttgtctgtgagttagatttggccaatgttgtgccttaattgtcttaatcttatctaactgaattttaagtgttttctctctgaagtgtgagatttatttacccatgattgcaaacctttatcacatgagatattgcactgtatttctttttcttcctcatctttacattacttctctctgcagatttgttgctattgagactttaggcaattagtttcaccttcaggctctttgttattcaaattttagttttacttcctcttagaatcataatacttcagagtaaagagagtcttcattttagtaggctttggaaattgggaaacaaagaagaaagacttttgcataatggcatggcttgttaatcacagggcatgggtaggacattgtcccattgacttgaagaccaacactcagtaagctaaatgtcttggaatcacaaatgtatttctaaaggacaggcaatgtttgaggtctgaggtgtctgctagaaagagtgcatttaacaaatgtgagaaatcattctctaacatgcattttaacaaattgctcttaagaaaaactacacattgagaaaaatcttacaacctatgttcacatcattttctacaaaatattacttaaaactttgcttttgaatttcctaattatatagaatttttattttcttagttttctatgaaagtgttattaaataaaatgactttctgaaatgtccatttttttcaatcaagaggtttttctatttctgttgtcatataaagatgatagcagtaaatatctgtctcaacatagaaaggtcactcagtacttctcgacaagtatctgctcatgctttcctgcatggatgatgaaataaaaccccatcctccacagttactatactggttgtcactggaactacaaatatttgaacatggtaatagaaaaacataaaaatgcatagttaacccaactcaaacgctgtctgagatagtggagagactttctcaaagtcctcacaagtaacaaagatctttatttcttctgcatatgacagctaatataacttacataaatcagtaggcctgtttggaaaggtgcatggagaactgggtttgtttccttggtattcttatatgcaaataagcacgttttcctaaatttatcctaataaggagatgaaatcttgaatcctacaaaggtaagaatttgaatgtcctaatttaatggactaaatatagataagaggtaaataaaggacataggctcccccgatgacgcattaaataaaatttttgtaaggtattgagatctaataatcatattgatctcagggattgtggaagtcttgctattcagaattaaagctgaattaacggtcataaacaacgctacacagttaaacattaaggatatggcaacattattagaaataaaattataactaaacttaggagaaataaaaatggaatttgatgcagtcactggttaggactctgagtgtcgctgttgaccaaagtgggaaagaagctgccgcagaggcgacccgactctgctccctccatactaaacacacagaccagacaagctcctacgaaaagccaacgctccacgcccattttcgtcagggaatatgtacccatcggctttagataaataaggaaacagcaggctgaaccagaactaagagaaaattgggcagagagaaggcaatggcgagtccacctaggggctggggctgcggagagctgctgctgcccttcatgctcctggggacgctgtgcgagccaggatccgggcagatccgctactcgatgccggaggagctggacaaaggctccttcgtcggcaacatagccaaggaccttgggctggagccccaggagctggcggagcgcggagtccgcatcgt

SEQ ID NO: 34565 - DNA, 2300 bp, Homo sapien
tttaaacactgttaaagagcattcaagtatatctatatctatatacatatacacacacatatatatacacacatatatatacacacatacacacacacaaacacacatacatacacacatggacattctgaccaaaatgtaaaatgtacaaactcaccgaatagtgaatgcatccaaagagtaacaagagaatctatacagtaggtgtcgacattattcactcctatgtgaaaacttgcttttccattttttttaaaagaaaatgttatatgcttcttagggtaaggtgtttgggaaaaaagtaaaggttatagatttgggtacatttcttctgagttaaatgttttgtgcaatggaaaaatatctttaaaccctctataaactactaacagactataaaatgcttgatccatacattttgaatgtatgtactgtatataccatatacttttaaatatctgaatctttagttttatatgtgttctgaagaataatttttcatactaattgaagtgttcatacaatgaacacttggcattgtgttggaaggcacttgctttggaatgttttggagcaaagtcttgagtcagttatatttttgatgtttgtataaaggtgacaatgagtgtctgtctagaattctggttactgtgagtagtttaagatgctataatgcttttccactataaggtgaattcggtgtggaactcattgcttattgctgcacacttgcctagttttagagtaacaatacattatgtaggctaaagataatttctttaggaagattttctggtttgaaaatggaattaaaactgtaagacacctgtcagaaacatggaaaatggcatgttattgaccagggaaaagtgtaaataacaaaaagttaggattatcagatggtaaactggggaccaaggaaaagtggacaggaagattacttatataattaaataatataattataaggacttacaattcactccccaatcctaataacgcatcattgttaggctacttgagaagaaacagtacatttcaggacaattgtgatgtagtatgaaaaaacatcctttgtaaaagtttttcatttgggccagggtggttcatgactataatcccagcaatttgggacgctgaggtgggaggattgcttaaagccaggtgttctagcccagcctgggcaacatagtgaaaccccacctctatagaaaaaaaaagttttcaatcatacttatttaattaaaagtagacacttggaaacaaaggaaaagagaccctcttgctttttactatacttctattttataaggtcaatcatttcctcattacctttaacttcttttggggggagataataaagataaaagagaagaaagtgaaacatagaataaaactaaaagctatgacattataacttttagaagttagaagtaaaggaaatagaatgcaataagaatacacgtgaagctgatatttcaagcctctttatactacgtcttctgccatcaccaaaaatagcttccatttgtatgattttctatgtattattttatttggccctcatttctactagagtaagcagagaagatattattatgaccattttatgaaaatggaaactaaaaacgtgacgggattgagcaagattatctctgccctttgacaagtaaaaggtacttgatttggatggataaagctcaaattaaaagaaataacagactaaagatatagtaagtatatttaatgttttttaaaagtccttttaaaatgggaagaaagtatcactatcagtacactgccgatttttctcctaactagctccttatttggagctgatttagtcaccattactgcagttctgcagcagaggcgccgggtgccgctcttggctagtgctgtgcaaaatattggctcctcccgctgcagccagctcggaagaaaagtgcactctctatcaggcttcctgcagcggagacacccattagagaacccaagcacaaagacaaagcaaatagttggtcctgctcggagaactcttgggattatttaaagatctcctctcctcggatttagaaaggcaaaggcgcagagagcgggatgggaaatagctccggatggaggggcccagcagggcagaggcgaatgctatttctcttcctgctctctttgttagaccaggttctctccgaaccgatccgctacgctattcccgaggagctggacaggggctcgctggtagggaacctcgccaaggacctggggtttggcgtgggggatttacctactaggaacctgcg

SEQ ID NO: 34566 - DNA, 2300 bp, Homo sapien
gtcagagcctcggatcccgacttgggacctaatggccttgtctcctactacatcgtggccagtgacctggagccgcgggagctgtcgtcctacgtgtccgtgagcgcgcggagcggggtggtgttcgcgcagcgagccttcgaccacgagcagctgcgtgccttcgagctcactctgcaggcccgcgaccagggctcgcctacgctcagcgccaacgtgagcctgcgcgtgttggtggacgaccgcaacgacaatgcaccgctggtgctgtacccagctctggggcccgaaggctctgcgctcttcgatatggtgccgcgctctgcagagcctggctacctggtgaccaaggtggtggcggtggacgcagactcgggatacaacgcctggctgtcctaccacattgtgcaggccagcgagcccgggctgttcagcctgggcctgcgcacgggtgaggtgcgcacggcgcgtaccttgggcgacagggaggccgcccgccagcgcctgctggtcactgtgcgtgatggaggacagcagcctctttcagccaccgtcatgctgcacctaatcttcgcagatagcttgcaagagatacaacctgaccttagcgaccgccccactccctctgaccctcaggcggagctacagtttcacctagtagtggcgttggccttgatctcagtgctcttcctcctcgcggtgattctggcaatctccctgcgcctgcgatgctcctccagacccgccactgagggctactttcagcctggtgtctgcttcaagactgtacctggagttctccccacctacagcgaaaggactttgccttattcctacaatccgtgtgctgcctcacattcctcaaacaccgagtttaaatttctcaatataaaggctgaaaatgctgcaccacaagatcttctatgtgatgaagcctcttggtttgaaagtaatgacaatccagaaatgccttctaattcaggcaatttgcaaaaggtgagtttcttcaaacctttccttccataaatataattgggtttcaattcattgatttagagataaaaagaatacagattaaatattccctgattacattattttattgattttctggtgtagagtagggtgtctaggaaattctttgtagaatttcctgtagaatatctgtgttgcagttgttctttcatagaaagcctccttttgatagtcttgaaacttttcttaatcctaatacactataatctgaaacatttttaatacagtattatctcacactgtcattttcagacatatctatccagaattagacccaaatcctcacaattaagtggtttacttagttttaatgcagtcaatcctaaaatatatgaaacattatgtatatcttaacacatttttaatgtaacctgtatataatatttttacttccctttgcatgtttttaaaagtatacacagatgttgcctatgtcagggcagtttttaacttctatgctaatcaaaagaaataatggcatctaaaatggcaactcttgtaatgggcactgtaatgaattggttcaaaatgtgtttgtgtagcatatgcctgtagtcccagctactcgggaggctgaggtgggaggatcccttgatcccaggaggtagcagctgcaatgagctataattgtgcccctgcactctagcctgggagacagagcgagactttgtctccaaaaaagtgtttgtggttgttggtacccttactgaaaatgggactagcataaatggtggtgaaatgtgatgataattcaaaatttacagaagattgtaatattatttctgttccccaaggtcctaagagatattttcataaaaatgaatggtaaacttcagagaacatttaaaattattcaaaataatctcttacactcttctaaatgcttcattatcttggggagggaaatattatgagtgtcatctctgcagatttagcagaaataaaatcctctgtgtgatagtttcacaaaacgatgcagtattaagttaggactctaagcgtcgctgttgaccaacctgggcaagaaaatcaacggaaactcaagttacatcctccaacaacaaagcaaattagacgggaaagcaggaaagctgtgcagaaattctgacctgaaacgcttcgcatccggtctctgcttgttgaaggaccttcaccgctatttctgagaagagcaaaagtgatgcagatctgttcttcctcttcttaatcccagagaagttcctaataagccagtaatggcgcctccgcagaggcatccgcagcgc

SEQ ID NO: 34567 - DNA, 2300 bp, Homo sapien
aatgtgagatgaaactatgaattttgaggcatcaggtaaaaatggatcaagacattgagagctataacctccaaacatgaaagtttgtttgaaaatatctacaagtgcttacattgtttaataatcatacactttgcttgcctcaacaagaagttcaaaagtactattaaacaaatagaatttaactccagtttacagaattcatctataatacctctattagttcctttaaacaaaatttatctactttgtgaatgcaaagataactatggattattttgatagatcaaaacagaatgtccttcaaagtgttccctgtattctggagcaatgccaccagaaagcagaaataggttacttaggagcctcccacaaaacgaagttaagctttcttagtgttagttctggattctcctcctggttccaccaactactctccaggacctagaagaatttacaaaccaagactgtttcttgccaggtctttattccagagcaggtcattctcttttattctgcaactatgtgaaaggagctttcttttctttctgctagcagagggtagcctcggatccatcaataatttagttttactctatcaacatcagtggagagacgagtacctctaaggatcctgtcaggacagtcctgcattttgctcaaatgctgtctagagatccctgttttctcaattacactagaatagagtaggatgaagatttgaattgcatactaggatgaagacttgaattgaattgcataatgaaaagaatcagccaatccattatccagtttcttatgaattcacagcccagtaggatctctgcagatttctgccttctgtagaaaatgggttgcttctatagctgattgctgcagccaagacaaacaacgatttctttctttttttctcacaagactgggagtgagaatatttggattccgacattgttctactactatataatcaataatcaggaacaaggcaaggcaattccctctttctttctttctttctttcttcttcttttttttttttttttttttttggcagagttttgctcttgttgtccaggctggagtgcaatggtgtgatctcggctcaccacaacctccacctcccgggttcaagcgattttcctgcctcagcctcctgagtagctgggattacaggcgcgcgccaccacgcccggataattttgtatttttagtagagacggggtttctccatgttggtcaggctggtctcaagctcccgacctcaggtgatccgcccgcctcggcctcacaaagtgtgggattacaggcgtgagcaacagcacctggccccccctctcattttttaaacggttaaaatgaaggtgttagaccgtctctaaggttctatacaatcaaaaatttattaaaataggtctatatattttacaacaattttgactttctgaatcttgcatcatggtgtctagaacatatgtgttcaattaatactgaattaattaaaatttatatacactgatgtaaatattttctaagtaaaatctttcatatgtatttaaataaaatttacctttttgccttcaataactgattttcccatgtgcaataacgtgtgagtcagtgcccaaaagagtcacttgaaagttgcaaggcaaagcagttttttaaaaattatctaagattatcaaacaccggtccatgaacactgttgcattaattcagtgtcttaaaatggatttttaattatcagggatatctagagcaaagaaatctaacagggaaattttgaaagatgaaacaattttctatgaaatcagtgtattgtgtgcatcaatgtggtgcagtaacttagtaaggactcacagcgccgctgttcaccaaccagggaaaaatggtgcgagagatcccacagaaaccaccgagttttacagcacagagaaacgacagattgcgataagccctcttccaggctgcactaaactcaagcctctatcctgctggattctgagctccccttcctaagacagaggggtccacccggatacacccgcattctgaagcacttcccgagatcggcgcctaagcaagagaagcaggacgactatggcggctcagccgaggggcggggactacagaggattcttcctgctctccatcctcctggggaccccctgggaagcctgggcaggacgtattctctactccgtgtcggaggagacggacaaagggtcctttgtgggagacatcgccaaggacctggggctggagccccgggagctggcggagcgcggagtccgcatcat

SEQ ID NO: 34568 - DNA, 2300 bp, Homo sapien
gcttggtggtcctaaaaaatcttgattgcttcttgacctatttacagtataatcatttattaatggggtggtagtagaaggttggatttatgcctaaagaatgaaatgtgtgtgtatcacacttcactaagatctatatcaaagacagacatcaagtctaatgccacactaaaggccatcggacaaaaccaataaaatatgtcaaataaaatgtcattttaagtgttgtaattggcatttgtgacataggcaattacatgttttaacagagaattccagtatgttgttttagtggtacagccagatgaagtgtgtctgtgggctatcaaagtgggagattggggatactggctttgtttcaactgtctcacgtactcaaaccttagaccatcttatgtacacagatcctagaccagtagttgattttatttattaggtctactgaaaaattcagttggaaataacccaatctgggattaactacttccatattcttttgtataacattttagtaaagctcagtatatcaagtgattgtcatccagaaggggtggatgacaaggtaatcttgattccagagacctttgagtattaattaaaaacacacttttagccaggtatggtgttgcaagctgtagcccacctgcatgggaggctgaggcaagaggacagcttgaacccaagaattggaggcccacctagataatataacaagactctgtctcttcaaaaaaagactctttttagactagtgttgtatttggtagtattttgcacatgatagactctgtacaatagtgtgggggatacattttttttttttgacatggagtctcgctctgtcacccaggctggatacattttacaagttctgcagtgttcacatttcagatgtacaatcacttggggtagaagacaatgttgctgacaccaacaatgttactgagggaagatcctatggcagaactacggttataaggtattttgtaaaagaaaatctcctgaccaaaatttattagatgcataaaattgtttttaagcaatggagagacataatcactaaactcagtgagctattgcaatcaaactttccagggattgtttccttcaattcagaggtcaccaaggaatgtaaaataagtgcagaggtaggaagcagtgcttcagtgcagcagatctcagtgactttgtgttttgaggctatgtattatccccctgataactttgaagatgaatgttgtatttcataaccagtaaaataattgtgtaatgaggagaggagtaggctactgcctgtgatcatcgaaatgagaatcacataatattcctgtaatgaaatcactgaaactattgggaagggggtgtatttgaagataagtataaattgcaccttctaaaaggcaattttggtattactgatactctccggaaaaagttgaaataaatcaacttggaggtacttagaaaagtggagaaaatgttaggaacaatgaaagaaagataaaatgtatccagtatatttctaatgagtaagtatggaaaattactgtactctgagacggtttaggccaagtctgtgttatggctatctttatatagatagtgcatgtttgaagattggggaaagcttatgtcaataaatgtttatgtacttaatctacatgatttgcctaaaaatcctcaaagttgggatgaaggcattcctaagagtacatttttagacgtcattaaatatacagacgtatccacgtagtttttgttctttcagttaggcacacaattataattattgcactggttaacttgaagcagcagaggctgtagtttcctagtgctgactctgggcgccgctgttggccaaagtggagagcttggcgctccagatctcctcgcgcagccgcagcgcgctttccagggcagccccagctcagactccccagcgccagcctttacaccgcttcctcctcggaaaaagaagaattttttcttgaactggaactgcaactaaagtccgttcggagatccaaaaatctgcaatacagaggttatttgtaacccggcgtctccaggctggtgagcaagctgaggagagcaagagggatggggagcggcgccggggagctgggccgggctgagaggctgccagtgctctttctcttcctgctgtctttgttctgcccggcgctctgtgagcagatccgctacaggattcccgaggaaatgcccaagggctccgtagtggggaacctcgccacggacctggggttcagcgtccaggagttaccgactcgaaaactgcg

SEQ ID NO: 34569 - DNA, 2300 bp, Homo sapien
gcgtgacggtggacagccaccactctcggccactgccacgttgcacctggtcttcgccgacagcttgcaggaggtgctgccggatatcactgaccgccccgacccctctgacctccaggctgagctgcagttttacctagtggtggccttggccttgatctcagtgctcttcctcgtggccatgattctggccattgccttgcgcctgcgacgctcctccagccccgcctcctggagctgcttccagcctggtctctgtgttaaatccgaatccgtggttccccccaactacagcgaggggactttgccttattcctacaatctatgtgttgcacatacaggaaagacggagtttaatttcctaaaatgtagtgagcagttgagttcaggacaagacatactttgcggtgattcatctggggccttatttccactttgtaattccagtgaattgacttcccatcaggtgagtttcctttaagtataatttaatgctcattgcctacccatttctccatattcacaagaaaatatacatatttgcaggaaaatatataatttttagatgtcatggatcattttaggaaagttgtagtcagttaaaaagctgtcatatcattctacaaaggaggagtaaagtaggagcaattgtgtggcccaacatttgtttgttttttagccaagcttagatttataaagcaatgagggtgtggttttaaccacaaagtgaaagtgttagacagttgttggctctctcctaaaaagtgaatgagatttttcctatacattttccttcttgttgactaatatatgatgaatacttttttcagcttggatataccataaatataaaaataataaagccaaagaatttaagctaaaattcaacacttttcttaactaatttaactggtatggtctccatagtagtccactgttttgtttcctgtgttaacttcccttttgtttcaaaagctcttagaataaggagtcaactggatttttatgtccatggaccccttgtgattatatgcagtgtacgctgtgtgtgcgtgtgtgtgtgtgtgtgtgtgagagagatccttttacttagaaaaaggtctactatgctcattagaagatcaaaagcagattctccttacttgtaacataggagtttcaggattaatctgtattcaagctcattctatatccttcatcaaagaaaagacaatgttttgtgtctgttgtccctctcacacacagccctaatatataatgtgtaactgccttatctgcagccctaaactaatatagctagaggtcttctaatcattctcctacctctaggaaagaaatatagtcttgaaaactgccaatctggtgtgcatacaaaatatatacaaaataccaaggaacattatatgagccttttgctaggtatatctaagcaactgcttcagttaatggccactttacaaattgctgaaagaaggaaacgtctttcgattcttttttttttctttttttttttttgagacagagtctctgtctgttactcaggctgtagtgcagtggcacaatgatagctccctccagcctcaaactcctgggctcaagcattccttctgcatcagcctcctgactagctggaactcaggctcatgccaccagacctggctaatttttctgttttcagtagagaaaatattttctttcactaatttaactggtatggtttccattgtctacccagttttccatatgcataagaaaatatattcacaggaaaatataaagttttcagatttcatgagtggttttaagaaagttttagtcagtgaaaaaactatcataccagtcttcaaaggaagggtgaaataagttcatctgctacgttgcccaggctggtcttgaagggaaacagacttttttgtagtcatacttatcctttggcttcttagtaagtattatatagtcattactttttgcagttttttagatcaaagtgttaatgtaggtaaagttaattttagaatatatgtaaaagtcaagtctgctttaaatttaatcatctctttggtgaaagggatgggatggagctttgctttttatcatatattcatctgtacctttcaagtattcaaatagaaaaatataaacaatgtaaataaaatagcaaaacaatgtaatatctcataaaactgcaatggtaaaagcatttatcctattgaaattccacaatttttatttgaaaatattatcgacatgtaattcaagtggcatttagaagaataatttaaaagcaacaactctataga

SEQ ID NO: 34570 - DNA, 2300 bp, Homo sapien
tgtatgtagataaaccattaaatttaatgtatgtaatcatttaattcatcttttaaagcaaagaaactgctagtagatgtctttcttcactgatttcactggtagttttcatctctttcttatgttcctcatatatgctttcttattcctacctaatggatttatgattttttgaatctcctaaaattttattaaaaatactatatgttggctgggtgcagtggctcatgcctgtaatcccagcactttgggaggccgaggcggttggatcacatggtcaggagttcaagaccagcctgggcaatatggtgaaaacccgtctctactaaaaatacaaaaattagctgggtgtggtggcgggcgcctgtaatcccagctactcaggaggctaagacaggagaattgcttgaacctggcaggtggaggttgcggtgagccgagatcactccattgcattccagcctgggcaacaagagcaaaactccatctcaaaaaaaaggaaggagaaggagaggaagaagaagaaaaatactacatgttatgtgtatgagagagaaagagagagactgattcactgaacttagaaggtccaaatcatccaaataattttctaagtttatccaggttttcttggatgcaaaatccttttccacctctatataattaccagaagaaacttacaaaaaaaaggaaatgctattgcctgaatttctcttgctcggaatcctgacatattcttgaagaaggggaaaaagacaccggatttgtcttatcgtttggagctttaaatataaatgactggatgttttctcaacatccttgtaggatggaaggtgaatacaggattattccatttttaagacaaaaactactagtcttgtgtacatacaaagctcccattacatggtataagtcttttgcttggtttcccttagtatgtgattcagtaaatgggttccttacaaagtgctgagatttcttataataccacttacttttaacctttcagtagttttctttgttgtatattttgtgttctttttcccaaattattatataagtttaagtgatgcttagaataatgtttaagaccactttaaaattgcataatttattgatgaaggattaaaatagaaacttgcttttcagtgtatatgcatttgaatcattgaaacacagtctgtgcatgcattacatattcacattaaaaaactaagcatttttgaaatagcagaaaagtttaagcaattacaaaaatgtgaaaatttccaactttaatcctgttaatatttagcaatattaggcgagaacatctgtaactattgctgaattaatattacttttataatacaaaaatttaaaataaacgtttttccaggaattttatcatcaaaataaaccccagaaaataatttcaaagtggataatctatccttatatatgtattaatacaattatatattttacatttacaaatatataggtataaaaattaaaaatgaatgtacttccaaacaagattgcacataaaaattacttcagaaaattgttaagatacacagaaaaaattgaagcatcataaaaaggaaattataatagtttacatatctagaaatagagtgcaaagttctaccaagaataagaataaattaatattaagcaatggtttgtgattttataatacacttacagaaattttattccactttatttacaactcagatatctaaaaaatagattgcttttgaaatacaaatgcaagaaacaattggagaaatctaaaatcataattagaagagagtagtgttttctttatcagccatctgatataatgttacacatcagtgggtgtagtaacggcttaggactctgagcgccgctgttgatcaactctaagcgaaaatcaggactccatccggatttccagttctgcggctacacaaaacccggcagataccacaaacctgctcccaggctgcagcaaaactcagcctctttcttctaaggaaaagatcaccatactttgcagggtggaagaaagaacctgatgaagcagcgcgcacagagatccttttgagaaaattccaaagcgaggcagcaatggcagctccaaccaaatgccagctccgcggaagattagtcctgctatgctcgctcctggggatgctatgggaggccagggccagtcagattcgctactcagtgcctgaagagacagaaaagggctatattgtgggcaacatctccaaggacctggctctggagccccgggagctggcggagcgccgagtccgcatcgt

SEQ ID NO: 34571 - DNA, 2300 bp, Homo sapien
cattctgttgtccagggtggaatgcagtggtgtgggtaaagcttactgcagtctcaatctcctgggcttatgcaatcctcccacctcagccttcacagtagctaggactgaggtgggagggctagcaagctatgttgcccagactggtctcaaacgatcttcctgcttcagtttcccaaagcactgggtgaggtgtgaaccacctcacccagcaaattcttactcctacgatcatttattcaggtcatactatgtttgtaagggtaaactgataaaaaggtaaatgtattcttcttagagaaacagctgaaagcccagatttattgcttctattcttccatttctatgacaggaaaacacctctttgaggttatatttttcagatcacaagtgtgtaaagtctgtttgtgtttacagatattttctgacgaagattcaaacttcagttatccacttccaaaccctagtaaaccaattttttccctttaatggtgaaagttgtcacatcttttattctcatatcttcaaaggtcttaatttcctaatgctttaatgttaaattatggagaatagtaggacattcttcttttctatagtatatgcttgctcaagagaagtttctaagactggacactgtgaaatgacaaaacaaggaattaaaaatatttctctcacttatatattatttctggctcaattctccaacttttgagtctagaaatgaacttgcatatcagatataatttaagaaaatattctcaggaactgctgggaagattctaaaactattttactgtttttagctataaggaagagaataatgtattatttaatgttattttaaacatagtgttgtttcaaatagtaaataacatttcacaagacatttgaaaataagctttgaagttgactcaaaattctatgctaaacatgtgatccatagatacactgatgactgctggcatttctgtggaaatgaagaattgttttatttgtttgtaattatttgggtttcagttgctttatttttaagaaaaaaaagctgaagtgtctgggaatcctttatgacatacagacattttaattatttcaaacacgttttcccccttaagtgggtagcaaaaaaaataaagcatacttcaggctcatatttttaaccatgcaacaagaaaattgttacaatttctgttctgaggagtagccttcatacttagtatttataaatattgaaatgtatgttaatttggggaaaacataacagatatccatgaaggcttgtatgtcatggtaggtagttactattcgataccacaaaaatgtctcttgcccttaaaaccagaacacgaggctcaccagacagatgactgaatggagtatggaaaatctttatttctgtttttcttaggctatgtaggacttaacttattgtgcattggtaacagattgtagaacataagctgaaagataaaattcttgaccttaatgtctcatcttaaaaagaagcattggttgacattctatatctcgtattacttaaaaataatgggggagcgcagtatatattaaacaaagattggctttgtggtgatcattgttgaaggtggggtgatggctatgtgaaggttcactatatatactccctactgttgtataagtttgaaattgtgcataatagatttatttaaaacacaaagcatagaaatatctactataatattatggtgagagcaaaatttgagggggatgtacacctgcattttcgaagaatatatacatttcggagaccgaattcaaaatgaaaaaccgggctgctgtcccgcacggagcctctgggcgccgctgtcggccagtgcagagcaagcgctgacgccggggatccgtcagcctctggcctgggattccctgcgcagccaacaacagaaagaagaaaaccagctcccacacagagcctcccggctgcgcagacctttcccagcacagcggattgccagctccgagacccgggactcctcctgtcctgggccgaatgctcttttagcgcggtagagtgcactttctccaactggaaaagcggggacccagcgagaacccgagcgaacgatgggagggagctgcgcgcagaggcgccgggccggcccgcggcaggtgctatttcctttgctgctgcctttgttctaccccaccctgagtgagccgatccgctactcgattccggaggagctggccaagggctcggtggtggggaacctcgctaaggatctagggctcagtgtcctggatgtgtcggctcgcaagctgcg

SEQ ID NO: 34572 - DNA, 2300 bp, Homo sapien
ggataccccattggttccagtgagttttattttcatttttacttttgttaaaaaaaaaaagattggtttttactttgaagtttgcggcatgatggtggaaagtgtaaatgctaaaacactgatgagtagaatttgatgtttattaaggttttttttttttttttttttttttttttttttactttctggtaaaattcacctagtctcaatcaaggcctatatatcataaggctttgttatgattagctttgcagaaccttgtagtttatagtgttgttgagtacaatattgacaattcctaagacagacttccatacagaagtgcctgtcaatttatatttcctcctgggtggtcacatattgaaactccagccccttaagcaaccctcttgttctgaaggcaggtctggtaagaataggtaagtatcagaaagaaatcacctctggaaacacaacccaaatccaagaatactcaatgcagttcttcccaaggagaagggcaataggcctttttcaaactacattttatatatttttcaatctatactttgtggtgatagttgcagttgaatatactaagtttttcattaatattgaattaacaatttatttataacaatgtatgcttagatttttccagccctatttataactgataacactgcagtatcctttttgcatacaattctctaatttcacactgctatgtggaagatatagcattttaatttaactttcattgctcaatagggatcctgaggaggctatagagggtgaaattaagaatatttgggattctgcttttgtcttttttgttaaattttctagtgactaaggctgaaagtaaatatgggttgggaagacagataaatttgtacatgttcccgagaacaggagcaagagatatatgacaaagctatttcagtggctctttaatgtataaggaggcaaacacctgaaactctgaaaactctgaaattgagaggcaaaataaacttagagtcaagaaagaaatgccatttctgcagatcagaatataaacaccaaccacagctgtaaaaaagaaaagaatatatgcaacgaagggaaattatataaacaaaggatcattggaggtactgatgagttcatttagttcaatgaaaatagtgacgtattaggtagatctcttaattttattactagtattctactaaatgtggtagtataaagtcaaaaagcattccgaagtttctcaagacccttataattccatgatttttttcaggtcagtcaacatttgttgaatgataggtctgtggaaggaaagcacactctttagggtcatagttattaactattaaaccattgaaactattattttatatttgtgttaatgagagtcaaaattattgtgcattcatctcaaataattctattattttgaaaaatacaggttttttttttaaaaaaaactgctcttgacattgtagctattgtgagaaaatattttgattataattatttaaaagcaatacaggacaccctggatgatggtaatgactagggcaatggttgcattccagtacttaagtatgaaataaggaattattactttctgggtgaatataggctagaattgaagacaaaaaaatttgttgcttatcttcagtacttccagcttcatagataattactcttaaaaggaacaagaatgactgcctctggatggaggaattggatagcaatgggccgtgggataggagacctataaaccttcatgctatattattttgtgcctttttaaattttgaagaaaaaatattcatttattcaagatatatgtaaattcagtaaataaaaagatatgatagttatgaccaagtggaaatatatttcctgatgtaaaaggaatcactgaggaaaaagattaaaatattttggctgtcaactcgtagtttaaaaaaaattccttgaaagaggtagagaaaagtcaagttgcagtcccacacagagcctctgggcgccgccgtcggccagtgcagagcaagcgctgacgccggggatccctcagcctctagcctgggattccctgcgcagccaacaacagaaaagaaaaccagctcccacacagaggctcccggctgcgcagaccttgcccagcacaccagattgccagctccgagacccgggactcctcctgtcctgggccgaatgctcttttagcgcggtagagtgcactttctccaactggaaaagcggggacccagcgagaacccgagcgaacgatgggagggagctgcgcgcagaggcgccgggcc

SEQ ID NO: 34573 - DNA, 2300 bp, Homo sapien
gcctttttcaaactacattttatatatttttcaatctatactttgtggtgatagttgcagttgaatatactaagtttttcattaatattgaattaacaatttatttataacaatgtatgcttagatttttccagccctatttataactgataacactgcagtatcctttttgcatacaattctctaatttcacactgctatgtggaagatatagcattttaatttaactttcattgctcaatagggatcctgaggaggctatagagggtgaaattaagaatatttgggattctgcttttgtcttttttgttaaattttctagtgactaaggctgaaagtaaatatgggttgggaagacagataaatttgtacatgttcccgagaacaggagcaagagatatatgacaaagctatttcagtggctctttaatgtataaggaggcaaacacctgaaactctgaaaactctgaaattgagaggcaaaataaacttagagtcaagaaagaaatgccatttctgcagatcagaatataaacaccaaccacagctgtaaaaaagaaaagaatatatgcaacgaagggaaattatataaacaaaggatcattggaggtactgatgagttcatttagttcaatgaaaatagtgacgtattaggtagatctcttaattttattactagtattctactaaatgtggtagtataaagtcaaaaagcattccgaagtttctcaagacccttataattccatgatttttttcaggtcagtcaacatttgttgaatgataggtctgtggaaggaaagcacactctttagggtcatagttattaactattaaaccattgaaactattattttatatttgtgttaatgagagtcaaaattattgtgcattcatctcaaataattctattattttgaaaaatacaggttttttttttaaaaaaaactgctcttgacattgtagctattgtgagaaaatattttgattataattatttaaaagcaatacaggacaccctggatgatggtaatgactagggcaatggttgcattccagtacttaagtatgaaataaggaattattactttctgggtgaatataggctagaattgaagacaaaaaaatttgttgcttatcttcagtacttccagcttcatagataattactcttaaaaggaacaagaatgactgcctctggatggaggaattggatagcaatgggccgtgggataggagacctataaaccttcatgctatattattttgtgcctttttaaattttgaagaaaaaatattcatttattcaagatatatgtaaattcagtaaataaaaagatatgatagttatgaccaagtggaaatatatttcctgatgtaaaaggaatcactgaggaaaaagattaaaatattttggctgtcaactcgtagtttaaaaaaaattccttgaaagaggtagagaaaagtcaagttgcagtcccacacagagcctctgggcgccgccgtcggccagtgcagagcaagcgctgacgccggggatccctcagcctctagcctgggattccctgcgcagccaacaacagaaaagaaaaccagctcccacacagaggctcccggctgcgcagaccttgcccagcacaccagattgccagctccgagacccgggactcctcctgtcctgggccgaatgctcttttagcgcggtagagtgcactttctccaactggaaaagcggggacccagcgagaacccgagcgaacgatgggagggagctgcgcgcagaggcgccgggccggcccgcggcaggtactatttcctttgctgctgcctttgttctaccccacgctgtgtgagccgatccgctactcgattccggaggagctggccaagggctcggtggtggggaacctcgctaaggatctagggcttagtgtcctggatgtgtcggctcgcgagctgcgagtgagcgcggagaagctgcacttcagcgtagacgcgcagagcggggacttacttgtgaaggaccgaatagaccgtgagcaaatatgcaaagagagaagaagatgtgagttgcaattggaagctgtggtggaaaatcctttaaatatttttcatgtcattgtggtgattgaggatgttaatgaccacgcccctcaattccggaaagatgaaataaacttagaaatcagtgaatccgtcagcctggggatgggaacaattcttgagtctgcagaagatcctgatattagtatgaattcgctgagcaaataccaactaagtcctaacgagtatttctcatt

SEQ ID NO: 34574 - DNA, 2300 bp, Homo sapien
tgtagacgaaaacgacaacagcccagaaataatcatcacgtcactctctgatcagattatggaggattcccctccaggagtggttgttgccctcttcaaaacacgggaccaagactcaggggaaaatggggaagtcaggtgtagcttaagtagaggtgttccatttaagattcattcttcttctaataattactacaagctagtaacagatgaggccctggatcgggagcagaccccagagtacaacgtcaccatcgcagccacagacaggggcaagcctccgttatcctccagcaaaaccataaccctgcacattactgacgtcaatgacaacgcgccggttttcggacagtcagcctacctggtccacgtgccagaaaacaaccagccgggtgcctccatagcgcaagtcagtgcctctgacccagacttcgggctcaacggccgtgtctcctactctctcattgccagcgacctggagtcacgaacgctgtcgtcctacgtgtccgtgagcgcgcagagcggggtggtgttcgcgcagcgcgccttcgaccacgagcagctgcgcaccttcgagctcacgctgcaggcccgcgaccagggctcgcccgcgctcagcgccaatgtgagcctgcgcgtgttggtgggcgaccgtaacgacaacgcaccgcgggtgctgtaccctgcgctgggtcccgacggctccgcgctcttcgacacagtgccgcgggccgcgcagccaggctacctggtgaccaaggtggtggccgtggacgcggactcggggcacaatgcctggctgtcctaccacgtggtgcaggccagtgagcccgggctcttcagcctggggctgcgaacaggcgaggtgcgcatggtgcgtgctttgggtgacaaggactcggtccgccagcgcctgctagtcgctgtaagagatggaggacagccacccctttcagccactgccacgctgcacctggtgttcgcagatagcttgcaagaggtactgccggatttcagcgaccatcccacaccctctgactcccaggctgagatgcagttttacctggtggtggccttggccttgatttctgtgctctttctcctcgcggtgattctagctattgctctacgcctgcgacagtctttcagccctactgcaggagactgctttgagtcagttctctgctccaagtccggacctgtgggtccccccaactacagtgagggaacgttgccctatgcctataatttttgtgtgcctggggatcaaatgaatccagaatttaattttttcacatctgttgatcattgtccagccacacaagataacctcaacaaagatagcatgctactggctagcattttaactcccagcgttgaagcagataagaagattcttaaacaggtaagtatttaaaaatgtatttaatcctttttatattacaatatgccaatatattccaatatagtggtattattttaagattctagataacttcttcatagagttcgcaaaatataggtcaaatttatggttatcattattaaaacaaaagtttaaattaaatgcctcagtcttcctactattcaaagacattttaaagcaaactacatgggtaatctccggtgacatttttatgaagtaaaatacctttcggttaaaaatataaaatacaggtatatttttacggcatggtattttaattgaaaccctgatgctactcaatttttctcaagtatttcatcttcatttactcaataaaggaaccttgtaagaattatagttaggcatcctacctgatgattttatcgggaccgtattatttccacttccagaaatgtcgttcctttcagtcggttaaaatcaattggaaccaactacaacctacaagttttcagctccagtaatattttgaaaactttttaaaaattaagcaagcccttttaataattactcctttcgcaggtgttcttggtaaagttttaacgtcacataatgtaagtattgtgtatcatcgtttttaagctctacaaatacgtgtgattcacaaaggtgagcgtaatcatttcttctggaatttcttagtcgttgcaataataagaatgggctctaggcgccgctgctcaccaatcagggaatgggaagctgcgcgccattgagtccctccctcccccgcctctaccacacaaagcggaatgagatggatactcacagatcctgacactggagacttagaagtattttccttcgctttctgatatattttggatgtagtcggcctaggacttcatagatacat

SEQ ID NO: 34575 - DNA, 2300 bp, Homo sapien
tatgttccctcggattctagaaaaagaagatttaattttctcaccatgacaccagaaacagtccccccacaagatctttctaatgaagtttctctggtagcaagcttcactgaagagaataacaagataagctctaactctgttgctcctactcacgtgagttccaatgaatgtctttcatttacaaatggatgaggtttaattttcaaaccaatattttggcaagaaaatcttaaacatattatatctactattgcttcaggtttgtttgcccactcttaatatttcctgttcctttctgtgtgggccagtaacttcattattagctttcatgtatttttgaaacattttcaccatttttacgggagactttttttttttttggacggagtctcgctctgtggtccaggctggagtgcagtggcatgatctcggctcactgcaagctctgccttccgggttctggccattctcccgcctcagcctcccgggtagctgggactacaggcgcccgccaccacgcccggctaattttttgcatttttagtacagacggggtttcaccgtgttagccaggatggtctcgatttcctgacctcgtgatctgcccgcctcggcctcccaaagtgctgggattataggcgtgagccactgcacccggcccggagacattgtttatacacacacacacacacacacacacacacacacacacgtgtgaaaagtgggtattatgatactgctgtcattgagatattttaattgaggaataaatttttttcctgtgatgtttcttgggacatcaatatttgagtatataaggctttttctttaatccattaactataaattttgaagaaaatgcatgagaaaatggagaaaatgtgttttttttttaaaaaaaattgagattaaggtctcattatgttgcccaggctggactcaaactcttgggctacagtaatcctcccacctcaatctccagagtagctgagactacagttgcctgaaactgtgcctggcagagaaaaaagcttaaaaaaataagaacatggtaatgatttgataatattcagttacatttacttttgattcttgtaattcaagtaaactcaattttatgtctgatattttctcacagctacctatatatttcttcccaatttaaaatatattattttattttatgcctagcaaatatctttacagtataaatatttacgctcatgaaagtacgtagccagttatttcttagggagaattttttccctatattttgatgggcttccaaaagtattaccagtaattctcagtaattacaattaggtcagttacccaggaaaaggtaagtctgtaacattctttggactaccaattttcttttactaagtttcctgaacaataaatatttttgaaatataatgtattaatagaattctggagtacttccattatttccagtcaatgcaagttggaatgcttctactttatgctaaaaatattaatgtttctttttcacttgggttcttgttaagtgtgattctgataatgtatacaatcacatatcatttttaggtttccataatatcatgaaaatttgatttttaagcgttacatgtcaacaacctggtaaagtaatccttccattcaggatcattcaaggaatctatttaaaaatattttccccaaattatagctgaatcagaaagtttaaattattatattatatgatttgtcaaaaagagaaactcctagggagacatctccataataggtgtgttgggggaacagtaatctcaaagcagatgcactaacattataagattaaaatcattgtttatagaaacttccaattcatttaaaagctcattggggaaaaaaaagctcattgggaaaaaaaaaaaaagctcactaaagtttctattaaagcgaatacggtagatttccatccccttttgaagaacagtaggtggagctatttaagatataaaaacgaaatatcctttctgggagttcaagattgtgcagtaattggttaggactctgagcgccgctgttcaccaatcggggagagaaaagcggagatcctgctcgccttgcacgcgcctgaagcacaaagcagatagctaggaatgaaccatccctgggagtatgtggaaacaacggaggagctctgacttcccaactgtcccattctatgggcgaaggaactgctcctgacttcagtggttaagggcagaattgaaaataattctggaggaagataagaatgattcctgcgcgactgcaccgggactaca

SEQ ID NO: 34576 - DNA, 2300 bp, Homo sapien
gaggtcttaagaaaactatgagctgggtgcagtagctcaggcctgtagtcccatctacttagaagtctgaggcgggaggatcccttgagcccaaggagctggaagttacagtgagctatgattattccactgtactccagcctggatgacagagcgagatcctgcctcagaaacaaaaaccaaaaaacaaacaacaacaaaaacaacaacaacgaaaatctcagaaaactacaggccttattatcaagaaaatgacaggccttattattgagaaaactacttacatttttaaaagctgattttcaaaaaccagattgtgaattaagtgatgctgaataggggaaaaaaagactgataaaccagtgtatctctgaataacccactagatcagtgcttgtcaaactttaatgtgttttcaaatcaccctgatgttttgttaaaatgtaagtcatgtctcagtaggtctagaggagggcatttctgcatttctaacaagctccccggtgatgcctagaccattggtcctcacactttgagtagcaagtgattgggctatactctttattctaaattctaaatgtattctatcttctaatgcctatcagccctcttgctggtctggctaattatcaaacttgagcatttaaaactgggggttttcagagattaattgaagtgttaaagacatggaaatataggtcacatatggcttttcatctcttccggaaatatcctatatatccttacttcttttctacctacctaacctatgtgcctaccccttcacttatgttcaaggttctattatacttcaaaaggactctatgcaatcaaagtgatgtccaagacaaatatacagaaatagtatgaggctctaacactttacatctaatggagtggtttgcatcattaattgaggcttactctgtgccaggcactttacctgccttcttcatttaataggataggagcaggaactcttagaggttcatttcttgttcaaggatatacatctcatctctggcttatatcacagtggactcttttattcactatcctaatcattataattttgtttggtgacaacaattctaaatgcagaaaagttaaggctctttattctgtgactaaaggctttgtattttctaaagatttgtggagctttgctgccattatttcaataattttataaagatcctaggtggtaaataggcctggctttttttctttttgaaatcttctccgtcttcttcttcattagcagtgcaacttcttgtggcatatggtacccaagatcttgggaaaaggattgatcaagtaaagggaaacgatagagagagtgtgctctacaactgagatcatgctccttgtgaaagacagggtagggaaatttcttattgctccctggttcttaagaaatgagagctaacaatgacatccagttttaaaagaaataaaatctgaattgtacttttaaattttataagccagagttaaaccaatagattgtaactcctgctaatttgatagtagctccagataatgaggaagtgacagggaatgctaatttcatttggtaagagataaaactgaaattattaatgtctccacggaaatgctaaatgcctccttacaagtagggtccggctaattgtctgtcttccaacaagccagatttgttggtgtttttccagacaatgttgtgtagttttcggtttggttcgatcccctttcttgtgatcaaagaaagtgattcaaatgtttaatgagtcttgatttggattggagacttgcagaacggctagcctcacagccccaaggctggctttccctaaggtaggtttcctatgcaccgatactggcaaggcgctttggctggaaactctggaaggaagccaaaggaaagtgaagttcctggcgctagcgcgtgtcctgctcagagagcccggcgctagctcattcttcgtgcagttattggctgggactctgtgtgccgctgtcggccaatgaagacgctggagatcgggcccctgcccgtcccctttctgcgccccgggatgaggcagagactgaacagccggcgagcaaatcaacggcatccagaaagccatgtcggactcggcgcccagcgcccaagcgctaacccgctgaaagtttctcagcgaaatctcagggacgatctggaccccgctgagaggaactgcttttgagtgagatggtcccagaggcctggaggagcggactggtaagcaccgggagggtagtgggagttttgcttctgcttggtgccttgaacaagg

SEQ ID NO: 34577 - DNA, 2300 bp, Homo sapien
ggtcgaggcaggagaattgcttgaacccgggaggcagaggttgcaatgagctggtgtcaggccactgcactccagcatgggcaacagagagagactccatctcaaaaaaaaagtgtgcgtgtaaaacagacagtctttgtaggagatgaggtgaagcaagtaggcaggagttagatcctgagttacctttgggccaagccaaggagtttttattttattccatatagatgacagtcactgcagaaatttgaactgatatgcatatatcatgaggtttttttgttttagaaatattattctgtcagtcataagtgaagggactggggacattgggactggaggcaaagagatcttatctctttgcaatagtttgaaagctattgcaatatttgaagagaagattgataaatgcttgaaccagcacagtggcagtacagatggagggagctgactacaataaaatcatcaggacttgttgattgacatgatataggaagtgagggacagggatgagtcaaggctgatccccctagatcctgactaaggaagctgggtggttgacagtgccattcacagagacagtgaattctggcataaacacctaataggtcaggctggtttacacctccatcattcccatgggagaaggtatagaggggtgtgtgtttgtgtgtgtgtgtgtgtgtgtaaaagaacacagaaagccagattcctctttttgacaccagaatattggttcccaccatagtcaaaaggatattcctgaggatcgaggcttggaaaaatattggggaaggataagaactccagttgttgctgctttttttggcagccagtgtaacctaggtaaggacttggttgaattaagaaatttcatgtccagatcaggatggatttttctatttctctgagctctggtgtgtttcccactcagattgcaggtcgtaggtacctacggtgtgaattgtgttgtgtttctgtgcttgtgcaagggagtagctaggttgctgggaggtctggatgagggtgggggtggggtgagatcaagtctccagctccaagaggtcccctggggctaagtgaaaagcttgctcttttgaaatggtcttcgttggtaattaacaaaagatcaagaataccttggtgtcagataaagggaatttgtaggcacaatgctgttggtagctgatctcaatcattcaaggaagctattaaatctatgaacattagcattctgccaggtaaagagatctggtccttagcacctcccagacacactgattctttactgttttgaaacatctccctctcctggcttcctccaccccgcttccatactgtccttgaaatcaatgaatggtaatttagtgtatctagtgtatcactagcaaatgtctgaataagaaaggtttggtttccgctgtgtctcctgttacaatgagaacatgtactgcataaatttaattggctacgttaatgtgtaagccttttctgcaaagagatggatccgtttctgaatattctgcagaagggcagagttttgagtatatggcagtggttctaattagcagttgctccaatacaatcagactgagacggaagctactcatttagaatactggttgatgacaacactggcttgaacaaagtgaccactctccaatggctactctccctctcagtgggccgcaggttgctagggctcaggctgtggctgttttccccgccgaaaaggggcggggtcagtcggtgtgttaggaaaaaaaatgtatatatatatatatgttgtctgcctccccacagagataacaacccgtggaaaaacatgccgttgagcgggaggaaggcgaaaagataggctgggttttttggggggtgggggagcgtggaggatagggtgggctttttcccctccaatgctgcgacgcattaaccctgctgctgttgggacgttctctgctcagcctattggctgagcccgggagccgctgtctgccaatcgggtggtgaaaggcagacaaatctaccccgccaccagcaaaaacggcgcgtaacccttgcggcgccggccgaaccgcgccagagctggcgcggggaaagggagataggtgtctccagctgctgtggctgtttggggcgggtcggcttcatccgcgtctcaggagcaagtagagaattagcgggcggcagcaatgctccgcaaggtgagaagctggacagaaatctggcggtgggctacccttttgttcctcttttaccacctgggttacgtttgtgggcagatccgctacccggtccca

SEQ ID NO: 34578 - DNA, 2300 bp, Homo sapien
tacctctgttactctcttagtgtccttagaggaagacactcatccagttgtcccagatcttcgagaatcttcagctccaagggaaggagaatctcgtctaaccctctacttggctgtgtccctagtggcaatttgctttgtctcctttggctcattcgtggcactactctctaagtgtcttcgtggggcagcctgtggagtcacatgctttcctgctggcacctgtgcctgtctcaccagatctcgaaggagggaggggcttcccccttccaatgggatcctccgaatccagctagggtcagatgaccctatcaagtttgttgatgtgggaggccactctcatggctgtacacccttggcttctgcacccactcggagtgatagcttcatgatggtgaagtcacccagtgcacctatggcaggggagcctgttcgcccaagctgcccaccctctgatcttctctatgggctagaggtgagacctttgcaggctcaacaaatgcttgagggttattctgatccaggcatatggctaggccatgtcctagagagtactggcctctcagtaagtgcccatagtgatgtcaccatttttgtaagaggtaactatgtggtagacgctgtgctttgtaactgtttcgtgaattaaccagagttgtcacagtttagcattgggggcgggtcatgcctatatctgagtaagaaatgaaagtaattggtgatcaagagccaggctgttgtggaagcatgatgatggaatgtgggagcacaggaggctacagtgcacagggtacagtgcaccaggcagtcacttggacaaaggtggctgttttctctactcttcctgaaagaggggatcagattctgaagtaccttaactctaggttaccatttcccaagggattgaggggaaataaaatctttgtctcccagtatctagtacactgtgaagggacctctctatttgaaacatagagacagcagaaagaggagagaactaaaggaatagagaggcacgcatcagagtggtggcatagatcttttggtctgggtcttaggactcatatcaagtccctactggggatttgaactagatgcggtaaattggaaggttggggcgggttggtcatcacctttggaaaaaacagtaagtgaaatcacttatgtcagaaaactggtttacagttggctgattcatagaaacagccaccctgtgcatctttaagttgagttctcctgaatttggtgaaaccatgaaacctagaagccaagccatccatgcttggcctctgaccaccctcctgggtgacctgattcagccccagaaatgttcccctacccaaaaactgtaacactcattccacatttggggtctggggtgtcagaaaagctaagtcccatgtcagctgacattgagatttccgcaaagcattgctggagagtcagggcaagactttacaaggttcttactaatcttttctctcaccttagcagcattcagcaggatgggggagggtgggggaatacatgggctttgcctctcccagaaggacaagattttgctggttcaagcaaagtggtggaagcttctgaagtcatgcaggaagttgctgggacagaacgctgaggagttttgtatcactttgtcttccctgttgagtaccatctgagctgtcaaactttgctgccaagggggctgaatcaacctgcagcacgaagtgagtggggaggtaggaagcttctgtgacacagatttgcagcctgtgttcccaaggtttccaggattgaggaaactccataattggttgagagcacacagactttttggccaatcagactcagagctgaggtgggagatctgctcttccagcccgcctctcctcctccagctccccagctccactcaaattcagctcccctcccccctgcccacccccgccactcggtgactaagaactgctgcaagcaggcaaacctccgagcagtttttaagaggctggaaggagacataagagacttcagctgctgcattccaagccctgggtctaccttggagacaggacagcacagacttactctccacaaagggacttctgggtcatggggcccaagacactcccacagctcgctgggaaatggcaagtgctgtgcatgttgtccttgtgctgctggggctgggtgtctgggcagcttcgttactcagtggtggaggagtctgagccggggacgctggtggggaatgttgctcaggatctgggcttaaagatgacagatctgttgagccggcggctgcaattggg

SEQ ID NO: 34579 - DNA, 2300 bp, Homo sapien
gctcacgcctgtaattccagcactttgggaagcggaggcaggtggatcatgaggtcaggagttcgaaaccaacctggccaatatggtgaaaccccatctctactaaaaatacaaaaattcgctgggcatggtggcatgtgtgcacttgtcgtcccagctgctcaagaggctgaggcaggagaatcacttgaacctgggaggcagaggttgcagtgagccgagatcgcgccactgtactccagcctgggtgacagagcgagactccagctcaaaaaaaaaaaaaaaagaaaaaagaaaagaaataattattgaatcaatggaaacagaattacaactcttcccacttttgggaaggagaattgagattcctgctttccccttcaaccctagctttatgtttgttgtgatggtatagaggtcacacatggcagccttgtgtctgttcttaggctgagttcatctacttagggacggggaatcccagattgggcaaaaccaaaagcagggacagaccttggaaaaattgtaaagcagttcttggttgtgctcacccaccatgacaaaatatgcacacacacaacgcaacacacacacagacattttcatgccttcaaggcctaccctacagcctttcccatggtgccaaacccttcttcttaccttacagtcacttaactgtctctgctggtctcttcccactcatttaggcaacaaatatttattgaaaaacttctctgagccagatggtgccaaacagttacctaaagggcagactgtgtgtgtgccagggctgtttcccgccaacactcccctgcaaattgaaataatttcatccttggaaattcaaaaaaatcatgaaaattgtcactgtgggaaaattccaagtagagctgaaccttctaagaagcagagagttcttcttatggtttagtatttttttaaattatgaatcatttcatgttttttcaacactcggagtttctaaaagtctcacttaggtccaagtgctaggctttgtgctaggtgcttcagtaggaagcaggtggagtcgctgcctcacagaagccagtgtggtggaggaacagacaggcactacaacagctgcagtgtgactagtgccatgtggggcagccgctgggatgggagtacagtggaggcacctgcccagtctgagtggatctcctctgatatattttattcgtgtcatcatggcaaatgttgggggactggcattctagggaacaccatctgcccaggattcacagcaagagggaacttgagggataggaaagtgcaccttggaaaaggtttgatgatagagtgtttgagggcggggggtgggggttcttgtaaaataggaggggcaggttcttctatggccgtggattttactctgagggcttaggaagccattgaattttagaaatttcttctccctgctccagggtctcttggggcctcctacatctccccctaggtacctcctaggtccccactttttctctagctctggaacattctcttccatttcccaccttcacagtcctctggagaaggtctgatctccctcactatgacaggaagccaggctctctcatggtgggtgggggaatgcactatgttcaatgcattggaccagcctggccaacatggtgaaaccccgtctgtactaaaaatacaaaaattagcctggcacagtggcaggtgcctgtcatcccagctacttgggagactgaggcaggagaatcgcttgaacccaggaggtggatgttgcaatgagccaagatcgcgccactgcactccagcctggatgacagagtaagaccctgtctaaaacaaaaagaaaaaagcatcggaggcagcaaagagctggtttgagggactgacttgtgggattctggcttctgaaggattgtagaagtgcctcctaccttgctgagagaaacaggtcttgggcatggggtagggttagggtactaggtttgggagccctgggagaggacaggaggggcatgagctgtgccggcctgggagtctgtgctcaccatcctactctctccccagctcccaaaatggcgatgacaccggcacctggcccaacaaccagtttgacacagagatgctgcaagccatgatcttggcgtccgccagtggtaagtggtgtcagtgtgtgtatggaagagtgggagacctggggttctggggtgcatctcacagccaccatgcccacggactggatgtcaaacctgtgtagtttctccagatctttcggcaggtctgaaaggacccacaattccaaa

SEQ ID NO: 34580 - DNA, 2300 bp, Homo sapien
gcgtgatggtgcgcgcctgtagttccagctacttgggaggctgaggcaggagaattgcttgaacccaggaggtggaggttgcaatgagccaagatcgcgccactgcactcctgcccggcgatagaacaaaaccctgtctcaaacaaacaaacacaaacaaacaaacaaacaacagtttaaactgccaccttctttttttataggtgtaccatagttcatggtttactattcccctatttaggggtacctacatggctttggtttttgctgttataaacagtgctgtattgaacatccctttgcatgccagtactcatctttgagtaattccttgggctagagaagtgggtctgcttcttggtcttggtcttggtcctttactccttggctgcacagctttgtgaaggatgcacaggaacagtataacaagctgcggatgatgcattctaacatggagaccctctataaggagctgggcgagtacttcctctttgaccccaagaagttgtctgttgaagaatttttcatggatcttcacaattttcggaatatgtttttggtgagcaagggatacttgctgactgaatcttttgtgggcatttctcactttcccctgggttcctgttggctggtagtaggtatacaatgcccatgtgttccttcctcctcttccctgccccagcaagcagtcaaggagaaccagaagcggcgggagacagaagaaaagatgaggcgagcaaaactagccaaggagaaggcagagaaggagcggctagagaagcagcagaagagagagcaactcatagacatgaatgcaggtgaggagtgaagacgggttgatgggctgagataggaatgttgggaagacttctctgcctagagtctagaggcagagtctcatgtctgagctcacctcctggcaaatgatttttggcagtcttcactccgagatcctgatgccggactttaaccccaattctgatacatgcgcattccaacttgccctggttaaactattaccttttctctcctttgctcgctcttgcattctctctcattcccctgtgattgtggtattgctgtgatatatactgttttccttctgtccatccaaaggttcctctggcctgttctcattccctccactaaatctttcgggtttttttctgtaaaatattttcctgacgctcctcccatcttttaattgtggcgtgtcttccctttctgcttatttcacaaagtactatgtccctagtaccttagcacagttgtatgcacaattagattttaaatggattgaacttttggagcgggtggggagccggtcaccctcttctttcttcagcagaatctctgtttcactaccagaagcatgtctttgttgaaacatatggtttcaattactggccctctgtttcctgtctctgcttctttcttgctgcagattccctaccccttcgcccccactgctctctctgtgggcagcggaaatacagcatacactgctcacacagcactgagcccatgccaccctcctctaaacctgaggggccacaaaccttctgcaaatgaagaggtgttcacagagctgctgagtttgttaggaatcagtattttacagagcacaggcacaagggctgctctgatacctcttgctaccagggactttttatacttttctgtaaagcaatttccttgcccttagttgtaagccacaacttcgtaatgctattaaagcccacaccaagtatccttcaccttcccctgggactccagggtttgtccccaggtactggctaggatgcagtgggggaaggtggagtcccgctgacatgtgggatgagggctgcacacggtcaacaggtggcgtaatggaccttgcccagtttccagtacccgggtcaagcaaatgagggtggaatgtaggtcagctgcactggtgatgctcagccagcaggtggcgctgggagcagtgagccccagccttggatctggcagcctatggactttttgggatttcacagtttcagatttcactatcctaagctgttgtcatggaaaccgagccaggctagaacaaggattctacattaactctttgtattccagccaggctgctcctcttagatgcagaggacttagacatcaggaagacttagccactggaggcagtacttcaggaaagtgcactctttgatcagtggtctttcctcggccctgctctgaaacctaaccaggcaaaacactttaggataaaagggagtgatatagttgcttagtaatttcacaatcgtagtctc

SEQ ID NO: 34581 - DNA, 2300 bp, Homo sapien
ttcctaaggaaacaccaaacaccaaaaaacagctagaaaggcaggtgtttttagtctaggttaatagttcttttcattaagaaaacatagactacattaacaaaaattaggcctcactgtcctggaactagacaaagaaaaagcagcattcactggaaattggaacagatttctgcccccgcctctatatttctatgtatatctccttcctcccaaaccctgttctctaaaataaatgagaccaagatctcaggggatttcatagattcatgttaaattaaatgaagtctctcttctgttcctagtactgcataccttgtgaaggctggaggttcaatgatcaaataatttatagtttcactggaaagatgaaaacttaagtatgtgacacaactaaagtacataaggaactaaaattattaagtaccagaatgtgtgtatagactgaagctatgctctgaaaggtgaaactaaggggtgttgaggctgggattattagtaagctcttgctgtctgtttttatggtttttttttttttttttttttttagtttctgctgaaaacttgcaaaagaacctagatcagatgaagaaacaaatttctgatgtggaacgtgatgttcagaatttcccagctgccacagatgaaaaagacaagtttgttgaaaaaatgaccatatcctctcttgaaaggagggagttgttccctaggaagggaaagaaaacttcctgtagtgggggaaaaacaggatagatagggcagtatgcaatttttttctcttaaaaaactctttttctttaaatacatagttttttgggtttgttagtattttgagacaggctctctctgtgtcacccaggctggagtgcagtggtgccatcacgcctcactgcagccttgacctcttggactcaaacgatccttaccccctcagcctccttggtagctgggactacaggcatgtgccaccaggccctgctaaactttttgtaacctttttttctttagagatggggtctcactttgttgcccaggctgcatagttcctgagagcattccattgttgtggagtagaagcacaccatgcagatcaaccataaaagtcccaccaactcccctgcctgtaccccgtctccactacacacgctcacacatgcttccctctctttcccctccccagaggtaaccactgccactggactttattctgatttgcacctcatacatttattttaaacaaaaactgcattgtattgtgttttgcacatatgtcttggccatgtttccataatagtatttatagaaaacctccttttaggtcaagagatggagaccatcctggtcagcatggtgaaaccccatctctactaaaaatacaaaaaaatcagctgggcgtgatggtgcgcgcctgtagttccagctacttgggaggctgaggcaggagaattgcttgaacccaggaggtggaggttgcaatgagccaagatcgcgccactgcactcctgcccggcgatagaacaaaaccctgtctcaaacaaacaaacacaaacaaacaaacaaacaacagtttaaactgccaccttctttttttataggtgtaccatagttcatggtttactattcccctatttaggggtacctacatggctttggtttttgctgttataaacagtgctgtattgaacatccctttgcatgccagtactcatctttgagtaattccttgggctagagaagtgggtctgcttcttggtcttggtcttggtcctttactccttggctgcacagctttgtgaaggatgcacaggaacagtataacaagctgcggatgatgcattctaacatggagaccctctataaggagctgggcgagtacttcctctttgaccccaagaagttgtctgttgaagaatttttcatggatcttcacaattttcggaatatgtttttggtgagcaagggatacttgctgactgaatcttttgtgggcatttctcactttcccctgggttcctgttggctggtagtaggtatacaatgcccatgtgttccttcctcctcttccctgccccagcaagcagtcaaggagaaccagaagcggcgggagacagaagaaaagatgaggcgagcaaaactagccaaggagaaggcagagaaggagcggctagagaagcagcagaagagagagcaactcatagacatgaatgcaggtgaggagtgaagacgggttgatgggctgagataggaatgttgggaagacttctctgcctagagtctagaggcagagtctcatgtctgag

SEQ ID NO: 34582 - DNA, 2300 bp, Homo sapien
ggccccaacacagtattatattttttctttctgtaaaagtccatgaagtgctgttaattcattgagtcttaccagggagaaagctgctacttaagtaaaaaaagtattcgggaaaaaaaaagctgatactctagaatcaccatagggatgcagctattacacagtggccaaacacagttgtcccaaagcttaaaagctctcctttaattcttagaacgggtgaggcccacttctatgaccatgttctccgttgacggcagtgtgcaaacttttctcaagactttgggtaacagattatcacgtcaggagaaaagtaagagtccagccctttctccctctgaaggtggcagggcattgctccttcacttggtcaccaatagcctctgtgggaaatcctaaagaagaggctctgctctggcaagaagggaagtctggctttgtatcttctcagtcccaacctgagagatcttctttttatttatttatttatttattttttgaaatggagtctcactctgtcacccaggcttgagtgcagtggtgcaatcttggctcaccacaacctccgcctcccgggttcaagcaattctcctgcctcagcctcccgagtagctggaattacaggcatgcgccaccaggcggcccggctaatttttgtatttttagtagagacgaggtttcgccatattggccaggctggtctcaaactcccaacctcacgtgatccgcccgcctcggcctcccaaagtgctgggattacaggcgtgagtcaccgcgcctggcagagatctttttaaaagaaattaagtctataaataaattgcaaaataaaaaataaaaaagagcataagagagaacctatagagacatcaaccaactgcaatgtgtagactttatttggctctgattcaaatgaactattaaaaaaaacaactatcataagataatttgggaaatttaatactaactggctatctgatgataaagaattttttaaatgtgataatggtagtaattatcttcttttaaaagtcctaatttttttgacacacattctgaactgcttaaggattaaataatatgaacaaggatacatgtaaaaataatgggtggcaaagacaaagttgatacaggtatatgaaacaagactagctgttgattaagttttttaaatgggtgatggacataggggtgttcatactagtctctttacatatatgtgtgtatgtgtgcgtgcatttttttcacggtttcaaaaataacattttttaaaaaaattcaggaccatttccctagagtccttggggcatttgattcttcccagacagctaagtgaaaggggttcctttttttcttctttttttgggggtatcttttcttatctgatcctataattaagaaaactgccctaaacatctctgtagcaaaaacacctaaacccaggattagagtctagatgaggcagaggggatgccctggcctgctgcctcaaaagctagcactctgtcactgttagtaggtgtccggcagccaaaccattttgctctgtgctccgctggcaaggacttgcggcatcgattgctcaggatgcaggcagcctgcagcaaggtgtgtccctgatgagcaactgctgagtaaaagagtacgtagctgcgcctcagccagtctccctccctctgcaaaccagactcctcctttgcctaactcctttttttattcctgcgtcacaaatacaaaatggagttagctgggagcaaaaacaatctgtctaaaatggctgaatgcggtggggagtgccagacagtaaagcgaagggaaagggcaccccctggcggccaagatagggagtctgttttatgttcttcactacttttgcatttcaaacgaatcagtcctacagagtccaagttaattttgtcacaaatcttgatgttgagctctaaaattcaactaatagaaactgaggcacaagaagggaaaataattttcagtctctaaagacaaagggcacaagtcaacagccctgagttgcagttactgcttggttatgatcagtaatagtttctaggagacaacagaacggaagggaggtccttttatagtacatgattccccagcttcaataatggactaatgacccccggaatcccaccgctatagcctgcacttccccaggaattcctgtttaaggcgtctctcaatgaagaccacaaacaggaaatggaggagtggggagttgcctgacatcctggaaactacgttcttaaagaactgcaggtgggagtaagtgggatagaaaa

SEQ ID NO: 34583 - DNA, 2300 bp, Homo sapien
tgctcctggggatagtaccactcctcctcctcctcctcctcctcctcctcctccacctcctttgcctgggggtgtttgcatctcctcacccccttctttacctggaggtactgctatctctccaccccctcctttgtctggggatgctaccatccctccaccccctcctttgcctgagggtgttggcatcccttcaccctcttctttgcctggaggtactgccatccccccacctcctcctttgcctgggagtgctagaatccccccaccaccacctcctttgcctgggagtgctggaattccccccccacctcctcccttgcctggagaagcaggaatgccacctcctcctccccctcttcctggtggtcctggaatccctccacctcctccatttcccggaggccctggcattcctccacctccacccggaatgggtatgcctccacctcccccatttggatttggagttcctgcagccccagttctgccatttggattaacccccaaaaagctttataagccagaggtgcagctccggaggccaaactggtccaaggtaagagtttctgtctatttcttcaccagtcaatcttttttttttttttttttttttgagacggagtttcgctctgtcgcccaggctggagtgcagtggtgcgatctcggctcactgcaagctccgcctcccgggttcacgccattctcctgcctcagcctcccgtgtagctgggactataggcgcgcgccaccacgcccggctaatttttgtatttttagtagagacgggatttcaccgtgttagccaggatggtctcgatctcctgacctcgtgatccgcccgtctcggcctcccaaagtgctgggattacaggcgtgagccaccgcgcccggcccaccagtcaatcttaagaaacagtttcagttttctactttgtattttgtgcatggatgggctacgccttaaggctttcatctttctatctttaagcttcactcatgcttatgtttattcaggagatattaggcatcttctttattccatacatcaccacggagagttctgtgaaccctgtattctgaatttaatcttaacttaatgttttttgccttttctctgaggctgtgaataccatggtaacacacagtttgataatagtcattcaccagtctgcaaactactgataattgtgctgatcccaaagtcatggatttatgaatccactctcctatcccaattccgcaggatgtgagttacacaggccatttttttttttttttttgagttggagtcttgctctgttgcccaggctggagtgcagtggcataatctctgctcactgcaacctcagcctcctgagtagctaggattacaggcgtgtgccaccatgcctggctaatttttgtatttttagtagagatggggtttcaccatgttggtctggctgctctcgaactcctgaccttgtgatccgcccaccttggcctcccagagtgctgggattacagacgtgagccaccacacctggcctacataggccatatttgcatgcacagtattgttcccatgatgtgtttgagatgcctgtgattctgagtgagttagcctttttcttctagaaaccaagttaatataaaggaccttagggatttgctcataaaatgagcaaatttggcacagttagccaaactggtgggagaaatttaatgatgagcaagacttctctgaaataaagccttaatggttatgaagctagaggatttggagttaggaggaggatacgtagtatatatatgaatctagttcttgaataatcaccaattaacagatgaactggaagtattctctcctaatcccactgcagctattctgtgcctcaagttagtcttattctagtaagacattgctgataatcagccagccacctattttacagcctcatccgttttctaggacggaaagtacagggctcagtttactaattcttaacaccctgcctttatccacagcttgtggctgaggacctctcccaggactgcttctggacaaaggtgaaggaggaccgctttgagaacaatgaacttttcgccaaacttacccttaccttctctgcccagaccaagagtgagtaccttcctctttgatgcaaaggtccagtgtagggcttagaatattttttcattaggtttcctattcccttcccttccctgggtgaagatagaaagggtatgttggatggaagactgatggattttcccattcaaaagaaagaaaagatgtttttgtattaaatattatg

SEQ ID NO: 34584 - DNA, 2300 bp, Homo sapien
tacataccacagaatattagtctcccagcactggttctttttcaatctggaaataaaatctgatttagtgctgctgtgtaatctggtctgggtaatatccatttggaagtcttataatatacttgggactagtattgtgacagtcttcaaggttggaataattttaggtataccttggactctcttaggctaccttgaagccaacctgaagcagagtacttcctggaatctttctgaaacaaaataataacatggccaagacctacatatatcttctcagacttgaaacctctagtagcaaggcaagcagcaatagatgggatgttatcctgatagaatttagcatttaggagcctagggagagttaaaaagaagattttaatataatactaaattcttggattacaagaggatcagccagatttgttgatggtgaagatccctcttcagttatctattttcttcagtggttctgggcaaggtgctatttcctaaaatttactcatctgctagatggggctgttgttcctaagaaccttgtttgcaagattaaaaatgggaaaggggtagagaataaagggacctcactgattatgtcttctatatacaggagttacgatagccggaacaagcatgagatcattcgctgcttgaaagcttttatgaacaacaaggtgagatttttcccattctcattccaaaccccatctggacgcctgttctttctcttctattggcaaaccaaaagaggaactaggaatatgaggttcaggacttctagctttctcttttagtatcataactgtttttcattgccacatatacatgcttctgtggatatttttttctcagttctaacttctgtttcagaggacaggctcaattttgtttctctctcttttttttttttttttttttttttttttgagatggagtctcgctctgttgcccaggctggagtgctgtggctcgatctcggctcactgcaagctccacatcctggattcatgccattctcctgcctcagcctcccgagtagctgggactacaggcacccgccaccacgcccgggtattttttttaatttttatttttagtagagacggggttttaccatgttagccaggacggtctcgatctcctgaccttgtgatccacccgccttggcctcccaaagtgctgggattacaggcatgagccacagcgcccggcctgtttctttactttcttttgctaattcttgaatttcctgacctgtagttattgtctctgcaatatttgctttatttcctgtttcttttttcttctagactgttgctccatttttatcttctttttgtctgtttagtaattcaacctagtgagcccacagtcctgtgcctctgaggacaaatctctcttcctcattgtttaattttgttataattaacttattccattggattgcggggagagaattaacaagaaacatataaatcaaagacttttattcttggaagacatctaattctgttgtgcctcctagaaaattattttggtatgttcatctctaattatattgggaaaagtattctacccctgtattaatttgctagtgtaccacaaaattagatatcttaacagaaatttattatctcacaattctagaggctagaatttcaaaatccaaggtaccagcacggttggttctttctgaagctgtatatggtaatatgttccatatccctcctagtttctggtagcttgttggcaatccttggcactccttatcttgtagatgcatcatcctgatctctgcctatgtgatcacatggtgttctccctctgtatgtatccatatccaaatttcctctttttataaggacactggtcatattggattaaggaccctttctaccccagcaggacttcattgtagcttgactaattatatttgcaatgagtatatttccagatgaggttacattttgaggtactgggggttgggacttcaacactggaatttaagaggacaccattcaacccataacaacccgtaaacttgtcccccagttagatgctttcgtctttcagcctcctttctttgttcttggtcctaccagtttggaatcaagaccatgttggagacagaagaaggaatcctactgctggtcagagccatggatcctgctgttcccaacatgatgattgatgcagctaagctgctttctgctctttgtattctaccgcagccagaggacatgtatgtgactggaataatttttcttctccattttcaattttatcattttctcttagtt

SEQ ID NO: 34585 - DNA, 2300 bp, Homo sapien
tcccctgggttctgacttcttcctccccttgcttccagggaagatgaagagagagagatttggaaggggctctggctccctaacacctgaatcccagatgatgggaagtatgttttcaagtgtggggaggatatgaaaatgttctgttctcacttttggctttatgtccattttaccactgtttttatccaataaactaagtcggtattttttgtacctttcgcctttctaggaatgttaattcttgctagtttcctatttatgaaaggagagggaaatgggcatgatgatgcatgtaataaaagcatagttaacattcattcagcacttatcctacgttaggccctgtgtatgtattctacatttattattgtaaatataagaagttaatagaggattttggttaagagttagacaaacctgggcagatttgagaggagtagaagatgacttcaggtttttgaatctgggtgtttagagtagtgatgctagttggtgaagatacactgagataaaacatgttaagtgcttagcacagtgcctgacagaagaagttgcccattatctgtctatgtgaagaacaatgctaaatactgtagtagccacaaacatgaacctttctctagaagagtttacattccagtcagtagtatgataaatattgtagcagatacagactgatacaagaaagaggactgatagatgggtcacttcctcccctccattctctgattctgtctgttctcaacactagcttagaaagtagcttttggactttttagacaaaatgtctggaaagctcagcactaagtcaagtttgaagtatgggatggacagctctatgtaacattctatccgatcaccatcagaaggtctggaccacaagagagatgaatgccaaatttaggagccagccagcttggcagagtccctggtatatctcaggcccttgactaggtactggggctctagagtaagtaagtcactgactctgcccttcaggaacttatgcttgaaatcttgctagctgtggtcaagaatattcagtccatattgtgaaggccgactggtagccacgtaactgtcacacaagggacagatgtagctgggagaatggatgaaattgcttagggagaaagtcatgctagaagagcaaagaatatactcttggagaatactcattcttttcactcatgtttggtttatgtcagtggggaatcctggttaaacatagggtttggcagcaaatcagactaagctgggtttaaattttatatcaattatgcgttcttgggcaagtcacttcaactctcaaaagtccaaatttactatttataaaatggtgaggctagcagaatctatcacatgggactgtggggacttagaaaaatacatgtagagtgtttgcctagtgcctagcagagagcaaagggcatggttaagtggtaactgttattgctgtttaggcacatgttggcaataattagtttgtcctgattagaaacaattagatggtacctaacctggaattcgaactaggaaattaaactccagagcgagtctggtttagtctagtgcttgccctggaccgagctctgttcttgctaccttgctttcaaaacatggtggctatcactataatttttttcatgtgttccatgggtattgcacacattgaaaactgcattctcttggaaaacctgtcactaattttctgccaggataatggtctcacgcgatttttggtctgggatgtgagagggtccaggctgtcaggctgtacagccacgtgggcgctgcgtgggagccagaggcctgcgctgctccaaccgccagggggcggtgctctccgccgcggccgcggagagctgcaccgcccactcaccacccccccccacgtgggtccgaatggttaggtccgctgggcaggtagcgcgcttccgcggcttccctccgcccctctcccttcccccattggtaggggctgcgggtccgggcggaagtggggcaggcgggcgggagcgaggcgtcgtcgttgtatattcatgaggcgcgcgcagcccggcatgctaatgaggcggggcgcggcggctggctaaagagcgactgggcggcggcgggcgcggagctgccaggcgggagcggcgtaggcgcggggtcgccggccagcgtgaaccgggacatggagccgcccggcgggagcctggggcccggccgcgggacccgggacaagaagaagggccggagcccagatgagctgccctcggcgggcggcgacggcggcaaatctaagaaatttg

SEQ ID NO: 34586 - DNA, 2300 bp, Homo sapien
aagccttgcatattggtggggctgactctctgcaggaagtcaatgtagtcctcggagtggaagcggcacatgtcatgttgggaggcctggtatggcttgaagacctcgggatggagacacaagatgaacccaggcagggtcagccccactccacaggctcagaccacccatactgaacccagtcctggagactatatgaagccaaacatagcattcccctcatcccacaatccttaagtcagtagagagactccgattaaccaggtaagttattacaaatgagccccctgaagaccacttcttttcctttccacctccagctcagcctatcgtaccttctcaactttgagccctgatccacctgccctgttccttggaatctcctattcccagttctctccatgctcatctcctcccccaagctctgattctgtcctctttcctctggattcttctttctggagtcaaatatatgggatatatgtcaactttctaattaaaatcaaagatttattatctttggaaggtcagggggatgtgtcacacctctttgaaaactgcacaagaaagagcttttcttctcccagaaaatgcacacaggtacatacaggcaaacaatctcaagggatatagattcctgcactaacatcacctcagtcttttctatgaccagtccatttgtctgtgccttggcacaagcaatgaacattcattcatattgttcactagtttccctagcaacacataaagcctgggtttagctgttttgtcttattttttcttttgagacaaggtcctccctgtcaactcaggctgctgatcatagatcactgtaactttaaactcctgggcccaagccatcctctcgcctcggcctcccaagtagttgggactacaggcacacccaccgcacatggctactttttttatttttattttttgtagatgtgggtcccactgtggcccaagctggtctccaactcctggcctcaagcgatcccccccatttcaacctcccaaagtgctgggattacaggcatgggccaccacgcctggcgtggcttaactgttactatcccatatcacagccataaattccaagctgggaagacagcatgtgtatgtctggtagatgaaaaactggatagcgattaagcagaaccatgtagaggtattccaggctgaaaaaggaatatctaaaatatcgcctctgttccacacgcacatacacatttacaaagacggcagcatcgttccaccctggagccctagctccttggaggtaaagaaaggtggtaaaagaggagtgggaactgagggtaaacctcacaccctgatacagtgatatccgctcccctaaccctaattcctgaggccaaggccctatccacactctaaaatgcagaggaggaacacaccttctgtcttcaaaccagccccacatcacgctaaccctaggccaagggctagtgtgcctacagtcagagggtggccgacctgaggtgagaaagtactttccattaagcagaggacgccacccccaacaccctgcactttcaaggtactcctggtgacttctatccagctccccgatactctaggggcgggtcgcacttcatgcactcagtccagcccacctatccctacggccacagctcgccccaccccccaacccccggccgaggcggcggaactcacgatcatcttcttatagagaccgtaatgcaggaccaggctatgggtcaatgccaggcgatggggcttcatagggtgtccagctcctgggggtggggagaagagagttcgtcagctctcacccctggagttgcaaccccgcctcaaaacctccgtgtcccaactcctcatgcatatccctgtttcctcaccgtagtggaagttgcccacgtcggggtcgtagaaataggccacggtcttggccatggtgccggcgggagcaggccccgcacctccgccgcccgccgcccgcggccgccgccagcccctccccggccgtgcgtgctgcgcaagcacgtagccggcctctgcggaactgggcgttgcggccccgcctccatccacacccaggccacgcccccaggggagctccgcccctcgcccggctcagctctcccggtatctggggctttgagcgtcccgggttgggcagggaactggcagcatagctcctaggatgcgagggccatttgtctccggccgggggtcagatcctcgggaagccgagccatcccatccagccgcttgccccaaaccgggcgcaggccgtggtcacttctctagga

SEQ ID NO: 34587 - DNA, 2300 bp, Homo sapien
ggggatgtgtcacacctctttgaaaactgcacaagaaagagcttttcttctcccagaaaatgcacacaggtacatacaggcaaacaatctcaagggatatagattcctgcactaacatcacctcagtcttttctatgaccagtccatttgtctgtgccttggcacaagcaatgaacattcattcatattgttcactagtttccctagcaacacataaagcctgggtttagctgttttgtcttattttttcttttgagacaaggtcctccctgtcaactcaggctgctgatcatagatcactgtaactttaaactcctgggcccaagccatcctctcgcctcggcctcccaagtagttgggactacaggcacacccaccgcacatggctactttttttatttttattttttgtagatgtgggtcccactgtggcccaagctggtctccaactcctggcctcaagcgatcccccccatttcaacctcccaaagtgctgggattacaggcatgggccaccacgcctggcgtggcttaactgttactatcccatatcacagccataaattccaagctgggaagacagcatgtgtatgtctggtagatgaaaaactggatagcgattaagcagaaccatgtagaggtattccaggctgaaaaaggaatatctaaaatatcgcctctgttccacacgcacatacacatttacaaagacggcagcatcgttccaccctggagccctagctccttggaggtaaagaaaggtggtaaaagaggagtgggaactgagggtaaacctcacaccctgatacagtgatatccgctcccctaaccctaattcctgaggccaaggccctatccacactctaaaatgcagaggaggaacacaccttctgtcttcaaaccagccccacatcacgctaaccctaggccaagggctagtgtgcctacagtcagagggtggccgacctgaggtgagaaagtactttccattaagcagaggacgccacccccaacaccctgcactttcaaggtactcctggtgacttctatccagctccccgatactctaggggcgggtcgcacttcatgcactcagtccagcccacctatccctacggccacagctcgccccaccccccaacccccggccgaggcggcggaactcacgatcatcttcttatagagaccgtaatgcaggaccaggctatgggtcaatgccaggcgatggggcttcatagggtgtccagctcctgggggtggggagaagagagttcgtcagctctcacccctggagttgcaaccccgcctcaaaacctccgtgtcccaactcctcatgcatatccctgtttcctcaccgtagtggaagttgcccacgtcggggtcgtagaaataggccacggtcttggccatggtgccggcgggagcaggccccgcacctccgccgcccgccgcccgcggccgccgccagcccctccccggccgtgcgtgctgcgcaagcacgtagccggcctctgcggaactgggcgttgcggccccgcctccatccacacccaggccacgcccccaggggagctccgcccctcgcccggctcagctctcccggtatctggggctttgagcgtcccgggttgggcagggaactggcagcatagctcctaggatgcgagggccatttgtctccggccgggggtcagatcctcgggaagccgagccatcccatccagccgcttgccccaaaccgggcgcaggccgtggtcacttctctaggaagctccgaagatcccgccactccgtccctcaaaggtgcggaaagccggcttcccccagccctcggagaagattcctgactctccgctcggtcggggcatctgagggcaggagctgcgccaggcgtaccggatagaccagtggacaacacccacgccggaccgcctgtcccctacccggacccagactcggcgccgcacattgccccgggggggcccggcgcagtcacgcgcgcgcagagctcacgctctccgccccgcacacctgcgctccgccccctggtcctgggcccgcgacgggtgaaggcatttgggaagccagggcggctgcggaggcgatctccctgacccagggccggagttgcccggagcctgccaccgctctcagccagcccgcatccttctctgttcttccctccccccgcctgccacggcgcgggtatccgcagccacagcccggggccggtgaggcggcgaagggggaggggaggaatcaagggatgagcgccggaagggcgtcgggggccctgagcc

SEQ ID NO: 34588 - DNA, 2300 bp, Homo sapien
attccaggctgaaaaaggaatatctaaaatatcgcctctgttccacacgcacatacacatttacaaagacggcagcatcgttccaccctggagccctagctccttggaggtaaagaaaggtggtaaaagaggagtgggaactgagggtaaacctcacaccctgatacagtgatatccgctcccctaaccctaattcctgaggccaaggccctatccacactctaaaatgcagaggaggaacacaccttctgtcttcaaaccagccccacatcacgctaaccctaggccaagggctagtgtgcctacagtcagagggtggccgacctgaggtgagaaagtactttccattaagcagaggacgccacccccaacaccctgcactttcaaggtactcctggtgacttctatccagctccccgatactctaggggcgggtcgcacttcatgcactcagtccagcccacctatccctacggccacagctcgccccaccccccaacccccggccgaggcggcggaactcacgatcatcttcttatagagaccgtaatgcaggaccaggctatgggtcaatgccaggcgatggggcttcatagggtgtccagctcctgggggtggggagaagagagttcgtcagctctcacccctggagttgcaaccccgcctcaaaacctccgtgtcccaactcctcatgcatatccctgtttcctcaccgtagtggaagttgcccacgtcggggtcgtagaaataggccacggtcttggccatggtgccggcgggagcaggccccgcacctccgccgcccgccgcccgcggccgccgccagcccctccccggccgtgcgtgctgcgcaagcacgtagccggcctctgcggaactgggcgttgcggccccgcctccatccacacccaggccacgcccccaggggagctccgcccctcgcccggctcagctctcccggtatctggggctttgagcgtcccgggttgggcagggaactggcagcatagctcctaggatgcgagggccatttgtctccggccgggggtcagatcctcgggaagccgagccatcccatccagccgcttgccccaaaccgggcgcaggccgtggtcacttctctaggaagctccgaagatcccgccactccgtccctcaaaggtgcggaaagccggcttcccccagccctcggagaagattcctgactctccgctcggtcggggcatctgagggcaggagctgcgccaggcgtaccggatagaccagtggacaacacccacgccggaccgcctgtcccctacccggacccagactcggcgccgcacattgccccgggggggcccggcgcagtcacgcgcgcgcagagctcacgctctccgccccgcacacctgcgctccgccccctggtcctgggcccgcgacgggtgaaggcatttgggaagccagggcggctgcggaggcgatctccctgacccagggccggagttgcccggagcctgccaccgctctcagccagcccgcatccttctctgttcttccctccccccgcctgccacggcgcgggtatccgcagccacagcccggggccggtgaggcggcgaagggggaggggaggaatcaagggatgagcgccggaagggcgtcgggggccctgagccgcactaggacgcccctggagccggaaccccagcagaagccggaaccagaaccaaatcaccggtaccgggtcggccaggtggtcagggtgggagaaaccaaaaagggagaggggtgcgggagtactgagaggaaggggctgcagaggcctggctcaggccggcgtggaggaggtgcgggcgctgactcaggcaggatttctgctcccgccgcctaagaatgccgtcccatctcgtgctgcagtgtccttgggagggacagaagcgcgaacaagctggaaaggggaacgctcggggcgtcggggaagcgggaccagggtcgtggtagagagcttgcgttgccgctgacctcttgccgaaaggcgaaacagcactcctggcccggacagctccctggttgggtagggggtggggccggacctcagccggacgtcttagacgtgcttgtttcagatcctgaggacggcattcctacccctcccccattcccagctgcagccccctaaacccaggaggcgccctggcccgcgctcgccccccagggcctcatgtcggaaccacagcctgacctggaaccgccccaacatgggctatatatgctcttcctgcttgtgctggtcttcttcctcatgggcctggtaggct

SEQ ID NO: 34589 - DNA, 2300 bp, Homo sapien
gaaggaaaagagggagtcagtggaggtggaggtcagggcaagagaaggttggagaagagggagcaaggggctatgctagacccaccttcattctggatgatgcagcgaacaatcctctctactgtgtcctcattcatgtcatcgtcctcagctgaaggatgaaagagattggcaaggaagcaggaatgagtcagctttgggggaatattacctggtggctcccatcatttattgcttaggacatacccttttacctacttgctatcatgctggacctcagcatttcagggaccagaaaagatggggacaccaatgcaagcccaagactaccatccagaggaccgttcctgcccatgctgctttctctagttttgctttcagagtggtgtcaccccacttgctaactcaagagtgcatcactaggcttcctgagcaggtttgatcaggatttggcctgggtctgttggtcagggaggcagaggtgtggggagaagggtgaaaggtgactgagccagggttccaggctcctcactcacggggctgaagctgggcatcgtcaggctcagagcccctcgacgtgcggcagcggtagcccttcttcttgagcacgtggcagatcatgaagcctaccaggcccatgaggaagaagaccagcacaagcaggaagagcatatatagcccatgttggggcggttccaggtcaggctgtggttccgacatgaggccctggggggcgagcgcgggccagggcgcctcctgggtttagggggctgcagctgggaatgggggaggggtaggaatgccgtcctcaggatctgaaacaagcacgtctaagacgtccggctgaggtccggccccaccccctacccaaccagggagctgtccgggccaggagtgctgtttcgcctttcggcaagaggtcagcggcaacgcaagctctctaccacgaccctggtcccgcttccccgacgccccgagcgttcccctttccagcttgttcgcgcttctgtccctcccaaggacactgcagcacgagatgggacggcattcttaggcggcgggagcagaaatcctgcctgagtcagcgcccgcacctcctccacgccggcctgagccaggcctctgcagccccttcctctcagtactcccgcacccctctccctttttggtttctcccaccctgaccacctggccgacccggtaccggtgatttggttctggttccggcttctgctggggttccggctccaggggcgtcctagtgcggctcagggcccccgacgcccttccggcgctcatcccttgattcctcccctcccccttcgccgcctcaccggccccgggctgtggctgcggatacccgcgccgtggcaggcggggggagggaagaacagagaaggatgcgggctggctgagagcggtggcaggctccgggcaactccggccctgggtcagggagatcgcctccgcagccgccctggcttcccaaatgccttcacccgtcgcgggcccaggaccagggggcggagcgcaggtgtgcggggcggagagcgtgagctctgcgcgcgcgtgactgcgccgggcccccccggggcaatgtgcggcgccgagtctgggtccgggtaggggacaggcggtccggcgtgggtgttgtccactggtctatccggtacgcctggcgcagctcctgccctcagatgccccgaccgagcggagagtcaggaatcttctccgagggctgggggaagccggctttccgcacctttgagggacggagtggcgggatcttcggagcttcctagagaagtgaccacggcctgcgcccggtttggggcaagcggctggatgggatggctcggcttcccgaggatctgacccccggccggagacaaatggccctcgcatcctaggagctatgctgccagttccctgcccaacccgggacgctcaaagccccagataccgggagagctgagccgggcgaggggcggagctcccctgggggcgtggcctgggtgtggatggaggcggggccgcaacgcccagttccgcagaggccggctacgtgcttgcgcagcacgcacggccggggaggggctggcggcggccgcgggcggcgggcggcggaggtgcggggcctgctcccgccggcaccatggccaagaccgtggcctatttctacgaccccgacgtgggcaacttccactacggtgaggaaacagggatatgcatgaggagttgggacacggaggttttgaggcggggttgcaactccaggggtgagagctgacgaactctct

SEQ ID NO: 34590 - DNA, 2300 bp, Homo sapien
ccacgcccggctaattttctatttttagtagatacagggtttctccatttggtcaggctggtctcaaactcctgacctcaggtgatccacctgccttggcctcccaatgtgctgggattataggcatgagccactgcgccccgccgaggcaaagcctttagtgcagtggaatgcagaaggtgtttcaatataagatatctgttgttataatgtatatacatacagcagaaagagaataggagtgggcatcaggagaactgggttctagccagcactctgccaataactggcttcgtgattttggacagctggcttaacctgggtctcacttctaacataggagtcatattattaaaaatgcctacctcatggggtagtggtgaggattgaatgaattggtacacgtgaagtgctagcagaacacttgagacatagtaaacataagcgttcaatacatattggctgttgaaatatttgtcagctacacccccccaccgaatgcaagcatttggccacttcctgtattgagaagtgatgaggaaggaactggagatgggatgagaggaaaagctggtaaaacctccccacatgccaggaataactctgtgcccaccccacctccagatgctgccgtccccttctcctcccagcttctccccacctgcacctacctctgtgttggatgggccccctgcacctgtcctgcctgggggtgagtggaaggaactgggagccttgggaggctaacagacaggaagaaggaggaagcttggactcccaggtcacgctctggtcctctccgtgccttcaggcatcttgcttggtggagagcacttgcctgggctctggagccaggctgactggttcaggtcccgctctgtcatctccaagtgtgtggtgggattctgaacctgtcttggcctcagtttatgttctttatgaggtaaggaaaaggtactagcttattgaattcttatgagagttaaaaaagatgcctgtggactacacagcattgtgcctggcacacagtaagtatgcagtcactgttattattttaaaaattagctaacttctctcacggtgtcctcccaatatgcaccttttgctcctagtgtccagatacctagctttgtatcattattttttctgatgcccactttttttcttttttaaatgtctatagcagttttattttattatttattttagattcaggaggtacatgtgcttgtttgtcatatggatatattgcatactggtggagattgggcttctagtgtacctgtaactcaaatagtgaacattgtacctgataggtaatttttcaaccctcgcccctgcctctactcctacctttgccccctttggagtcctgggagtctgttatttccatctctatgtccatgtgtacccgttgtttagctcccacttataagtgagaacatgcaatatttggttttctgtttctgagttagttcacttaggataatggcatccaactccattcatgttgctgcagaggacatgatttcattcttttttatggctgtggaatgcctgccttttctaaaactttctggtacttccaccttgtccacaaggagtctccctccctggagttaccaccatctccaccaccccaagttcactttgcatgacttagcacttagtcatttattgtgtttgttgaggtttcattattggtttcttgacagccattgggggtgggagcactatgcatcctatctcccttagttttgtaccttgagcagagctgattatacagcagttgcccaataaatgttgaggacagtggatagagtgatggattttatggtctaggatggtgaccattaatttaacaaatatttatagaatgccactgtcctaagtgctggagatacagcattgaacaaaacaaagtctgaagactgacttgtggttcttatttccagacaaagccctggacttccctgggttcctggacatgatggcacctcgactcaggccggtaagggcccttgccttggaggagattgtatgtagaggggttattccaaccagtcctgttttgtctgcagggctgagggaatagacagggatacccttaagggagaactctggagcactaactgtgtgttccctacagatgcgtccaccacctcccccgccggctaaagccccggatcctggccacccagatcccctcacctgaaggccagggaagccttgacccccagtgatgctgctgtccctatcttcaagctgtcagaccacaccatcaatgatccagagcaaca

SEQ ID NO: 34591 - DNA, 2300 bp, Homo sapien
cacttcctacattctgggactaccgtgaagcctggagtagggagagcgagtttgggagctgggactcggggagtcaaaaatagatgagtaattgtcaataaacctgggaaccaaaagactaccattctcattcattcattcaacaaatatgtattgtgcacctaattggtgccaggtctggggatatagcatgaacaaaacaaacagggcccctgctcttatgaatcctccgttgtggaggggaacagaaaatagcaaataaacacataaaccagtacttgaacaagtgagtttagtgctgtgaagaaactgaaccaaagtgatgagcttgaagagtgattgtggaggccaggcgcagtggctcacacctgtaatcccagcactttgggaggctgagggggatggattacctgaggtcaggagtttgagaccatcctggcaaagatggtgaaaccctgtctctactaaaaatacaaaattagctggttgtggtggcacgtgcttgtaatcccagctactcgggaggctgaagcagaagaatcacttgaacctggtaggtggaggttgcagtgagccgagattgcaccattgcactccagcctggcaacagagcaagactccatctcaaaaaaaaaagagtgattgtggagatggtctttggatgggtggatggggaaggcatctgtgaagagttgcaaagtaagggaaagaagctgttggaggcgacagatggaacgctggaaggaggagattctggagaaagaaagcaggcatgaagaactctgcattggaagggacttggtctactgagggaacagcaaagaggctggagcacagtgagcagacagtgggaggagagtacaggctgaagtaagaaagaccagcagggtcttccatgcgtagccttgaaggccatggattctatttggattttattctgaagcaagtgcattttaagcaagtaaattatgagatcttatttccctttaaaaaagaaaaaaaaggttgatcactctgagtgctgtgtgaacagtgggttggggtgagggcagtgtggaagcaaggagatcagatattagaccagaagtctaataatgggggcttggactaggatggtggtcttggaaattgagggaagtggatcaagaggtttttgtttgtttattgttgtttgaaatagaacctgtaggacttactgatggatagaatgtaggggtaggagaaggcacattgactctgggtttctgacttaactgactggaggaaatgcggtgccatttaaaacgttacggggggaggatcaggttgaaggaggtttaaaagctttaaaagttgaggttcctattagatatactagcagaggtgtcagtggggagttggaatgtgaatctggagttttgagacatgtcaggggtactgggacaggtgcctgagccaaagaagcttaggtgaggaggatgaggaattggggagaggctcctcaggaagcagtgctagggctggaagatcctaaaggtggcaggggcttcctgcgcatctcccagctctcgccgactcactggtatcgtttagttttcagtggggccaagtctttttccctttgggcctggttccttcctggatccaggcatctttctcaccccgctcacgctggcttttccagttaagcgggaattaggaaaaggtctgggaccagccctctcttcgtcagatgcatctttgctcaggtgcccagtgactcagtttccctggtcacacactgaattcctctccattcctcatcattagctcggggactggggatctacatatgcaaatgaataattatcaataattacaggctgaatcagtggttacactacaaatagaacttaggcgtcttgactcagatgcctggggttcttcccaccgcccagcggacgctgcgtccgccccgcccgccccgccacccggaccctgccggcgtattcgcagcagtaacaggtttagtttctcggtggccccctctcgcttccgcgccctgcgacgtcgccggacaagtcgtgggcgggcagagggcggggcctgacctggcctggggcggggctccatagtgggcggggcttcctccagttccggagtccagtggctgaccgccttgctggagcggagatgcagccgccgccccgaaaagtgagcttggccctgaatggggactcctggcgggctgggggaacggagggagctaagggggcatccgacttgtggtaggagacgggaagtcggaaggggtcagaccccaaaccagaagtaacagagga

SEQ ID NO: 34592 - DNA, 2300 bp, Homo sapien
taaatggtaccacaattcacccagtgattaaggccagaaacctgggagtcctctgggactcctccctttgtgtcatcttcatacacaactcaccaactagtcttgtcgattccattagaatcaatcacttctctccatctccactgctaccaccatcctagttgaagtcatcattatgtttttgtctgtcaacagtaaccactaaaatgtgtggccccagaaaggggatagctggacaatgttccatgcttgcctccctacaatccattttccatgcagcagccaagtgaatatttcaagcataaatcagctcatatccttcctatggttaaaacccttcagtggcttcccattgaacttaaagtatcattccagtcccttaccatggcccacatggccttgaatgtctgacccctgcgtcctccatgcctcatctcacatcacctgttctcgtatctatcctctttgctgtagctacattggctgtttagttccccaaatacatctttcctgattgccagcctttgttcttgcattttgtcatgcttgaaatcttctaccacccaatcttagcatggcttgctcttcctaatccttcagatctctgagtctcatcttcaagtgccacttttgaaaggtcttgcctgactaccctatctcagttgctgtcctgttgcttgctcagtttattgtttcttgcaaagcaattatttgtctgcaattatttttttgtctgtaccctcactagactgtgtgctttgtgaagggaggccatgtgtatcatgctcaccaccgtatcccagggccagcacagttcctggcatagagacagtgaaaaataaatgtctgtggttggatagttgaatggatgaatgaatgactggtgagagctgggggcttagtatggatattctgattgatatataaaccctcacctttccccttaagagcggccactgcatcccaaggaaaaggtcttagagcaggctttacaatggtgccagctcccagagccctgctcagcttccctgctcttgaaaaaagtccccctggcccaagctggctgcctcttcacaggtgagcctccttcctctgcccagcatcccccaggtctctcccctagcatcctccacccaggattgcccatctatgcccaggtatccgacgtgagagcccacgggtggggctgttgcggtgtcgtgaggagccacctcgcttgctgggaagccgcttccaggagaggttctttctgctgcgtggccgctgcctgctgctgctcaaggagaagaaagtgaggccctggggccagaggtgtgggatgctgggtggccatggagaggagccatgactgcacccaccctctgactccacagcccatactctcatcaatctcattgcttccctgcccccgacttctgtgaccctgtgaccacagaccccattgcttccatgacgtcttgacctcattaaccatgatctctcatctctccatctcgctgactctgtttctgttctcagagctctaaaccagaacgggagtggcctttggaaggtgccaaggtctacctgggaatccgcaagaagttaaagcccccaacaccgtgagttttcttccccagcccgcacttccagggccttcctgccttcacccccctgccctttctgactgccccatcactgttctttgtctcccaggtggggcttcacattgatactagagaagatgcacctgtgagtacctcctgccctggcttctcctctggcccacctctgcaccctgtcttttctcttccctctttgtatgctccattcctatagctgtgaccctctctctccctctgattccattctgatcaccccagctacttgtcctgcactgacgaggatgaaatgtgggattggaccaccagcatccttaaagcccaggtgaggggaaagaaaaggctgagggctgggtctgtggtccccctggggcccagctgtcctcctcagtgcctttcatgcccactgatgccaacccctcacgctcccaccagcacgatgaccagcagccagtggtcttacgacgccattcctcctctgaccttgcccgtcagaagtttggcactatgcctttgctgcctatccgtggggatgacagtggagccaccctcctctctgccaatcagaccctggtaaggcaccccaccctgccccaacccgattcctgtcgtgtagcccttgtcacattgcagtaggcagtggtgtgcctgctagcctggtgccaccctatgctcactgtccccctcccttctgccttc

SEQ ID NO: 34593 - DNA, 2300 bp, Homo sapien
aaccctctgactttgatgtcttttgcaccctttttttgcccttctgacttttttacccctcccctcagctgtctcaggctggagacctcatcatggaagtttatatagagcagcagctcccagacaactgtgtcaccctgaaggttggtcctgaggggactggaggggaaataagaggatagtgaggttccaggggcaatagcctgaccagcatgaattctctgctcttgccctgaccccaggtgtccccaaccctgactgctgaggagctgactaaccaggtactggagatgcgggggacagcagctgggatggacttgtgggtgacttttgagattcgcgagcatggggagctgggtgagtatgaccacgcctgtgtgttcatgcatgtgtatatgcgtgtgtgtggttgtgtggtcaaggtcatcagtgacttcatgttaccaaatatgaatggtaactcatggatgactcatccactcatccatgcgaggggacattcaacacagttgactcactccctctttctcagtattcttccatcttggccttagtgacccccacaagctcgtagtttaccttctaccttaaagggagcttctcttcctcttttgcccagactccaaatgttggagagacccacggctcaatcctaggcccttttctctcatctatctacatttctccttggatgaattaacccattctcatggttttaaatgccattaataacctgacacccaaatttgtatatctggcccacatctctcctctcagctccagactcacatatccaaatgcctactcaacacctccacttctgacaagcaactcaaatgtaaaacatctaagaccaatttagatgatgtctagtcccctttcctcaaaaaaaaagcctaggccattctccaatttttcccaactcagtaaatggtaccacaattcacccagtgattaaggccagaaacctgggagtcctctgggactcctccctttgtgtcatcttcatacacaactcaccaactagtcttgtcgattccattagaatcaatcacttctctccatctccactgctaccaccatcctagttgaagtcatcattatgtttttgtctgtcaacagtaaccactaaaatgtgtggccccagaaaggggatagctggacaatgttccatgcttgcctccctacaatccattttccatgcagcagccaagtgaatatttcaagcataaatcagctcatatccttcctatggttaaaacccttcagtggcttcccattgaacttaaagtatcattccagtcccttaccatggcccacatggccttgaatgtctgacccctgcgtcctccatgcctcatctcacatcacctgttctcgtatctatcctctttgctgtagctacattggctgtttagttccccaaatacatctttcctgattgccagcctttgttcttgcattttgtcatgcttgaaatcttctaccacccaatcttagcatggcttgctcttcctaatccttcagatctctgagtctcatcttcaagtgccacttttgaaaggtcttgcctgactaccctatctcagttgctgtcctgttgcttgctcagtttattgtttcttgcaaagcaattatttgtctgcaattatttttttgtctgtaccctcactagactgtgtgctttgtgaagggaggccatgtgtatcatgctcaccaccgtatcccagggccagcacagttcctggcatagagacagtgaaaaataaatgtctgtggttggatagttgaatggatgaatgaatgactggtgagagctgggggcttagtatggatattctgattgatatataaaccctcacctttccccttaagagcggccactgcatcccaaggaaaaggtcttagagcaggctttacaatggtgccagctcccagagccctgctcagcttccctgctcttgaaaaaagtccccctggcccaagctggctgcctcttcacaggtgagcctccttcctctgcccagcatcccccaggtctctcccctagcatcctccacccaggattgcccatctatgcccaggtatccgacgtgagagcccacgggtggggctgttgcggtgtcgtgaggagccacctcgcttgctgggaagccgcttccaggagaggttctttctgctgcgtggccgctgcctgctgctgctcaaggagaagaaagtgaggccctggggccagaggtgtgggatgctgggtggccatggagaggagccatgactgcacccaccctctgactccacag

SEQ ID NO: 34594 - DNA, 2300 bp, Homo sapien
gaactgctacctggcaggtcaccagtgccttcccatttccaaaggccaaggctgcctcccagcctcaccaggtcatctctgcagcatccggcactcctgtatgggaaatgctccactgctctggcttttgacccccttctcccaggtctcctacaactcctcacactaacacattgtctccatatcttttcagggctctgtcgtggccctcccaaccaggtttaagtctcctctcattattatctacactttccaaaaagctatcccatcctttaaggcagtgctacccggagggtgctgtgaagactgtcacaccatactagcccctggactatgtgttatggtccatgacaggataagcacagaacttgagagtaagcatttagaatattttatagcaatttgacatagtaattttatgtgttgaatctaattataaaaaaagggcttgggccaggggtggtggctcacacttgcaattcccagcacttagggaggctgaggcgggaggattgcttgagcccaggagtttgagagcaacctgggaccctgtctctacaaaaaataagaattagccaggcatgatggtgctcacctatagtcccagctactggggaggctgaggtggaaggattgcttgagcctcggaggtttgagcctacagtgagctgtgatcatgccactgcactccagcctaagtgaggccctgtctcaaaaaaaaaagcgggtcgggttgtattcttcattttttcatccagattttctagcaactcatttttattattattattattttctttttgagatggagtttcgctcttgtctcccaggctacagtgcggtgaagagatcttggctcactgcaacctccgcttcttgggttcaagcgattctcttgcctcagcctcctgagtagctgggactacaggcgcacatgacctcgcccggctaatttttgtatttttggtagagatggggtttcaccatgttggccaggctggtctcgaactcctgacctcaggtgatctgcctgcctcggcctcccaaagtgctgggattacaggcttgagccaccgcacctggccacttatattatttttaatgaaaatacagtactggccgggcgtggtggctcatgcctctaatcccaacactttgggaggccgaggcaggtggatcacctgaggtcaggagtttgagaccagccatgcaacatggtgaaaccccgtctctactaaaaatacaaaaaattagccagacattagcgcctatagtcccagctactcgggaggctgaggcaggagaatctcttgaacccgggaggcagaggttgcagtgagccgagatcatgccactgtactccaccctgggagagaagagcaaaactccatttcaaaaaaaaaaaaaaagaaagaaagtacactattggttagtgacagcttgggactttaagaaggaaaaaggaaaaaaccctggtcctttactgcaatttactgcaggtagtttgagaagcactgctttgcagtcaacctcaaacatcctttcctctatgaagcttctccccagccccctagggtggtgggatttcccagggcatcatgagtcttcaggtgtagcatttttggctataaagaatgagtatgcctttttggctgggcgcagtggctcatgtctgtaattccaggactttgggaggccaaggtgggagttcgagaccagcctgggcaacatggcaaaaccctatctctacaaaaaaagtaaaaaaaaattagccaggtgtgatggcatgctcctgtagtcccagctactcaggaggctgaggtgggaagatcacctgagctgggggaggtcgaggctgcagtgagccatgatcacggcactgcacaagaatgagtattctttcttatacccacacctcaattaagggcatgaggctgccacacaggggtcttctttatgttggggagagcaaactgaattgaattgaattgaatttctttcctgtctttctccaaccatctcatgtctcctccttggctgtctcctctgctctctcgcatcccttttcattcctgcttttcttctgctttctcttcatgtttttctctgcttttcgctaccccggtcactctcatttctctcccctattccttgtctcttcccccatccccctttctcctgtcctccccctgcctctacagtggttctccccgctgagctgccaccagctgctgggccccgggctgctgcggctgggccgcctatggctgcggtccccctcccatacagccccggcccct

SEQ ID NO: 34595 - DNA, 2300 bp, Homo sapien
ggagttggggagaaggggcggcttctcccatgaatgaaacagctgcttgcttggtcactgagcttgcagggcgtccgcctgtcccaaaaaggcagccccaaaccttggtttggaagtagggatgtgccttgcggaccttcatccctcgaaggaacctaggccgggcccttggggatggaagtggggagaaacagacgggtacccctctgctgggcctctgcgcttgttgcccaggccaagtctcaattctggatgtccagcttccgtccccacactaaactggttgccagggtccagccacccttccgggcgtgggagaggtgccctgggggattagggctcgacctttcctcctcccttttggcaggactggagggcatgggagcagcggagaggatgcaaagccgtccctggcactctccctttctcagtttctacctccgtcccagtctccgtcccggtctctgcctctttgtccctctccctgaggttgtcttcgtcccaacgtgttctggtcctttctcggcctgcgagagggcagactgggggcagactcggagataagcgcggcggttgggcaagaagcccaaaccctttggaggcctgcgcttgcacaaggagtggccggggccccgcggagggaaccggccgggcggggcggggctgggcccgtcgagggagggcagaggggaggcggggccggcgcggcgggacccagaacctcggacgagcggcgggcacccgcgagcggacggcggccgcgtagtgaggtgaggacccccgcgccccccgggtccctgcttcccagactcctccccatcaccttctcgagggccttcgtgggctcccaggccccctcggcgccggcggccctccccatccctgccacgacccgcccctccctcctgctgcccggcctctgccccatccctcctcgccccctccctcgtcgcagcctgcgctgcccgccactgcccgccccgcccccgccactcctgtcccgcgagcacctcagctcccagccccgtgctgtcgagcccggcctgagtcaccgggaaaccgggccctgagtcagggcccgaggctcagcacgcgggccctggcttgggaatgaggcccagctggagagaggcagagggaggccagcagtgatgctgggacggagagggcgtcctggtcaccgacagagcacaagagtaacagggagagagcctaggccgaggcggaagacagaaacccaggctcagaggcagacagagacacagatacaactcaagatctggttagaattgtagactgagtcaaggacaagcttaataacagagagcaaaacagggtgggacaaggagagggacaaagaagaattgagaggttgagatggaatggggcagggacagtgacaaggcagagataaaactcaggggccacagaattagagacaggtctatgaaatagaccagggtcagggtcggggtcaggctggtggaagggggacagagcacagagacctgagcccaagggaatgagcagggaaaaggcaagctcagaaaaggaaggcttggagaaagcagaggtggggggatggcatttcacactgccaaatcgctacagggcatgtgcacacacaggtgaacagcatgtgaacatgctgccggtgggcagagagtccagaagcctctggagtacccctgaccagaggtcaggcctcatctctctggcatccccatccttattcttcaattagcctccacccagggccgggaccccacacattaggactggttagggctctcccggcagcctgaccaaagcaggcaggatgtggaggcggccagggctggagggacaggaaggaagtctgagcagagacaataggtggaaggggaggagggactgggaacaaccaggattaggacggcaggcctgcatacatcggctctggaaacaagagggagggggcgtctgcacctccttcctcctatctaggctgcccctctccctaccttactccagagctgattggccacatcattggcccctcctctgcatctccctatcccactctgacccacagcattctagcatcttgtcccatgcttactcagttggatgtgcagtcaggcaggagcagagctttgacccagacccagggtgggcaggaactgaggggccaactctagcactgacttactgtgaacctggggcaagccccttcccctctctgggcctcagtttccttaacttcaaatgaagtcccttccctaagtagagagccattgctgttgttctgggatggctct

SEQ ID NO: 34596 - DNA, 2300 bp, Homo sapien
ttatatgtgtattacaacataattggtttcctttgcaatcctatatattttattttatgcattttaaaatattattctgagatgagaccacatactttaccgtattgccaaaggagaacatggcacaaaaaggttcagaactcttgcatctagcccctgacccaaactccccggcatccattcctcaaaactccctgtgccctttactgtcttttcctgctcccttattttgctgggttagtctgagtccttaaagaagaagctgccaaggcagaatgcaaggatttgactaggggagatgcctgtgagagaggaagggagcctggagctaggagagctgtgaaggagagagggaaggaataaaggttgagaggagcatcctaaaacaccagtcaaaggaaagttcagcaaagccattgggaaatcttgatccaaagtcagctgtcaaaggagtcccctatctcccaggaatgggtctgccttagatctctgctgagctctgtcactggctgggagcagcccagtgggaagctggccttagatttcagagagaagcagctggggccattggttaatttcactcctcacagtgtaagatctgtgaggagcattctcactgccaccacagttgcccatctgaaaaaaaggacatggtgcaggggtcctgtccagggtggtaggtgagcatggtagttatagatatagacttggagggttggctattttctagctgcagagtcttgagcaagttatttaatgctccctgtctccttatatgtaaaatagaggtgataaaatttcctatttgtagggatatttgtgaggattaaagtttgcaaagcaatgtttacatagatcctggagcacggtcagctctcaataattggtagcccttattatggctattgcaattattattttattactataattctctttctcaaagggaaggccgggaaagtggggctccagtaggttgaagatgacagtccctcccctagctgaggcagctggaagaggtgggaaccacttcctcccactcccctcttcttcccctgaggcaggggtcttcccctagctactgacagttcctgtgtctgctgactcacagccaacttcctctcatacaaacaggaaaacacagccggccagcgcccccgccacccccaacacatacacacacacacacacacacacacacacacacacacacacacacacacacacaaacaccccccccccacacccaaacactggtcctgctcagagagggaagtgcctccgcccctgggagacaggctccaggaccggggttccggcaagattagcgaaggagagaagggccattcctcttcaggcctccccggcatcccccctgaaattttagggtgggagttggggagaaggggcggcttctcccatgaatgaaacagctgcttgcttggtcactgagcttgcagggcgtccgcctgtcccaaaaaggcagccccaaaccttggtttggaagtagggatgtgccttgcggaccttcatccctcgaaggaacctaggccgggcccttggggatggaagtggggagaaacagacgggtacccctctgctgggcctctgcgcttgttgcccaggccaagtctcaattctggatgtccagcttccgtccccacactaaactggttgccagggtccagccacccttccgggcgtgggagaggtgccctgggggattagggctcgacctttcctcctcccttttggcaggactggagggcatgggagcagcggagaggatgcaaagccgtccctggcactctccctttctcagtttctacctccgtcccagtctccgtcccggtctctgcctctttgtccctctccctgaggttgtcttcgtcccaacgtgttctggtcctttctcggcctgcgagagggcagactgggggcagactcggagataagcgcggcggttgggcaagaagcccaaaccctttggaggcctgcgcttgcacaaggagtggccggggccccgcggagggaaccggccgggcggggcggggctgggcccgtcgagggagggcagaggggaggcggggccggcgcggcgggacccagaacctcggacgagcggcgggcacccgcgagcggacggcggccgcgtagtgaggtgaggacccccgcgccccccgggtccctgcttcccagactcctccccatcaccttctcgagggccttcgtgggctcccaggccccctcggcgccggcggccctccccatccctgccacgacccgcccctccctcctgc

SEQ ID NO: 34597 - DNA, 2300 bp, Homo sapien
tctcccagccgccggaccaagagcagcgccctcaaactctccaccttcgtgccttaccaggaccgaggagggcaggagcctgcgggcgccggcagccccagccccccggaagaccggaacaccaaaacggcccccgtgcgcctcctgccctcctacagtgccttctcccacagtagccatgattcctgcaaggactcggccaccttggaggaaatccccctgacccagacctcggacttcccacccgcagccacaccggcatctgcccagacggccaagcgcgagatctacctgtgagccccctactggccggccggcccccctcccccagccgccggccagctcccaaatggcccattccagggcctcactctccaccccttcagcgtggacttcctggccagggccccaagtgggggtatcactgacctcatgaccacgctggcccttctcccatgcagggtccaggtcctctcccctcatttccatctcccagcccccaggggccccttcccctttatggggcttcccccatctgatgcccaagagggctcctctgcaatgactgggctccttcccttgacttccagggagcaccccctcgatttgggcagatggtggagtcaagggtgggcagcgtacttctaactcattgtttccctcatggccgaccagggcggggatagcatgcccaattttagccctgaagcagggctgaactggggagcccctttccctgggagctcccagaggaaactcttgaccaccagtggctccctgaagggcttttgttaccaaaggtggggtagggacgggggtgggagtggagcggaggccttgttttcccgtgctgctcctggactggcccacctgcctgccacatgcccacgcctagtcccatctgggcccccattccctgctggtcatgcagtgtctgtatataaggaccttggaatgacgtccccatttctgcctgatttgcaacttttcttgttgatgtcgtgttgtcttgggggacccctctggggggggacctgccctgtgccccctcctccctgccgcagtgccccccaacccaggcctctattgttccatgttgtaaatacccctggggccatggtgggatgggggtgcaggccagggaaacaacgggtgggtgggggtggggacgggggtaacatttgcctatcagcagagctgggcttttatttaatttttcttaaaaatacaaatctctatttttttggaactgttgcgctgtgccctggggggatccccgctcaggctggcctcccacatccagatgagcatcacagaggggccctgaggctgtggggggcagctggacaggggtgggatgactgtgcctctggcctggttgggtgagttgggagcaggaaggtttgctcagggggtggctgggtgctgctcccgatatagggggcctgcatcctgccccctccctgccctctcaacccccagcccctgccatgactgacccgtcagcctgtaaaaccaccattgccttgatctcagggggtgggagggctgcctcagggcaccctgggctccaggcccccttcttccagttgggcttccctttgtcagggtcaggggtcccatgggggagggggtagggaggttggggggcagagaagcccagtcagccatgatgaggtgaagttctcttcttcacctcagggggccagggtgtaaggggcgtcctgcagagcccccgtctcccactgtggccatctcaaagcctcagcccctcttccttccagaaacccccactgccttggcccatacctctccagctccctaggggcccaggctgggaggctggagactcagggtatggcccttgcttgacttagtctaagcttggggaggtggtccaagattgcgagcggtgggtacaggctgcggggtcgtctggtgcctttgggagctgtgctgctggggtcttgactcttgtaccccagagaccccacccccaccccggaaaagccaggggcctgaagaatcaccctatttatctgccccttacccccaacttggcttggggtgacagtgctaggaaggagagcattgttaggctggtagccctggcatacgaagcccttctacagaggggaaggggtagaatgggatggggtggcagcagccaggtctaggggttggccaaaggctcctttcccttggggaggcccaggagatgggcttggggcttgttaaagagacagcccctttcccctgcacaaatggggcaggtgcaatagtcttggagttggtagtat

SEQ ID NO: 34598 - DNA, 2300 bp, Homo sapien
acaacacaggcgggcggtgtcccagtcagccccatgattcattgccttgggattggagcagacaataagtggctgtgagttggaggaaggagaggtcaccgtgggcaggagaggactgtgaaggtttcctggagggccagagcctgccctcagtgggattgatgtggggtgggtgttccaggtgtggggaaggtattccaggtaaaagtgaggaagtggggaaaggagactgaaccagaagcctccaaagaaactgctgatccaaagattttggatttgaataaaggagggactggccatgattttgttggagaggagggggcattcaagacagagacagtagctgggtctagctgggatctgcaaatgcacgacctcaaagccaggggagatgggcagaagaagggggttattgttgtgatggggtacagcttgtggttgactagggcagaggttgggagaggcaagtgtgaagtaggggctggatatacggagatggatgtcaaataagagccagatgttcatccagagaccagagggtgtggggtgggggagtggccagggaaaggctgctggtgtcattatcatcggcagctctgtcccagttagacctgctgggctccctgttgctaaggacaggccagggcagctcccaatgccaattccagggctagtcagccctgaccacagttctgaccccaatcttgacctgtgttcccttgtacgcacctgcccatggcagcaggagggagaggagaggagccctagcaactgtgcatgttcctgtgtgcatgctctggggcatgtgtgcatgctctggggcatgtgtgcacgctctgtggcctgtgtgcacgttctggggcatatgtgttgggggaaagtcgggaaggctaacacctactcctcaaccctaaccattttcacaagccttgcccaattcaagctggccttttatgggggtggagaatactgggcaccgtgggtgattgtcagaaaaagaggatttgagatgtcatacctcatgcatatgcactgacttggcatctcagaacaaagagaaatgagacatcatcccctctccctccagccaaccttaatggagcccagtgtgacaagtcaaggtcccagggtctggggtgtgtaaggacgtacttgtgtctctttcctaccatgcatgtggggaggggtgctccagttggggatgctcgaggtctcacccttccactggctctctctccctatctcagtatcaaggtaattaccatcggtgactaaggcaggatgctcgtgagaaggaggtgttgggtgaagcacagagcagagagcaaggaggaaaagaaggaaagagggcgggcagccgggcttgggcccagggagcgtcaggtgggtgagggtgttccatgggcgggagctgctctaggcatgccaggcctcttactggctcctccagctggggcagacactgctgctacacccagctgtggatgagattcagggatctgagtttctggaatcggggttctgtgctgggactgactgctcttgtggagaatcgtgtgtcagtgggagagggtgagtatggggccagctctgggcagctcagggccaggcttttcttcccagctcatggcctctgttttgcctcttccccttgcagccctcctgattctggggcctcccaggatggagcacctgaggcacagcccaggccctggggggcaacggctactgctgccctccatgctgctagcactgctgctcctgctggctccatccccaggccacgccactcgggtagtgtacaaggtgccggaggaacagccacccaacaccctcattgggagcctcgcagccgactatggttttccagatgtggggcacctgtacaagctagaggtgggtgccccgtaccttcgcgtggatggcaagacaggtgacattttcaccaccgagacctccatcgaccgtgaggggctccgtgaatgccagaaccagctccctggtgatccctgcatcctggagtttgaggtatctatcacagacctcgtgcagaatggcagcccccggctgctagagggccagatagaagtacaagacatcaatgacaacacacccaacttcgcctcaccagtcatcactctggccatccctgagaacaccaacatcggctcactcttccccatcccgctggcttcagaccgtgatgctggtcccaacggtgtggcatcctatgagctgcaggctgggcctgaggcccaggagctatttgggctgcaggtggcagaggaccaggaggagaa

SEQ ID NO: 34599 - DNA, 2300 bp, Homo sapien
atccctcctccccggcatctccggcctcggcctagggtcccccgcaagccggagccggcgcgagcggcgcagcgggcgccaggagggggcggggagggagccggcgccggaatcacaaagccgcgaacccggctaggcggggacattctcataaaaccgaccctctcgtggcgagcagagggggttttttgccctacgctcaatcctccaaggcctcagtgccgcccccagtctttcctggcagaagaaatagtagccgaccactgttggggaaactgaggccagaattctgacttacagagggtagctggggggaaggggtgcgagaccacctcgcctacaaattctgctcctatgcctgccgcgatctccgttctggctccagggcctgcccgcgcacacactggcctacagcggggaccaggcggagggggcgctcaggtgtgagacgaacccaggtgtgcgggacccaccaaggtgtgtgggacccaggtgtgctggagacccaggtggctcagaaaactcagctaaatggctggaagagggtcgcaatcaccgtcccaggctagcaccctctacaaaggaacctggggccccagagctccggggaggcgggatggcttggccagccaggtccagcttgttcccggaacaccagccggttcggcccgggagtgggggttggggaggcgccgactgggaagccggcaggccggcccagccttcccgctgtgccgatatttacaataataatgtcgcgattaacgtggcggggcgcttggggctcgccgaacgaccccggcggcttctcctgcctgaatctggactccgagagagaggaacggagtgtgtgtgtttgtgtgtatgcgctgcagggtgtaatgtaatgtgacactgttggtttaaggtgtgtgtgacacccagtgttaagatgggtgaagcagtggattctgtgtttgtgaccgtgaggcgctgctgtaggtgccaattcctgtgttagagtgtgtgccatcaagcgtgtgctgagatactgggttgtgtgtttgtgtgggtgcagtagaggggtgcaaggagacctgtgctgtgtacctatgttctggccaagaagtgggtaagatgatatatgctagggtgtgttccttaaaggaatgtggggggtggctaggttttgagggttcatctagtgaactgtggctgtgacactcgtacatgagggcacgagattgtgtttgtgtgtccacgtcgcggggtgtcacacccggttgtgttattgctctgtaaagccacgggttgtgtgtcggtgctgctgatcgtgcagacactgaagcggattctgagctggcgacggtgccccagtgggcgctggtgtgcgggaggtatgtctgtgtgcacatatgcagggatgtatgtatgtgtgtatatatgtccacggtctggccctctgggtgcccgcgagaagctggaagcggctgagtgagccgaggtagttgcccaacaagtgtgtatgtatgtgttgtggacaacggtccttgcttgctccgtcctccgggagacccccaccaaactgggggccgcgcgcttccccaaacccatcctccacgccgcgcgctcctggagtctccttatccccgtctctccgagcgcgcccaggtttgggacgcggggactagggttctgctcagcaccccctcccctccctcggcttctcgccgcggacctgggaggacggaatccctcagccgcatcccctgctatgggctcccagcagcccccacctcagccccctcgcgccgagctcgtgttgggcccccgcggcctcgctccgccgagcgcccctccctcagctcccgccggccatgaccgcttcgggccccaagccgctgctgcctccaccgccgccggatccttacccgcctccgggcagcgccggccgcccgccccgctgtccatgagccgccgccggccccggcctgggctgcggctccgcacggctggggctggagctgcagttcgggctccggctccggctccggctggctctgggcgcagcagcccggcggctttgcgtccgcgccgcgctcccgctccccgagtgtgtgaggcggcggcggcggcggcggcggcggcggcggcggcggcggagccagcagagagcggagcgcacagcccggcccgccccctccctcccccctccctcccggcccgcccgcctccccgccccccctccggccgggaggtggagctcgggaccgctccggtccggctgggaggggaccccgagcaccgctccccaaagcctg

SEQ ID NO: 34600 - DNA, 2300 bp, Homo sapien
actttggtacagggccagaagtctgacttctctcctcttcaaatgccacctcccttgctccccaaccatcctcccagtccctgcttgctcacctgccctctttcctggggaaaaaaggccccaattctcatatctacattgtccctgactcaggggcacagagcccagcctggcagctggggtaggaggggctggggagcagggagaagagtaggcacaccctggtgctgctgctgtggcccagttctgctcctaccacttggtgcagaatttgagtttgatggtggtggagcagggaggatggaggcgaacatctgggagattagcatttcctgcccagctctgcggctgctgatcctgctcagccctgagcaagggaggagaacagaggagcctttgaatggctcccagcaagcagactggggagggtttgctgcattgggcagcgggcacacgctgggggcagggagaccggggcagctcttctgtggaagatttcttctctctgggccactgattccctcctcggagctgtgctcaatgatgtggagagtatgagctttctagagacagaaagaagctacttacagaacagacccacccccctctttcaccagattaccccatctcccatctagagccctgcccctgggctcctggggctgagggatagagcagagcccaggtcagaaaaggagtccagttaagcagggctgctctgggagagatcttggacagactttgcttgccctcttagctaaccagagattccacttttaccctgaagagcatcccaccgagagaggccagagctgagaagagaaggaagtagaagaaagaggaaaggcacagaagagtggtaggaacaggaaaatggggaaggacagagatggggagtcagaggctatggcaaaaagaggcccaacaactggtcatcccataacaagagcctttcctcacccagcactaggcctggctagggataaccttcctcattcttttgacctagaacactctgcctgggcctgcaggcgaagaaggcaggaggtcctgttgaactgggacacttggtagcctgggttaccaaaccgcaagcgcaggagagggagttcccaagctactcagagacctctagatggcgccagagagccagagctgaatgggagaaaccgagtattggagtgtgtgagacactgcgtgtgacaccgtgtgtgatttggtgtgagtgtgatagggagcgtgtggcactgcgagggcgtgtgacacaggccgtgacactgcgcggcctcgcggggcagggacccggtgactgtataatgtaagtcactggcaaatacgtgtggccgcagcactacgccgtgcagagggcaggtgatcaggggaccctcgaatagcctaagctcaggagcagcacttcgtcttcacgcttgtgtatcttccccatcctcactctagagcccccgggtcccattagcctcctcctcccacggtcccctccatagccccacccccacggcttgctgcggccaccgaggctgaccgctctgcggcttcggccggagggggaggggtggactttccccgagcgcagcgggaagggagggccacacagggcgatcggggatctgggcgggaagagggtggatatggaggagcaggtgcccagggaagaaggcgctgtgggagacacttcccttgcctcgacttcccagggggcagacagagctggggacaggtgtttgagtagggtaaggaggggaatccaggagcggtcctagatggaggcttgggtgggataagtgtaaggtgaagctcagaggagggcacggcctgtgtactgggcctcgggcagtgaagagatggcagagggaggggtccaggctttggggagcggtgctcggggtcccctcccagccggaccggagcggtcccgagctccacctcccggccggagggggggcggggaggcgggcgggccgggagggaggggggagggagggggcgggccgggctgtgcgctccgctctctgctggctccgccgccgccgccgccgccgccgccgccgccgccgccgcctcacacactcggggagcgggagcgcggcgcggacgcaaagccgccgggctgctgcgcccagagccagccggagccggagccggagcccgaactgcagctccagccccagccgtgcggagccgcagcccaggccggggccggcggcggctcatggacagcggggcgggcggccggcgctgcccggaggcgggtaaggatccggcggcggtggaggcagcagcgg

SEQ ID NO: 34601 - DNA, 2300 bp, Homo sapien
tttattgtttcctccgcttgcaatgcctttcttccttctccacctggcaagctcttattcacatttaaaggccccgctcaaatgcaactacttttctgaagccttccaagggatcccacaatccattgttcatgcttctatgggaacctaacctattacacttgcctgcttacctcccctactaatataattaatagcaacttacacttactgggcttttactatgtgccaggaactatgctaaacatttttatttatttattttttattttttgaagggtattcccaaaacaccaagttaaacatttttaacatattattttatttaaacctcacaacaattgcatgaggtattttccctattttacggatgaagctcttgagacttagtgtggttaaggaacctgcacaagataacatacctacgaagtaagcaagctgtgattccaacccagatttgtgggactccaaagcccactactaatccactggaccgtgttcctggaggccacaaatgctctttcctcagctgtcttctcagatcctagaacgggctgatatatggctcaaaagttctttaacggccaggcacggtggctcaagcctgtaatcccagcactttggaaggccaaggcaggaggatcacctgaggtccaggagttcgagaccaacctggccaacatggtgaaaccctgtctctactaaaaatacaaaaattagcaggatgtggtagcaggcgcctgtaatctcagctacttgggaggctgaggcaagagaatcgcttgaacctgggaggcagaggttgcagtgagccgagatcacaccattgcactccagcctgggcgacagagaatccgtctcaaaagaaaaaaaaaagttgtctaacatattaatacaactttcaagccacatgcctcggtctaaaagtaggtgcccccagtacacttttaccccaggtagcaacttccactcaccttaaagtcacatacctggaggaaggggatagggaggaaatctaaacatcttatacttgaatgtaagctccgttatttcacggattcaaatgtggtgaaaggaactatttttttttccttttttttttgagatggagtctcactctgtcgcccaggcgcgatctcggctcactgcaacctcccgtctcccgtgttcaagcaattctcctgcctcagcctccagagtagctaggattacaggcgcccaccaccacgcgcaactgatttttgtatttttagtagagacagggtttcaccatgttggccaggctggtctcaaactcctgacctcaggtgatccgcccgcctcggcctcccagagtgctgggattacaggcgtgagccaccgggaccagacggaactattcttttccacaaaagaacaaacacatacataacttttgccacgtctgaagacgagggttctaatagggcgcgggtggtgtctcaggtattttgaaaggagctacccaagaatctcagcttgtcaggccagtcattccatttgaccctatctggcgcgtattggggccccgacaaggtaaggggttggcatgaagctgcacagtgagataaagctggaccggagctagaacccagaatcaaagccttgccctgtgcggtttctcatcgcctacgcagtcgggccctggcctggcatctccaggcaggtggccttggacggaagcccggcctactggcttcatttgtgggaccccgggggtcctctcctccgcccatggagcctggttactcccacttcctcaagcctagggcctggagaagcctttcctggttcgcggcctcacggtctgcaaggtcctcttacttccctgaagccgctccagccccacttcccgaaggtcccgcttccgggtggctcgcttcgccacctgcggtcccctgcctcggcttgggaacgccaaggacatcccccacggaagcctgggcccacatccccatgcccttgccgcacgtcaccgccccgctggccccgaatacgcctccgccctgcacttcctctctgcagcgccgtctttccggccgggctcccttctaattggccagctcagagcttcctcgggtactcggccactcggggcatcgcggcggcctttctagccgctgtcccaagggttggtctcgcgctttcggctgcgagctctctgtggtgctggcagcgacatgtggcgcctcccgggactcctgggccgaggtaagggacgtccaagcaaccagcgtcactctgggccgcaaagaccgaactggagtgggggcgggcccgag

SEQ ID NO: 34602 - DNA, 2300 bp, Homo sapien
ccagtcaaacctgagttttaacccccactatcactgaacttggactccatggcttagtgcctcagtttcttcacctctgaaaatgaaggtaatggtagcacctaactcattaagttgtcataaggatgaaatgagatgacactaagggacttagcacagcctgacagcacagtaggtattgaacaaatggtagctgctctgatgattttgtaggagagacaatatcccaaggttgcctgaattacccttctagggctctaagagccctgctcactcatgagtcactggggttgggagttaacaatgcctggggaaccaagcccttgaagaagtgctggctccaaagtaggagtccaagaatatacagcaagagtaagagttgctctcacctcttcttgtagccccggggcccagcgacctgacagttacaggactgaagtctttctccagcccctccctctgcagcttgaacaccctgctagcaggaacctcacgcctaccacatgcctcgagcacaggcaaccttggcctcctctgcagaagtgggcatctcggagccagcctggaagcctccagcagggctattcccccacacccctacccactggaaaggagtgttgtaagactaggttttggctaaggtgagataaaacatagtccctggtgcctcttaggggccagagcgggcaggaggttggataacaaaaatagagcatcagcaaccctttccaggtagaaattccagcgggagttcaggttcccaagcaatttcacgtacatggctggtaagtgactgatctttccccccgcttggtagcctcacagatgagtcttggatgcattcacagtcatttctggtctgtgcaccaaaggatgcattcagtgacctatgaaaaaccctactgaagggtccagagaccctggtgctcaccttagcctttgtctttgagcaaataacttaccttcttccttcttatgcctgggttttctcacacttaaatctgtactactgtttgccaatgtctgatgtgtgtatccctggttcacaagaagattttagatggtattcaaattaatattttctatttagttatatatttaatgtataatataaaaatatgattagcatattgacctgtagtttgatagatgttctgtctaggataaagctaactgtaaaaaaaaatagtgaatcagtttaaagaaaaacataacgtaaaagtgggcacagatccagagaggtagcaaaaatcacaggggtggttccatgaatggctgacacttaggaaactctgaattaggccatcctcgagactagcccaccattcacctctgttcatcccccgtgggctcataatcgttttcatttcacctttgatttggaaggaagaagtttcttgcccaaatgcctggatgtgtctgcttgactttcagaacttctcacctcagccctaaagagggagcctgtgggttctcagagagatatcacaatttgagtcccaaagaagaggccagatacccacccaccttcccccaaatcttaagcacctgcgccagtacagtcaagaagaggaaagtgtgtgaagacccaggtctggctctgccacttgcctggccatgtcaccttgaagctgtgacctgactccctatattgtttcctcagttgtagaccaaaggcaatggtgtctgccctcctaccttagaagacaaatgcaagggcatttcaccacagagaggacctttgtgctcactttggcccaggaggcagtgatgctcatggttgcatgactttatgagtcgctgggccagggtgaggacctgggcctcctgactcctggcccagagttcttgtccatcagttcatactgcaattttatgtgaaagcattatgactgtcctacccatgggagagtaaatgtagattgaatgctaggagtcttaaagctggagagtatagattttgaggtccccatttgggaaacatgtgccagaaatgtctaggtgtttaataaaacagatattggattatctcatcactcttgcccttgagtattatgggaagagccagggagacgggcagggggagctgaaagctgaggctccgtcctcatctctaaactctccactaaccaatttaaaggatcttaaaagcttctccaggagagagacttaggaaaaaaaaagatttctgagtcagtgctaatgagtccagttactgaatttgtgaatagctattccctggcttctggatgttagcccaagttgaatagcatagatgtggttgagagtggggtctggga

SEQ ID NO: 34603 - DNA, 2300 bp, Homo sapien
tcgtttaatcctcacagtttcctgctgaaagggctactattcttactcccatccccactctacagatgaggtaatggaggcccaggaaagttaagtgacttgtcccagatgacaccgctggtaagttgcaaagtcagaatttgaactcaggcagtttacctctgatggctgctctgttaatcacagctgctttccagtgagacaaaaacgggtgatcagggcagagtcaagacagagaggtaaacaagattgggaaaaagacaggaatgagaggggaacaatgggggaaaagataggaacaaagagagttggggaaggggagagaaacaggaaacatgacttgcccgggaggggcatcagtccacgtgcaagcaggtggaggctcaagttttctgctcacttggtgatgcagaggctccctttccctcagcagccgccttgctgcgtggacagcagcttcccatctggcctgtccccggagccccggcctcatcctcctcagcggcaggccacttagcttcacaggaaatgctctttctctaattggcattgaaactcacagccctcccttttcctgtaggtggggtttccataggaaaaagctgcttctctgtttccccagcctagcaactgtttggcagtcagagtcccacatcctgctcaactgggtcaggtccctcttagaccagctcttgtccatcatttgctgaagtggaccaactagttccccagtagggggtctcccctggcaattcttgatcggcgtttggacatctcagatcgcttccaatgaagatggccttgccttggggtcctgcttgtttcataatcatctaactatgggacaaggttgtgccggcagctctgggggaaggagcacggggctgatcaagccatccaggaaacactggaggacttgtccagccttgaaagaactctagtggtttctgaatctagcccacttggcggtaagcatgatgcaacttctgcaacttctgctggggcttttggggccaggtggctacttatttcttttaggggattgtcaggaggtgaccactctcacggtgaaataccaagtgtcagaggaagtgccatctggtacagtgatcgggaagctgtcccaggaactgggccgggaggagaggcggaggcaagctggggctgccttccaggtgttgcagctgcctcaggcgctccccattcaggtggactctgaggaaggcttgctcagcacaggcaggcggctggatcgagagcagctgtgccgacagtgggatccctgcctggtttcctttgatgtgcttgccacaggggatttggctctgatccatgtggagatccaagtgctggacatcaatgaccaccagccacggtttcccaaaggcgagcaggagctggaaatctctgagagcgcctctctgcgaacccggatccccctggacagagctcttgacccagacacaggccctaacaccctgcacacctacactctgtctcccagtgagcactttgccttggatgtcattgtgggccctgatgagaccaaacatgcagaactcatagtggtgaaggagctggacagggaaatccattcattttttgatctggtgttaactgcctatgacaatgggaacccccccaagtcaggtaccagcttggtcaaggtcaacgtcttggactccaatgacaatagccctgcgtttgctgagagttcactggcactggaaatccaagaagatgctgcacctggtacgcttctcataaaactgaccgccacagaccctgaccaaggccccaatggggaggtggagttcttcctcagtaagcacatgcctccagaggtgctggacaccttcagtattgatgccaagacaggccaggtcattctgcgtcgacctctagactatgaaaagaaccctgcctacgaggtggatgttcaggcaagggacctgggtcccaatcctatcccagcccattgcaaagttctcatcaaggttctggatgtcaatgacaacatcccaagcatccacgtcacatgggcctcccagccatcactggtgtcagaagctcttcccaaggacagttttattgctcttgtcatggcagatgacttggattcaggacacaatggtttggtccactgctggctgagccaagagctgggccacttcaggctgaaaagaactaatggcaacacatacatgttgctaaccaatgccacactggacagagagcagtggcccaaatataccctcactctgttagcccaagaccaaggactccagcccttatcagcc

SEQ ID NO: 34604 - DNA, 2300 bp, Homo sapien
tctactggcctctcgcctttcattttccctgcccccacctgcgactgtcagccccttgccttgttcactgtcaggcacacagggggacgattgcggggcggatagtgagactgtcacgtgggctgccagcagggggcaatgggcacccttgtgtccctgagctcccaggggctcctagtagcttaggcagcaccttgcccacaccaagctgagggagacctgagaaatgggattcctgccaaagaggcaaagaaaaaagtgaagggacaaatgcaaggccatctttgccatttgcgtatgaggcataaaacttggaagataataaacagcaaaatcatagtccttatgtgctgagtgctttctctgagccaggccctgtgctgagtccttaccccaccttgtgagatcgatgacagccctcagagaaggaaacagaggctaggagaggttaagtcccttgtgcagtgtctcagagcttgtgagtggcctgtctgtctccagggccatgctgtaggaggtggccctggattcaggccccttgctatggtttaatgggtttcagtgaaatagttgggaaacctcaggagtgggatatggagttaagggaaagaaaagccagagagaaagggaaggagtgcaggtgactgtcccttagccaccccagtcctgatgaccacaggcctccatgccaataagccctgactagtgccacttgggtccaaacatggcatctctggccccaagggcttagtagcaaacacccatctagggaagctggcgttcattctcatcacctcaaatgcttcatgagcctcagggatcaaccttgaagtgggtataaggctgggagaatgttgggggcagcaaactgaagggcacaataagaagcaataaggccacctcaaagcccacccaagcaaactgctcattcacctccttccttcctgaatttcaccttatgaggaggtgagtggaagatagggtatcccttaaaacatctaaaaggagagttgggggcagcaaaggagatgtgcttcacgggactcttataaacaaaactggggagagaagaattggaggaagggggaaagacatagatgaaagggaggggaaggtgtgggagagggaaacgtataaaagcttccaagaggagtgggaggctgggggttccccagacagagactcagtctggaccagatgcagagaacaatggacttcaaggctggaggggggcagaagggaagcgggaggagagccacacggtcaagttgcacaggttcttgcagcttctggaatcaagaccatgggcaccctcataagtcagtgtgggcagggactgccccagggccaatccaagatccagaggtagccatagggtgtgacaagttgtgcagattacaacactcaccccttgcaataacgtcactgcctgtgactcggggccaggcccaggccaaagcccttcctacatcatttcgtttaatcctcacagtttcctgctgaaagggctactattcttactcccatccccactctacagatgaggtaatggaggcccaggaaagttaagtgacttgtcccagatgacaccgctggtaagttgcaaagtcagaatttgaactcaggcagtttacctctgatggctgctctgttaatcacagctgctttccagtgagacaaaaacgggtgatcagggcagagtcaagacagagaggtaaacaagattgggaaaaagacaggaatgagaggggaacaatgggggaaaagataggaacaaagagagttggggaaggggagagaaacaggaaacatgacttgcccgggaggggcatcagtccacgtgcaagcaggtggaggctcaagttttctgctcacttggtgatgcagaggctccctttccctcagcagccgccttgctgcgtggacagcagcttcccatctggcctgtccccggagccccggcctcatcctcctcagcggcaggccacttagcttcacaggaaatgctctttctctaattggcattgaaactcacagccctcccttttcctgtaggtggggtttccataggaaaaagctgcttctctgtttccccagcctagcaactgtttggcagtcagagtcccacatcctgctcaactgggtcaggtccctcttagaccagctcttgtccatcatttgctgaagtggaccaactagttccccagtagggggtctcccctggcaattcttgatcggcgtttggacatctcagatcgcttccaatgaagatggccttgccttggggtcctgcttgtttc

SEQ ID NO: 34605 - DNA, 2300 bp, Homo sapien
aatgtcctctgaagaatataaatgttaacacaagtaaaattatcatgaattccataactccttctgtggccttggtccacgttaggttttccattaagagatactattgtcatcagtgagtagcttctcctgttgtattcttctgtgtagcacggggctggagctgtggatatttatgaaccccaggcacccacttcctgttttcgtggctgtccccggtccctgcctctgtgccgttttctctgcctttggccaccagatggcgctctggaaacgagttttctgcatcaaagctcccctgcattactctcaactaggctccctccctcttctctgttcccttccaagccattttccagggtgcagccaaaaggcctttctggagggcacatctgtgtgatcttgggcaagttacctaacgctgtgtgctcagcatcttcaatgtgatggtatggctgtgagtgcgtcatgagaggatgtaggtaaagcacttaggacaaggcctggcatgtggtcgctgttctcattatcctgcgtagagcttttcaaaagcactccacgaccttcaggacaaggtctaaattcttagccatgggaacccaggccactgcatcatctgaggacccctgcttatgtcccctgcccaaccttcctccctacactactgcactgaccctcttgcagcacagccaggagccagcctgcccacttcggggcctttgcccattttgcccctgccaccagctttgcctgtctcctgcctattcaacttcctcgggctcactcctccaggtccgtcaggattcagcgtgtgccctccatgaggagcctcccggacccccaggcctgattccagagccattctactggcctctcgcctttcattttccctgcccccacctgcgactgtcagccccttgccttgttcactgtcaggcacacagggggacgattgcggggcggatagtgagactgtcacgtgggctgccagcagggggcaatgggcacccttgtgtccctgagctcccaggggctcctagtagcttaggcagcaccttgcccacaccaagctgagggagacctgagaaatgggattcctgccaaagaggcaaagaaaaaagtgaagggacaaatgcaaggccatctttgccatttgcgtatgaggcataaaacttggaagataataaacagcaaaatcatagtccttatgtgctgagtgctttctctgagccaggccctgtgctgagtccttaccccaccttgtgagatcgatgacagccctcagagaaggaaacagaggctaggagaggttaagtcccttgtgcagtgtctcagagcttgtgagtggcctgtctgtctccagggccatgctgtaggaggtggccctggattcaggccccttgctatggtttaatgggtttcagtgaaatagttgggaaacctcaggagtgggatatggagttaagggaaagaaaagccagagagaaagggaaggagtgcaggtgactgtcccttagccaccccagtcctgatgaccacaggcctccatgccaataagccctgactagtgccacttgggtccaaacatggcatctctggccccaagggcttagtagcaaacacccatctagggaagctggcgttcattctcatcacctcaaatgcttcatgagcctcagggatcaaccttgaagtgggtataaggctgggagaatgttgggggcagcaaactgaagggcacaataagaagcaataaggccacctcaaagcccacccaagcaaactgctcattcacctccttccttcctgaatttcaccttatgaggaggtgagtggaagatagggtatcccttaaaacatctaaaaggagagttgggggcagcaaaggagatgtgcttcacgggactcttataaacaaaactggggagagaagaattggaggaagggggaaagacatagatgaaagggaggggaaggtgtgggagagggaaacgtataaaagcttccaagaggagtgggaggctgggggttccccagacagagactcagtctggaccagatgcagagaacaatggacttcaaggctggaggggggcagaagggaagcgggaggagagccacacggtcaagttgcacaggttcttgcagcttctggaatcaagaccatgggcaccctcataagtcagtgtgggcagggactgccccagggccaatccaagatccagaggtagccatagggtgtgacaagttgtgcagattacaacactcaccccttgcaataacgtcactgcctgtgactc

SEQ ID NO: 34606 - DNA, 2300 bp, Homo sapien
cccggctaattttttttttttttttttgtatttttagtagaagcagggtttcaccacattggccaggctggtctcaaactcctgatctcaggtggtccacctgcctcggcctcccaaagggctgggataacaggcatgagccaccacgcctggcctgaaacctctaattttttttaaaaaaaaacaatgtttcagaggcccacatgataatagacttttaagatctacatgatgagcaaatacacaatgacaagagaccagcaagaagtcagggacacttctgtactggggtagggctcattaaggttcagttttatccaaaagttgggcagggttttcctctccacactgctgcccctctgtgttcaagggcttgttgcaggagtgcttgcgagtggtggccatggaaaaggaggcagtcccccctgggatggtgggatgagttcagcaaagtttcgggacagctaccagatgccagtgatggatgggaacaaatgcaggcaccgtcaggtctgctaacccctatagtgacaagccatagtttgtgactcacttctactctccactccgtggcctgggtcccgacctctggtctaggtggtacactgtaacctctcctctccctaggctccgtcatcatccggtgtccctggggacagggggtgggagttgggtctctttctctgtctgtgttctcattctcacctatccttaagtcataaactcgaatcctaacttccccagggccttcccgtttagttcttaaggccagaactattttactctctgtgaatttgttacaaaaaacccttattctctgacaggctcctggagagagtcagactgatgaggaatcggctctaaccctggctccaccactgtgtgatactggccaaaccttagtgcctccatcatctttagcaaactagcacaggaacagaaaaccaaataccacatattctcacttgtaagtggaagctaaatgatgagaacacatggtcacaaagtggggaacaacacacactggggcctacctactacagggtagaggatgagaggatgagaggagggagaggatcaggaagaataaaaagtactagacttaatatttcgtcactgggtgacgaaataatctgtacaacaaacccccgtgacacgagtttacctacataacaaacctgcacatgtacccatgaacttaaaagttaaaaaaaaaaaaaaaaagtggcccaggcgccgtggctcacatctgtagtcgcggcactttgggaagccaaagcgggtggatcacttgagcccaggagttcaagaccagcctgggcaacatggtgaaaccccatccctactaaaaatacaaaaattagccagatgtggtggtgtgcacctggaatcccagctactcaggaggctgaggcacgagaatcgcttgaaccctctaccgggaggcagaggttgccgtgagctgagattgtgccactgcactctagcctgggtgacagagtgagactcggtctcaaaaacaaaacaaaaccccaaagtataatacacctgacttcaactttatgacattgctgtcttttattacatctttttatattaaaaataaataaaaatgtcataaatagtaattgtgtaaatataaaaggccttattaaaaaaacaaatcttagtgcctcagttttctcttctgtcaagtgggcacataaaattacctaagtcatagggtcctgggcatttaaatgagagaatgtacgtgaaatatttagcacagtggagggctaggcacacggggagactgcagtttaaaagactaaccaggcacatgagaccaaagacacaaaagtctgttattttcctagagtcaaaaacaaaacttattagaaggctgtctttacccaatcttgtcctcaaaattgactctaaatctttagttcactttaaacattcagtaaattattaacactgctttgaaattctctttctattctctctatcctgtgacctctgacatgatgtcacaattcaccttctgctctgactttgtgaggatttcccaagctggttggtgcatgggcttcctcacttttttcctcacgaagaggtctctggtctcccctctctgagcactctgaggtagggttgctgtgtgttttgctcttggtctaattcctttggctaaacatgaataattatattaatgaatggctttggagattcttcttccgtcctttgcatttttccgagatatgtttctggttttggtatctattagaagggtattttggtttctgttttgtgac

SEQ ID NO: 34607 - DNA, 2300 bp, Homo sapien
gtcaagtgggcacataaaattacctaagtcatagggtcctgggcatttaaatgagagaatgtacgtgaaatatttagcacagtggagggctaggcacacggggagactgcagtttaaaagactaaccaggcacatgagaccaaagacacaaaagtctgttattttcctagagtcaaaaacaaaacttattagaaggctgtctttacccaatcttgtcctcaaaattgactctaaatctttagttcactttaaacattcagtaaattattaacactgctttgaaattctctttctattctctctatcctgtgacctctgacatgatgtcacaattcaccttctgctctgactttgtgaggatttcccaagctggttggtgcatgggcttcctcacttttttcctcacgaagaggtctctggtctcccctctctgagcactctgaggtagggttgctgtgtgttttgctcttggtctaattcctttggctaaacatgaataattatattaatgaatggctttggagattcttcttccgtcctttgcatttttccgagatatgtttctggttttggtatctattagaagggtattttggtttctgttttgtgacaatcaagatttatagtacagaaaattagaagtgattatttctatttcaaggttctttctgtggcagccaggtaatcccttgggtgccctgatttactcacttggtttttttctctctcctgggtataagaccaactacataatttacaaagcccagggcaaaataaaaatgcagcctctcattcagaaattattaagaacttcaagagggtgagagcacagcatcaaatcaagagcagggcacttcttttttattttaatttttccataagttattggggtacaggtggtatttgattacatgagtaagttctttaatggtgatttgtgagattttggtgcactcatcactcgagtagtatacactgcaccctatttgtagtcttttatccttcgtccccctctcatccttccccctaagtccccaaagtccattgtatcattcttaagagcaggccacttctaaatctggggcccttctaagtgcagggccctatgtgactgcacgggttgctggcccatgaatctaatcctgcccgggaggcaatggtggtaaaagctttagaatcctgtaggcttgggttagagtcttagctctgcaagttactcttttggaggaagaaatatatgaaaaagcggacacaggagcttattagattgtgaggagcacattagtttgatgggtcccaggagaaggagccaacatttctgtattccacttaagcgctgagaacggtgctttgtacctaaaaaaattttttaattaagacataattcacatgcaataaaattaactcttcaaaagtatacaatccagtggtttctagtacactcacaaagttatacaactatcactgctctctaattccacaatattttcatcacccaagaaacaccatatctattagcggtatctattagcagtcacttcccattccctcctgccttagtttctggcaaccactaaactactttttgtctctatggatttgcctattctggacatttcatataaattaaaaacaatatatggctttttgtgtttgacttttttttttttttttttgagacggagtctcgctgttacctaggctggagtgcagtgactcactgtaacctctgtctcctgggttcaaatgattctcctgcctcagcctccctagtagctgggactacaggtgcccgccaccatgcccggcttattttttgtatttttagtagagacggggtttcaccatgttggtcaggctggtctcgatctcctgacctcgtgatccacccgcctcggcttcccaaagtgctaggattacaggcgtgagccaccgcacccggccttctaagggttttatagttttagttcttacatttaggtcgttgatccatatttagttaatttttgcatatggtgtgaggaaggaagtgtataattttaattcctgcttagcctgacgataatcatgtgacccttggtaagttcttgcacctaagtctcaatttccttatttgtaaagtgagaataacaaatggtagctaaatcataagattacagtgaagatagaaaatttacgtagagcatttatcacactgcttgaagcatcctaactactcgataaatgcggtcggtgttacagttataacatgagcgatgaatgcgtgcttccacagtggagtgccagaaagaccggcagca

SEQ ID NO: 34608 - DNA, 2300 bp, Homo sapien
ataattatattaatgaatggctttggagattcttcttccgtcctttgcatttttccgagatatgtttctggttttggtatctattagaagggtattttggtttctgttttgtgacaatcaagatttatagtacagaaaattagaagtgattatttctatttcaaggttctttctgtggcagccaggtaatcccttgggtgccctgatttactcacttggtttttttctctctcctgggtataagaccaactacataatttacaaagcccagggcaaaataaaaatgcagcctctcattcagaaattattaagaacttcaagagggtgagagcacagcatcaaatcaagagcagggcacttcttttttattttaatttttccataagttattggggtacaggtggtatttgattacatgagtaagttctttaatggtgatttgtgagattttggtgcactcatcactcgagtagtatacactgcaccctatttgtagtcttttatccttcgtccccctctcatccttccccctaagtccccaaagtccattgtatcattcttaagagcaggccacttctaaatctggggcccttctaagtgcagggccctatgtgactgcacgggttgctggcccatgaatctaatcctgcccgggaggcaatggtggtaaaagctttagaatcctgtaggcttgggttagagtcttagctctgcaagttactcttttggaggaagaaatatatgaaaaagcggacacaggagcttattagattgtgaggagcacattagtttgatgggtcccaggagaaggagccaacatttctgtattccacttaagcgctgagaacggtgctttgtacctaaaaaaattttttaattaagacataattcacatgcaataaaattaactcttcaaaagtatacaatccagtggtttctagtacactcacaaagttatacaactatcactgctctctaattccacaatattttcatcacccaagaaacaccatatctattagcggtatctattagcagtcacttcccattccctcctgccttagtttctggcaaccactaaactactttttgtctctatggatttgcctattctggacatttcatataaattaaaaacaatatatggctttttgtgtttgacttttttttttttttttttgagacggagtctcgctgttacctaggctggagtgcagtgactcactgtaacctctgtctcctgggttcaaatgattctcctgcctcagcctccctagtagctgggactacaggtgcccgccaccatgcccggcttattttttgtatttttagtagagacggggtttcaccatgttggtcaggctggtctcgatctcctgacctcgtgatccacccgcctcggcttcccaaagtgctaggattacaggcgtgagccaccgcacccggccttctaagggttttatagttttagttcttacatttaggtcgttgatccatatttagttaatttttgcatatggtgtgaggaaggaagtgtataattttaattcctgcttagcctgacgataatcatgtgacccttggtaagttcttgcacctaagtctcaatttccttatttgtaaagtgagaataacaaatggtagctaaatcataagattacagtgaagatagaaaatttacgtagagcatttatcacactgcttgaagcatcctaactactcgataaatgcggtcggtgttacagttataacatgagcgatgaatgcgtgcttccacagtggagtgccagaaagaccggcagcatttctgagaaggtaaacgggaggaagtaggcttgcttagtccacttggagaagcaggtctgggattgttgtgagagtctctgccctaggtagaccactgcctcatgatcccctctagagattggtaaaaattcgaattctcgggccccatcagaactactgaaaagagcctcctgtgagcacagggctcgcagtaagtgggggtgacggtggtcgcgccggcagcgccgccttgggcctgcgggaggcgcccgagaggcaggggcgaccacggcggctgcgcagagtcctccctatgccggcggtcgcgccagcgggatccgcctggctcagctgacagctcccgagaacggaagaggcggcgcgccggttgagcagggcgtctctaggcctggtcggctggcggcggtgagtgggccccaggcaagggcggagggcggaactttggggttcggcactgccgggcggccggaaggtacggtggggatagctctctg

SEQ ID NO: 34609 - DNA, 2300 bp, Homo sapien
gacgattgggcgggattctatgaaataatgcgcacaaagctctggcaaaaccctatgtaatggaagatgttactgatgaccagcactcaagtccttcctccagcctccgcatggaaagttcccaagtgtccctagaagtctggaacactctaatgttgactggaaagaataagatggatctctttttctgatatggaagcgtcccaaatccagtcataccagctgggaggcagtgcccgctagcggtaaaaagcatggattttggatttggacagatccccctgaattgaaggcacaagggaaaccacttgtgcctctggccaagttaatttttctctccaagcgtcagtttctccacctgttaaaaagtaacggcaaacctacctcactggagcttaataaggattaagtgaaataatgcaggtcaaatatccgagccttgatatatataagcctcatgtgtatgtgttcccatttatgtaaaataacagtgtaagcatattcaaagaaagcaattcagaatgtactcttaaactaagcaatggttatcttggtgtggggagttggggaaaccaggggcctgcctttttctctattatataatgctgcaaagtttgatctttaaaaaaggacattaaaaagcccaattgtactttaaacaacacaagttttaatacttgggtaaataaatggcatctaaacaaagaaagaaactgaaggcagagccaggcccaaccctaggagactgaggaagcgattctgctttgcctgcccccagctcaacccctgcactaaaaccccccggccccagccccaaggtccagggggttgtattcctgggggcgacccggcgcccctcaagtctccctcctcttgcacacacacacacacaaaccagactcgaatccccgcctcccaagggaaagtgttttttaaggtctgttccagggcctgccggggccagggaccgaggtgggactgagtggccggaactcctccacctgggagagtcggtccgggtagctgcggccaagctgagtcagcccggcgggcggcgcacgcggcgccgcgtgacccgcagccacgtgacccgcgcggggccgggccgccggcgcagtcgctgcagccgccgcgggaggcgtccgtgtaagtgggtagcagggctggcggggaccttcctcgcgggccggagcgcggagcgctgccccagccctacggcactcggggtcgggaccccggggagccgccctcacacattttccaggagggatcggaggggcgatggggtggtaatgggggtgggggacacgctgtaccccaccgacgaccgcgcgggccaccttcgcctctttccttcacactcccactaaccgcagtgctgggggaacaaaatgtcctccttctggagcgattaccttttcccttttgtgctttgggggaaactgaagacccagaggggttcgcaaagcaaggtgggccagtaggaagacccctccgctagtccagagagagcacacagctccccaggcagagctcattgccccacctgctctagtggcccagcatgatcccatgacctctctacttctggaggaagagtcttggggtagacggcggggagggggtagggtatcccgttccggtaggggcagggatgagggaggcggggctgagccgagcatctatctggatggtaacagccaacgtagaaaatactaagttgtttacatgcattctctcatttcatattacccgtcgtgaagtctgtgaagtaggtactattgtcccaatttttacataggaggaaacggctcagagagaacttaggtcctttgaccgaggtcctgcaggtggtaagtgaaggagctgagattagaacccagatctgcccccagtggcgcctcctcgtggtctgtgggtggtggagacgactggcctagcctcttagctcctctgtgaatagaaaggcctttttcctggctcagacagcttgggaaggggattgttgctgggtaagagaagcttctcccaccacctccatctctttctctgccccttaccattgattcctttctgtcatcccctctcccccactgcaggacaagatgaagctcatcatcctggagcactattctcaggcgagcgagtgggcggctaaatacatcaggaaccgcatcatccagtttaacccagggccagagaagtacttcaccctggggctccccactggtgcgttcttggatggagagggtgccgtggataagggtggagagagtaggcaacaggggccaggtacaccg

SEQ ID NO: 34610 - DNA, 2300 bp, Homo sapien
gttccctgcagaaggggtaactcaggggaaatgggcttagtcaccagaagtcagtcactctcctcctggaaaggtctggatgcagatgctgcagacctggcccatgttatcagacgtgatcggagattggagttggagcttcattgtgaaacatctgcagtcctcaagctgagacaacatttctggctgggggcggtggctcatgcctgtaatcccagcactttaggaggccaaggcgggcagatcacctgaggtcaggagttcacgactagcctggccagcatggtgaaaccccatctctattaaaagtacaaaaattagctgggcatggtggtgggcatctgtaatcccagctacccgggaggctgaggcaggagaactgcttgaacccgggaggcggaggttgcagtgagcagagatcacaccactgtactccagcctgggcaacagagcgagactccatctcaaaaaaaaaaaaaaaaagatttctgactgaatttaaaaataaacaaaaactacaccaacaccgagccattcacagcctctcaggatttggaaaacaaaacaaaacaaaacaaaataacactgaggcaaagagcaagtcccccacactgtaaaggtatcagctccaccatctggtctcatcagggcctcaccagatgaagcctacccctagcaagctggtctggagctgcagttgggcccaagggctgggtgagcgcctggggctgtccacagtgagcagattcagcagaattgcagaacgtggccacccggctgactgaggaaggccctgtcccgtgggcataaagccaggattcctttggccttttgctgctggaggaaaactaggctgattcagaaggtctcaccactgctccctagcactgactaaagtccgggatgtcagactatgaggtcatatatcacaagtctctgtacgcctttgatccccagtttccacatcaataaaatggcggtaatcatatctgacgattgggcgggattctatgaaataatgcgcacaaagctctggcaaaaccctatgtaatggaagatgttactgatgaccagcactcaagtccttcctccagcctccgcatggaaagttcccaagtgtccctagaagtctggaacactctaatgttgactggaaagaataagatggatctctttttctgatatggaagcgtcccaaatccagtcataccagctgggaggcagtgcccgctagcggtaaaaagcatggattttggatttggacagatccccctgaattgaaggcacaagggaaaccacttgtgcctctggccaagttaatttttctctccaagcgtcagtttctccacctgttaaaaagtaacggcaaacctacctcactggagcttaataaggattaagtgaaataatgcaggtcaaatatccgagccttgatatatataagcctcatgtgtatgtgttcccatttatgtaaaataacagtgtaagcatattcaaagaaagcaattcagaatgtactcttaaactaagcaatggttatcttggtgtggggagttggggaaaccaggggcctgcctttttctctattatataatgctgcaaagtttgatctttaaaaaaggacattaaaaagcccaattgtactttaaacaacacaagttttaatacttgggtaaataaatggcatctaaacaaagaaagaaactgaaggcagagccaggcccaaccctaggagactgaggaagcgattctgctttgcctgcccccagctcaacccctgcactaaaaccccccggccccagccccaaggtccagggggttgtattcctgggggcgacccggcgcccctcaagtctccctcctcttgcacacacacacacacaaaccagactcgaatccccgcctcccaagggaaagtgttttttaaggtctgttccagggcctgccggggccagggaccgaggtgggactgagtggccggaactcctccacctgggagagtcggtccgggtagctgcggccaagctgagtcagcccggcgggcggcgcacgcggcgccgcgtgacccgcagccacgtgacccgcgcggggccgggccgccggcgcagtcgctgcagccgccgcgggaggcgtccgtgtaagtgggtagcagggctggcggggaccttcctcgcgggccggagcgcggagcgctgccccagccctacggcactcggggtcgggaccccggggagccgccctcacacattttccaggagggatcggaggggcgatggggtggtaatgggggtgggggacac

SEQ ID NO: 34611 - DNA, 2300 bp, Homo sapien
ttttggttgaggacataggaaaaggagattagaagttggagatcaattttcttttactttcaatgcaaaatatttctatgataaagcctgttatttatattatgataaatatttgtgtccacatgcagggagtatatagatattgagggagaaagtaatttaggaaagaaatagaagggtagcaacatcttttccacaaaagccacagcactgcagacatgcataaagattgcagttgttgctccaatagccttatgtggtaggccgacaaattcttttttctttttctttttttttttcagagattgtgtctcactatgttgcccaggttggtctcgaactcctggctcctgggctcacgtgatcctcgagtctcaggctctcaaagtgctgagattacagatgtgagccactgtgcccagtggacattcttttttattctttcttacacgtaaatgtagacaatctggacaaagaagtctggatttctactttccactgctgacattttaaaaaatttcaaattagatttttgcaccctttatacaagactacatggcaggacattatgtttgattcactgtacctgattacatttaaatgttgtttttctggattataaacaacaactgagggacagagtaaggaggctctaaatagacttgagagcttggaatgttgctacatttgttcgctctcccagcatgttaatatgtgagactaatacttggaaatagcgacagatatagaggagtttggatgctgagagagaactcaaagtgaagatggtaaacatctagagtttttattgattacaattttctcatatatacagaaacctcagggtgtgttctaaacacagttctcttttaaaatacataattaactaaacttcaaaattagaagctaagacaataatcatattaatataacctctacactgccaacttggaaaggcaatgaagaagaaatgggaattgcaacaagcttcagagatggaagattttgtttttctctgtaggacatgtgggtagaagcaattgcagatggctgggtgtgaaagaaacagaccttgcaagcctgctatatagctatactgtgctacatggcattgggaggtaataagatttaaaagacaaatactcttgtcttcacaaagcttataatttagttgtgcaatactgggtaagaaagctggcttaatggagttgtattccagcttcaccccttagtagctctgtgtcattgggtgagatatttaatttctttgggcataacttcctcatctgtgaaacactgataattgtatctcctatatggcagctatgccagcctcctttctgttcttccacaagacaatctctctctggaccgccctttgcacctgttcctgtggtcgggaaagcctttagcatggccaaacccttcaagttttgacttcatgtcaccgagtcagggagcttttttggaaaatattgtttccgattccgcagatgaggctgttaaaatactaaaggatggcataaacatgaggatgctattataatcatccaccctaagtaggatttgagatccaagcagttctcaaggatttagggttagcaaactttttctgtaaaatgtcagatagcaagtattatagggtttgcaggccataccaaacaaatgggtgctgctgtgttccaataaaactttatttatggacactgaaacttgaatttcatgtacttttcacagtcatggtggcagaccggatttggccccctccctgtcgctggctgacccctggtttatgagtacggcagataaaagaagggagtgaataagaaccacgattctgctgccagacacgagggatcaggtcgctgctgtgaagattgtcaacctctctggttgccaacgacctcgagaatggggttgtggtccctgcgtcagggcggttgtgctgaaggctggatgagggcacgtaggtgaagctcagtgcttggcacgaggtgctcatcagcagcatcgcccttgctttgggctggcctgttagtaattcgtttttagtggaatcgaatacaacacttgagcctcggaggctcaggtcgtcggagcaactacaccagggccggtgcacctcggggcggcggcgcaggactaggctaggccgggccgggccgggcagggcggcgcgagtcgggggtggggcggcggcgcagcgccgtcgtcgtagtccccgcctcttccccaggggccgcgtcggagcctcggcggcggcggcggtgcttacagcctgagaagagcgtctcgcccgg

SEQ ID NO: 34612 - DNA, 2300 bp, Homo sapien
gtgataaatggggtatgctgatgactctgtagtctgtcagtttttttccccttgtgagctattgccacacagcattcacagactcaaaccagaattgcttatacgcttactgcagccagttgaactaactcataagtgcaggtggcccatctttggtgggtctgtcagtagaaaacagaaaatatgtaacctcgctagacataacttctgaaagaaccaccattggatttccagaatgctttagtttaccgttggtgagaataagaactattttacaataggcaagaggacttttttttttttttttttttttttttttacagagtcttgctctgtcgcacaggctggagtgcagtggcgtgatctcggctcactgcaagctccacctcccgggttcacaccattctcctgcctcagcctcccgagtagctgggactacaggcacctgccaccacgcccggctaatttttttgtatttttagtagagacggggttttaccgtgttggccaggatggtctcgatctcctgactttgtgatccgcccgcctcggcctcccaaagtgctgggattacaggcctgagccaccatgcctggcctggattatattttttactctaaatatttatttttaaatacttttttcctagacattaaaacaaagagatgaacattggagtaaattatttcaatgttggcttcttgattatatgtaaagaaaatatatatgatacagttagagagaccaccatcacttctgtcatttctacaaaagaataacagggccatcttgtggctattaaagatggtgtgattgcctcactgtgcttctgtgacatcagtttctcctatgtcctgttttgcttcttgttgcccccttaattaagatccttggtggtggttctgctaatggttctggctaggacatcctggcacccatgcctggcaggtgtttaataaattgaggacctgggccaggcatggtggctcacgcctgtaatcccagcattttgggagactgagtcaggaggatttcaccttgaggccaggattttaagaccagcctgggcaacatagcaagacctcgtctctacaaaaaaatttttttaaattaaccaagcatggtggtttgtgcctgtagtcctagctacttgggagactgagccaggaggaccccttgagcccaggagttggagcctgcagtgaactatgatggcgtcactgcacttcagcttgggtgacagcaagacagtgtctctaaaaacaaaacaaaacagttcaggacctgttttgccaaaactgacagagccttgcattgctgaccctacattttacttagaaaacataaatcattcatcgcaccatctaccacctcctcaacagcatcatgtactctatgattggtcattagaattctaaggaaagagaaatagtaattttttttcctctattgattattgagaacttcagtaataaaaatgaccaacaggagaataatttagaagaaatagttccttggcttgcttattttctaaactgtacctttaagagaaaggctgaccacccgtgtttccccaagtcaaatcctgaatggaccaaagaggagcccttaagcgtatgttcagattgattgcttatggcataaataatttaaagaaatttaatggattgattcccttttaaagtttcatgggaggaggttttataatccttcatcattgatcattcttgctatgtaccatttgcttgtaagcaaaaaataagagtttggcccggcgtggtggctcatgcctgtaatcccagcactttgggaggccgaggcaggcagataacttgaggtcaggagttcgagaccagcatggccaccgtggtgaaaccccgtctctactaaaaatacaaaaattagctggctgtggttgctcatgcctatgatcccagctacttgggaggagaatggcttgaacccgagagacggaggttgcggtgagctgagatcgtgccactgcactccagcctgggtaacagagcaagattccatctcaaaaaaaaaaaaaaaaaaaaaaaatatatatatatatatatatatatatattaataagagtttggatacacttatgagcatttgtgcccaatattcgggtcattttgggaacttcccttttgaagagaaccagtttaatggtgttttgtcttgcagagctctgtgcagagctcccaagctggctgctcttgagctatagttagcctatagtttatttgttccacagttatttttcaagtttttttaaattagttgccaac

SEQ ID NO: 34613 - DNA, 2300 bp, Homo sapien
aacccccctccccgcggctcctccaatcctccttttctgccatagatttaagatttatttattcccatccttctgactgtttcagcaagggccatgggtgagcaccagctggaaaattactgcttcaactttcattgtttaaaatgcttaaatgacatgcgagaaacaggtttttaggtctgtgatgctgagaagggttggtagcaaagtaaagccaggttgcaaagacctagaaaataagtgctacaatttaccagctcttccatatacccggtgcaggacccttggcctcagtttctacagctgacagagagggcgatactgaacttcaacagccttaaaaggaagtcctggacaactgtacccatttttctggcgaagagttctcttggtcttagagaaaggtctcgcccctgaaaggaaggctgaggttccctaggggagagtctgctctgccctcaggagctgggtaagtacacggaggggtgagccgaatggtgagaaggcattttaggctaggactcggtgaccttgggctgcctgcctctagagtcccagccccagccctaggccagacctcagccctgggctgggagcctttcattggttcctctgacaacagccaagcacaatcctatagtggcgtaggaagaaaaagactgccacacaatctccccgtgcggccagaacagcggcaagacagaccttacaagggactcagggccaagccctggcccagactctgctcttatccacgcatcaaagccaccccccgccccggacttcccggaggctacaggctcctccgttccagggaggagcagggcctgctgcgagggctccccgccttcctggagtcaggcctaatggcgggggcttttcttttcaccggcttgagctgatcctcacccccgccccccaacgccaccatcattaacagcgaagaaaggatccccagccatttccatttcctctgcggctcaagagccccgttgttatttaatcctgaggccaccccggcagcatcctcggcgcagccggctccacccatccacctggccagttctcggccgctcccacttccccggaggggaggccggtgagaggtgggggatattggggaaaggcgcctacaacagcgaagggccgtgggccttcggtggaccgaggctcctcaggccagcgtcctgtgagggctgggaaaccgactgggacagagaaaggacacctagctagggcgacagagagcgggcagacgcccgggcactgcggacattgcactggggcggggggcggggggaacgctgggaggcgagggccaggcttcctctggctgagttgccagaatcgccccggggggtactggagccggaagaggcctgggcccagtcactgtctacacccaagaaatggggggaggggcggccagcactcacgagagattcagcctcaggaaaaagaaccagattcactcaccaatcctcaccccaccctttgatatgaatgatggacattttcctaatttttggtaaacgcagcttcaagacccctcccgcctggcgtctctggtctagagcaagagaaggcccccagtaggggtcctcccgcccccccttttgactgcctgcggggggcagagatccccagatctaggtgtgccctccaccaccctgctctcaacccgggatccggaggccgcagcgtcccccaccccccagcgacactgacggttcctgcccaggcccgcagtggcgtgaaggtggcctttacctcctctcgcaggctgggagggggtgcagcccgcgcagctggcccagctgcagcagtcgccgccgccctccattcattaaaaaaaaaaaaaaaaaggcaacaacagcctccactggaacctccacccctctttgtaaaagaacgacggctcctggtggagcttgagccagtcccagcaatcacgggttaagatcttttcccgccccccattcataaaaaaaggagcggagcgcatgcgcgctcagggtctgttgtgcccacccattcatagaatcgcgaacggcacgcgtgcgcactggcgctcccttccctcccattcataaaaaagccattttcccaggcagtggttgcaacatcgccgcggaggtagcgagctgagctgacagcgcggagctggcgctgtggagcgcagggagccttgccggttcctccgaccggcgtctgcgagtacagcggcggctaacctgccccggcttcaggatttacacagacgtggggcgatgcttgtgaccctgcagctcctcaaagta

SEQ ID NO: 34614 - DNA, 2300 bp, Homo sapien
aacccgggaggtggaggttgcagtgagcagagatcgcaccactgcacttcagcctgggcgacagaacgagactctgtctcaaaaaaaaaaaaaaagtgtcaaaagggtacacagctggtgatagtcaagctaatatctatcgaatgcttacaagttctcaagtgctgagattacagtgactctgttcagtagctactgttatgcagccccattttgcagatgaggaaactggggcactgtgagaatgagtcatttactagtgagtgtccaaccaggattcaaacccaagtttagcagtatgctgggtaaaccagctatcagaggggaaaaaaaaggagaattttaaaagccctggcatttgccaatttctatgatataaatactctcaccagggttgatttcaagatattaatggtttaataatagtaaaattcctgaatatttaataattggctttcatgagcttctgggagctgtctcctgcacaccattgtcaagtccatcccatagtcaagtccacagtttactgtcaaccacggaagatgagatttcagctcatggaacagaactggtttgggggcagcatgctgagatgctagcccaggccaatcagccatggctacactcctacctcagacccagtacagaccatggaacatggagcaaaagaaatagaaagcaaagaacacactgcctccctttcttcggcaaactttccttcaccagggagtggaaggtggggccctgccagcctaacacgctgtggcagaaataaaaaaagcctggatgttttttccaggccctacaaatatttttcttggttagataagttcagacttgagactaaaggagctgatcacttcctttctgagatccttagtttccatagtattttctttaaagaaataaggaagtatttattacaagatgaggacagggtttgagcctgcctttaaccaaaggtagggtattctggcctaatttgaacccaattaaaatacatttagactcttggcttagcttctttgtcaatacctataggacatcacctgctaattaggtagtctgataagatgttccacaagaggctcctgagaaaggactggcccttcaatcaacaagaattcacaggacactaataatgcataggtatttgctcaatgctagatacagaaagaaaaggcatagtttctgtcccagggtctcagagactaatgaaggagtcagtgaagtaaacgtagttaaattacattcatttgcccattcaacagatgtttatcaaatgcccatcaggtgtcaggcattttgctaggcactgggataccattgtgagcaagaccaattggtttgtactatcatggagctgacagtccagtcatgaaaagagacattaaataatcacaagagtgaatgtgtaattaaacactggtagtaagagccatgaagaaatgttaaatggtcctatgagaactggaggaacctgactcagttcagggaagacaggaaaggctttcatgaggaattgagagttgaactaaaatttgaagaaaaattaggagttaaccaggggagtagggtagagagaaagagaggaacatcactccagagggaacagcatgggcaaaggtcctagggtggggggaatcagaaaatggaaggcaagtttggagggagacgtgatgggaaatgaggcagagggggagtaagggctgaacctcccagagtcctgcaggccacagcaaggcttttgtttttgtcccagagcaatgggaaatcactgaagagtttaggcagggggatatagatgggaattacacccagcgctgcagtgaagtaaaggaaatgctgtctgctgttgggagagcacaggggaatgaacccacctaaactggtatatgtgaattttaagaaagagtagggaggttagggttgggggatgtgtccaaataaggcttgctcgaggaggaaatatccgaaatatccagctaaatttttgaagggtgagtgtgacttagtcagaccatggtgaaagggtggaggaaaggagggaaggagggaggaagggagggagggagaaagagaaagagaaaaagagagagagaaaaaatactgttggcagcagcacaatgtttgggctaagacctgggtgagtatgagggtgtagggggactataaaaagaggccaataagagaaaaagtcacagggttaagaaggggtcaaatgatgagagcctcacaggtcatggcaggagtctgggttttatctggaaagacaacgggaaatcaatgacccagtcaaa

SEQ ID NO: 34615 - DNA, 2300 bp, Homo sapien
gaggttgcagtgagctgaaattgcaccactgcactccagcctgggtgacagagtgaaactctgtctccaaaaaaaaaaaaaaaaaaaaaaaaaggccaggtgcggtggctcacgcctgtaatcccagcactttgggaggccgaggcaggcggatcacgaggtcaggagatcgagaccatcctggctaacacactgaaaccccatctctactacaaatacaaaaaaattagccgggtgtggtggcaggcgcctgtagtcccagctacttgggaagctgaggcaggagaatgacttgaacgcgggaggcagagcttgcaatgagccaagatcgcaccactgcgcttcagcctaggcgacaaagcaagactccgtctaaaacaaacaaacaaaaaaaacaaaaaaacaaagtaagggagagaaagacaagatagaaatgagcagtgactgtggagggaggttgggctgtggcctgagctcaggagaatatcagaggtaaaggatgacttctggaggaagtaagggtgtggaagctgagtgagattaacacagaaataaaacagaaaggatggaggagtaatggaggccgttggaggaaggtggtaaaagaacaactctgtcaatgacagcagctgtcaccctactgaatgttgattacatgccaggcattgtgataaggatttgtagggatagtctttcttacttatcccaatgcctctgtagtaggtactattattttactcattttacagatgaggaacttgaggatcagagaggttagagggcttgcttggagtcacagagctagtaactagaagagctgggattggaacccaggtcagttggatgccaaagcccaggttctcatccactccttctaccaccttccaatattgactcaggggcatttcttcccaccacgcctgctgtaggctgaggaatgcgatgtctcccagcaccccaaagagtgaggtgccgtgtgatgagctaactcggaggtgtagctcaaaagccctgctatgactgagccgtctgccagggctgtgagtgctcagagtggagacgttctcatccgccatcagggaatactcactccattgtgctggccccacctaaatgtttttttattgcctgcccttcaccatgagtaatgccactttccattttaagctgggagcttcaggagatgactgcattacaagccagggtttaaagctaagagctgcctgggggattactcacccatttcaagacgctgcccacaatgcaccctcccactcaggatgctgctggaagatcttcttccttgccaaagcctaaaagaaatctgatttcccctggaatccgactaggagtggtgccagaatatcagaaagctggcgagttaactggttctccaagtggagctaccgtgcttgtttctggtcctctcatgtgtgctaaggttttgttgcttgttcattcatttggcatttgctgagggtctactatgtgccatgcactctgcccatgatggagagactatcacaagctaaacagctttagtccttgtcctcagggagctaacagtctgggggtgtggggataaacagacaattatagtaaaatatcataacagaatatgctaaatcatatgacatgcatgctcagggagttttggaaaccaacagccagaggatttatactaaggtaggtatgaaggatgaggaggagctggcttggtttcttaattgtaagcaaccaaaattgactctagaaggagagttcagagaacctggggttgctcccagagtcactgggaaggtgtggtggccccaaatcacactgcaggaatggtccagccagaccaagatgtacgtgtgtatgtgtgtggtggggaatgagggggcgggtgtaactttcaaatacatggggtggggattcagatgccgggccgtcaaaaatgatgacaaatttccagaacagcaggtagaattagggaaggtgtggaggagaaggctgtctcaaaatgacctaagatattctgagtcagagaaaacaaaaggaacagcttaaagagagcaccaactcagtgaggcaaccaggcagtggggccggctggccagactcttgggggattccttagtgagtgagttcactgctcaaagaagggctttgccacttctgcagggaagccagccacgggccagcaggtaagcatgttttaaggctttccttttttgttttagggctcctggggacattctggaaggccacagttctcactacaagccttgagattacagagcctagctaagtcggga

SEQ ID NO: 34616 - DNA, 2300 bp, Homo sapien
gataaattagcatatgtcagtagctagggattatatttgcctaaaagctgtgtgtgtatgtgtgtgtgagtgtgtgtgtttaaacagggtttcacaactggacataatggagaaataaaataaaataatgacttgcatttgcattccctgcgttcaaggtgctcgaacacacttggacacatttgattgtcatgataatcctgtgagtttgcagggaagatatgagtaggaaagtctcattaatttccactaggagggggggaatctggagcccttgggctgaattgcccaacaatggccaaccacacagtgcaggcaggttaacacggggttaacctaaagcagggagacctggttttagtcacaatgaggactttaactaagggtaccacctgagtgagtctctgagtctgcatctctgtccttaggatttttagggtattttctaactttcaagtctatcatttcacgtagttaaaaagggttaacatgcatactacatctagcataatgattctttaatacttggaaaaccattgtccaaaatattttctttaaggattcagaaggccctttggaaacttgcagatactcaggaagattattatgttttaaagcaaattatcagtatcctttgcaggtgtagaagtggtagttcatgagggttccaattaatagggtctcaagaaatcaacattttctgtatattcaagtcccttttgggagctgctgcttatccgtgattggagttctgtgatgattgagcctctagctctttagtacaggacacgagctccttctccaaggctcatcccttcagaaggcacatggatggcttccccacacccccatgctctgtggggagtgtggggaacaaactgcaactccatcctctctacacctaagcaactacccagaggaggtagagactggagagcatatttctagttctgacaggtcgatctgtacctctctacctgaatcatcaggtgagcaggcttgtgtacatacatgggagtgcatgcgtgcacacacacacacacacacactcatgccttctgggctcaaacgcctgcataagcaggagcgactcttcaattattggaaactattaatcatgttttcatttggtttcttcaaagacagctcttgatccatatcctttcagtccaccttattccccaccttctagccaaagagttatttgtccagacagctccctcccttccttaccctgtcctggccagaagtctaaagaggatgtccatggcccattgaagaatttcccacccctgaagttgagctcacctgaggattcacctcatccaacggggacaggcttgaacagtggagagggaggacagagctgccacctctgcagcccctcgccagtcccaacctggatggcttttgcctcgattgacttcgtaaaatgccatttgtagggcttggctctggggatggcacagacagacacacacacgcacacatacacgttgccacacacagacacctacaccccatgcagggatgccagatgacagaacagaaaaggcctccctttcatccagcagccttctgactccagaggagagtctccgagccacgacctgctgtttccctggcaactcaggcctcaaaataaacaggattctgctcagacgggccagaagtccattcggctcacacatttgccccaagacaaaccacgttaaaataacacccagggtagctgctgccaccgtcttctgtctctacctccctcctggctggccaatggctctgtgttcctgggcctgctgctggctgtccagagtaggggttgcttagagctgtgtgcatccctgcgggtggtgtgggagtgggcggttgtctaaaggcaggtcccctctactgataaacaaggaccggagatagacctagaggctgacattcttggctcccccagcctacaccccccccacctcgatttcccacagagccctagggacgggtagccagctctgtggcatggtatctggaggcaggccagcaacctgatgtgcatgccacggcccgtccctctccccactcagagctgcagtagcctggaggttcagagagccgggctactctgagaagaagacaccaagtggattctgcttcccctgggacagcactgagcgagtgtggagagaggtacagccctcggcctacaagctctttaggtaagaatcagggcatctgatctgggaaacagagcaggttatagctgaggttgtgtgtgtgtgtgtgtgtgtgtgtgtgtgttttgtgtgtgt

SEQ ID NO: 34617 - DNA, 2300 bp, Homo sapien
ttaaactgtgggccaggtgcggtggctcatgcctgtaatcccagcactttgggaagccaaggtgtgtggatcacctgagatcaggagtttgagaccagcctcaaactgatgaaaccccatctctactaaaaacacaaaaattagccaggcgtggtggcaggtgcctgtaatcccagctacccaggaggctgaggcaagataatctcttgaactcaggaggcagaggttgcagtgagccaacattgcaccattgcactccagcctgggcaacagagcgagactctgtctcaaaaaaaaaaaaaaaaattaaactgtggcatcattcttcaagtgtacctattaatctgttattatttctaatattctctttgatttgcttccacagttctgtccctcaatattcaaggaaggaaaagcaaagttgttgaattaaaaaatgcctaattaatcattaaaaaagactgaattaaagtattaaaggaagttcctagtttggggactttgatatttttatacttggggcaatggcaccttattaagatttgtgaagactgacaggtatgatttcctttcatacagtaggggaagggttatgaacacagacacgtgctcaggcaaaccaggtttaggaaagagtagctgcagaaatggagaactaactgattgtctaaaaataatccttggtgtggccctcctctttggaaagccttgcagactcccatctggggtaatgcagcccagtgacctgcagagggcagtgttggacaagctgttggttcaatctctctgtctctttctcagggtagtggaaagtgcagtccagcttggatacagtgggaacccggcctgggcggcccagcccagtcctctctggtgtgtgtgtttgcacaacgaattattcacaggaaaatggctccaacgagaatggtggccagagactccatcctgtacctagaaccagggcctgggactgtaaacaggtgaaaaccttattttctctccccttcaataactggatttggaacagaaatcaaggattgaagttgtgggtctgaatcaaccctaagggttttgttttccctcttatgaagtgaaaacaacagtgaaatgtcaacgattcacatcttcaggagacggtagggcaaagtggccaagagctcagacagtcgggagttcccatcccactctaccctctccaaagcttaggtgaggagcctttccaaacctcagcttccctggatatcaaataggagcaatcttaccctcctggcagcggtgttgtgaggattaaatacaagaatgcagaagtactcctcaaatgaagggcattcagcaagaaagagcccagtaaataacagtgataatggtgaagaggacgatattgaattggcatcttgccaggcatgacattttcaaaactttccattcatgtctgaagaggaaggatcagaggtgaaaaatcaaactgtctcaatgttgtaagttttacaagcctaggagccagaggcagaaacagccagggcagaaggcagaatcaacacattgagagcctagctctgtggcgttgcccacatctgcctttcagggtcggggctcccatcctggtgttgaaaagaggatctttgcatctaaaatagtgtgtatgatgactgtgtgacacgaccaccagactcagaaatactcacctgcctcagacataaaagtaaggacttcgttcattacgttgatcctctgtgaaacctcaaaaggtagcaatcagctaattgaagaaaaatgataagttggacacattgcttggatgtactgaaagtaaggctcagagcaaaacccgctcccttctgcctcatattgggaaaggtaacagggactagtgcagagagaggcatggagagaattcggatgagatcattgtcctttcacctggcagctgtccagcccccaaatagcttttgtgtccagtccaaaaataagatcacatgagagggggagaaataaatatacagtgcttgtccttagcctttctgtgggcataccagtgtcagctgcacttgtaggggcccaagtgcctcatgacccactcggcagccttcctctccaggatccccaaggctaggaggccaacctactaacaggtgggtgggtatggtgtgtggtttcactcagttcttctcatggggtttctctgagctccattcataccagaaagggagcaggagagagaggacaagtggatccaacagccttcgctccaggggaatcagggcatcgcctccttttctgggaggacactcccttctgat

SEQ ID NO: 34618 - DNA, 2300 bp, Homo sapien
catctaaactaagacttaaaaataaagtagagttacctatgctaacagtgggagaggcattccgggaagagggaagagcaatacatgaaggagggaaaggaggggaggagaagagagtgcagcttcccagttgtgcgtcccatactaagcagcatgagatgattctggccccttcctggcttcccatagagaggcacaaggactgctgtcaaataataaaagaatgccaagcaggaatattaagtgactgttctcagaaagagaagattatgtatcaccgtttctccatgactcatcccttcccacatatcttcaattttgagcatttagtcctttttccactggaagtatgaaatggtggtccctcttcctgccaaactccccatcagctttgttttggacattggcaaaaagaaatcctgtttcctgtcttttgtttcctggctgtagcctctggttccacccccttctcggtctcacagtgtctatttccgcctcaggccccagagtttctaacaaacccgtagatcagttttctcttccatagttactagttacacagaattatcaaagaggaaaataacttttcttcatcccagggttttttttctccttggatcactttgtttagtttttttcttaggttaagttcccaggctctcctctgcaaaggcaggaagaaattagcaggtgttgggggcccagttctccccgggaacatactggagccctactggtgtcagaccagaaatgatgtaatcaagtcactggcaacagaatgaagacaaggaaaactccagggtttatatcttgggtgtggagattgagatataatatatggccaggagggggaataaggcgggcctccttgcaaagaacagtttttgagtttgcataatttttcccacttctaggctggttgaccttaagcaagttacttgaccactttaaggtttggttttttgatctgtaaaaaaggaaatcacagtacctaccgatgatgtatctatccacttgactgggctaaggcatgcccaaatagctggcagcacattatttctgggtgtgtctgttaggatatttctggaagagatcagcatttacatcagtagactgaggaaagaagattcaccctcatcaatgtgggcaggcatcgtccaatctgaatagaacgacagggcagaggaagggtgaatttgttctctgctgaaactgggacatccatcttctcctgcccttggacattaatgcttttgattctcaggcttttggactctgacactgacaccagcaagcatcttcaccctccagcttctctggccttgggcctcatactctgagttacactatgagctcctgctcccatttctcaggcctttaaactcagactgaattatagcaccagctttcctggttctccagcttgcagacatcatactgtagaacttctcatcctccgtaactgcatgagccaattctataataaatctcctaatgtatctctatatatatcctattgggtctgtttctctggagaactctaataatatactacctaatcaaattgttgcgaggattaaataaaatgatatatgtcatagtgccaaataacaagccctcaacaaatggccattatctttattactagtgggatttagatcatgtgcttcttactaaaataataaataatatttattgtttgtttcagctatgaaaagaaaacatttggaagatcactgattccttcatggagaggctggcttgggaatagatgacgtgtcaaagattgacatcaaccttgagtgcttatttgtggacttgagatacagataaaaaaaaaaaaaaaaaaacctccctagagtgagggctacttgggatacatgctatatcccaaggagttctcagtttgaggtcagccccagctctacaactcaccaggagagtgcgcgaggatgagggagagacagcctgctctggttctcttcaaggtgacaatgacacctgttgacagatgagaattccagccaggaatacagatttaggaatcatgtttctcactctcatgatgacatagaagagatgcgtctgaatctttctgccagtgtgttaaagttattctgatattgactgtagttctgagctttgtctctatcccaccaaaccactaacttctggaaattacttgtagaccaagatgggaggactccgtgtgtggctccgtgagtatgtctgttacacatatcaactgcatttatatatattctatatcttgttaggaaaggctaggctatgctgcagaa

SEQ ID NO: 34619 - DNA, 2300 bp, Homo sapien
tgcaggcctctcacctcacaaggctaggtcataaaaggtgatgcacctttctccttgtgagctgtatatgttcacactggagccttaaggctgccatactgggaggaagcctaaactgggccacagagaaaggccatatggagaagccctgagtctacctgaaaagtgggatgcccagctaaccatccactcctccagctcctgtcaccatccaactgcaatcacatgagagacctcaagcctttggcttccctaaatttctaacccacagagattgtgagagaaaataaaatgattgctgttgtcttaaaccattaacttttggtatcatttattctgtattaatagataaccagaacacctacctttaggtgctcaagataaagcattaaacagatttactttcatagggtttccattctagatctttctcatctttggcaagtgaagaacaattgtttttgggttgtaattatctatcagatagctgtctggacctgctatcaagtctaaatttgtagatacacctatcaaagagatcacattcacttatttatacatttacttatttattttacaattttttgtagagatggggggggtctcgctgtgttgcccaagatggtcttgaactcttgaccccaagcaatcctctcacctggcctccaaaagttatggattacaggtgtgagccaccatgctccatttatgaatttaatacattaattgctttcttaatatagatgggacacctctgacccctcctgagtgaaaaatccatgttcccaagcacccaggccttctatcctatcacaaggcatggttatcgcttgtttgcttccatctcacctaataccaccagcagctaaattcattctgttattcatctttgtattcttaccatctaggctagtgcctgcacatagcagacctatttaaaaaacaaaccaacccaaacaaacatgaagcccccacgtagctgaaggagggctgctggttcctagacatagagataatttattcaaggacagtccctatcctccaggagttaacaattcagcactagacaccctgtgggacccagcctgacaagtgcaacgagtgagatgccagaattgagtcctgcggtcgaacagagggactacagggcaacgcactgggcgtgggaggtggagatggctctgggaaaggatccattcatttattctacatttatcaatcaccgtagcacacacagcacatagtaagtgctcaatatctgttattaaatgccagccactgtgctaggtgccaggatgcaacagcggacaagaaaattgcaggggcacttgccctcgtggggcttaccgtgtagcgaaggatgacaggcagtagactgtcatcttattatgtaaaattgtgctagatgcagagcaggaaaataacaggcggctgaaattctagtaatgatgtgagctccttcggctgaggggaaccgtgggcgggttctgagcaggagtggccgtgagggggacggaccgtagggggcgggaagactgcaggcaagagctggtaattttaagatgcaaataacatttttctgcctgactggaagaggagcgtttggtcgctcgggattctcccggagcagggggctgtattttgagtgtaaaatcggttgccccgcagtgcagggcaggcggtggtgaactgcagccctagtccccaggtttttcatgcttggcacatcgaggctcttcggcccccaggaccagcagactcgccatgcgtggctcggattcgggctggagcaggcgggcaaggtagcgggggcgggtgcacagcaacgctcacccctaggtttcggggtctgcaacgctgggagggcaagaggaggcggagtttgcgctgcggacctaggcgttggcgagggccacgcccccagccgcagaccctgcctccaggcccctttgattggatcaagaccgcggaagggccgggcgtcctcgggcggcctgagggtcgggcaggggagggtgcgctgattggcccggcggggattaagtcatcgctagcaggttcgagcggcccagacaccggcggggcggccgaggctgctgtgagagggcgctcgaggctgccgagagctagctagcgaaggaggcggggaggcggcgtctgcactcgctcgcccgctcgctcgcttcccggcgccgctgcgggtccgcgctgcgtttcctgctcgcgatccgctccgttgcccgcgcccggaacagcagcacctcggccgggtccgagctcggttcgggagtcttgcgcgc

SEQ ID NO: 34620 - DNA, 2300 bp, Homo sapien
actcacctcaggcttgatagaggaatttttcagtacagctaaagtggacacctgtccttttacttgtttggaatccattccccagactttgggacagcatctcaagcttgttttggagaacctcccttctccacttgcattctatggggtgatggtgacagggtgatcaaccccaaccccttgcccccaccccaatcccacagctcctgggttcaagttccagctccaacatagatcagatatgtaaccaaccctgggttagtcataaagtctcagttatctcatctgacggaggctgtcagcccgtgggttaggcagggaggatccagtgagaaacactgtataggcactctgcacatcacaagactcagttctaggtatagctgggctattctttcctcatatatgaatcctccagtaagaggaaccaggaaaggtaagcatgaataactgtttggagctcggagaagttaaaggactgacctaagagtgcaaggccactaaggagaggacctgtgacttaagtcctgtgaactgagatccttgtagtatgtgggaacaccataccacttcaccccattaaggtaaaccctctatgttacttgagagattgaaaacaacactaaaaagagaactctctacctaaaaaccattgcttcttgccaatttcaatccagtaagattggtggtatcttatgtagattttcaccttggatatggagcagcccaaagatttatttcaagagctttccctctgatgcacacaggaatctaacacacacattccaataagaggagagagaaaagagaagaggctggcactggtgctgggtgcatgccaagcgtcgtggcaccctcctcatataaccctgctgtttcatgtgcaggcagtgcaagacacagcaaggagccaagcagagtcaataatatttactttgcagaaacatctgttgctagaaaagcagaatgctggccagagtggagggaagtcataactgccggcatctggggaggccaagtatctgctttccagagtaggtagggctgtgcttctctgagtgaggggaccagatggctaagaaatatggaagcagctagaagtttgggccttgagagactgctcccagagccacctgctcactcagggactagaggaagtgcccttcttttcttggagatgccagcagatattaatctgcaccggatttaagagaatttaacccaaatagatccaactttcactaacacagaaggtttaccataattttttaaaaattagaatctaccttaattttatacaagttgtaccagtaataccacaagtcaagccatttcctttttctccttgggtaaaacttaacatacatgtgcacacacaaacatggactcaggtaaccttactactgtattttcagtgcatctattgcctttgtgacctccaaagttaccaaaattgtgtattaactacccttgaaatgttttgctgctcagtcacatctttccctttggacttagaaagtgattacagttccgggaggccaaggcgggtggatcatgaggtcaggagttcgagaccagtctggccaacatagtgaaacctcatctctactaaaaatacaaaaaaaaataaaataaaatagccgggtgtactggtgtgcacctgtaatcccagctactcagggaggctgaggcaggagaatcgcgtgaacccgggaggctgaggctgcagtgagccgaggttgcaccattgcactccagcctaggcgacagtgtgagacgctgtctcaaaaaaaaaaaaaaaagaaaaaagaaaaagaaaaagaaaagaaaagaaagtgattacagctcagaaaggccatcattgaggttagaacttgcaacaggattggcctcatggctgcctaaagttcaagaataccaaagtccccgggccttgttaatctcttcctttcctggacgccagttactctctgtgcctcatcaccttgtatttggaataattctggaactagtcatgaatggcttcatgtcacaatgcacaaagagtgcctcggacagggctggacacagtgtccctccaaacctgttgtacgatgtgagcgggcaaggaaacacaagctggcttacaggtggaatacctgagagtctccagagaggacccatgacagacagctgagacatggatggacacgagccccagagagacttcaggtttagcccacacccccattcctaggtcaaactcaacacactcaaaacaaaactctctctactcaaacaccctctgccaccctctcccc

SEQ ID NO: 34621 - DNA, 2300 bp, Homo sapien
caagtgccagtaagacagagtgaactctggttgtatagagaagtcagatatatgtaaatcttaatagagccattcagtgtcaagcggttagaaggtgtatgtggcatcagtttaacttctgatggtgtggtgacctcccagcctccgatacccaccctaacctaacctagcacctagcacaatgcttggcttgttattgtcatcactaacggatggatggaatcagtggatggttttctaagaacataaatccaaattagaatttaagaggccgggtgcggtggctcacgcctgtaatcccagcactttgggaggccgaggcaggtggatcacgaggtcaggagatcgagaccatcctggctaacatgttgaaaccccatctctactaaaaatacatcagtattctattgatgtgccaatctaggcacttagatgatagaataataaggtaagataggtgggaaacactaattagaaccagaagcatttagttgggtaaatagaaggaaggaaagaacccagtttgttagagaacagaggatctgcaaagctggggaagtagcattctcttgggtatgaaaataggaaagggtggtgcacggatatgaatgatggcagctgggaggtgggtaaactgataaaatcagtgatgagcaagagtttgctagaagttcctgaagcttctggagaggtggtccttgctactattaaaggcattgttcaaagaagggccagaaaacccttggatcaggcttgtactcggaattgtttttagatgagtttccttgctcataggtaacagatccggagcagctttacttcttgcttctcctcctcttcctcttcctcctcctcctattcctccaccaccattaccaccaccatcatcatcccttttattattagctcatttaatcctcataacaactctatgaggtaggtcgtatttccctcagtttacagttttggaaactgagacacagagagattaagtattttacctaaattcacacagctaataaacagagataaaatttgaacccagagcatctggtatgagagccagtgctcttctccactgttacactgcacagttgcgcctgggtaagcaatgattatttccttattaaaaataaagacctatagcttcttagcctgtcctttctcaaaaaattatattaggatctctggattgtttttgtatgatatatttcaaaaaatttttaacatacaaatattagatatgctcactctcaaaatgcaaataatatggaagtagtatgagaataattaccctcattcctcccttctagggatgaccacaggtaatttttagtgactatcttttcagtcctctctggttgtgtatatatttacatgcataggattgcacttcttttgttattttatacatatatctttacatacatatgtattgtgcatatggatgtacatgtgttgatggaattgtgcttcacatgttcttttgctttttgtagtctttgtatcattgtcactgaggtctggccatgttaatgagtttaggtgtatatcactggagctctttgatttgccgttgtgtatcccttccctgacaaactgctggcacataatagatgctcaacaaatatttgtttaatgaattgtgttgattccattatcttatgccacaatgtttaagtagtcattttttattttactcatttatttacttattttcagacagggtcttactatgtcacccagactggagcgcagtggcgcactcatggctcattgtagccttgacctcccaggctcaagtgatcctcctgcctcagcctcccaattagctaggaccacaggtgtgcaccaccatactcagctctttttattattattattattatttatagagaagggggcttgccatgtggcccaggcttgtcttgaactcctgtgctcaagcaatctgcccacctcagcctaccaaagtgctgggataacaggtatgagccaccatgcctgaccaagtagtcattttttaattgaacgtttagtttgtttcctcttctccactagtataaaaaatgccatttcctcatttcaggaaggctggccattttgtgatgagacctttatagtttggcaggctcttggcaggatgaagatgaagctgttttctctccatctggccaggtatttgctggctgccgttgatcagtcccaatggagacagtgactcttgggaaattatttcctcctacattagaggccagatttaaacaaataaagcttgattttatgttggcctgttcttt

SEQ ID NO: 34622 - DNA, 2300 bp, Homo sapien
acatgcctgtaatcccagctacttgggaggctgaggcaggagaatcgcttgaacccaggaggtggaggttgcagtgagccaagactgcgccactgcactccagcctggtgacagagtgagactctgtctgaaaaaaaaaaagaaaaaaaaattatgctctttaggtttttccttgtttgtttcatgtgacaggaaagacttcattttattgctcagtgtcacctgcaaacatcatacaggtactgtgcctttgagagccacatgtttctgagctggggaccctttcctctctcataacccagtatgtgtcaggggaacacacggagagcagtagataccagctggatttgtgcccctacctggtgatgataggctaaatcctgaagccattcatgagtatttggcctctttctatttggatgaaagtggtttctttcccaggaaatagaaaatgtcttctgcccacctctgacttattttttttccagctgaaaggctgttggtcctgcaggaggaacagctttcttcattgatgtcccagaattattcttggagactcttcagaaagatgcagtctggtggctgcctccctttacctggtgcatcatttagatctctttgcattgtaaaaagacggaaatcctgacctcacctggcttaaggggaaaaaggaatttactggctcatatgataagaaggagaggcaaatacaagggttcaggatccaccatttctgcttatcttgtctctgggttgtcggactttcaggctctgtgtggtggcacctggcagttacataacctcctagtgcaagcccagcaaacagcaaatatctgttcgtgagtcctggagagttactctgattgggcaggcttaggtcttgggccatccctcatccaggcactgagtccagagagttgatatacttttggccagtctgtcctgaatctcattctccacccctggaaaaagtaagaaaagggttgctctccaactcaaaatgaggtgctatgcagaaaaaaaaaggactgggagctggtggcaaagaactagtctttagccagtatgagggagctggattctccctcctgtgcactgaaaaagactctgtgaccctcccaccagtatgtgtatgacctggcctgcctcaccagggacaggatggggatctgtgaagcaattacactccccaacctctgcctcttcttctcacctccttgtgtgctactcaggaagattataagaattatctctcctgttcttttatcatacatgcttgtttaaaatatactgatttgtttaaaagtccatgcaagaagagacaaaagaaattgtcagagctgatatggtggttctcattgcacatttgagcttaaagcaatttttttaaaaatacaaaagtaatggaataaaatcataccacagtccaccactttaacccaaccactaatttagagtatttcctttcagccttgttcatataaaaagttcatagaaaaagtttctcatagacatatcttgtttttttttatttgacattatataatgcaggcattttccatgttgctttacagtcatcgttgtcatataaatcggcgaggtaatattccatcaggtagacatacggtaattcacttaatcattcttctatcgttggacatttaggttgtctcctttttttgttgttttttctgcttttgcaaagaagagtgtgtgctgaacgtttctggggtctgtaacttttctcgtgccttatcttattttctgaggatagactgtgagaaatgagattactggttcaaagggtataaacgtttttaagactttgatacatattaccaaattgcttctcaaaactcttgcatttgtctctcctgctgccagcaggataggagaggatcagtttcactgcattcttgccagcaagagatattggaatttttagacattttcctaatttaataggtaaaaaaaatacttgtcatttttgttttactttgcatttctctagttactagcaagattggatgcctttatgtgtgcttatttattagttccattttatgctgtgctttatgtattgtcttttcttcattttagaccccaagactgcttctgagacagaaacagatatctgtgctgaatgggagataaagaccatcactagtgctctgaagacctacctaaggtagggactttccatttgcaaggcagagtgccagctagttatcatgcaatcaggaagaaagcagttttattttcagactccggagagctgtcgggtgggtgtttgagatgtg

SEQ ID NO: 34623 - DNA, 2300 bp, Homo sapien
agcaaacacgcattgaatgcttagtgtttaagacactattccagggtacagtggcccacacctgtaatctcagcacttcagaaagatcacttgagcccaggaatttaagaccagcctggacaacatgacataccatctctattaaaaaaaaaaagttagctgagtgtggtggtatgcgcctgtggtcccatctacttgggaggctgaggggaggattgtttgagttcaaaaggtcaaggctgccatgagctgtgattgcaccactgcactccagcctgggtgacacagtaagacctcatcttaaaaagaaaaagaaaaagacactattcgaggcactgtgaaaaagactaaaatatactctccttgctgctgctcagatgagggagatcagatctacgtatgtgggggagcattgctgccaatgcaagatacattttaagtggtaagtgagcagttgggtcatttactcaaaaatatttatggttgaatgaaggatcttggcaattgtaggcagggtttccaataatttccctagttcgttttctagatctgccttgaagtgtataatttcctcatctgccttggtcttattgctgtgagttgggtagaaggagttctaggtttgtttgtttgtttgtttgtttgtttgtttttttaagatggagtcttgctctgttgcccaggctcgagtgcaatggtgcgatcttggctcactgcaacctttgcctcctgggttcaagcgactcttctgcctcagcctcccaagtagctgggattacaggggtgcaccaccacacccagctaatttttgtattttcagtagagacggggtttcaccatgttggccaggctggtctcgaactcctgacctctggtgatccatccacctcggtctcccaaagtgctgggattacaggcatgagccaccatgcctggccagagttctagttttatgatccatcttttttctcttgttctccaggaggcttcctacctctcagaccctaccaagctatgtccccaattttttgtttttttcccactgagacctctatggctctaatgttttagatttcaagaaaacttaaaatttggactataagaatgacatagaaaggaaaaaatatcacaaagaatgaaaagctgcaatttgatcatttgcatgtgttgcatttttgaagtcctccccaccccattgcaacaagagactttatctttaggttgtatttgttcttttttttttttttctcccaaacatctagcagtttactaatatttgtagtgggcaaaaatttgtaacaatttcttatataatgcagtatatcaaatatcctattaaaataaaatttagttcatatcttgaaggattattttctgaccttatatggaaaaggaaagttttgagaatgagtagttctttaaaccctgaatcaatgtaaccaggaaaaaataagtgaagagagactgtgccttgccatgggtcaggggaagttttactatcaaattttcatgcaatacccaaatctctgtataggtatgagggctctcttttctgtttctttgtctataaggaaattctaaattaaatttcctcttccttacaagccagttattaagttattaagttctgcctttaatttcagcttgaatcaattaggttagatgcccacaagcaagtgccctggttcatcatttcaaagaatgagactctttttgctgtatttttctttgcatccatggctgatttttctacccttctactagcagctcttcttccgcctccaggagtttattcttttcactagtatgccaactccagtggcattacaaagggagggttaataaaacctgtgttgagttggtattttgactatagctagctctgaattggagcatagagagcgctgttagccataacctgagtgttcctgatgaaactcagagccagctttctgccttagtcatcatttttggttcactttgtgtaagcaagttcccagtgtaacccactggccttggcacacctcaggaagaattaggtctctatgtacaaaaatgttcgacagaaacctaagaccctcatctagaatctgaatatataatcagtgtgtcgggcctcaaaagagaagagcaatgtgatttcatgtagaaccctatttgtatgctgccacagccctatgctttgctttacttcggattcatatagaaatccaagaatttgtagtaagtaagagaaagaaaacaccatctctgctcagctgagctggcccgtgtgccgaactaggaagatggctcttttc

SEQ ID NO: 34624 - DNA, 2300 bp, Homo sapien
tctgccttctgggtccagaagggggttttgttaacatggagttgctcagcgcccttcataaaaattcttctggctgagggttctacgttggcatacggttggttccctcttcttttccgaggtggcgagtatctcttcctttgccaagatggcggctccagaatcctctggaggcggcccccgtagatcgtctccggacaagaggcttgctgaaagcctacttctttcctttcacatcagacaatgcacagggaaccgtttacccttgagaaccaaggaaggacggcttaggctacccgcgatcgcgaacctttgccaagatggtggccgcggggacgggctggcgacactgtaccctaccaagatggcggcgggcggcttccgggacgcgcttccccaatcgtcttcaagatgtcagagcagggggagccgccgtcagtctgagcgcggcgggaggtgagagagtggctgtggccgagcgcccgagcaggattaggtggagctgcggcagcccccgcccgtgtcaggagctggcaagcgatgtcacctgtgggggcgcaaaagttacctccccaaaccctaaacccacacagcacaacctttcccagagtcacaaaaatcataatctgtgccgcacaaggtaggaggctcggtcccggcatcgtccaagccttcccgacgcggcgagctggggaagggagctggggcgggggcttcccgcacgggcacccctcgccccacggccctctcctttctcaggacggaccacgagttcccttccccttggactgagggggaagctcctaacaggaacatctgtagggagttgaacgctggcattttaaagctgcctgtattttgttttatttgtaggggcaggggtcctatgaacgtgatagggtgagcaacgcacagagtcgagggcagcaaatgtcaagattcgggggtggggcctgcaccgggaacttggacgcgggccctggccggggtggaagaagaggtcaggagtttcggaaggggggctatatttcgccagcaacttactatttcgcctgcaacttgcttttaagcctgccgccccctgctttccttaatcataataataaaaaaaaagtgcaaagaaatccagctcgctggaggttttgcatttggcgtgcaacttccttcgagtgtgagcacattgggcgggaggggtgggggttgaacttggcaggcggcgcctccttctgccgccgccgccgcctcgcagactcggggaagagggtgggggacggtcggggcgcgggggagggtgggttctgctttgcaacttctctcccagtgcgagagcgcggcggcggcagctgaagacccggccgcccagatgatgcggtggtgggggacctgccggcacgcgactccccccgggcccaaagtacgtatgcgccgacccccgctatcccgtcccttccctgaagcctccccagagggcgtgtcaggccgcccggccccgagcgcggccgagacgctgcggcaccgtttccgtgcaaccccgtagcccctttcgaagtgacacacttcacgcaactcggcccggcggcggcggcgcgggccactcacgcagctcagccgcgggaggcgccccggctcttgtggcccgcccgctgtcacccgcaggggcactggcggcgcttgccgccaaggggcagagcgagctcccgagtgggtctggagccgcggagctgggcgggggcgggaaggaggtagcgagaaaagaaactggagaaactcggtggccctcttaacgccgccccagagagaccaggtcggcccccgccgctgccgccgccaccctttttcctggggagttgggggcggggggcgaagcgcggcgcaccgggcggggcggccacgccaggggacgcgggcgtgcaggcgccgtcggggccggggtggcggggcccgcgcggagggcgtgggggcagggaccgcgggcgcccctgcagttgccaagcgtcaccaacaggttgcatcgttccccgcggccgccgcgcggcccctcgggcggggagcggccgggggtggagtgggagcgcgtgtgtgcgagtgtgtgcgcgccgtggcgccgcctccacccgctccccgctcggtcccgctcgctcgcccaggccgggctgccctttcgcgtgtccgcgctctcttccctccgccgccgcctcctccattttgcgagctcgtgtctgtgacgggagcccgagtcaccgcctgcccgtcggggacggattctgtgggtggaaggagacgccgcagccggagcggcc

SEQ ID NO: 34625 - DNA, 2300 bp, Homo sapien
tttaattgttgtcagcaaaagtgggcagcagaagagtggggatcaataaatgttagccacaaatcataactatttgtattactctgaaaaagaggggttaacttatagttcatgcatgcttccaaatgaatgtgaaagactaaagaatgagaatttttttgctatcaaattaaaaaattaacaggcacatttagattgctgaagagagaaattaggataagtttttttttttttttgctcaattaaaaacgttttcaatggcatatttaaaactacgtattcttccccattaagatctgcagagaaaaaaaaatgaagggagaataattgggaactcttgtgaaatcataaattatttaagcagagtacctaccactaaggatttgagcatgtatgagcgatgaggtggattcttagagcagagattcagcagtgagacaggctaatggcatggggagatgtgttctattagacaactgtattgtccccttaattatatacatatatatgtatataatatatatgtgtatacatatgtatacatacatgtatatataaatagaattcttaatcattttaagcagtgtacaaggataattattagcatgggctatttaactcacttttaaaacgtgtaaaacattattgtagggttgggtcttgatttgtttcccatgaaactgttggtagtttaggggccaaattaacgaaagacatctcattctagtgcttgaggctcagaaattggaaaaacgggcaactaggtcaagcagtgttctcatagcctcacagatgagcatccaaagcaagggcctccttctagttgacttgtgccaagggacaggagaagcggagtctgccttctgggtccagaagggggttttgttaacatggagttgctcagcgcccttcataaaaattcttctggctgagggttctacgttggcatacggttggttccctcttcttttccgaggtggcgagtatctcttcctttgccaagatggcggctccagaatcctctggaggcggcccccgtagatcgtctccggacaagaggcttgctgaaagcctacttctttcctttcacatcagacaatgcacagggaaccgtttacccttgagaaccaaggaaggacggcttaggctacccgcgatcgcgaacctttgccaagatggtggccgcggggacgggctggcgacactgtaccctaccaagatggcggcgggcggcttccgggacgcgcttccccaatcgtcttcaagatgtcagagcagggggagccgccgtcagtctgagcgcggcgggaggtgagagagtggctgtggccgagcgcccgagcaggattaggtggagctgcggcagcccccgcccgtgtcaggagctggcaagcgatgtcacctgtgggggcgcaaaagttacctccccaaaccctaaacccacacagcacaacctttcccagagtcacaaaaatcataatctgtgccgcacaaggtaggaggctcggtcccggcatcgtccaagccttcccgacgcggcgagctggggaagggagctggggcgggggcttcccgcacgggcacccctcgccccacggccctctcctttctcaggacggaccacgagttcccttccccttggactgagggggaagctcctaacaggaacatctgtagggagttgaacgctggcattttaaagctgcctgtattttgttttatttgtaggggcaggggtcctatgaacgtgatagggtgagcaacgcacagagtcgagggcagcaaatgtcaagattcgggggtggggcctgcaccgggaacttggacgcgggccctggccggggtggaagaagaggtcaggagtttcggaaggggggctatatttcgccagcaacttactatttcgcctgcaacttgcttttaagcctgccgccccctgctttccttaatcataataataaaaaaaaagtgcaaagaaatccagctcgctggaggttttgcatttggcgtgcaacttccttcgagtgtgagcacattgggcgggaggggtgggggttgaacttggcaggcggcgcctccttctgccgccgccgccgcctcgcagactcggggaagagggtgggggacggtcggggcgcgggggagggtgggttctgctttgcaacttctctcccagtgcgagagcgcggcggcggcagctgaagacccggccgcccagatgatgcggtggtgggggacctgccggcacgcgactccccccgggcccaaagtacgtatgcgccgacccccgctatcccgtc

SEQ ID NO: 34626 - DNA, 2300 bp, Homo sapien
gaataggagaaggctgcaggaaaaacacagttgtttgttatgagtagggaccagaagttcagttttgaataactttgagatgcctactaaatatccacctggacatgatgagtaggctgttgcgtatgtgagtctggagttcggaagagacatccaagttgctgacataaatttcggtcttcagtgtagaaatttgatttaaagccattgggttaaacaaaccaaccaaggtaagagtatttgcaggtaagagaagagacccaaggacttagccctaaggcactccagcattatgatgtaggggagatgaggaaccagcaaaggaggctgaatggaaacagagaaggaatggcgagttctgtgcaagagacaggaagaaagagaatgcaaaatggtcaaacaataaataattaagttgaattagatggtaaagaaataaatgcaaggaaatgcaaggccatagtcactgggcagacagagtaaaagaacatgatgaatcaggtgagattaatcacccctcctggaactatcagaaaaagatactcactgacagtgaggcagtcatgttagtccccaagttgatgactaatggaaactaaggtcacagtgcacattaatttcttttgaagcaaaggataaaaacaaacaaaatataaaagattaagatgtaaacgttagtgtacactaattcagagaagaattaaatgatttttaaaacttcaagaaggaggacagcattctaaatgcattgttctaaaacgatagtaagatgggataaatagtcacactagggtgatgattttggatgtgttaaatttgtcactttgagaccagatatgctccatttcacttcatgccagcttttaagaacatatatcatagaaaaagagaaaagaaacagttgaatcaaagtgaagagaaatattgtgaagcaaataaatccagggaaaaattaataaaaccctattcccaccctaaaaaaaagaaactaaaagaagtgcaaatataaagttcaataggagtcattagagattgtaaattgggctctgagcttcctaccaacaaaagcacaaaggaaaatatgatcactggtattaaaaaaaaacacctatggtttccaaaagattaaaacaaaccagcagttttatagaagctaacactaaaatctaaaggaactacgttctatggagccacttaatatggataaacactttgacaatattctttcaacaactacagtaacaagtttcttagagtccatttctttttacatccataatgaattgtaaatcttttctacttcttaagtaaaacatcaccacttaattctggtaacttttccatattaactttttagaacaattgcaaacgtaccataaatgattgttgtcacagtggtaactatttgaccctgactgttattttgtatatagcagcttttaaaataaaaaggcaacaagtttctaggcgtaatttccacagatcttttatgtaaaacaatgacatcctttgcaacttctgccatttaatctatctcaagcaagctctctggaaacaaatctatttgaaagattctattgtaattagaaatcagggtaactgaatgcactagatgaaaaccttctgactggggccaatgaagtcaataaagtcaaaactgctgtgaatgctcaactgtctgcagatcagatgtcttgggatggaatccgttctcgaggccaccatcattaatatcaatttggccatgtaatacaagcctcacttgttccactgttacaaatgtgcttaaaactgagctcatttacaatccaaatacatatgtaggatggtaaccaaggcatcacactaatttaggtattatgttttagggggaacaaaaggtatgttaatattttattcatctccaaattaactataaattgtgcattcttgcatagatcctccttgggaatgagaaattaggaaaatccagttgttaaaatgaatgcctaaaatcaaaataaaatttgtttttctggcacctgcttgatgacacagactaataaccaatgacaaaattgcccttgaacccaagttttcatttcctcctattgtgtggtcaggttatgtaagggtttgctttcaccccattcaaaaggtacctcttcctcttctcttgctccctctcgccctcattcttgtgcctatgcagacatttgagtagaggcgaatcactttcacttctgctggggaaattgcaacacgcttctttaaatggcagagagaaggagaaaacttagatcttctgataccaaatcact

SEQ ID NO: 34627 - DNA, 2300 bp, Homo sapien
cacaatttttaacattttgataactgtattcaatataattggctctttataattctatatattttcttttatacttataaaaatgatgattctgagacagagtccaggggccttaccagagtgcataagcttcccaaagcacagaaagttagacctccacacctccacaaatagatctaatttcagggcaagaaaagcagtgatgatgctttatgaccatatgttctttttgacaaaaaagcagtctttaacagttttggctaattgcaaaaagccaatgcattctcaaaggaaaaagatatgccaacactgaagatacttttgagaaaattccatcatcaaagaagatggtttttgttttttacagacccagtctttctctgtcatccaggttggggtgcattattggagtgatcatggcttactgcagcctcaaactcctgggctcaattgatcctctggcctcagcctcctgagtaactgaggctacatgtatgcaccaccgtgcctggctaattttttattttttatttattatttttttttgtgtggggatgaggtctatgttgaccaggctggtttcaaactcctgggctcaagcgatcctgctgccttggcctcccaaagtgctgggaattacaggtgtgagccacagtgcctggctaagatggagttttatatacagaattatcaggccttctttcatatctcatcctcaatatgcaaataactaattcatttagcaaatatttattgaacgtccattatgtatgaggcactattgtaagtattggaataagtgcagtgaacaggtcagatatggtaactgcctggatggagtttatgttataatggaagcaaatagacacaagaaatatgatcgcatcaggtatttataagtgttatggtgaaaataatgcagagtaatctaatctagggagtgagagggtgactagggtcacccatgtggtggctaggtgcctgggtctggcgttgcacttcttccattcaaatcctggctccatgcacctctggctctatggccttgtccagttgtgcactctctaaatcccagttttgttacctgtaaaatggacatattaacattacctactttaaagaggtgttttaaagaaaatggctactcctaacatctccccaagaaccaagcacagaattttggaagttttaatatattttcttaaagaagtctctttctcagcattgtaagacaattaactagattcaagtctcagagttgttaagttattttatcttaaggcatccaacggcacagattgacattaaagtgaaagaagaactagcttcatcattgccattgttctttaccatagcccatgggaacacaggacccggctgactgagaaaagtgaatgaggggaattatatcagaaatgacagagaaggatgggcaggatttctggcaggcacaggtatttctaagtaagaaatggtgtggttaggagagaatactctcaagaaggggagagatggattctgcggcaaagggaggttccttcattcagtgtttatggagagaataaaggcgctggcccctccagtgaggatatggagtaaacgagacaatcaagtccatcactcctggagcctgcattctagtgtggaagacagacagcaaatgatacatcaacattaagaaattcatgagtaaataaagataatttcaggcaataataattactctgaagaacataaacagggacctatgatagaaaaggggtgtaaaggagtttggaggatttaagctgagtgagcaatctcatctctattttgataaggtcactgtggattctgtgtggataacacattggatgtggataagaacaggagcagagagacctccaatagcaggaggctgctctaggggtccttgcaagggatgctggcagcttggacccgagtggtgggatgcagatggaagaggcaggtggacagatgagacagctgaagcaggaaaagcaggcacaaaggctaacacaacacaatgtaacagaacgggagtttagaacggaaggaacactccagagtcattctggtccaattctgcagatgaggaaaccacatcccaggaggccgaggcggcttgccccgcatctcagaagccgggcaggccctgagccttctgacctcacatcctctgccacaccacagtggagaaaccagaactggaggagcagccagaatgcagagaagaaaaaagaggtgagggagcgaggaggagggagaacagagagagagggaaagaggcagcgaagggg

SEQ ID NO: 34628 - DNA, 2300 bp, Homo sapien
attacagagccacagtgaatttgaattttgttttgttttttaaattcttgggcactctaatccaaacacattcctgtattgcatgtttctcacaaactgacagatacataaccttcccctgccctcatcgtggaacagtctttatgaggtttcaaattcgggatccatgatgaacatcatttaacacatgaattgtctgaagttatatatgcacatttatttgggtgtttgagtgaatgcatgtatttatgggaaagaggcccagttgtaataggattctcaaagagatccagaaccatctaaaaaagtttaagcaatcctagtataggaagctcctttatttgacaggaagctgataagattatctctagggtcctaagaaactaaggagatgatgttttaggtgagattgctagaaagccttcagttcatgtatttttgtcacaaacaccaggtactataaaaagatcatttaaaaaaaaatgttcagaggctaacggctttgagtcaacctcctcagtatgcaacttataacacgtgtggcactgaccataagggtttgagaaggaggagtaataaaaatgattatcaactgctgtatgaaaatcgcctgatgattcgtaataaggagcttacatcattaaataatgtcactaagcactttcaattagcactgataaaagtctcagagttggactgatttaactactaacaaaatactttaatttttcactggtcctatgaactaacagcctatctcctaggtacctgaagctcccatcatcttctaaatacagaaatactgttactagaaaacagttcttcaaacaagctacttttccattcatggtacacctgaagagtttgcagaagacactcaactcttaaatagaacaataccttcgaagccaagccagtgtcacatatctctctagaggaagaagattatgcatgaaagatcatactcctgataaaggacatgttcacatattgttttaggcagaaccaaatattctaaatatgtgttttcactgcaatgtagactaaattaattgccaaagatgaaaagttacttgctatagggtcctccacttcctccataatcataggactgctgtgactgatcatcgatgctgtaacttgtctggtagaaatccgtgtttaagttttcaaagcctgacattgcaaataatctgtaataaaagagaaatggcaaatattccttatgcccaaggttctactgaattcgttcctggcagtctgcttaagcaaatagaaacacaacaaatattttttcagtaattcggagaggggatgggggcggaaagtacgcagcatttgaacgacggtagcggagagagagtaagaaaatgtatattcttttaagttgcggcccagtaagacaactccaccttaaagagctgatatgccttccattaggggcgaggtcgtgggagttgtggttccataagcggtctaaaatatcaataacaacaaagatgatttttcaccttaggactgggctttacagctgacaaggcgactgcttccttgcaaaataaggcctgcggcctgccaggaaaaagtgcagaatctggaaggtcgcgcctgaggtgcaggggaccgcgtcagggcaagggcttgaatgagagcgagggtctgagcgaaaggaccagggcgcggcgccgaaagacggcaacaagcccatttgcacgggtgtggagagaagctgaacactgtgccacgggcctgggtcactcaccaaactctgaggctgcgctggcggcaaaggcagtagcttcactaatcccaaacaacccccaaactctgtttcagaccctgaaccagccccgttgctacgtgtcacagggccaaagaacggcttccggggcacgcccgctcgcgcaggcgtgttagcaggttgggcaccggtgggcgggaggaggagacacgagtatggagcttgcgcagtatctacccaacctgcggctggcccgtgccaaagaggaaagtgcttccggcagcctggttaggggtggaaccaggaaagcgcaggcgtagcaattgctgcttactcgtaggtaggaggaggagtttctcagacctaggtgatggaggaagactgggaggcgctaaaatgagacagacggagtcccctctcctgtccacaaactacaatgcctacaatgcctcggtgtcagcatttactgtgattcaagcactgtgctaaagtgtttgtatgtattatttaatctttacaacctaatgagatggttaccctatttcccttttgtaagtga

SEQ ID NO: 34629 - DNA, 2300 bp, Homo sapien
tatcaactgaattaggatatttttgagagtaaaagggagcaacattaataattatgctgagggtaagtaaaaataggcagaaaatgggacaatggaattgtctccagcaaatcataatatgtggtcattctacctgaagttgtgcagatgatacctaaaccaataaatgctaaaatgattgatgaaaggtggtgaacacttgaatgagcaatttcagaaattcaaaaatatagttagaaagcacaaaaatctagtgttcagtggcaaaatagggtagctatagttaacaataatttattgtatagttcaaaataactaggagtagatttataattttctctacacaaagcaatgacaaatgtctgaggcgacagatatatctcaattacccagatttcattattacacattgtatgcttgtatcaaaatgtcacatttatctcataaatatgtacaactatgatgtatccacaaaaataaaacaaataaattcgctaatgggtaaaaacctcaaagggcagctgcctgttggtctctagagtacaatcctagttttttggttgggtcttacatccttttgttgttgctatttttgtttggaggggagtgcgttttctgtttgttttattggggtggggggtgttgagagaaaagttttaagtgaaattttattgttcctttggaaactagtccccaacaatggtctggcttcttttgtgagggcctcaggattttgatcccagaatataatgcagtggctcatgataaattttattgctataaaccctgaagaaagttctgctcattagttaatagcatcttatttcgagtcacaatattcgggattccaccatcttgggaaagtgatttaacacaggagccaaagcaatcattttcaaaagaaaacaatttaaacatcactcatcagttcacaatcttcacttcttttagaaccaacacacaaatcccacaggatatttcctggccccttcctgttattccagcctcaactcctatgtggctcccctcacttgctgttccagtcactcaggttccacttagaagagtggttgacaaattcagctaatgttgcccccaccgcccccaaggacatttggatttggcaatgtctggagagatttttagctgtcacaacttggtggtgatggtggtggtggttggttggggggagtactggcatctaatggctagagattagggatgctactgctaagcatcatgcacagggcagcccccaataaagaaacatcctgactcaaaatgttaataatgctgaagttcagagctcgattttcatctttcctcagaccatgcttcccagatcttgcacacattgttctctttgcctaaaatattcaggctattttcccttatcctcctttcccgttgccctttcttctcttttctggtcttctctaactcccactcaccctttgataaccctcttatagtggctttacagactcttcttcccagatgaatgttactctttcaaagaattatggaacactaaagaatattagtagcaatttcacatgcatttgtatgtgttcgattacccctctccaccaccaactccaggtgggtagatgtcacctagcttatatttaccacagtatccccagcagctagcacagaatgaatgaatacttaatagcttcacttacaaaagggaaatagggtaaccatctcattaggttgtaaagattaaataatacatacaaacactttagcacagtgcttgaatcacagtaaatgctgacaccgaggcattgtaggcattgtagtttgtggacaggagaggggactccgtctgtctcattttagcgcctcccagtcttcctccatcacctaggtctgagaaactcctcctcctacctacgagtaagcagcaattgctacgcctgcgctttcctggttccacccctaaccaggctgccggaagcactttcctctttggcacgggccagccgcaggttgggtagatactgcgcaagctccatactcgtgtctcctcctcccgcccaccggtgcccaacctgctaacacgcctgcgcgagcgggcgtgccccggaagccgttctttggccctgtgacacgtagcaacggggctggttcagggtctgaaacagagtttgggggttgtttgggattagtgaagctactgcctttgccgccagcgcagcctcagagtttggtgagtgacccaggcccgtggcacagtgttcagcttctctccacacccgtgcaaatgggcttgttgccgtctttcggcgccg

SEQ ID NO: 34630 - DNA, 2300 bp, Homo sapien
aaattcagaatattcttcttttatattataaaatcttttaactctgcaatttaaagtaatattaatactctttttaagagtattaatattaatattaattcttggtgtgctttttaaaaacatgtttagtaatcttgaaatttgttgtttcaaatttcaagaaaatgtcttgcaatttgttgtttcaaaaaaaatcttgtttcttaaacttgccgcctctctattcctattcaagaatatctaaggttaaaatgaggatggttatcctgaagagtcagtggtctaaagcccatcctgttactctggaatcgtgtgaccctgaggaagtgctgaacctctctgttcctcagttctgcatctctaagaagagatagttaattttcattcctcaagtccgttttagctctaaaagattataatttttcttactctgtttctccacctactgccatactgtccctgcagtgttttcatacctgagctccaaagctatcgtcatgacgttttgacctactctcttagaaataaaacatttgcttactttacaaccaaaaccagtacttaataggtctgaattcagatttattttgtctttgacctgatgtcaacgaaatatttattttgttgtcatggtgagcagtgcatgccaagtaaacttagatcactataaaaacttaaaaataaaagaaaatctaaatgttttggccctattaagttgccagatacagagctgcactgatagcttagggcactagatggcgatataagtgcatcacataacaaacatcttgcttggtccagcattaaaatcctaatgattgaggccagaacaggttaatgcattagttaacgaaacaaagtcaaatataatcaggtgtaggaatgttagctaacgctctgaatatgttcagtaacccaatgcttattgaaagaaaagattgttaaagtagaaactaatttatcctactgttgagcgtatcttcaagctaattttttgggcaagagttggcaataaacacgtttctcataaaatgtatataattcctaagttcacctccatttttgtttttcactttttaaaaatagcaattgtttgggatggcgtgtgcctcacatatattattcattgaccaagcactatattcttatcagggatgtgagccctaagacactggtgttttaaaggggaaatggccgacttactgtaagctgttggctgggccattattgactgtcaggctcaactggaagcactttgttagtggattaggttgccctggaaatgccttcctgaaactctaatgatgcacttaagggagccctctggaacaggagtaaaatgtcttttagcagcagtgccttccaccagagtcctcttgggatgacttgggaggggctgggggcacgtccaaagagacgcgcagtaaggaaacaaccccagaaaaaggttgcaggtatcaatttcttacaggtgagctaagataatgacttatggatgtaaactgtgggctttctgtgggtgccggtgcttcacgtcttcattttgaaagagcatcattaatttcagagagagtgtttatgtatctacctatttacatatatattcatatttatttatttgctaggggttgtggtggcaggcggatgaaatagaaaaggaaaaaaagggagaatttgagtgaatatggtttaaatcaaaggattaaaaaaaacactgtgtagtttgaacactggggtcatttggtgtgcgtgtctgtgttttaaaacaagcattagagggatatttgcccttcagcaggaaggaattccgtgaacgaggaggggggaggggggaagatctgtagatttttcaaataaaaagtcagttgtgtttatctcacaacttacctcttgggtagggggcagggatttgctgtgggatggtgatggaggtaaagacaaggaagaaggaaaaggcccttggaaactccagactccaggacaggacagggagggaagtggctgcgcagcactgcgtccccgccccaagccccgcgcgcctggcaatcgcgtgcccaccgccggagcgcggcgtccccgtgcagtcctggcaacctgtcaccgaggaggacgtgactcggagctgcctccgctttctccaagccatattcctttaagatgatgtaatagtcatttccctggatggtttcttgcctgcactgctgaaacaacagcatccgaactgcactgggaactgtggaaccacccagctccgccgccagagaagccggagccccgggccccccgccggcatctctgcg

SEQ ID NO: 34631 - DNA, 2300 bp, Homo sapien
tttaaggccgtggctctcaaccaggagtggttttgcataccagagatcttttggcaatgcctggagatattttttgtttcatgatttgaggggtgctactgacaattaatgggtataggccagagatgctgctaaagatcctacagtgtactggaaagccctccataacaaaaagttatccagcccacaatgtcaatagtgcttagcttgagaaactctaaattaagcatgagtttaaatttgtcaaggcatttttttttctgtaccatatacgggaagtcttccaggtcaataaataggataaaatagaaaaataaaaatcggaaccagtttaaatgtgtatagaaattatatgtatggaaattatttgaagttagacataattatctctttatgcagatgtgaaagctgagatttacagaaataggaaactttttccagggatctggtagtgatgaggaaggcctgtagtttaggtgtcttgtgttcttctacttcagtctttctgcctcagaaaaattatacttcagtgatgttgtcaatctttcaacagctaaatgtgtttgttgtgaagcactctgggatccttttcagtttacatgatcctgttaaagatgtttcccaagctgatcaacagtagaccacaaagtgctctcagaaatgaaactagtaagggggagaaagtgttttgagcaggccaatgatttcattgtctgtaactgcttatcataccctttgttactttgagttgaatattccctctctgaggatggtaaaatcttattggaaaatatgtttcctagactcacccaggggtggctcccaagtccttgtttccaaacatgtgacaagtctaagcacaagtccttgctactgagtcttattgtttagtttatatacactgactttattagaacacaatttgtgtctgaaatgatttgacatttttcttttaatgtatcataccaatatcccagggatggaattatggtagggtcattctaattccattttatacaagggaaactaaggacccagaaagtttaaatcggtcatttatttgtttgtttatgcatatatccagcaaatatttgttgggtacatactatatataggtcactgtcgtgagcattataatgtctaagcaatcaaatttggagtaaagaacttgaattaagttcattcaattcctagactaacattatttctatatgtagttctgatcagtattctagaattatggtttaaatatccagttataaataatatatattacagatttattattatgtacctgaaactctactgagtacttttcatgccttatctcatttaatcctatcataatccaatgaagtaagccctaccactatcctctctttacagatgaggtcagtgaggctcagaaagataaagtagcacataaaggctcatagctaaaaagtggcagagccagattttcctctgagtttattagactctaaaggctgctggcttaaccatctctttgtacaatctgttctctctgttctctgaactttgcctgtttctcctctctcctatgctaaacaaggtgagatcccagcctgacatccttcctaaaagtcatcagttttttttgtttgtttgtgacttgtatctgcctaggaggtaaagaaagggcagatttgctacagcttgtactttatgccacaaaaattttcaagggggcaataatgttgtagaacaagtatctggtgagtactgataccctaagaaactcaccgtgataagctagcttccacgtctggagaaaatgacacctgcaattgcttgctgtgctgcacacaggtcactagggcaagcttcaggagaagtaaaataggtgtatgagcgtgtttatatgtgtttatgcatgagtgtatctaggtatctgctattttcatcttttggcttgttaaacagtctcaggtttttattcaagacaggtcaaaagcccaaatgtgattaactgccctcagcatctcattgttactgttataagttgggaaaaagagaggcagctttagaaaagaaacttcaccgaaatacgtgcatgcatgtgtgagtgtgtgtgtgtgaggagtgtgtgtatttatgtgtgttttgtgtttatgtataaaattatgtatatatatgtacatatgtgtgtacatctatcttaatgtgtatatataaatatatatctatagctgtacatatgtatacacccataaacaaagctcatagtttaaaactttggaattttcagtttggagaacttattattattacaatttata

SEQ ID NO: 34632 - DNA, 2300 bp, Homo sapien
tcttttgatgctctgatcaatttttcaacccgtttctaagctgaccccattacttattgacttatttcaaaaatgaataaaaacaaatcagatttttttctttaattgattttttcagataataaaagaaacaaatgcccattgtagaacatttgtaaaatatgtaccaaaatgcatgaaatcaataaatcaaatcattgataaccctattacaattggagtataatttcttccagtattttctctacctgtcagggtttctactcaacctcagcacaagtgacattttagatagaataattctttgtttctggaggatgtcctatgaattctagaacatatacagcatccatggtttctactcactagatactggcagaatagagcctcccttcctcagcacccaatcatcacaaaaaagtctccagacattgccaaatattcccttgtgagcaaaattgcacccagtcgaaaaccactactaagtattataacgaaattggaattttactgtctgtacaattttacattatttttaagctatttatatgcttcttaaactaacaatacatagtggaaattttcccgttttattaaacagcattgaaatgatggtttttactagctgaattccaatgtaaagatcaaatataattaactattttctcattgttgaccagttacattgttcatacatttttaaataaataaaagtttaaggagtatccttatacataaatgtttgaccctatcactgattagaaaattttttgtatcttactaaagtcagaaaattattttcaaagtagcaaagtatctttgaactaatgcataattgttcagaactttggtggtgttagtagagtgatagatgtctttcacccaaaacaagttggtggctaaaatctctaaatctactctgaacctcttttgaataataagggttgagaatctaatgaaaactaaggactaaataaaaatacacactattatacacacacacaattccatatacaattttggaaggtggaggtttgtggatctgttaagaacagccataggccttaaggagtcctgctataaagacccctggtttctactgcagcttttacaaatatgtaaccccaatagagagctaagcaaaccaaggttaaggggcatgtccatgacagaaccagaagacttttgtccactgagcctttatgaatttataaatgtccaaaatgaatcatattacagaaaagctttggaggtagaaaagtgagacactcttctggtcctttagacctgtggcagtatttgtctagtggggtctcagtttcctgaattgacctagcccatcaggtcaccagcattatctcatgaagataaaaacaataccaagcactaggcttcagaaagctcttatctgtcctcaccgcgaggctgaatataatttactccccagtgtagactgatacataatcatgtctttgaaaaatgttccctggaatgaattataatgcaatgactatggccacaatcattgctttccaacatagagggtgggggagagaaagggaagttgaatagcatttaccaagatgaagcacctactcccttgccaaagatggttcaaggatctttgcttccatacttttatttagtcctcacagcgactctgtgagatgattgatatgatcattttatggataataattcagatgggttaagccactgtcttagtgtcacatggagagtaagtgacatgtaaacttgaagtaagctcatgctctttttattacactgtgttactcaaaaggaaaagaatcaagactttccccaccttccctcagcaccccactacccccatttccaaaaaagctttgccctggcacactctatccccttaaaaataaagtatatcacattttggagggccttctgaggcactcttaggtgattatattatctactttattagacattaatcttgcatttagaagacctgactttgttttcttgccctttatcatttgcttttgattgatgatgggcaagtcactaattctctttgaatgtcagctttctcaccacagctgctgcactacttgatgcatagtattaagagctcataactcgaagtaaaagaaaactgtaaaagattgttactttaaaaaaacatttaaattcccttagctttaatttccacatttataaatttgaaattatgattcctatttcacagggttgttaatttgttcattcaacaaatactgtgcgtctattagcattatcacttatttattgttaggggagag

SEQ ID NO: 34633 - DNA, 2300 bp, Homo sapien
ggtgtgcactgccacacctggctaattttttattttattttttgtagagatggggtttcactatgttgcctacactggcctcaaactcttggcctcaagtgatccttctgccttggcctcccaaagtgctgaggttacaggcatgaaccataggagcctggccaaagagtaataaacattgaaaactcatcccttcctgctacattttccattatttatgtttttggttctttatggctgtcgtatgtgggtggtggaaatactatgtgatggtgtgcttctgtgcttccctccccaactcccactcctcactcaactccatgttgctaaatccccaacttgtgtttagtgacatcgagttggcatctttaaacatggtaggagtatttacaccacaggaatcagcaacctttggaaatcagggccttgcttgatttatactttaaaggacagctatttgttaaacatttttcagttcacctcaggattcagtggacaaatggagacactggtgctaaaacaaagtgctgacagttcacccacaggaacaagagtgaaggcaaggcatttggtctggtgggtagagaggtggcagagcgatgtgacctattgactaagtgaaaatggaagtaaggtaatgactggagtataaggctgggaacaaaggtgtcagaggtgtggaggaatgcgggagagtaagtggattagagaaattcagtactctcttttttttttttttttgagatggagtcttgctcttgtcgcctaggctggagtgcaatgggcgagctctgctcactgcaacctccgtctcccgggttcaagcgattctcctgcctcagcctccggagtagctgggactacaggcgcccgccatcacgcctggctaatttttgtatttttagtagggacagggtttcaccatgttggccaggctggtctggaactccggacctcaggcgatccgcccaccttggcctcccaaagtgctgggattacaggcgtgagtcaccgcacccagccagaaatacagtactttcatagtgtatttgtctggcaccattaaaaggcgccatagggttagtggttatgaacttaaaagatgcacagtgggtgtgtattttccttcagccccttctggtggcttgggtagagacagtcagaggagacctagatttacacaaggctagggttttgccagaccagtgtgactgcgtatggcaggggcgagcgagatggcaaaatcgtaaaagtcatcacctcagagaccctccataatcaccctcactaaaatcatgtccgcgcccgtgtcactttaaccgattattgtttttattttcccagcttgttgattgggtgtgaaatcagccggctcatcagcagagctggtgtttcctccctgcggaatccgcagtgcccactacagcgctggggcataggaggcctcagaaccgtgctgaatacacggattaacgtgctggttctcctaacatctgttggttgcagtaaataataatactcgcaactcttttgtatcctctagttccttgctccgtggtgtttaaccttagcgagcaaaggaacttacctgcaggttttggtgcactaaaacgcggttcttattcccgaggcaatctttaccttacacgaggcccaaacccaagcctcagaggcagctgcctggtggcatgagtaatgctggcctttgtcacaccaggccttccttattaatacttttttcccgtgctgccaaccacggcttattctgtgactccaggcggtgataccataaacgcataagcccaaggtccaggtttcctggggcggggcgtgatggctcccaggcagagaagcttttctcggcaggcgcggccgcgggagggcaccagggccgctctggcgccgccagcgtggagaccgcggggccccgggtgctctgggagcgctccagcgcctcccgcgctctgtaaccccaggccccggactctggcagtaggggcgtgggcgtggccgactgcgcgtttctccgagtggccaataaagtttcgaaagtttgaaaagcggaggaaaaaggccacgcccatgtggctgtccgagtgtgggcgcctccgggcctctgcggagccctgggcagctctgagctcgcggaggcgtggccggtgcgcggggcccgcggcgcgcggggatgggggtctcggtggatgtgcaccaggtgtacaagtaccccttcgagcaggtggtcgccagctttctccgaaaggtaccgccccgcttccaccttccgtatcccgcgctgcctc

SEQ ID NO: 34634 - DNA, 2300 bp, Homo sapien
gcttccttagtggcacagactcaagagtagaaattaatagaaggagacaggcaagcagaatgggatgtgatgttatcaaagctcaaaagtgacgttaaaaaagtaatagttgaaagtggtctctgaaattgtcctacatcaaaattaggcctccgtgctcagaaaatagataaccatcggctccatcctaaagttctgggccacatgcatgtttgatgttttggaactaacatgaaagaacgtggaaaaatatgtaaacaatgttttcagacctcctggtctcctcttaagattttcccattgagctgtgtctgaacactctctgcataataaataattgtcatccttacgtctagagagaagatatagtaataacaataattttaaaaagaacacccagtttctttctctttttttttttttttttttttgagacggagtcttagtcgcccaggctggagtgcaatggcacaatctcagctcactgcagcctccacctcccaggttcaagtgattcttgtgcttcagcctcccaagcactcccagccaacacacccagctaatttttgcatttttagtagagatcgggcttcaccatgttggccaggctggtctcaaactcctgacctcaagcaatccacccacacctcagccttccaaagtgctgggattacaggcatgagtcaccgcgcctggcctcaaacacctagtttctagtcccaattctgcccctaactcactggacaacttcaaagaatcccttgatctttctgggcacagctgcctcatctgtaagagaaagtgagtagccagttttgtccattatcttttgacctcttgccctcttaggggaggcttagctcccttgaaccacctcttcacctctttttttttttttttttttttgtcgccctggctggagtgcagtggcacgatctcagctcactccagcctccgcctcccaggttcaagcgattctcctgcctcagcctcctgagtagctgggacttcaggtgcgcaccaccatgcccagctaatttttgtatttttagtagaaatgaggtttcaccatgttggtcaggatggtcttgatctcctgaccttgtgatctgcccacgtcggcctcccaaagtgttgggattacaggcatgagccactgcgcctggccagcctcttaaagttatatcactccatgacattgttaagagcacagcccacttgccttctgctagctgtgactcccgagatgagttatttatcctctctgtgtctcaagttccctcatctgcaagatgaaagtaaagaatagtttagtgtctccttgggttgttaaggggttaaagggctaacacaggtaaggtatttagaacagtggttgacacagataaggactaccctggcattaagattgttattattcacttaatcggatacctttgtaattttacatgaaatgtattatcgataaatcaaaaaatagaaatataggcataatctgaggatatgaaaagactacagtggataacaggcaggaggagagcttggaggccactgcttttccttttttgaaaaagcttctctgtgctttgatttttcacgtatgtgtatatacgtgacactagttttttaatttaaacagattgagcaaaaagatcactaaagtccctcttatctctaaattcagagattgactatgattttcaaagagcaatattttctaggtgtccgacttatccttgttttcatagcttgaccatttttacttttgaccttcccaggaaatccttatgaagatttaaaataaacacaatcactttggtatgtttataatggagcaggttctgactccttggatactacagaaaacgggaaaggtgaaaatatgaactttgtaaatacttggccttagggactggcttatattttacctcttacaatcttttcccagaagcaattcagtaaactgaaggaaagatcataaagttaacaactgcaacaacaaaagcgtggtaagtaggcagcgccctggcagtgaaagcgttaacagggctgggtaaggcgatcccttgaaatgagtaagactgagtggttaaagttttcaaagcggttggcagcagcggcgcttggaggaaaggaagccggttggagggcgcagcgcacccctgctgcgcggaggagggggctgagctgaactcagcagaagttacatgcacaaggttagtggcccccacacgcctccccagcccgctgccgcgctgacatctttggagaggaggcttaggaaggcgaggcgccatcgc

SEQ ID NO: 34635 - DNA, 2300 bp, Homo sapien
cctttaccacttccaagtgaaataatggtgaaaaacagaaattagggccaggcgcagtggctcacacctgtaatcccagcacttcagtaagctgaggcaggaggattgcttgaacccaggagttccaaacctgcctgagcaacatagtgagacctcatctctacaaaaaaaatttaaaaattagccaggaatggttgtgcacatatattttcctagctacttaggaggctgaggcaggaggatgggttgagcccaggagtttgaggcatcagtgagctatgatcatcccactgctctccagcctgggccacagagtgagaccctgtctcaaaaaaaaaaaaagacaacacaaattagcaaaccacatcactcttagctcattattttacaaaagtagaaagagactggaagattatataccacaacatcactgggagattgggtattgagcaatttctattgtcttgctttagattcaaaatgttgggtcataaatacatgttgtttagtaaacagcaaaaaataaatatagcattttagaaagaaaaaacaaaacaaaaaaaaccttgtagagaacactcccccattccctttgataaaacgctccaatgtctcacagtccttggagtctggagggacttcctgatgtctgagatgcctggaggccatatactggtgatccctgaatctggcaaaccaatggattgtttcctgaatgcctttgatcaggtagctattcccacctccacagcctcatcagtcctgattgtctttaccccctgactcatacttggatattacctgcctgattcctgtgtggacttcagtcacagctaattttttgtatttttagtagagatggtatttcaccatgttggccaggctggtctcgaactcctgacctcaggtgatccacctgccttggcctcccgaactgctgggattagaggtgagaaccaccgcacccgctcgaccaagaaggttcttattgctaaccactgggcagtctctctccaccattcccccactccatgccccccatcaggcacgtcttccttcctccctcaccagttctctgtgtcttcccaggtttgtagccctgcactcctactcagcccatggacccgatgagctggacctgcaaaagggagaaggcgtcagggtcctggggaagtgccaggacggctggctcaggggcgtctccttggtcaccgggcgagtcggcatcttcccaaacaattacgtcatccccattttcaggtgtgtcgcctccaatcccagactttgggaggttgggccaccctaggccaggggccatctgtgggttgaactggtggaagacccagtgctctttcagaaaacaggccaagaaagcgctttttgctctataacccgcctatctcttttaaaacaaaatagcaaaactagttatctttttcgtagcccttcacagcttacaagcacttttgtatctcttagctcacaggctgtgcccaagaatcctctaaggtagatattatgttacagatgaaaatggtgtgcagagttaagcaacttgctcaagaactggatgtcaggttttcttctgcacaaatcccaggaaccccacttcacatcctctatcccaatgctccatctagtggcgtgatgggaaaatgtggtcagatgacttccccagagcacctcgggaaacttctcaggctgctagagtgacccctaatcagagtttccatgaactgagacccctacctcttcctccacacccaagatgaaatgctagtaaccctgcagggcctcctccctcaccgcttttcccgatctcttacattgtgtggcatactgttcatgtcattgaccccctctttgtcttaccacctcataccactgccacaaatgcacctagaccccaaaactatccatgactcctcctgcctccacccccgatcagcccaagcaaaccctgtctcaaggcagtgaggctaccaccacacatccaacactgtctttatgacataccagagggtcacaatcacagggaaagagccccattgtattctgtgcgggtcagacctagtcatatgcccacttttggggaccttcatttaggtgagctgccacgtccggaggagggcagcaagaatggtgaggagacagcaaactatatcatagcagaaaccgataaagaaactggggttatttaacctgtagaagacaagggacagagggatcacaatacactgtgtcaacagggcagtaaatttgttctgagagggggcagtggagtggatcagtgtatgcaa

SEQ ID NO: 34636 - DNA, 2300 bp, Homo sapien
ggaggctgctgccagtggtgaacacagtagagctgctgtttgtgatgccctttttgaatattgggccagctcttaagggctaacatcccagttagagaaaaggacgcagggacctgcacggtggagcaaatcagaggcaacatccactcttcccacctaagcccagaatgcttttcagtctctccatctggaaaacaaagatcataatgtctgcaggtctgggggtgtcctgggggttaatatatgatagcaaagtgttttgacattggaagaaagtgctagataagtgctgagctttctgccaaaagacatagaggcactcagtgttggatgggagacttgggatttagaagttcctggaatccagctcagtgctgagctcagaaaaatgaggtcacaccttggtctataaagagtcattcaaaaaggggactgatggaataaggctggtgtgggcctaattagctgtatgctgcccttgctgctgctgctactgctgcgaaaaaatttgaaatttgtctttcctgttgccagtccactttgcagcatccaacaccttgaggcctctgttcaaaagacaggcagatcagttgcactctggcatggaagccaatgctggagatttcttcccactgcccaggccttgtccccagaatatagtctgacctctctctaatgaacagccgtactcgttttcactgacaacaccaccatggggaccagagacaggttgaagtccccttgctgcgaccatcagttcctagagcacttggttgaatatacttctcaggcagcactgaccacaattaaacaatgccttacttatcttcgtacaatactggcttgttgttaaactacatattactttgtcaatcaaaagaaggaaagacaaagagagagaggagaaatgagggtaaatgacctaaaggaaaacttggaggcattggtaagaaggaaaccatttggcatctctgtgccagggtcttagttgagttggttattcccaggaaattagcagaggttacttaatcaacagggtgacaaggtgattaatggactgctcaataggaaatgtgatgttgggaatggattggtaaaagggcaagaaaggcatgtaaaatgacagtcactccccatggagttcagggagctgcagtctggaaacagtggataagggattgttgtttcataaaactttaatgaaattcttgaaaatcatagcccaaggctgaagaattaaagtcttatggaggcatgtgtagggcctaccatctgctttagttcatttgttgcaggcagaataaaggacttttcctgccaccaaatgatgaatgctccaactagccaggaggtggtatagctcactggtaagaacagagagccagcctagacctgggttcaagtagctgcttgggcaaccaactgtataagtctttgtgtttttttatttataaaatagtggcactaagagtacctagcttagaggactattgtaaagaacccatgagaaaatatgggcaaagcacttggccaatacctggcatacagtaagcactctatatgtgttagccaaaatgatgtgtcagtgctgaaagcagcatagcagacatttaacaaatgtttattgatccacagtatatgcagaacacagatatataagtcatatgaaatctctgccttcaaagactttggaatttgtgaaaaagtcactgactcaacaagaaattgccactgtaaaacgaaataaacacatataggatcttatgctctgagcttaagagctaaagggatgtggggtgaggaatgatcagaactggagtgaaaaaggatgaaattcaagtcttctagctccaccaaggccttgatatgagccccccttccttccctcagcacaccctcacagttatccgggtgtagggaggtggggccaactttagttaagcctgtagttcacaaaatgggtgtgtatgggtgggaagaaggtgagaagtagccacatttggtatgtggttgggagctgataggtttttaaataggactcttgactgaacattttctttctctatttcttctcttaaaaaaaaaattttccaaaaccagaaagacctctagttttccagactcccggagccctggtctctacaccacatggacgttatccacctcctctgtgtcctcccaaggcagcatttcagaaggtgatccacggcaaagccgtcccttcaaatccgtctttgtgcccactgccatagtcaaccccgtgagaagcacagccggccctgggactttaggacaagggt

SEQ ID NO: 34637 - DNA, 2300 bp, Homo sapien
aaaaaaaaaattagctgggtgtggtggcaggtgcctgtaatccaggctactttgggaggctgaggcaggagaatcgcttgaacccgggaggcggaggttgcagtgggctgagattgcattgcactccagcttaggcaacaagagtgaaactctgtctcaaaaaaaaatgttgagtatgtaggaagcttttccaagatatttcctctgtatttggtattccattcttattaactgagacagagtcttgctctgtcacccaggctggagtacagtggcatgatcttggctcactgcaacctccatctccagggttcaagcgattcttgtgcctcagcctctcaaatagctgggattacaggcatgtgcctgcacgcttggctaatttttgtatttctagtagagacggggttttgccttgttggccaggctggtcttgaactcttggcctcaagtgatccaccctccttggccttccaaagtgctgggattataggcatgagccaccatgcctggcctgtatttggtattcctaaatgtgtcttgaacctgggaacattgattttttcagaaaattgtttttttgtctggcctcagtcctattacattttattattatcgtgtcaagagaagaaatgcactatcctgaaagaaccattcatttcttatataattagtcattggtcatcatggtacttctttttattggtcatggctaactcagtttgtgttctcagtattttgactggacaccaaagccaaagacggaactgtatccaaataatatagttagtctgtttcttacaagatatataagcaattatgaaaccactttatgtatatattaggattgaataaataagtaaacaggtagataatgagaacctctgcctcacagagctcactatcagaaaaagaagctataaataagtaaagagaaaatgctagaatgagccctatggggtcagattggatttggtgataaaagtatgagctcatgatttttattttgtgtatagatatgtagatataaaactaaacagctgggtgtggtggctcacacttgtaatcccagcactttgggaggctgaggtgggcagtttacctgagatcgggagtttcagaccagcctgaccaacatggagaaaccctgtctctattaaaagtacaaaattagccgggcgtggtggcgcatgcctgtaatcccagctactcaggaggctgaggcagtagaattgcttgaatccaagaggcggaggttgcactgagccgagatcgcgccattgcattctatcttgggcaacaagagcgaaactccatctcaaacaaacaaacaaaaaacatagatatgtgtatgtatgggttagtatacaaatatgaactgttaagtggaaaaggcaaagtgcagaacctgaatgctttgattggacaccaaagctaaagacggaaataactacataatgagttccctcttttttttttttttttttttgcaaccctatagtgttccattgtagggatatcctacagtttaattgatggacatttaggttctttttttcaatattttagaatggaagattttggtagtactgagagatgagaattgaaaaagtaaagttttattagtgataaacttgtaagaacctagtttcaaaactgagaaaaattcatatgcatttgtacacataaggcaccagtgtgtattctcatgtattaaaatgtattttgctacctctaaatgaggctgaaatgttgataagaaaaccacaatgaaaggtgtgtctttatccccactttatcattttctatctctgcctcattaaagatcactttatctcattaactcaacatgcctgagaagaaacacatattggtgcttagtggatgcaaatcaatatggatggttcgaatattttaacatcacggttagggatgctactttttggtgattttaatttttgttgttgatccaggacagtcctttaaagcatttgttaatttatatatgggctttgcaaggtatccaactggacacataggacacagttgatactcagtaaccatatttttaatgcattgaatttttttttcttcttccaggaatgcgtttggctctggctgatgctggtgacactgtagaagatgccaactttgtggaagccatggcagatgcaggtattctccgtctgtacacctgggtagagtgggtgaaagaaatggttgccaactgggacagcctaagaagtggtcctgccagcactttcaatgatagagtttttgccaggtaatctgtagatccc

SEQ ID NO: 34638 - DNA, 2300 bp, Homo sapien
tttccttttagaagtcctgctcccagcaggcctccataggatccaagatgatgggaagagctatttttcttagtaagttgagaaaatgactcggtgctttttgttttatactgtgactggccactaaattagtagaatgatagaattttggagtctgtaagatttttagatgtcacgtaatgctccttcccaagcagtatagtagtcctctctatgcttctgctgttactatcactactgttactattaataatatgggtgatttttttaaaacagactgcatagtactttatcttattaatcaatatcctcagtaggaggttatgcaaacttgacagacccctcacttgcccctatgatacttctgtgcaaattagagaagggcacccctacttgacttaaaaaaaaaagtacaaaattatttattcctcattaataaaaatggtaacaaattagatttgttacaaccagtgaattttgctgtaaccaacagaatagcaatgactgtattagttgtcataagtgtctatatgtcataatgaaaatagttgtaggggactgggcgcggtgactcacgcctataatcccagcactttgggaggccaaggcgggtggatcacctgaggtcaggagttcaagaccagcctggccgatgtggtgaaactccatctctactaaaagtacaaaaaattagctgggcctggttgtgggcgcctgtaatcccagctgcaggctgaggcaggagaatcgcttgaacccgagaggcagaggttacagtgatttgagaacgtgccattgcactcaggccttgcgcgacaagagtgaaactgcatctcaaaaaaagggaaaaaggagaaaatagttgtagctttaaacaaatggcagctgatgtaaattgcattatgtaacatcagacttagcctgtgccctaatattgaaaggtaataaaagatgttcctttaagataatctgtggccgggtgcggtggctcacgcccgttaattgcagcactttgggatgccagggcgggcagatcacgaggtcaggagttagagaccagcctgaccaacatggtgaaaccccgtctctactaacagtacaaaaattagctgggcatgatggtgcgcgcctgtaatcccagctactcaggaggttgaggtaagagaatcccttgaaccgagggaggcggaggttgcactgagccaagattgcgccactgcactccagcctgggtaacagagcaagactccatctcaaaaaaaaaaaaaaaataggtaatctgtatattagactgaaaaactgctgtttagaagcacaggcgattttaatagattttgttagctcaataaggaacctttgattattgaactcatttcttctttgtaagtcaaagaagaacaatacatttattattcttgttagaacatgacattttctttggctgtctgaaagttgttgtactatcctgattttattagaacaagatatgtattgccatgtagtataatagaaaactgatataatcatcatttccttctgatatcagcatagttaaactaatgacatacaattttaaagcgataaagattgctaggctgtgagtggtgcctcttccgatgcattgccctaaggcagagcacaacttgaacaaccgatttttgtgaccctaatgataggagggttcctaaaatcataactccaacctcatgagctggtccattccatttctgaatgattctaattgccgtaaagctctttcttaggtaaccaggtggtgttctagagttatagtggaatcattacacatgtctaacccagacagtataggctaaatcacagtggactgagtgtgagtctggaggtcctctcctagctgtgtcactgatagctgagtaacccaaacaaggcactttatcggatgaaattcagttttcaccgctctaaaattagtgtaatatcttttcctttccgtattttgaattcttttttgtttttatctggtcatggccaacctagttaattttatttggctcatttggtttatttatattactgttattaatgattgatcactgactctctatttcagatgtcaaaatccacaggcaacttcctcactttgacccaagctattgacaaattttcagcagatggtgagtaaacatttttcttattgctgttctgtagggtccagttctcagattatagaagacacgttaaaattggtgttttaattttactttctgttttgcttttaacaaaattttaaaatcttaatgtttcctttgtggatgagcaac

SEQ ID NO: 34639 - DNA, 2300 bp, Homo sapien
taagatgggagaaagtgatgaaggaggaaaaaggagatgaaaaatgtggaaacagtaaagttgaaatgcaacaaaaaaagtgaaccagtaaagatacactttgtcttttgctcttttctagattctgtgaggagaccaggaggaattttgaagccaccttaggttggctacaagaacatgcttgctcaagaacttatggtctaggtaaacaaacttgaaatttttctgtttggataactttgccagttacacagaaaatatacatttttacctttcccccctgccctcaattctagtgttttctgaattgaaagcagtaagtttcctctggatggtcatgaaaactaggatatagtccactatcatctactgtgtggtagaaatatgccctctctatatagattttgtggtgtgacttttttatggagagactccaagcttcaaccatttgtcttttttttcttttttagagacagagtcttgctctgtcgcctaggctggagtgcagtggtgcgatctcagctcactgcaacctctgcctcccgggttcaagcgattctcctgcctcaacctcccgagtagctgggattgcaggcacccaccaccatgcctggctaattttttttgtacttttagtagagacggggtttcaccatgttggccagtttggtcttgaactcccgacctcaggtgatccacctgccttggcctcccaaagtgctgggattataggcgtgagccaccatgcctggcccattttgtcttttatctacaattttatttttattaattattcaagaataatttaagagcttcctaaataagtagctttgtaaatgttatagcccccttcttaaaaatgtggattctatagatgaaatgtctctcaggttcctcatgcgttactttttatttttcaggcactcacctgccttgggatgagcagtggctgattgaatcactttctgactccactatttacatggcattttacacagttgcacacctattgcaggggggtaacttgcatggacaggcagagtctccgctgggcattaggttggtaaacagataagggaaaggagcataatttgtcagtaagagttgtgatatttgatttatgtatttaaatgttttaataagatttatttcacagaattttgtcatgatatttttgcttttttactattgaactgggaaaaattaataaatagccccttactgtcatcatctattcttcattcttatggaagctgttgtccttatttgttcctgtaactacattaagaaagagattcctaatccatgtttcgattcaggtactgattcttccaaagaaattacatatatatatatataaaatagtttgttttatttttaatacagaccgcaacagatgaccaaggaagtttgggattatgttttcttcaaggaggctccatttcctaagactcagattgcaaaggaaaaattagatcagttaaagcaggagtttgaattctggtatcctgttgatcttcgcgtctctggcaaggatcttgttccaaatcatctttcatattacctttataatcatgtggctatgtggccggaacaaaggtgaatgataaaataggtgtggactagatttattgattgtcaataggggtgtcttgtggcttcaaatatctaataaattattgtggaggggatggtatagatttgccagttacattctttttcttatcttaaatatgtactaaagcagaaaggccacctcctatctcttacatccagaaatccacatacctaccccaggcaccaaagcatgtcatatctcaggtgcattgctggtctgctagtaattcatttgacctgttaaatgcaggaataattctagaccattagaattggaaagaaccttctctttagagcagagcgccccaaggttccagcattagttgtggtaacattctgactagagtctgtttcttcagagtaatccttctgtccttttccctctttacccagacatgtctacttttccctctagttcctcaagtagctgaggaaacaaacctctcagtctgttcaaattttatttcataaaaccaagacaatttcttatgccttcttgtatttagaataaaattacattttttccttcaacaataaaacgaagattttggagtagaggaataaaataattttttttttgagacagagtccaggctggagtgcagcggcacgaactcagcttgctgcatcctctgcctctaaggttcaagcaattctcctgtctcagcctcccgaatattttt

SEQ ID NO: 34640 - DNA, 2300 bp, Homo sapien
acagagcaagaccctatctgtcaaaataaaaacaaaacaaaaaaaacataaaaccccaaaaaactgtcataggaagcccaaccttcaaaccataggattcgaaactgctgaccatcttttgtgtttttttttcctttttgttcactttttaattttcactgaaatgaaataatcagtagctagagaaagtgatccacttgatgaagattcatgcctttttaaaagcaggtgttacatagaaggaaaggtagaagatgactgaccctgggaaggcgggcaagacataatgaaaatgtgggctttcagttattggtggtatagcatttttttaaagtaatttttatccttgaggaatgaagattgatttgacatagtatctaatgtatgtttatttaccttcctttagggagatgcacttatttacatggaaccagagaaacaagtgatgtccaggtcgtcagatgaatgtgttgtggctctgtgtgaccagtggttagtctcttatagcaagaaaattcccctagtcaatttgctcacctttgacttaaaaaaaaacatatcaatttgtccactcccaggtacttggattatggagaagagaattggaagaaacagacatctcagtgcttgaagaacctggaaacgtaagatgggagaaagtgatgaaggaggaaaaaggagatgaaaaatgtggaaacagtaaagttgaaatgcaacaaaaaaagtgaaccagtaaagatacactttgtcttttgctcttttctagattctgtgaggagaccaggaggaattttgaagccaccttaggttggctacaagaacatgcttgctcaagaacttatggtctaggtaaacaaacttgaaatttttctgtttggataactttgccagttacacagaaaatatacatttttacctttcccccctgccctcaattctagtgttttctgaattgaaagcagtaagtttcctctggatggtcatgaaaactaggatatagtccactatcatctactgtgtggtagaaatatgccctctctatatagattttgtggtgtgacttttttatggagagactccaagcttcaaccatttgtcttttttttcttttttagagacagagtcttgctctgtcgcctaggctggagtgcagtggtgcgatctcagctcactgcaacctctgcctcccgggttcaagcgattctcctgcctcaacctcccgagtagctgggattgcaggcacccaccaccatgcctggctaattttttttgtacttttagtagagacggggtttcaccatgttggccagtttggtcttgaactcccgacctcaggtgatccacctgccttggcctcccaaagtgctgggattataggcgtgagccaccatgcctggcccattttgtcttttatctacaattttatttttattaattattcaagaataatttaagagcttcctaaataagtagctttgtaaatgttatagcccccttcttaaaaatgtggattctatagatgaaatgtctctcaggttcctcatgcgttactttttatttttcaggcactcacctgccttgggatgagcagtggctgattgaatcactttctgactccactatttacatggcattttacacagttgcacacctattgcaggggggtaacttgcatggacaggcagagtctccgctgggcattaggttggtaaacagataagggaaaggagcataatttgtcagtaagagttgtgatatttgatttatgtatttaaatgttttaataagatttatttcacagaattttgtcatgatatttttgcttttttactattgaactgggaaaaattaataaatagccccttactgtcatcatctattcttcattcttatggaagctgttgtccttatttgttcctgtaactacattaagaaagagattcctaatccatgtttcgattcaggtactgattcttccaaagaaattacatatatatatatataaaatagtttgttttatttttaatacagaccgcaacagatgaccaaggaagtttgggattatgttttcttcaaggaggctccatttcctaagactcagattgcaaaggaaaaattagatcagttaaagcaggagtttgaattctggtatcctgttgatcttcgcgtctctggcaaggatcttgttccaaatcatctttcatattacctttataatcatgtggctatgtggccggaacaaaggtgaatgataaaataggtgtggactagatttattgattgtcaataggggtgtcttg

SEQ ID NO: 34641 - DNA, 2300 bp, Homo sapien
atatgagaatgtattctatttccaaatttctaatttttgtttttatcatgtcctttgcctaaaagcattttcagaaattgtctttttcgtgccctctaggaatctctatggagtgaatttcttgacaagatatttcaaattagttcatattattatgcagtaaacttcaaagatttattgaatggagaatacctggtcccttcttttgctcttttagttaaggagttcatattttagataagcagttttattcagtccattaatttatttattaatgtctactaaatgccaggtgagttcaacaaacatgttctgaaccattcttttctcctaattgtgcatatgttaatgtggtttatatttccatggaaagaaggctaggctagagaacataaaaatccaaacaagttattaggtgcttcagagtcaaatgaagatttttaaggacatcaacaagaatgttttttagtttagctttcctacatttttctggataaccaagaattggttacatttcttttttttgaagtgacacatattttgaatgatgataaaagcaacacttatgtagcacttatatattaatttacttaattctgaaaataaccccattctgaagtaggcactcttatctccaatttacggatgaggaaatggaggcacaaagagattattaactgatttacttgagattagccagatagttagccagtgggaactggaattcaaactaggtagcctggctctgggatttacatttgtgtgtgtgtgtgtgtgtgtgtgtgtgtgtgtgtgtgtgtctatctgacggagtcttgctctgtctcacaggctggagtgcggtggctcaatctcagctcactgcagcctccaacttccgggttcaagcgattctcctgcctcagactcctgagtagctgggactacaggcacgtgccaccatgaccagctaatttttgtatttttagtagacacgaggatttcaccatattggtcagactggtctcgaactcctgaccccaagtgatctgcccaccttggcctcccaaagtgctgggagtataggcttgaaccactgcacctggccagatttgtgttctttttttttttttttttgagacggagtcttgctgtgtcgcccaggctggagtggagtggctcaatcttggctcactgcgacctctgcttcctgggctcaagcagttctcctgcctcagcctcctgagtagctgggattacaggcccctgccatcacacccagctaattcagatttgtgttcttaatcactgcattcattaaatataactttataatgctggattaaatagatattgaagtattttggtatgttagaggtttagaatgtcaaaagagaatgcatgtcttttctacctaagatagaaacaatttgagagaaatataagagtcatgtagatgaaaataagagtcatgtaggtgaaaatatctgctttattaccagagaaagctggaaggtgattgaggcttaattgatggcaacaatggataagctaatactttgccctagaatgttattggcctactgaaaaagatagaggtgaaagagtaggcctccttctaagagcaagctttatcacatggtcaggcaaagaatactcacctgcagcaggtggggttagaaagaggagcctaattagatgaagccgaatgtacttagttccttcagaaaccaccaggaatgaggtgagtgagtgtaattgaagtctgtctatgtggaaacttaagaagtggaagtgagtattccttcctaatcatgctcacactaggtatctccgtgatacctagtgaggtgtgggtatcactgacagaacgataagtgtgttataaatattagttatccatgctataccaaaatgaaaaattatcgttgtaaatatgataaatttcatactaaaaatatttcggtgggcagaagcaaatttagttagggaaaattaggaaagaaactcaaggcagattctaactgttttatatgtggtttttctcccctctcatccttttagatcatgttggtggatggatttaaaggacagaaggttcaagatgtaaagaagactattcagaaaaagatgattgacgctgtatgtgataggctatgctctgaaggctgttttagaagagctgttaatagacttgacagtgttattagcagtgagttctacagtagaacctggagctataataaaaatatcatacagttttgcggcagaaaatagacctatttagcaattcatttaacttgaacatcccatctataatg

SEQ ID NO: 34642 - DNA, 2300 bp, Homo sapien
ggtttctccatgttggttaggctggtctcgaactcccgacctcaagtgatccgcctgccttggcctcccaaagtgctggaattacaggcatgagccaccatgcccggcccactcccagttttgaaagttctattatgagtaaaatgctatcagacagcatcgcatgctacagagaaatctttgtgaaaggaagagtcaatggatgtggcaaacttcattgttgtcttagtttaagaaattgccatagccatcacaaccttcagtagccacttctctcatcagtcagcagccgtcatcgaggcaagactctccaccagcacaaagattacaactcaactgaaggctcagatgattattagcattttatagcaatgatgtattttaaaattaaggtatatacattgtctttttaaatataactttattgcacacttaacataattcaatatagtataaacataacttatatatgccttgggaaatcaaaaaatttgtgtgacttgttttgttgtggtggtttagaaccaaacccacaatatctcccagatatgtctgtatatttgtgtgattatatgagatttggaccaattcctaattttagaataatatatttcccctgtatgccactaaagaattagtactgttattgttagactagaacctaacattgcctatgggtctcataacaatgaatacttcactatttgttgaattagaatgtatattgacatattaacaattagtagaaaggagctttattcaaagaatatgaagaagcccaagtttaacttgaatatttaggaatacataaaggtaggattaaatgtttcttcttaatttattatagcttctatatgtttgttaatatgtatatgtatatgcttaaaaatatactttaagtaaattaaagtaattgtgatatacttttaatagtggaacttggaaaattatttttaatagttgatctgattctaagttagaagagtaaataattgattcataggaattcttatttaaacaaaatttgtgtatttctcagtaattgccttttaaaattttccttttataggtagactggcgtcgttccttcatcaccactgatgttaatccttactatgattcatttgtcagatggcaatttttaacattaagagaaagaaacaaaattaaatttgggaagcggtaagtttgttatacttgagcataataaagcaaaaatcagttgggcacagaggctcacgcctgtaatcccagtgctttgggaaactgaggtgaggggattgcttgaggccaggagtttgagaccagcctgggcaacatagcgagaccacatctctttatataaaaaaaaaaattagccaggcatggtggcatgcacctgtagtcctagctacttgagaggatggggcaggaggattgcttacatgaataaataaataccttgtagcctaccttttcccattacctttcaggttttaaaatatgttgtttctattcttttgtatcctttgttttccttttttccttaccagtgtcttaatttctctgagctgcttagtgtttatgacagatataaccagggagaatgggagggtgggcttttattatcttactaaagattatgttcagtattccctgccaagcagaaaaagtaatcatttgatttgtgttttattttatactttgttctacaaattaagattcttccttgattatgtagattaatcaaggaagataacttaagaaatgaaaataagttatcttccttgattaatctacataatcaacttcctgatagtttcatttgttaagtcaatttatgttttataatcttttgttcaataccacaaagccaagatcagtgtgtatttttcagtggtattacctttgacgaagatagaaagctttcattaaataagtaggttgacagtggaactaccataagagtacacataatagacacagatatctactcagaaattctagttgcaagacatgtaagaaattaggtgcaacacaggcaaatatggtaggataaaacgtgaatattataataatgtttgtcactttttgtttattttttaggtatacaatttactctccgaaagatggacagccttgcatggatcatgatagacaaactggagaggtgattatttgtgagacagagtagctattataataatccttaataagactatagagtttaagaaatagaaacctaaaaataacttctttgtagtgctgagggatgtagtcctgatactctggtggatatgaagaggagatagaatatcaat

SEQ ID NO: 34643 - DNA, 2300 bp, Homo sapien
ccgtgttgcccaggctggtgtcgaactcctgagctcaggcaatccgcccacttaggcctcccaaagtgctaggattacaggcgtgagccacggcgcccggccatttgtgtttgttgttgttgttgttgttgttttttgagatggagtctcactctgtctcccaggctggagtgtaatggcatgatctcagctcactgcgacctctgcctcctgggttcgagtgattctcctgcctcagcctcccaaaattctgggattacaggaatgagccactgtgcccggcaagaaatgaattttaaattttatttatttttaattaatttgaatttaaattgccacatgtggctagtggctactgtatcagacaccatatatctctgtatggtagcatagtcttttttttgttttgtttttgagacggagtcttgctctgtcgcccaggctggagtgcagtgctgccatcttggcttactgcaatttccacctcccgggttcaagtgattctcctgtctcagcttcccagcagctggtattacaggcgcgtgacaccacgcctggctaatttttgtatttttagtagagacggggtttcaccatcttggccagcctggtctcgaacctctgacctcgtgatccacctgcctcggcctcccaaagtgctgggattacaggtgtgagacaccgtacccgaccagtctttttttttcccttgagatgaagtctcgctctgccgcccaagatagagtgcagtggtgcgatctcgactcagtgcaccctctgcctcctgggttcaagcaattttcctgcctcagcctcccgagtagccgggactacaggtgcacgccaccatacccagctaattttcgtatttttagtagagacggggtttcaccatgttggccaggctggtctcaaactcctgacctcaggtcatccgcccacctcggcatcccaaaataatgggattatggccaccgcccctggccctgtttggtagtggtctaaatagtctgagtcaggcaatgggaccaggtaggctttcagtctcttgcttaaaaatggagattgttggccgggcacggtggctcacgcctgtaatcccatcactttgggaggctggggcgggcggatcacgagttcaggagatcgagaccatcctggccaatatggtgaaaccccgtttctactgaaaatacaaaaattagctgggcgcggtggcgcgcgcctgtagtcccagctactaaggaggctggggcagaagaatcgcttgaacccgggaggcggaggttgcagtgagccgaaaccgcgccactgcactccagcctggagacagaacgaaactccctctcaaaaaaaaaaaaaaaaaaaaaaaaaaaaaaggagattgttggctaggtacggtagctcacgcctgtaatcctagcactttgggaggccgagggaggcagatcacgaggtcaggaaatcgggatcatcctggctaacaaggtgaaacccagtctctaccaaaaatacaaaaaattagtcggtgtggtggcgcgcgcccatagtcccagctcctcgggagcctgaggcaggagaattgcttgaatccggcaggccgaggttgcactgagccaagatcgcgccactgcactccagcctgggcgacagagcgatactgcgtctcaaaaaaaaaaaaggagattgtcaatacgcggttatacaatgtctaaatgctgggctgttgaatgccactgacagtaaaaaatatctgtgcatagtggcaagccataagtagcacctcagtcaccgtatagtaattaactgcgtatcctggcatcccgacaggcaaccagctctaccgggtgaaaaggttgatggccaagggactccaacctaaccagggcgcactcgcggcattctgcgatcccgcactgcatcatggactttgtagttcaacatgccagtgacgtcactgccggttcccctctgagtgggcctatcgggtagacttccgataacccgtttttctctgggaattgtagtcagttagcgcctgctgggtgtctgctcgggtggtctgggaactacaattcccggcgggctgtgagatgccttggctgtagttagtaaggagccggatgattgcctcagcaggtgtgaagcgtgtgctttagtttcgtgggaggcctggcatccccgagagggaggggaaaggtaaccactcctttgtggaggtcgccagggtcattgtcgtggatttgcacagtcggctgggcggtgcaatggcggtgagtttgagcgagaagaatccgcag

SEQ ID NO: 34644 - DNA, 2300 bp, Homo sapien
ttctcctgcctcagtgtctggagtagctgggattacaggcgtgtgccaccacagccagctaattttttttttattttgagacagagtcttgctctgtcgctgaggctggagtgcagtggcatgatctcggctcactgtagcctccgcctcctgggctcaagtgattctcctgcctcagtctcctgagtagctgggactacaaacacgcgccaccacgcccagctaatttttgtatttttagtagagacgaggtttcaccatgttggccaggctggtctcgatctcctgacctcatgatccgcccacctcggcctcccaaagccctgggaatacaggcatgagccactgcgcctggcccacgcccgtcccatgcccggttaatttttgtatctttagtagagacggggtttcaccatgttggccaagcttgtctggaactcctgacctcaggtgatccacccgtctgggcctcccaaagtgctgggattacaggcatgagtcaccgtgccaagcccccccttttttttttgagatggagtttctttggctcttgtcacgatcttggctcactgcaacctctgcctcctgggttcaagcgattcccctgcctcagtctcccgagtacctgggattgcaggcgtgtgccaccatgcctggcaaattttgtatttttagtagagactggtttcaccatgttggtcaggctggtctggaactcctgacctcaggtgatccacccgccttggcctcccaaaatgctgggattacaggtgtgaggcaccgcgcccagcctggcctacatttttaaatggagaaaaaaatgaaaagataatatttcatggtatgtgaaaattatataaatttaaaattttatataattttaataaatgtttgtaatacagccacaatcattccatttacatattgtccctggttaattttaagccaagacattgtatgacgagtagttgccatagatacctcaaggctcacaaaaccaaaatatttagtatctgatcctttgcagaagtttgcctatacctgttctatgtatatataggatgtctgtttatttgaggttgatccatttcttttatatgaggtgcgtgctcattaggtatttttcaaaatgttattacaatgcataaccccataaactgttcatcatcttaagaggagaagctctgttttgctcagcattggactcctagtgccttactcagtgctggcaattgcagggactcagtatatgttattgggtaaacattttaacatcagtgctaaatcagtgatttcaaaactccagaaagaatttctcacctactagaaagtaagttgactatttcagtagtttctaatttgtcttaaaaatttttttgtaatccttctttgctgattaaaattctcccttcccgtcccccaaccactgaattttagatatacaatgaaaagataattaaaaacaaactattggagtcatttttcttcctaaataaagcaacatttattaatagtactagcaaaattgaaatggcctcagccttttacatccgtgcgccacgttttaaaaatgacgattactggattccaaggcatggttgtcagaaacattctgcgtaattaaagcagagcagcagaaaatacaaacgtgagtgccaatcaacatgagtgtgtaaagaaaaaaagtaaaattttgcattctgtgcaatgtgtcgaacgtgaacgtattgcacgttgtgttgcagatttactacagctgagtcatttcgggacacgagtgtgtgtttccaagaaaaacgagaggaaggaaccaggctgaggggctcgccgggttcccccaggcactcccagcagcagacaccggtattccgcggcgggcggcggcgtggtcaaaaaaaggcgccgctgcccctttaagaggcaaagcaccttttccaagataccatcttgcaccaggagttcacttaagctctccacctaccttgctatatctctcctccctgactgggtaccgcctgccggcggggcgagcgagccttttcattggtcttgccctcagggccccctctctcttactggttctcaggcctgccactcggcactgtctcccgcccacctcagccttcgggctaggttgagtgagggctcttgggttagttcctgttaggccccggccgggggagtaggttgaagtctcctaagatgcccggtgggctggggcaccgggagctgtgaagggaacgtgagggggcggcgtagtggagacccacggcaggcctgaagaagagcggcggccgagc

SEQ ID NO: 34645 - DNA, 2300 bp, Homo sapien
aaaaaaaaaaaaaaaaaaaaggtggtgttctagccttcatttaatgatgttagagtctttgataattgtggtagatctttatggtagatctatttagcatatgattttaagtgttagttgggccttttctttttgtaatctattgctgttcaccttttctattctcatgtaataagaataatgtggccgggcgcggtggctcacgcctgtaatcccagcactttgggaggccaaggcgggtggatcatgaggtcaggagatcgagaccatcctggctaacaaggtgaaaccccgtgtctactaaaaatacaaaaaattagccgggcgcagtggcgggcgcctgtagtcccagctactcgggaggctgaggcaggagaatggcgtgaacccgggaagcagagcttgcagtgagccgagattgcgccactgcagtccgcagtccggcctgggcgacagagcgagactccgtctcaaaaaaaaaaaaaaaaaaaaaaaaaaaagaataatgttggccgggcgtagtggctcacacctgtaatgccagcactttgggaggccgagacgggtagatcaccgacgccaggagttcaagaccagcctggccaacatggtgaaaccttgtctgtactaagcatacaaaaattagtcgtgcgtgttggcatgcacctgtaatcccagatactcaggaagctgaggcaggagaatcacttgaacttgggaggtggaggttgcagtgggccgagattgttccacggcactccagcctgggcgaatgagtgagactccgtctacaaaaaaaaaaaagaagaatgtgaaaattgcttagtaatttccgaagaatgttaagggctcacaaaaggaactttaaacaaattaatcaatcagttaatttattacatagagatgtggtcttactatgttccccagactggtctggaacccctgggctcaagcaatcctcctgctttggcctctcagagtgctggcgttacaggcatgagctacttcgctcagcctgtaatctgtttctggatgcttatgtattttctgtggtttgaattttgaatataatgtttcatatgattttgaagaagttttctgggattataggtggagccaccatgcccagccacaaaaggcacttaaaaaaattataaacctaaattctttgtggttatatctctttgctaggcatgaagtaggagaattaaccaagatgtattaatcttccttttaggcaaggaaataacaatcaaaataaaccagggttcttacgaaagaatcagtatacaaacaccaaattagaagtcaagaaaatccctcaggaattgaacaacattaccaagctcaatgaacacttcagcaaatttggaactattgttaatatccaggtaaatgtggctatgtcagtgacagaatccaggcattttatgggtcttgggaatatttctatcagctcaccttgtttaaatgagtcagtggttattctgatcatctctgctaagtgctgtaaatgccaccatatatctatatacccacttttatgatggacttgttaaaccatgtttgttcttgtgaattcatttggttcttttctgcaatctcttcctgaaagagaatgggtagcctcacagttttggagactgagaagtccaagatcaaggtgctggatgattcatttcctagggagtgctgtcttcctcgcttgcagatggttggcttcttgtgttctcacatggcagacagagaaagagaaagagggggtcagggcagatctctttctcttcttttaaggccaccgatactattcattaggatgcacctttgtgacctcatttaaccttaattacatcctaaaagctctatctctaaaacagtaatgttggagtttagggctttaacatgtgtattttggggaaaacattcattacatagcagtgggtcataatttatttaactattttctgtttttgggaatttatattgttttattttcttcaaggttgcttttaagggtgacccagaagcagccctaatccaatatcttaccaatgaggaggccaggaaagccatttctagcacagaagcagttctaaacaaccgattcattcgagtcttgtggcatagggaaaataatgagcaaccgacactacagtcctcagcacagctgctcctgcaacaacagcaaacacttagtcacctctcacagcagcaccatcacctgccacagcatctacatcagcagcaggtgctagtggcccagtctgctccttcaacagtgcacggaggtatccagaagg

SEQ ID NO: 34646 - DNA, 2300 bp, Homo sapien
tatcaatgcgccaggcactgtgccatgtgcttatcccagtgcattcctcacaacaatcaatgggaaataaatgatcacccccattttacagatggggacaccgcagtacagagaagttgagaatatctcgtggtctcagccagcaagaggcagaggcgcattttgaatctgaggccagggcctgagcgctatggcaccaggttgtgagggagtttactgagcaccaatttcgtggctcaatgcttttcttcttaccctaactctgaacgtcttcaccagaatccaaggaggcagacagtagtgcaattccatttaagagccgccgaaaccgaggctcagagggctttagcgaaagggttgcgcttggctctaggcacctgggctgagtctttttcccaccatcgcagggcgggaaccagcggagggggctggctcggatggggagaaaagcaactggagggcgccgaggggaagagggagcccggatctgtcagggcgtcctcttggactaagggatgttcccctaaaccacaccaccccacctcgttcagattctgggaaacccggcacgcacataccctgcacaataacaggcagggtgaggtctctaagccccgaagatcgctctctcagcggaggcagtggccctgacgagggggtacagctgcacgcgcggggtttctctccgaaccggagtgcagcgtagtcgaggtccaggattccccatccattattcacgatgtttactagagcggggcaagggagaggaaagaagagggaagtagagagaaaaagaggctaggggaggtggaggcgggcagtgctaacctcgagagccctcaagttccgaaactttgagaaggaagaccaagaggctaaggcgcctgggaagcagcaggccgtcagtaaatatttgtaagatggatggataactgggtgagtgagtgaatgggctaatcattagcccctctgatccttgttttcctcatctgtaaaacgggataacatcacctactccatacggtgggtatgagaatcccatgggcaaactctaaattgtctagcacatattaggaactcttaaacggtagctgttgtcacgaggaatgggcttgcaagctctggctgcccagcagaaatgcactgaaggactcccaggcctggagggccatcctgaacagtcgctattctaaaaaaaatactccacaagcttccttagacgggagggttggaggaagagtgggccaagttacatccctcaaatgaaagaaagaaaggcaagcgtggggaggaagccaccccggactgagaaggcagttactgcccctacctctaccccggagcgcggttgagggaggtggggcaggggtcacctgggcctcgttctggcagcccctcaccctctccagggcccgtctgggcgcttggaggcgcctcctcgctgcgccgcgggaccggactctggtggacagcttgggcgtgaggccaggagcgccctggaaatgggcagtttggcggcagccgggccgacggagtgtgtgtgtgtgtgtgtgtgtgtgtgtgtgtgtgtgtgtgtggtggagaggggaagttggagtagggtcaacttcctgccccagctcagcccagggctacccttttatccaggcagttcgagctgggacaggacggagaggttgggacttttggggtggcatgggggaagggaagtccacgaagaagaaagaatcggaaaggtctggcgggttggagccagcggggcggggcggactgggagaggccaggccaggcccgggtataaaggctgtggagggggcggccgccgcgggcgcagaaaggcgcgccgctagctgctgtctctcctcacctcccgggccgcccctgcgagtccccggcgcgtgagcacgcctgcgcgcgcccgggcccttcctggcaggctgcttgtaagatgagtgaagaagcaggtgggggagaggggaggcagcgagcgagagggcgaggggagcgcgggcgctgagcagcgctcacttggagagcggcaagcaagctagacaagcctgattccatgtcacccgctgccaccctgccaggagcgcgaagatgatggccatgaactccaagcagcctttcggcatgcacccggtgctgcaagaacccaaattctccagtctgcactctggctccgaggccatgcgccgagtctgtctcccagccccgcaggtacgtagtggagcataattaccgctctaaggcacattttttgacaggcactagcttcatgtttttttcatgtcgcccag

SEQ ID NO: 34647 - DNA, 2300 bp, Homo sapien
tcaccttttaaagtatacgagttggctgtatgcagtggctcacacctgtaatcccagcactttgggaggccaaggtgggcagatcacttcagctcaggagttcaagaccagcctggccaacatggcaaaaccccgtctttaccaaaaatataaaaaattagctggatgtggtggcggaggcctgtgggagctacttgggaggctgaagtgtgaggatcgcttgagcctgggaggcggaggttgcagtgagctgatatcatgccactgcactccagcctgggtgacagagtgacactccctctcaaaataagtaaataaataaataaatagtatagaattcaatgggttttagtatattcacaaagttgtgcaaccatcagcgccaattccagaacatttttatcatccaaaaagacattccatatccatcagcagtcacttccaattcctcattcccctctacctcctggaaaccactgttctactttctgtctgtatgtatttgcctgaaatgcaatgcaatttcatcatatttcatgtaaatggaatcatacaacaggcggcctttttgtatgtggctttttatgtctgaacaatatttcattgtacagttataccatgtttcttttttttttgagacggagtctcgctctgttgcccaggctggagtgcagtggcgcgatctctgctcactgcaagctctgcctccggggttcacgccattctcctgccacagcctcccgagtagctgggactacaggcgcccgccaccacgccgggctatttgtttttagtagagacagggtttcaccgtgtgagccaggatggtcttgatctcctgacctcgtgatccgcccgtctaggcctcccaaagtgctgggattacaggtttgggccaccgcgcccggcctataccatgcttcttaaccatgcatcagctgatggtcattgggttgttacaatactttttggctattatgaatattgctgctgtgaacatttgtgcacatgtttttatgtggatccaattatttaggcttacagtatttaagagtgctgctttgctactacgctgactggggttaagaccaggctctgctatttagtagatgtgtgaccttgggcaagttacttaacttctctgtgcctcaagctcatctacaaacagtgactatgttacccacctcctagcaatttttgaatcttaaaagagttaacgtacctgacatacttagatccgggtttgctacatggttaggtccaagtaaaatttatctattagtattattttaatatttttacgactttaataaaagggctcatcttcattgtgcctttgaaaccccaaatccaaaacttttttttttgttaattagaaaaactaaataaatattcagaattgtctggtattctgggtgtgctaatttcagacaagcacattttgagatcgagggagacgtggttaagctgtaaattgcaaagaggcttgccttcgccaatttacctttcttaatgcagcaacttataacacctattggcttgcaacggtttagtataatttgggaggtattcttgtaattaataatatattatttaataacatggatatagagctgagtggtgacttaagactcctgctactgtaaagctaggaaatagcggctttccacagcaactgtgcaatcggtttaggcgcggcccaggtcgattttgattggcttgcccagtggaaatgctctccgcctgagctactactggccaatatggctccacaattggctctcctggaagccgacagacacgtggctaccgcaggctgagccgaacttgggaggacttagttctgcttaccgcgagagggcgccggcggttcctcactgctaaaatctcatttcccataaagcccccgagtcaccaatcaactggctgtcttcataccgctttcaaagtcggcgggcgccttgcccaatagcaaagaacatatcgcccccatttcgaagattgatggaaagtttgaccaaccgcatctcagacttctgctgtctccgcctctctcgttggggattgacgatttttctagccaataggagacgtcgggtcggcgggtggatgaacgcggccctctgtaatggcggagcgtggcggggacgggggcgagagtgaacgattcaacccgggggagctcaggtaaggaacgctgccctccttcacatctctgctcacgagagccccagaggctagacgctagacctgccatgtggagatccggggcggacggtgggtagcggagccgggcggcc

SEQ ID NO: 34648 - DNA, 2300 bp, Homo sapien
cttatattcctgagactagacacctaaaccttactaagagattatcttttaatctatctcatattcagagggcatactaatatattgagtacagatatttgtacgtaatttttgttgtgtatttcttattggtaatttgcccttgtgttgatatgattgtgtttttatagaactgtggcccgcaagtggtatagaagcaagataaatgaattatttaatgcttctaatgaaataaatcctagtgtgtatcatttatagtcattgagacattttcatgcattatatatatgctgaattataagtaatttctgagtcagtgccgctttgcctatctagtgctgaaggtactaggctcaccttcagcaatacttgttttataggtatgataataatactttataactatggtattgaatgatgttgaaacaatatgtgattttcttttgtttttcgtgaatttgtttttaaatatttgattcattcatttgataaatacattaacgtgcattgttaaaaggtactgtaaatcctgaatcaagaaagctttattttatatatttgtaaatttaaggtttgggcaagaaacatttcaaaatgaattaaatttaatgtaaagggaggataaatagaggaagtgtagaattatgctttgtttaatgttttataaagggatgaatattaagaggtgaatatattatgtaaacagtaatttttaaaaagaaaagtttgtgaaatatatgcaaatgactttgtaacaatatttgaaatgtttttgccagggcacccaactccgacaatgctgtcgatccaaaagtggcaattctctatgagtgcaagtgagtgaactaaccataaattgcagcttctttttaatactattaaagcaagtgttctggtagtgattagcagaaggattcattcctaaatattttaattaaattttgtcttatagttaaagaggaacaagaattaatggaagaaattaatgaagatgagcctgttaaagcaaaaaaacggaagtaagtaatacatacgatttgattgaggtagattatatcttttaaaagtcgatttggtaataatttgtgattggaagggacaggtaatgtgaatgttgttaggaggcatgattgctctcttaggcctgataataaatagctttgtttttcattgtagaaaatgtgtcccttcttttgctagatttgtagaagatttgggtattcatatatgtattatgactccaaatgatagttttggaattaattctttttggaaatttattaggtctcaattttatgaaaagttagtttcctccctcatttagaccccaatggataccattccagagatctcataaaaacagacacagacttctccctctttatatggttatcttacgacttacctagtccttgagtctggtcattaactccttggtgaggagagaacccataagcttaggaagtgctctgcgagaaagagactgctaagaagtagaggcattagcttggccagtgctctagagttgggtaaaatgtaaatgttatggcggggggaaggatggggtagagggtatgcatgtatggggaatgggaccattatttagcagcaaaaaggaaagtttgaagacattaacaggaactggttaattgtagtccttatctgaaaaggacagattgaatgcagccaaattatggcaaagaaatcagtaggacaacccctataaagggtagttcttttaaaaaaaatttctttattggcaacaacataaaagatatgaaagaatcactcataatttatcagcgtaacatagctattctcatttttgcaattgactttttagttcttgaccaaatgtaatttttattagttgtgattaactgattttgtgctttttttttaaaaaaaaaaaacctagaataagacatttgttttgttaattattataaatgactgtattcattctgtttatgtaccataattttggatgttcctacgatgttaaacttttaggttgtttttaattgtttgttcttatagacaactctgtaaggtttttaactgcttttatcaggagaatgtcaaagaagtcctttatgtggattgcccgagcttctctatttaggtacaaagctaaaagcctgtttttcctggcttagtttttcttttatttcctttattgagatagatagtgatagtttgtattgtgacattttcatttagtatagttctataaaggttatttgtttttattagttacttcttggatgtcttttaactctaactatttaaatagtttt

SEQ ID NO: 34649 - DNA, 2300 bp, Homo sapien
attccctcaaatttatccgttctgttgcagtcacagaagtcttcataaaaagctaatcaaattttgtcactcccctggttacttgcaggggatgaaggttctctttactcccagcagtttcctacaggtcacatttagcctccttagcataatataaaagattgttcatttcttacctcccaccttcatatttccttaacacctttgctttcttcattgttccttgaactgtagccttgctgaacatgcttaatgaaccataccatccttccattgctcacggcagtccctctacctgatatgatttggaagtgttcctgttgcagtgacagactttctcgttcttcaggggtacgctcaagtatctcttctgtgaggctactcctgacctatctaggcagattcgatctcactgttccttagaccacccttgtgctcagcatatgactgcagcacttattacctgtatttgcagttatttgcttacatgtttatcctttttgtttttttattttttatttttttgagatggagtctcactctgtcacccagctggagtgcagtggcatgatcttggctcactgcaacctttgcctcctgggttcaagtgattctcctgcctcagtctcctgagtagctgggactacaggcatgcgccaccacacacagctcatttttgtatttttagtagaaatggggtttcgccatgttggccaggctggtctcgaactcctgacctcaggtgatccacccacctcccaaagggctgggattacaggcatgagccaccgcacccggcctttttatccttttttttccttctaagtgagctctttgaaggaagggataacgtcttattttgtaatcttattgcaaagcacggtatatatctgacttgtatttagatgcttggtaagtgttggttaaataaatgtttttgtatttttgttttcttacctttctgttattttagtctgtgtttcttcacattggcagtagtgtggcttaacttttaatgccattatcaccaatgaagcatatctttttgctggttggtgagccagccagacctgttatgccttctattatactgtcttcttcttaaaaattgttttgagaagtcataattgtatatacttacggggtacagttgctgttttgatataggtagataatatggaatgattaaaccaaagctgtttaacatattcatcactttgtttgcttataattttttgtggtgagacacttggaatttactctcagttattttgaatgtagaatacattattggctttagttaaccctggtgtgcagtaggtctcaaaacttatttctgctgtctctgaaacttcattatctttgacaagtaactcctcattctctcccttgtcctgtctcctaccccctagactttggtgaccatctactctctatttctatgagttcaacttttttggattccacaaatgtgagactatgcagtatttgtgtttctgtgcttgacttatttcacttatgttgtcctctaggtttatccatgccataaatgaatagaattttcctctttttttaaggctgagtggtactccattgtgtatatttattacattttctttatccatgtatctgttgatagacacttaggttgattccatatcttggctattgtgaataatgctgcagtggacatggaagtgcaaatggacattcagataagtctctttggtgatatatatataattttttctcttcaggtacgttcttcagatgtgtcatggtctgatactcgtaggaccctccgaaaagatcaccgctgggaatctggatccttattggaaagagaggagaaagagaagctttttaatgaacacattgaagcacttaccaaaaaaaagagagagcactttaggcaacttctggatgaaacttctgcagtaagaatctcttatttttctcattttaatctggatgaatcttgttagtaatttcttaaagcaaagcattgatatgatttttagtgtcatggtctttagattcattactggaatgcatcttatgacaattctctgattttaaaaaattatggtattcttatttatttagaaatgcctattctttgcagttttcacattcataactgctcccatagtaattcaaaatgtccttagccatgtggtcagtgatccctcctaataatagatttagcaaatttcttcttttgatccattttcaatttggtactatggcctcttgttcggcagtttgtacgctttgttatccaggttttgttccttttt

SEQ ID NO: 34650 - DNA, 2300 bp, Homo sapien
agctggagcaccaggagatgcttccctgagtcagtaccaatagacttgggaagtaccacatgacagtctttagtttccctcaattgtctattaagaatcaaatttccatggtattaaaggtggcttgaacccatttagctttttatcttatacagcttcaggaggcttgaatatcataatcttgaatatataagccacagtgtgaagcagtatatttgtttcttggttctgaatgaatctcttccacatacatcaagtgaactaccttccttgtagtctacaatctgcaaaacatcactctgctccctcccccattttcttccctgtaagacgttgcgggcctcttcacacccaaaagtgatgcttgttgagactcaaggatatttcatccttaagtagttactgggagttactgtgccttgctggaataaggtgttgccccaatttactgttctataggaacaactacttcccagaggtaaaaggaaggaaagcaaaaggaaatagaaatggaaacaaaggaacccagcaccactgaccactgtcccaatagctatactgatcactacttatttattttctaggacactgaagaattttaaaacgtcagacccttctttacttgcgaaaaacgtgaaagcacagtaccagaatccagagatctgaatgcagcagcatactctcctgtatatcatgctttagcttttctgactagccacactcaatgtagcatgtatcttcatatcaaccccacaaaccccattctctgaacattttgagctcctctaatccccccagagtatccattgcttattttaaaatttcagggctagttctaccaaatcatcttatctgagaatttttttatttctagagacagaggatcactctgtcactcaggttggagtgcagcagcacagtcatagctcactgcaacctcgaactcctgggcttaagcaaccctctcacctcagtctcttaagtagctaggactacaggtgtacaccatcatggctgacttttttttttttcttttttttttttttcttgtttgtttggtagaggtgggggcaggggtctcactttgttgcccaggctggtctcgaacttctggccttaagcaatcctcccgcctccacctccccaaattctgggattacaggcatgagccagtgtgcccagcacaaaatctttaccaactttaaaatataatttaaaaaaatctcttaaatgccttccacatagatattgatttttctttcatttctcttgtcttggtaaatcctctaggaatgctctctgaaaagcagcttaattcatcatgcagttgccttcatcaccatcacttgttgaaaagtcttattagtatgtaaagcagttctaatttggagctgtaaaattgcttctaaaaactcgtaatagaataaactgagagtcatccataattagatttttttaataggacttctaacttgttttcattatccagctgtgtttgaactcagccagctgttgatggaactgaggtggttgtaagggttggggaaaagaagaggaagctcatctctgcagagtgggtaggggaagctttagttctcagtttaaaacagtggttctcaaagtgtggtctcccaacctgcagcatcagagtctcatgggaacttgttagaaatgatttcttgggccctactccagacccactggatccggccatcaggtgaagttcaaagaacttggttcagatgtagtgttcactaaattacagacagcagtcaagattttaggaagagctggttgaaaataattgccttgactggctctagtgaccccccaaggaacacatgccacttacatgtatgttctcttcattcatcatttatgggtatatttgtattactccacagggctgacgatttggtattagacttgctaatgagcagcagccatgtgctcctgctatctgacagtcggtacagtcacaagtatattgtatgcagcagagaagagcttaacagccagcctccttccacattctgctctcaggaaataagcaaggggaggatccagaagtgtcatttgacactgacgacagagtacttatttcctatgcaaaagagcccaggcagaaagacaaacctaaataagaatctaacttctgtaagaagctgtgaagagtgatgctggcagctgcctttgcagactctaactccagcagcatgaatgtgtcctttgctcacctccactttgccggagggtacctgccctctgattcccaggactggagaaccatcatcccggct

SEQ ID NO: 34651 - DNA, 2300 bp, Homo sapien
tgggaaataatgaaaccaagttgcttaacccttgcagtttgcttttcatatagccctccattaattcaacaaacagttgtttgacagtgacactttaacaagacaaggcatacaatgcatagcgtgatgaagaatgaaaagttaatctagaagaaattatattggtccctaagttttacataacttttcaaaataattctgcatctactatacttcttttacaacatgtcttttaacaactaatcattcattcaaagttaagaaataatgaatcaaaaccttttcttttcccagacaggaaaaacagaccaaaaattcatagtggggagaagtgaggagcaaatgggctggtatgaccaagaaagacttaataagaagctgagccttaaatgatcaagaagcactggatagataagaggttagtacatattttagactttgagggccatctggtctccattacaactgtttaactctgcctttgtagtgtgaaagcagcatagacaatatgtaaacagatgagcatgtatcccacatgaaggctttgcatatggacattgaaatttcaattttgtataatttttatgtgtcataaaacactattcttttttgatttcttcaactatttgaaaatgtaaaaatactgttctttgctagagttgtaaaaaagaaaagttgtgagtcagacttggctgtatgccatagtttgctgagccctgataatggtgtttgaggggtaggagggggcatcctatctagacaggggaatcagcatgaataaatgcctggggtgatcaatgcatttttgtgggacagtgggcccctaggactggtagcaccatgagatcatgtagaagggctggaagatgagatttctgcttaaactgcaaatttctttcctaaactacatctctcaggatggtacatggaatgaacttaggagtcagacatattggggctagaacctgggcttcatcatctccaggttggattgtctttgtcagttttccttatcttgttaagacgcaacttatctttaaaatgtagacatcaatatcttatttgcctggttataaaaatgaaaagagataaaagcaaataagacatgtagcacaggacaggcatggtggctcacacctgtaatcccagcactttgggaggccgaggcaggtagatcacgaagtcaggagctcgagaccaacctggccaatatggtgaaaccccatctctactaaaaatacaaaaattagctgggcatagtggcgcatgcctatagtcccagctacctgggagaagaatcgcttgaacccaggaggcggaggttgcagtgagccaagatcatgccactgcactccagcctgggccacagagtaagactctgtctcaaaaacaaacaagacatgtagcacagtgcctggtacactgtcagaagtcaccaagcccatatcgaacatttaaagaagaactaatgtcaattctactccaactgttacaaaaaaatagaggagggaatacttccaaactccttctatgaggccagtattaccctgataccaaaaccggacaaagatatatcaagagaactataagccaatatccctgatgaatatatacaaaaatcctcaaaaaaatactagcaaaccgaattcaacaatacattaaaaagatcattcatcatgaccaagtggaatttatcccagggatgcaagacagttcaccatacgaaaatcaatgtgatatgtcatatcaacagaatgaaggagaaaaaccctcaaaaaactggatatagaagaaacgtaccttaaaataataaaagtcatatatgacagagccaccgctagtatcacgctgaatggggaaaaaactgaaagcctttcctttaagatttggaacacgacaaagatgcccactgtcaccactgttgctcaacatagtactgaaagtcctagatagagcaatcagacaaaggaagaaaaggcatccaaattggaaaagaaaaagtaaaattatccttgtttgccaatgatatgatcttgtatttgaaaaaacttaaatatgccaccaaaaaactattagaactggatgtggagccaagatggccgaataggaacagctccggtctacagctcccagcgtgagcgacgcagaagacgggtgatttctgcatttccatctgaggtaccgggttcatctcactagggagtgccagacagtgggcgcaggccagtgtgtgtgcgcaccgtgcgcgagccgaagcagggcgaggcattgcctcacctgggaagcgcaaggggtcaggg

SEQ ID NO: 34652 - DNA, 2300 bp, Homo sapien
tatggcacagagccaacagcttttttccccttggttttgggtggatgagctagttctctcatattagaaaagagtagttggccaaatggaaaccttgaaatctacttaaacaatggagacctatccaatctgccttctcagaacatgtgtcttaggaaaaatgcctggactgttgaataaatgcaggagaaagtttgcagcatatgtgaaaagaaaaataaataaacccagagactcgatctgtggaagggacattctccccattggttacaatggaaaattcctcaagcacagcctggccaatgagcctgggcctacctgattcatcacacagctctgtcccaatctagcccttgattcagaaagatacaggggaaattttcccaaatactattccaaggcctcctgaaacaattttaagatcattccaaccgaaggcacaatgtcttctcatcattttgattcactaagagatgaacttagcttttccccactctgctcctactccaaattgtgccaatatccaagagaagctgcaatgtgtaactacaaaaggactgaatgttggaacctcggtgatagatacagctcatcccatggaagaaccagccacgacaacttgtactgaagtggattaaatcaacttgtacccgtcttcacctgttactaaaattttaaatgtggattttgaacaaacaagtgtataagtcttaagcactagatgaaaataaaatagaatctattgaaagttgaactgaactccccccaccacacacacacacacacacacacacacacacacacacacacacacaaaataactatgtcaaggaacatttctgctcttttctcccagggatatgcagtcaatttctggagatgaggaagatgtcattttctatctaccagaagtatccatactgcatggaaatctaatgacaattcccaacctcagttaaggacttgtttttccatttttctgaacttcaaatactttctaaattgtgttagccgaagcattgtatgtatataattaactcataggtccctctgggcccatctagctaaacttgtggagcttaactgagcaaaacatttgctgatgtctctccctacagtggtacccattgaaatgaataccttctacaagatgaaacctaggaaatgtcgtttccaattggctttctactgattggggttgatgtcttttccaaattggctttctagtgatttgggttgcttcattaaatgtttttggttgtttcataacaatagtaatctcattttctttcaaaagtagagtttgaaatttgggaaaacatgggtggggagggaattctacattttcttcctagttgaagtaggaagacaggtctcttttctgtattaattggactcctgaaattcccccagggtagcagtggctctctgtgggcacagggctcttatgcttatgtttctgtgcttcaatgtaccttccatgctgacagcaaatagaaggtgttcctgcacaagcaaaacctaacggagaggctgcaataatttgtccaaaacgaagtgcaaactgcaagggagagtggactttttcagactgatcctgtttactagtctggtgctttcctccacctgtgtagacacagatgctttattgaacaccagcctcctacagttagaaggtattttgactcttaggaatgggggaaccagttgcaaagttctggcccctgatccccctcctattcctactagagggcttaagataggctctgagcggcacttcccactttctcctctttttctgaagcttcgagccccaaacctcgccctttaaattcaccaagggaccacatgcatcatataagggtgaggaaaagggacctggatgtagacttcctgactatccaaaggaacctacttctctttgctgttctcaagttcaggcgtccggagaaaggcagggagctaggggctctgggtgctagcgtagacgtggcccttagctgagtggcgcgagaggggaggaggttggaagagcgcgtctatgcgttccacctgaacctgcaagctagtcgcttgctgcccaggtgccgattcgcggctgcatgcgccccactgcagcaaagagcagccgcagcctctgcctcggccaccactgctgctgggaaagagtcgtggggctgctgacgcggttgggaggagcctcgcctttaatgcaccagccgcctccagcctcctgcagcagcagcagcagcagcagcagcagcagctgcgagtgcgcgcgtgtgggtgtgagggtgagt

SEQ ID NO: 34653 - DNA, 2300 bp, Homo sapien
caggcactaggtgaggcagtagggatataaagatgaattagacgttgatctccccctcaagagtttgtactttcattatttagataagataggtaagtaaataaagtaatatgctgtaattaagggctgatactactgttatagacaatagtaattaaaattaggaagcacttacaatgtgctagacactgagctaagccctttatatgaactatcctatcatatcctcaacagtgtcgtttaagactctattattatccttgttaggcctgtaatgaggctaaaatatgttaagtaagttgcccaagatcacacagcaagtcaatgtcaaaggcaggattaaaccctggctgtctaactgcagcctcactcctcttaagcacatctcctcttcagctactcttaggttggtgtatggcatagaagctcagagaaggctaacagcagcaacattggtagtttatcacgtgcctgcaatgtgccagatctctatgcctattgtctcacttctttcaagaatacatgaggaaaaccttgttattcttcccattttatagaaggagaaactgaggtttgcagtgttaaaatttgttcatttctacctggccattaagtgaatgcactgggatacaaactgtcagggtcaggttgaacccaaagcccacactccttctactccctcactgctggccagaggttagatatgaagtatctcttagggagacactcctgcatatagtcttctgtcactagtttgaaattacccacaaaaacaaaccagaccacttaggcactgtttaaacagcaccttacttaggatggccctaccttgccaagtccctgggtctaaggaggtaatatgattattgcagaactaaatggcccgacactgccagcagtttgtcaccatgccatagtagtccaagggccagagaagtggcatactggtgggggaatggattgacatgaccatggtctgtcctggcactctaatgactttgttttttccctcctggggagaccagcacatttctccaatgctgagttaaatatttttgtaaggaagagagcccataaaggcttaaaaattattccatcagattttcaaggcacacttttattttatttttaaaaatctttctcagggaaatgttggttttcttttatggacatttaaatcatttccttgtgcctctgaatgcagcatgaaggacatttgactctttctcttcattatatacaatagtgtctttgacagaacttataaaccccaaactgaagccctgtgctttcttgccttccagtgataaggtttccaaagtcattattatttcatggaccaaaaccaaaccaattccccatcccaaattacttatatcttgtggttggtcatgtccttaaataatatcagtctatctgtctctgtctctgcctctgtctctctttttctctctctctctcatttgaaatctcagtgagagttttggtaaagttgtgtaatccttgtatcaacttagtttttccatgttttttaatgccatcagggttcacagattgatgaagggtcagttcctttgggtttagtctctattcttgcgttgtggctttctatttggagagtgaataactcagaactaagttattgcttcactgttaaggctggcaggggaagaaagaggcagtagtggagcacagaatctatctgtgttagccctctgtcaccgactactcaatccagcttttggcttcacctaaatgataaatggtcctattgtttgggctttagtattttaaaaaatagaactaaatctagattaagcaaggacagagacccatttcattgcactgtactttaatattcctgagatccatggcattacgggtggctccttttaacagccatctctctccagggcagaacactatgctgtctttgtttcatctgatctttcagctaaataagagatggtcacttatcctcactactcccatatcctgctggatttctcttgcgaaaagagaaactcaccacacgggaaaaggtagaggtttcaggcagagcatttcagcgtgtgtttacaggcaggactgacttactcagcaaatcctgttcagaggagcttcagccaatgaagaggctatatcccggcttgcttgggggcttctgagtttgagctgcatgcagaaatgtaaggcagtgcttcctggcgctgatggcaaaatgggacccatctccagttattcctcgggcaccccagctttgcaaatctgggaaagaacctacataaacatattggtga

SEQ ID NO: 34654 - DNA, 2300 bp, Homo sapien
cctctgggcaaccctatctatgagtaaacatcaggaactggcattggtatgtgaattggtcacattattcctagtgaattcaccaagtcagtaacttccatgatttgggtttttcagatgtgaaataaattaatttcacacataagccaggttcctcctagagctaaaattctctgaagtagtacaaatatctagacataggctcatatttaaatatgcctaggtttgtatgtatgcatgtatgtgtttcagagttgcatatgtctgcttgctttaaagtacatgtttagtgaaaatagaaacagcatctacatccagaatcataactattgatataggaactgtgccaggacaaaaactggggagaaatctcatctatagctaatgttccctaagacagatgtgtctcagatctcaacagcagaattgactcagtgtagagagggtcactgacaactcacaaggtagggtaagaacctgtcaaagaatgtctgatgctggaatccaaggccagaacagaaagtataagcaaggatcagcactgtgggtgtgtctgtctatgcactaataaatgctgctaaaggccttccttctccccttctaggtgctaattttattaggaagttttagccctgtgtcatctcaaaggagacattgatactttactacttgatatctgaaactgtattccagctcagccttccaaatgagattcttgctgtgaagccttactgggctaaagggcccaaactgtcaaatgggtatccaacctctacacactgggaatactgcaagtcagacaggcttgattgaaatctcaacctagccatgcgctaggtgtgtccttgagggagttaccaaaaattcctgagtctcagtttcctcccctgtaaagtggggatgataataatgccctccccatgatttatgtaagaatggagttactctaagtcaagtgcttaccacagtgcctgaaattttctcagccaatgttcttcttttttttttttagtatgaaacactttagaatcaatctttactactactaatatccattattaagtttcttgactgtgctaatcatattcaacatccacaactctgagagatgggtaccattattattgccatttaagatgaggaaactgtctcattatgcttagaaacttgtcccaagtcagagcccaactataaaccctgcctaattgcaaagtctctacttttaatgatgactctatactacttccatcagataacccgtcaacaacactgagaagagcatatgagaggcaatgctcctctcgtgtggctaagcagatgaaggtttccgtataggaattcaataaaaatctatggctgacaatgaaaatgactactcagatccctgtgcatttttaaaggtcaatttgtttttgaaactttgtggtttttttcctactgaatttaatcattcttaaattcataccatctcccaaaatttgattctgcaatattctcttgaattttgaaacctagttgaattgaaggggaatgttcatgctgttgagaagaaaactggcacccctgctatccagaagtgttctgtaaaggactcttttgaatatgtaaaggaattagaatatctcttaatatatgtattgatatattcattagtattggctacatatatttgtagaaaccaggagtcactattacccagaacatttagccccatcaaatgtccaactggatctgaaacaaaaataaccttggaacaaaataggccacatttgtcagaaactgactcccaaactctgtgtgagccaccccgccccatccccagccttgttttttttttgtttttccctactctgcagtcagcctgactttggcaagcagtcaagaagtgaacaagagagatggaagtgctctgggtatctgaccccttactggccgctcaaccatgcaagctgtgaagcccagtttaaaaaaaaaatgttgcctttcttttcctctcaccccttaacgaactgcctcattctcttccccaccatcacagaaggaaaacaatcaaaagcattagtattcccgtgaaaagggccagtcacacaggggatgactgcaagtccttcgtaaccactccaggacgctgccagggcctgagaagggacaaactccaattgctccagttcaaactggtcctggcctggtcaaacggaggagacagagcagtgattcacagcaggacgtggtacttgcagactgaccgtcctctcaggactcactagggtctcttctctgacgagatgatacctggtgtg

SEQ ID NO: 34655 - DNA, 2300 bp, Homo sapien
gggttgagaggatggtattactcccagtatcgaagaaagtgtacacgccccctgtgatactgttccttatatctaagttaaaaaagaatgatattaccttcagtatcgcagggggtggggtgtacactccgcctgtgatattatttctaatatcaaggggaagagagaataatgttactcccaacagcgcaagggatgtacacaaatggtgatattgttcctaatatccagggaaggagatgatgatattactggccatatcgcaggaagtgtacacccttctgtaatattgtttctaacattcagtgggggagagaataaaattgatcccaatatcgcagaaggtgtacagacccctttgatagagtttttaatgtacagggaaaaataataatattatgcccaatgtcgcaggggttgtaacccccccgccccccactgtatattcttcctaataggcagcatagtagaggtttatattactaccaatatcgcagaaggtgcacacacacctgtgatatacttcctaatatccagcgggaaagaggctgctattactttcaatatcgcagtgggtgtacatcccccctgtggttttgctcctaatatccaggggggaagagatgatattactgacaatatcacagggggtgtacacctcttctgtgatatggttcctgatataaagggggaaagtggatgatattactcttaataacgtaggaagtgtacacccaccctgtgattttgtccctaataacctcatggggagaggtgatattactcccaatattgcaaggggtggacaccccacaagtcatattgtttcttaaatccaggaagggaaaagatggtattactaccaatattcaaaggatgtacagaacgcatttcttattgttcttaatatccaggtcgaaaggagataacattacttttaatataataagggtggtacaccctgcctgtgatatgattcctaaaatctagaagaagagagaatgatattacttccaataatacactgggtgtgcaaccccctttgatattgttcctaatatctaaagaaagagatgatgatattactcccaatactgtagaaggtatacaccgtcctgtgatattgttcctaataactagtgggtgagggcatgatattatttcaaatatcgcagtggctttacaccccttccgtgatatttctcctaatttccagggggtggagtacgaagttactcccaatatagtagtgggtgtacacccacgctgtcacatttctacgaatattcagggaaacacagcacgatagaactccaagtctcgcaaagagtgtacaccattttgtgatattgttcctaataaccggaggtggataggatgctgttagtttcaatatcgcaggctgtgtacacacacactgtgaaattgtttctaatgtccaagaggggagagaatgctattaattcccatatagcaagagggtgaggcacaccccgccatatggggagtaataggaccccccctccctccctggctactacgagccacatcgctggggtgtgaggcaccctcctgccatatggggattaatagcgtccccctttcccccccgactattacgatccacatcgcaggggagtgaggcttcccccgcgatatgaggagtaatagcaccgccctctccccctcaaccccccggcttttaggatccacatcgcaggggggtgaggcacccccggcgatatggagagtaatagcaccccccttctcccccccccccccccccggctattacgatccacatcgcagggggggtgaggcagttcccgtgatatggggcgtaatagtacccgctgtgcgtcctggtggctccggacccggcccaagcgcggcgggacctccatccgtagccctctcccccaacgtcgccctcccggggtccttgtctagtctcagcaggcggcaaacggaccccaggcgtctggcgctcacccaggagactgcccagcggtttctggagagagcgctaagcggagacgcccgctggcaagcagatcccgcctccttccctggccaaggagccgcccctccggggtagctgtgcgctgggcggcgctcggaccccttggcagccgcaggtgcctccccagcccagcccagctcagtccagcgcagcccagcccagcccagcccggcgctcgcagcctccgccgcttccgggcagataggtgccttttcttgctccttgctcttggagttcttctcttagtccctgttccctggatgaaagcatcgctccg

SEQ ID NO: 34656 - DNA, 2300 bp, Homo sapien
aaggcaaagaaacttgtaaaattaaaaaaaaaggcagcagcagcggtattttttttttaggattgtaaatgtcccctacatatttttgcttttcttgagaaaaatgtgcaagatcctttccagcaagtttggggcagtaaaatctacaggaaagatgcagagagagagagctctgctggtttccatagtatgtagttaattctccttttactctgttctaaatataatcctgctcatttgcatgccaatccccagaatgctttgtaatttcacaactcttggctagtggtctcagcacttacgctttaagaacaaagcaaaatgtttagggcgtgcctttggcccagtctttttattcccccttgtgttttgcaagagtatagggaggtgatctttgcttggcattcatcctcctttgcagagtatcacagaaataaagtggagactgctgtggacttttcttgcgaagactgcattcagtccaattaaccataaataaccagaagcttggattaactcacttgagagggagtgtttaaggggggctttgtgtgtccttggattatgtgaccagtctggttcgtttcgggtttatggaaagcccaagccggagtattctgtattctctttctgtggatgccttatatagtttctttatcgcaagcacgtcttcactttaatgacaagatgtctagaattgccatcagtgggctgccttatggaaacgtgaattcaagattcaacacagctttagtcatgcttagtgacatacaggatttctatttaatagaacattaagattgacaattggggagcggtgggaaaattgtcttcaaagggttttataattttttttgcatagcaagtctttttttggttccttaaattttatgtttggaattatttgtcgtgagagttgaggagctccctcacccccagccaccactcagaccccacccacagtggcctctccaaatatgtctccctttggccgtttgattttagcaggtagctaaaggacaatgtattccatcgccgaagggccatggttttgcttgtaataacatataaaccttcgtctgtcagccctgcctaaagtaaactcgggattgtgagcagtgcacgtggttcattactgatggggagcaatagcagttctactccaaatccatggctgcgcaccaggaacgtgtctgggctactgccttcccactccacaggtgttttctactttttactcacagagcagcattcatgttctttctttgattctgagactcagtcaggcagtggagtttctttaacaagatactacttggatattttttaaatacagggaatggttgagtccactgctaccgtgccccttgcagcctctgagagcgagtcacggctttccattttctaatgtgtatgttccgggtctggggaccccagcaggcccgccaggttgcagagtcggaccagtctccggcgtctgaaggggctgcgccgctgtttaccaccccgcgagcagcagaggcggcgcccagccctcctctcgaacaaaggcgcggccgccgcattcgacccgcgccatggcagaggagagcgggtgccgggagggaagccgggaaccgtctccattctgaaactagggcggggaaggtaggagatccgacgaggagctggctgggggcggcggcgcccgcaactcggccccgcggccgggagggcgtagctgatgctcccacccccgggactcagcctccgctcccgaaaagcccctcgcgccccctggtggctgtggagcagcctgactccgcagcactcgcgaatcagaaaaaaaaaaaaaagaaagaaaaagaaaaagtgggtgaggcagatgcaaagaggaaaatcaatagggataagagagaagagggaggagtcgcagatcagccattcttgtcttatggggtcccagctggcgcagcaaaagaaaaaaaaaaacaaaacccgggcgtgaacgcgggtggaggagggtgtgcgtgggggggcgggggtgaaagggggaccggggagatttactattgtctctggcagccgccgcgggagcccgggaggggggcggaggcgggcggaggcggcggcgcggccagcgcaccattcactccacctgatctcggggcgctgtgcgctgaggaaggcgcgggcgagccggagcagaagaaggagggagggagccagccgctgcagccaccaccgccaccatgtcctaccaaggcaagaagaacatcccgcggatcacggtgagtccgggcgccgctgctccctccctc

SEQ ID NO: 34657 - DNA, 2300 bp, Homo sapien
gtggctttctcttcactggggattgggttgttgttgttgttgttgttttgtgtggaattttgctctgtcgcctaggcttgagcccagtgccgcaatctctgctcactgcaacctccacctcctgagttcaagcaattctcctgcctcagcctcctcccaagtaggtgggactacaggcgggtgccaccacgcccggctattttttacatttttagtagagattgggtttcaccatgttggccaggctgatcttgaactcctgacctgaggtgatctacctgcttcagcctcccaaagtgttgggattacaggtgtgagccactgcgcctggccaggggataggtttaaattgtgtcaacatacctgtctttgatctaagttcaggccaacttccattcctcaatattttgtggctgtcacagacctgagactgacattccagtttccggagcctttgttccactccaaaatcagagttcaaaggttaatttcatcaaattctatgtggatgccttcaaagagtatgtctatgcgcacaaagaagccggccatatgcttatgagcattaaatgagttaatatatgtgaaacaattataataatgactggcacatagcaataactccataaacattttctggtgctgctgtcgttgttattgttatcctccatttgttcaaaaagaatgtatcaagtgcctgtagatgttctgggcacaagatatacaaaggtgaactgaacagaccagatctctgcctttatggagcttagcatgtatgtgtccatacttgggagggggagtgtttagttcacaaaataaacaaagttctgtaagttgagcagaacagtgaacggctgtgctacctagatgggtggtaatagactacattcttggtgaggacaggccgatctctcttgttcgacactgttgctccagcatcttgtgaaagccatagtgggtacctgatttatgttggttgactaaataaataaatgggtgactttctgagagggagcacagttaaatccggcacaacaggttttgggtttaggtggtgtgtgcagatatgatgtaaggtatgtagtttgcaggttctgtttatgtggcagagtcggcgtcagagtatacgtgggtggacgtggggaagagaatgaggttatgaaagcacagatgtacataagtaaagtctgcatacatctgaggtaacatgaaaagcaaagtctttggttgtgtgatttttgaagtaaatctgggcttaggtgtgaatctaagtgtcggttccgactgaggtaaacctggacttgtgtcagtgtgtgagattaaaatctggggtttgttgtatgagggacagagcatcaatgaagagtgctttgcaaggcaaaacctaagaatgtgtgtgtgtgtgtgtgtgtgtgtgtgtgatctgaaatgaggcaaattaggggtggtaaaaagcaaactaggatattatatagaagctaagaaagggcttatgtgagccaaagggcttttgtgactctcaatgaagtaagagggcttctctctcagtgtgtgtttgtgttgtgtgtgtaagccaattcaggacttcatgtgagagtgtgggtttgcaaggcagattctagaactgggtgtagttatgagtgtcatcctaaagatcaggatgaggcaagtccggggttccgggtaggattgtgagtctgtcgtaaatttgagtttgtatgtgttagttgtaaatcaggacttggctttgagatgaatccacctgggtcagctgggtttttgtgcacgagggacgtcagaaagctttgtgtttgtgaggcaaactagggagttagtgtgggtgaagcagtcaagtgctggagtgtgaacatttctaagacgtctaaattgcgcgaaagtgtgtgaggcaaggctgttgcgcgagcgggcagtgtgcgcctgtgtgtgcgtgtgcgcgcgcgccaagtttggtttgtgattgtgatgggcaccgacgctgcgtcagcccgggaggccacgttagggttgggggtgcgtgaggaggtgcggccgggcgagaggtccagcgagtgagccaagcgcggcgctactctgggcccctgctccgcgcgctagctggctgtgtggctcgctggctcgctagggacaagcaggaatcggagcagcactgccgcctctggcgcgaaggctcaggcgcctcctcccgccacagtcactgtggctcggcgcacgctgccggcggctgccctttccgcctctggggaagaaaaacccgcgggccgctttcgtgcttgaaccat

SEQ ID NO: 34658 - DNA, 2300 bp, Homo sapien
ccaaaatttgtagattaaaaaacggcccttttaattactgcttattgaaaaattatgcaatgagttacaagcccccatgaattctgtcgtgcctttctaagaccttgcattttgttgtaagtccatttacatatacttggaaaataatagggagtttctgtatgtgacacatgatttattccacctgcaggcaatgccgcagacaagcacacacacttggtgttctgttccaccgttctttggataccagatgactgtcactgtagtttggaaactactaagctaataccccaaattgcaccctattctaacattctgaggtttattcagtgtttggcaacaaggtgaataagaaaacctgacatttaataattagcacaaaacaactgtaaaatctcaagcatgccttttagccgtcagcgttgcgtaataagttggtagtgctattcttctggggcttctttaagataacataggtatctggcaaggaagtgtctacctctgtcttctcctgttctctaatctcttaattgttacttcccaacagatgccaatgggccagagagcctgtatgacacaatccaaaaacatcagcatctcaaggcacagactaactcagagaaggggttagaatggatccagagggaaaatgttgagcaaccagcacagcaaagaagcttatctttgcacacttcacagtttttaaagcactcagaaaatcttcaaggctgcagattgagaaagtgacaatggatgaaatagaggagcagaacagttaagtgacttgcccaaggtttaacagatagtaggaggtattaatagaagcggaccttagcaatctgaaccttgtgtctaatgtctttgttgtgtatatccttcccacctttgccctccctccccaaacacaagaatgttcttgtagatggaaatcttttggtgctatggctgagcaatgtgggtggtttgtgttctgtttcttttctgtttatttggggattttgcctctgtttataaaatattatctctcggtgtctatagtattttgctgttgttgttaaagtgcccagaatctctcagaccttggtgtagctgagttgtggccaatatgatgcctgattattcacactgtgggggaaaaagagtaggcttttgtaaacttatggaggactgccccctgggggccagaagaatgaacccctccctggacatgagtagagtaggtgcaggaggctgataaacacggtgaaccctatgtgcccattaatatccaagaaaacctcagtagtggcattctattgggatcactcatgccaattcccagatttctcatgcattacttttctcaccccttagcaagccaaatttagtaaagattactgtagaaaacctaacttttcaaaattaacaggtgtttctaaaagaaaactagaacaatgaaaaaaaaagtaaggagacaagattgcctatcatcgcatcaccagagacaacattttctcctaaatctttctagcctttattttctgcatggatatatatacctattatatatataatttattgtaacactttgggaagctgaggcaggtggatcacttgggtctaggaatttgagactaactcgggcaacatggcaaaacctggtctctaaaaaaatacaaaaattagccgggcatggtggtgcacatctgtggtcccagctacccgggaggctgaggtaagaggattgattgagccttgaaggttgaggctgcagtgagccatgattgtgccactgcactccagcctgggtgacagaatgagatcccgtctcaaaaatatatattttaaaatagaattattctgtaccctctgttctctggcttgctttgtatcctctatagtgtcttaatggcatagatttttttcaagttcacacagagcttttctcagctatttcatagccagaataaagctgtggctagagaggaatgccctctagctggagaaggcagtatgatggaatgccagcttcccaaaccaaaacgtgcttatgaaccacctgggggcctgcttaacatgcagattctgattcaggaggtctggggtaggacttaggatgctgtattcctactgtgctctctgaggatgtggatgctgttgatctgcggaccacactttgagaaatacacaggtgacagctgtggtggaaagaactcccatccaggaatcaaaacatgtcttcacattttggccatggaacttggggtaagtttctaaacctcttaatctttgttcttttacatatagaaaaagaaatcata

SEQ ID NO: 34659 - DNA, 2300 bp, Homo sapien
taacttctacagcctgcagcttcctggtctgcttacttacaagaacatctctgcagagaaagcagaagataaaatacaggaatacaaaaagaagcgagatgatcacatcccattcctttatgttacacattacacataggtgatgctgacttggaagtgtgtgcaggttgtgtggctgctgagactttgacagaaggcaggggacactagctgcacaaaggaggttgcaggctttcccaccaagtggatggaaagccagtgtcacgtgctggggaactgctgcaactctttcctcatcacctagttatcttcaagccagttttattagaagaagcccctgacattaagagtgacaccatgcaggaaaaagtcttctcatgttttaatattagttacttacaaatgagtaacaagtaactgtagctacatttattgaacatttcctatctgctaaagaccgtacattttacacacgtcatctagtttaatttttgtaatgactcatgaggttctgtgattatttctttttacagatgaagaaacatagatttgaggaagttaataaatatgttccagattatacctatagtaaatactggcgctaggaatggagcctagatcgtctgactctggaacttgtgttaaacccatttgaacctgtaaataactctgtggattaagaacaaagattatttccattttatggaggagtggcagaaaagtgtggtggttaggagagcaaatgtaagtgttagaagagtccattttgattccggttctgtcgtttatcagttgtgaatttgggaaatgtatctaactcctctgagatttacaatgtcctcaaatatcaagatgtagagaacacttaatctcttagggcctctctgtctttgccatcatcatcatggttattacgtactttggattttctcatcttaattttttctcctacctgaaattgccatgttattccccttaaacccttagattaagagatggctgcaatgtactactatgctgctaatagtaaatatttattgtacacttactatatgccaagtgcttttagtgcattatctcattcaatctttacaacccctccacgagataaatactggtgtcatctataatttatagttagaaacagaactcgcctagaactggacattgctgatttcacttcccccttttcctgcccaccaccctgactgccaactgacttcggaactccaaaaaggcatccatgaaaacgacaggaattgcctgcaggaaattgaatgctccaggagtttgacactaaaaagattgggaactgtccaccaacttgtgctaccgagaatagtggttgttgaaaggaatttcggtctctatccaaacttacttttcctcagggatgtgtcaattacctccaagtcctgttcagaagggtagctggaaaaacagtgaaaccaagtaactcacctgagaacaagccgggagtagtgcaaaggaatcaaccagactcttaatttattacaaagtccagccactccgtttgctttctaaaaaccttgttgcctggtattgagtaaaagatgctataaaggacgaacacgtttggaagtaataataatctgctattatgcgacataattttctccacatttgttgttatttttctgataataaatttcatactttttattggaaaaccacagaaaatgcaaaaaatagctaagccgttggtatgtttctatctagatttcaattaaattttaattattctctccccgtgcctagccccccttgccccatttttaaaaagacctggagttcagggtaggagacatcaagagcatcctagagggcagcagcacaaattcactcccctccagaccctgcagcttgcttcgcccatctcccctccccctgagcttggtcgcttatcattggtcattgccatggcaaccagcagctgccgggccagcagcctctaccgcagcaggggtggggcactgggggagggggagagagagaggaggagccagaggaggtgtctgctgcaagttcctggctgcttccgagctcaccccatcctccgagagggaggaggcccaactggtgatgctgctgctgctgctgctgccgccgccgccgcctctattgctgatactctagtggggctggaagggtggttcctattcgcaccatcgccaaccagagacagagggaaaaaaaaaaccggcagccactgctgatgttgggttcggaggctgcatccgactcggtcacaaggaaaatggattcagtttgcatctctc

SEQ ID NO: 34660 - DNA, 2300 bp, Homo sapien
aatgagaaactggacagatacatgatcaaatttgcagtccataaagatccctatgggcctttctatgggcagcagctttaaggaagaaataacaacaaatattgagaaactctttgcaggaaatgcagaaacccagggggaaaggatggcattgtcttagatatgacagtggaagctaatgagaagtgtccaggattgaggttattttgaacatgaatccaagaagagaacttggtagcaaattaagtgtggaagatgatgcatagaaaggggaaagggaaatatcagggagaacaacgaggtttgggcttgagtgatctactggaaagaaaagaagctgtagggagaatagagacaaaaatattgtggtgaaagatcaaaatagtagtatggaacatattagatttgaggtagctgtaaaacatccaaatagtgatttcaagaactaaacacttccaaagcttccctttgataaaaaccaaagtccttactctagactgcactagatttagaccctcactgcttccattatttcatctcccattttgccctctatcactttgctcaagccagagtgtcctcctggatgtttctcaaacatgtcaaaccagcgtcagcctcagaacctttgcgcttactattctctctgtctggaatgcacatccttggaataaatgcatagttcaaatcctcatttccttcatgtctctgtgtgatatcacctgaaaagcaagaccttctctgattacgctatgatacatatctccttaaccctccagcacccttatccttcttgtccttttctccataatatttatctgatatattttataatcacttattattttttgtcacttgcctccctcaacaaaaaggcaatggaagctccatgaagacagagattgttatttttatttactgatctgtcttaagagataaatacagttcttgtcatgacttgggaagggtttgagattttatcctacttggaagctaagaagttagcctgccacattataatggtttctggcagaaggcacagactcctggctcagagaaaagggacttaattattccatagcaacagccagagtattggaatttgttctggtttcccaagccccaatttccacaggccaatttaaggggcatcaagtgatagttgcagggaaagtacagtgtgttaaaggaaagaaaggccaagcttttaaaaacccgaaatcttttgtaaagggcaattaacatggtctttgccctagaaggagatattaactttattacactaaacagtaaacaaacctgccttttggtgcagagggagacattacgtattttctaaggtcgtttgttatataaacacccttaaaaagatagtctgaaacaaaggttatcagtacctctactcataagacacaccaaaacatgagagaggatggagaattctcttctaataacacatggtagatatccagcacatattctcttttacccagcacatattctcagatgaaagagtaaccctttgaattaggtgttattattattttaatttccagatgaatacacagaagcacagcaaaagtggctccaacaagcaccctctagctccagaatacacgctttagggaactgagtcctctctctctcttgctttctctttccctctcatctgccactccatcagctactttaggttttgtgaatgagtgagggaaaaatagagaaaagagaaagaagaataagaaaggaagagtggaggaaaggaaaaaagaatggagaggttttaccctacttggaataaaattctttctagtagctatccatacctgctcatctatccagaactacagagtagaagggatctttgagttcatcttacaggtgagaaaacaggcttgagaagggaatgactttcccacaaccacagagggagttagggatcaaactaaccactagaactattttcctgacagaatctttgccttgcatgtttcaggcccacctggctcctttcacctttcttacacaggtgacattcccagaacctggaggccaggctatgacacagagtcaatcaataaccagggagatctgtgatatagcccagtaggtggggccttgctgccatctgccatatgacccttccagtcccaggcttctgaagagacgtggtaagtgcggtgcagttttcaactgacctctggacgcagaacttcagccatgaaggtaacaggcatctttcttctcagtgccttggccctgttgagtctatctggtaagtgttgcatatttttcaaatt

SEQ ID NO: 34661 - DNA, 2300 bp, Homo sapien
ccaggaatgaaagtgaagagaaaggatttaaaagcaagcaaacaaatttgagggcagcactggtttagtattccaaaagagaccataataaaaaactaaagggcgtcattgtggcaggctggatctccacaagcaaccaagtctccataagccctttgctgtaatgatgaatgtgtaagttaaacattgaagaactagagaaactggtgcctgagtaggagacctggaatgcagaaacaaacccgttaagaccctacctgggctttctcatcctcaaacctgattgagtgataaaagcattcatgcacatacaaaccataccaggacccatgtaaaattaagaaactttccagcccacagaccactagttaaagattagatttaggctaagtagaaatactcctgcatataggcatagagcttgaaattcatttatatatactaaaggaaaaactcataacttttagttggtctggtaaattactccgaccttctccctgtggctggttacaaaaataaactcgcttctttcccagttcacctgtatctcatcattggaccacgagagcaagcagctggaccctgttcctccggcaacggcatcaatcttaccaccaaccttggctctttgaggggcttggtatattaatatcactggcatcagtgggaatatgtgggagaaatggaagcagtactggtagagaaagaaggagaagtggcaggattgaggtgcatggcaggcattcatggtgtctttcatgtagtttataaagtagtttataaagtagcagaaagataaagaaatgacagttacaacatggtaacataaaaattagtaaaatgtgacataaattagatattaattttggtttggcatagcagaatgctctgtctgcataattttattagatcttcattacaataccacaccctcagatgaggacaaataaagccccaacctctggccttacatcttaaggtgtgttttctcaaaattttctgggttccactttggtggtgggaatggctggagccagcagtaccacgtggccggggagccctgagctggtcctgtgcccatatggactccgctttctatttcaccccttcatggttctttcttaccctcttccttgcatgtcgggcccactcgatgccccaaagaactccaggacttctgctcacaaatgaagttgtcctgaggtcctgtggctgaaccctggatccagaaagacagccttggaaacaaattactactcctgtagccagtaccttacaattacgtatttttgaatgattttatcggatttgattgccaaagaatcttgcaaaaacaattttttccccaagctacacaccttatggttggttgtgttatttatgttcccattttagatgagaggaccaatatcctagattaaaaatgtcaaatccaagattacacaaacagtgaaaattgaatcccaggtttttcaaaagacactctgattttagatcttaagcctattattctatccaaaggctcagagaagacatgctctgaacatactcaaagtaactgacactggaaaaggtaacagaggtgtgaaaatcttaccatagtagatgtgtgagtgggctgggggcaggtgaattccagagaaatgtggcactaaatgtcatgaagctgactctgtattataccagagtggcctccagattgctttcacaactgggtagttcatcagctaatgtgattctccaaactttaaatgattagaaaactggggaaaaatgtagaaaaccagaggaaaacactccttctaatccaaatataaattcttcacttcttttcaatgttcttccaggagaaggattcgttgggctctttgccttctgcttttatttctgtgcaagggtttatgcaagaggtacttgagaatgctgtactgtagagctttgtttctcatgggaacacacggggaagtggaaaaccctccaaattgtttggtgagaaaacataacatttatccctttctttggtggggtgagtcaagtggtagggactagaattcaggtcctcaatgggcatataaatatgtgtgtgcaaaagcagccatcacactttgtatggcaagtggaaccactggcttggtggattttgctagatttttctgatttttaaactcctgaaaaatatcccagataactgtcatgaagctggtaactatcttcctgctggtgaccatcagcctttgtagttactctggtaagtaactggaatacatctggaatatgtgacatttctttacttttctgtt

SEQ ID NO: 34662 - DNA, 2300 bp, Homo sapien
aagaaaccatgatatgtatacactggaatactatttactatagagccttaaaaaagaaggaaattctatcatttgcaacacagttgaacctggaggacatgatgttacatgaaataaaccaggcactgaaagacaaagaaagacaaatacataccacatgatctcatttacatgcagactctaaacaagatgaactcacagaggcaaagagtagaatgatagttaccagagaccgggagttgggtagtgggagggattggggagatgttggtcaaaagatataaaatttgagctaaataggaggaatgagtttgagacatctattttacatcatggtggctatagttaataacattgtattgtatacttgaaaattgctaagagagcagattttaagtgttctcgccacacaaaaaaagataagtatgagtagtctgggtattaaatagccagatatagcctttgcacaatatatgcatatttcaaaacatcatattgtgcaccacgaatatgtacaatattttgccaataaacaaataagtggatccacaagctgaaagagaagagagctgttaaaacacttagttctcctatgagaacacatgggcacattcaggggagcaacacacactggggtctgtcagggtttcaaggggaaagagagcatcaggaagaatagctaatggatgctgggcttaatacctaggtgccagccaggcacggtagctcacgcctgtaatcccaacacttgggaaggctgaggcgggcagatcacgaggtcaggagattgagatgatcctggccaacatagtgaaaccctgtctctactaaaaatacaaaacttagctgggcatggtggcacatgcctgtagtcccagctactagggaggctgaggcaggagaatcacttgaaccagggagtcggaggttgcagtgaactgagatcgcgccactgcactccagcctggcaacagagcgagactcagtctcaaaaaaaaaaaaaaaaaaaaagaaagaaagaaacctaggtgacaggttgatctgtgcagcaaatcatcatcatggcacatgtttccctatgtaacaaacctgcacatcctgctggctacatgtgtagcctggaacttcaaataaaagttgatggaaaaaaaagagaaaaataaaagtaaaataaataagacagtttatgttgtcgttttctgtttgttttgagacagagtctcactctgtcacccaggctggagtgcagtggtgtgatctccgctcactgcaatctccgcctcccagggttcaagcgattctcctgcctcagcctcccaagtagttgggattacaggtatctgccactacgaccagctaattttttgtatttttagtagagacggggtttcaccatgttggccaggatggtcttgaactcctgacttcgtgattcgcccacctcagcctcccaaagtgcttggattataggtgtgagccaccgcgcccagccaacacttagttcttatacaatggggtcaagtgtgctatagggcagatgatgaagtaacaaactgcctggagaagggtggagtggttatcatgaaggtatcacaaagaaggaccatttgaactgaggaatacgtaggagtgatccgaagggagacaaggaggagggtatctgaggaagaaggaagagcaagagcagacgcatggggtgtgaaagggcatgcccatgtgggaacaagggattgtcccagagcacgagggaaggcatagagtgtaaagggagggtgtaggcttgccttgccaatctgatttgttgcctgctgcttggcactgacgagcaattctacctgatatccctttaattatcaatgctggccttgaaactagcctcaagagattcactccagaaccctttatagatacaaattttaaaaatcaagagggtttttctttccctatatgtaaaatgtttggtttgaatgatagggtatgtctcattagtacagatccaaaagcaagctgtgcagacatcttgtgcaacaatctaaattccaaagcagatgatgtcacctatctatgccctataaatggagcattgtttcacatgtatctgaacaatttatctgcacgaataccccgtgctaccagaatggctgtctcagtacttcgcctgacagttgtcctgggactgcttgtcttattcctgacctgctatgcaggtaagtgcttctgatcacagcccatgaattgttcagtagttagcagtgactagagaaagctgatggcactgattcagaacataaaagaaagaa

SEQ ID NO: 34663 - DNA, 2300 bp, Homo sapien
tatatatatgatttatctctaaacctcttagcactagtacaatgtacgtgttattatttttattttacatattaggaaactgaggcttagagaaaataagtgacttgtccaaggcaacatggctaacaattcaagatttggacccatttctagcttgcttcaaagctgggttcatttctatccctacatagttgaaaagactacatagaatagaaacagatttctgaaaccctgtctcattctctttccattaagctatgatggactttgattttctaacctgtaacaataatggaatttgaacttgctttccgtggtcactaattttactattccattggaaaggagccaagctacaacaatagtgcagaccttgaaaccaatgattttatatatatatatatatgtgtgtgtatatatatgtatgtgtgtgtgtgtgtgtgtgtgtgtgtgtgtgtgtatatcttttttttttttgatggagttttgctctgtcgctgaggctggagtgcagtggcgccatctcaactcacacaccctccgcctcccgggttcaagcaattcccctgcctcagcctccagagtagctgggactacaggtgcgtaccaccaagcccatctaatttttgtattttaatagagatggggtttcaccatcttggccaggatggtctcgatctcctgacctcatgatccgccagccttggcctcccaaagtgctgggattacaggcgtgatacactgtgcctggcccagtgattatatttttataggaaataaattatttcatgagagaaaaaagaaaggacgtattatctcactgtgataaatctcataatattggcatactccctaagttgggcaactttgatcagttttctggaaccatcataaaaaggcctttaattggataaagtctcgaacttttcttctgtggatgtgaatatcttgagaagtactggaatgaaacaatttggctctggtttcagtcatcttcacatgtttcttcaggtgctttcttaagctattagggcaaaataagctggtagaaaaaaggtgttacttgtaggatgaaagaagcaactaaagagaagaaactttctctagaaaaatgttacatttacacatttataattgttaacaacttttttcttcttttctttttgggagactaaataatgggatgatacaggaagaaatatgatttagagaaaactgattgagccaaatttttcaaacggtaatatgggtaatcataggctatggaaagttaaactgagtctccaatgtttatgattatgatgtttggctaggatataaaataaggcttcagaatataaaatatcctgcagattgagaagttttaaaagtagttacatacaagttttatttttccaacgttcctgccttttctaatgtctaaggatgaagcagtgtacagagaggaaagaatgttatatgtgtggtctgcttgcaagtgctggatgcctcctctgcctgctccaactaaactgtctgcttatgagaaagtcattgctcctctgagttcctgcctccctatatattcaacattagaattttgccaggttatcttttagggtcgttcaactctaacatatatatgagtctgtgacactgaactcagacacttcagaacaggaaccctggatttctctggatgtggaaatctttaaatctatacctgactggtaggacaaccaatctgtcttcctttcctctcctctcccacttatgaagggagtccagtcagaaacatgtttgtctacgaggtagtatatctggtatttctgaggaattcggttattatataggattatagaatattcaactttgagtagggtctgtggactccatcaattgcgttctgggggaggtaccatgaaagaacattcctactttagaaatagatattctctgttcaaacctgacaccctgacaggatcctaaaggatggaagctaaagtggtgtggtatataagtcccatgaccttgaacaactggttttatgtgggtgtcaccagtgctttataaaagtaaactgcatcgccccgagttcagtcatactgcaccagctgagcaatgcatggagtggacctgtaggcgacttgcatcgtcttcaacatgaagatagccacagtgtcagtgcttctgcccttggctctttgcctcatacaaggtgagcaatttgtgtgtaatctaagcctcttgccacacatctcaaagccctggggaagggacttttctccccctactcctgccaaaaaatgtttacgtatgca

SEQ ID NO: 34664 - DNA, 2300 bp, Homo sapien
ttttttttttctataaagcacttagtaggaacccagtaaactaatttcccagaagatactcaagctttctccttttcttttccttttaggagacatgcgatgaatttcggagacttttgcaaaatggaaaacttttctgcacaagagaaaatgatcctgtgcgtggcccagatggcaagacccatggcaacaagtgtgccatgtgtaaggcagtcttgtgagtgcacaaagaaaaccactactgtgggatggtggaattggggaagcaatgagccaggcaaataatatgtattgtgtttgtcctttccttacatgtaatagaaacagaaggttatctgtaaagcatttgaaataaatcttttctttataatggccaagattcacagttctagaaataaaataaatacaactaagctattacattctctgttagttctggggtagaccctgccagtagatcacacttccttgataaaattcttaagttatttgctatcaagtggatcctttctctggattatctcgcaactcatgttggaaagaaaacacacagattttaatgtcaaagtccttacctacattgttgaaaataacacattttcagaaaatgaaaagtaggtctttacacaaagtttggaagtacacctagaatatttaagtccttcaatagcatttaccaaacatctacaatgtacaatgtgtataatgtgtataatgattatacaaaggtgaatgaaatagataatcttctcagaaatcatatagtccactgatattagtcacagacgtaaggtaatataatacaaaggagggactgttgaatgaaaaatttgtctgtggtatgttacagtacttcaagaaagggataattaatagaaagttttatggtgggataaaactagaccttataatttggataaaatgtggacatgacagaaagtaatgagaggagaagaagggaacagcaagagtaaggatctaaaattaggaaaaaaacaagtcatttagtttagtcagaacttaccaactttatcaaccttgaatgcacaccagagatttcgaggtcaattctacatgtaatgggaagctgcaaaagttgttcagataggacagtaagtggcataaatattgttcctttaggaagattcatttgttagcagtaaacaggagaaaaagagaaagaaagtactaaacttaagaattgctactcatgtagagggaggagctgcaataaataacccaggaagaggcagctacgcagagcaaggaggtaggctagaaggcgagtggatcaaggtgggggatgctgtgaaggtgaagtcaatgtcatgtggtgacagctatgcaagctgaaggacagtaagcaattagagatgattccactgttttgtgtttgtttttttgtgaaaggtagaaaatccaggagaaagaatacatttggtagagaagataatgattttggggcctcttgaacattaggtattggcgataaacacagctggagatccccagtgaacatttatgaagtgttagttaattgctcaccttgtcttttttttttttttttcttatggagtcccactctgtcgtccacactgaagtgcagtggtgtgatctcagctcactgtaacttctgcctcctgggttcaagtgattctcctgccccagcctccctagtagctggggttacaggcatgtaccaccacgcctggctaattcttgtatttttagtagagacagtgttttgccatgttggccagactggtctcgaactcctgacctcagggatccactcacctcagccttccaaagtgctgagattacaggtgcaaaccaacacacccagctttactcaccttgtcttgtttatggtgatatatatgtggtgttcttttattttaatgagacccttcctggcaaaggactccatataatttatatttttatttttagagaaggcctgcagcatagtagatgttaactcaatgctcgataattctgtacatatgtgatttgttcatataatgagaaactcaaagaaatgcacaccactctctgtaatctattgttccctacctcccactttctaatttccagccagaaagaaaatgaggaaagaaagaggaaagaagaggaagatcagagaaatgctgcaggacatggttccagtggtggtggaggaggaaacactcaggtgagagcaacctctaatttcagtaactggggcgggctcaactccttgacaataggactgtgaatagcgtatatagtctatggtaaaggcagtgctaagtccttga

SEQ ID NO: 34665 - DNA, 2300 bp, Homo sapien
tagagatcaagaaaatgtaatagtgcatttctaagtgaaaaaacaatatatattataaaagttgaatattgtaataaaacatatgtacctgtgtgattatgtatatatatttaaactggaagaatataattttatatatatttaataggtacctctgagttgtaagatttcacacctttttatttcatttgtatattttttgttttatatattttatttcattttgtatgtttcttttttttcatatttctatttggccatttctatttgtatgtttctacttgctccgcctccctctcttttttgtatatttctattttataaattttctaagtgagcatatattttctttgtataagaaaaatagctttttacagaaggaatggtagaggccagaagttcagataataggaggaccttaagctataataatatatcttccctgttaaaatggcaaaggctctgggttactacaggcacaaggctggatctactgcaaatggtatccaaggatctcatctgtcactgcaacctcctgtaccagccttttctttattagatgtttccacacatgttttcattctggtcctaatactggtcctggtcttgatactaattattgttgtggaacatgttatattctttctgcttgctctttcctactgtgggatgttttctcatgctattgcctctcttgaattgcctgctaatggctgccctttccagtgatctcttcttaccctcctcaggtcttcccctgctgaggtttgatgcaatctgaatgatggatctccagggcctgctcagtccagcacacaatgcctcagtgacttttctgtcctacgcagcagttactctatttcctcctggggccctaatacatgcttcttagaaggagcacattatattcctcttccttttctcttctttctgaggtgggtcagctgtgacatgagggatggagagagtgggcctctgtgttttgctctagttttctggctgcagctgaacttgtactgttcctgttccatttctggaggaagccagggaaaatatcaggatgagatgggggtgtgtttagcaaaacatggtgtcccagattgtgccaggagtaggcatggtaggcaacctttcatagtgtacaaagaacttgcaatcatcctgagagtagaatactctggctacattttaatgtcttaagtaacacctgccacatcagagcacatcagcagagtttatataaattatccattgacatgtgttgcagacagagataaaagcctagagaacatatggaagaccaggctacttttctagaattaggaatggaggaacagttaaatgtggtccttggtcaggccctggaaactgcagtttccattctctggggtcagaaatgttgctacaaggaaagtccatcccgagggaggatttgctctctgacttttccctttctgtgtctggattaaaatagctgtgggaccccagtgagatggcagataatgatttttctccctgtgaatgtcctcaaagagtctgggattcaacatcagaagatccttggtatagacaagcatgcctgaatcatcagaaatctttgtcttaatccaaagaggtattctttgcttgacgagcaagtacagatccactccacttattgagaagttcatgttgtctagggacctcaatagccccatctttttttttgcatcccctcaaaagataaatttaggtgaagcttcaggtaaggagttgctttttcatgacatgtaaaatgttttcccactaaaataatacacttatgcccacagagtaacctatgatttacttctgagtattcaaagatctgttactgagctctatacttttaatcaagatagttattcaaggtttaactttttaaacatttgtttctgaagaagaatggaataggctttccaaatacatagtactgaggatacaatgggtggagtagagatggctcttcattgtaaaagtcatcttaaatcctgattgtctctactttagtgattgtattagagggcaacaacctgagacaatatttcagagcatcattccaaggacacaccaggaggaaaaatggccaaatctttcccagtattctcacttttgtcctttatcttgatacatttggtgttatcttctggtgagtaatttagctggtcttggccagcagttgaaattgatttgtgggcttttacatcataatctgagagagaatgctttgaaattgttctttaactgggatgaatatatatatatgtgtatatatatataaa

SEQ ID NO: 34666 - DNA, 2300 bp, Homo sapien
ttcttcagggaattaattaaaacaaagttcaaactactgtcttttacttgctatgcagccaaacgactataattttatgtagtctgtgaataattgcctttaatttattaacttctagtatttcaccttcttatttaaagagccaattaagtgatttcccagagaatgtttcttaccttttcctttaggttgtattaaaacaaaaccaaaaactttcatatggcctcagaaacctaagaaaaaggataattcaatcattagggaccagattctttcttaaactatatatatttatgatataatatttccttccctatgtctatccagagccaatacttaatatgtgctttcatgttcctaagcgtttttgtggtaggtagtgtaaatgttgaggatagagaattgaaaacattctgaaaaagaggacagagtcattctaaataagaataattctattaaaaaatcacctattaaaaaagaactcttgaagatcagaggaaagcagggaaggaaagactggaagatagggagatggtaatatttaggtgaacagtgactgagagtgtagaggtgaatatgagaagcaaggaccaaaaatgaaactctggggagagaggaagaagtttaaacaggaagtttagaaacatcaccgtgaatttaatgatggcatatgatcgactaccactgttatgttgattttttttattactatttgtttatgctttcaaacttttgtcacttttggacatgattattattagactaattctgtacattctagtcacagaaggagggaaaaaaaggtggtcaaagaaggaagaaacataggaagtagaatggaaagagggaggaaggtcacagcagtacctaaaaccatgctatgcaatgctttagttttaggaactgatctttatattatctcatatgaatgagaaaacatacttaaagatcacaaatgggtaaattgtacaactgttgtttttaaatttcatgacttaagcaatttcccatatattttgtttttctagctattttgactcctcttcccataaaggattcaagaaaattttaaatatagtttttaaggtttttcagtagtgtctttgaatacttttaacatctgacctacatctttctgtaaaggactttaagatgatttccctcatgatattttcaatagcagtttatgatttgaggtagacgttcttgttatcactacaaccattcttttttgttgctgtttcctgaaagaaggttgtggcatcgcactctttgatctatcttgcaattaaattggccatgaaagataatgtgattcatctaacttttatatgaaaagtaaaaggaaatatattgctcatttcaaaaattcaattcaggccaggcacagtggttcacgcctataatcccagcactttggaaggccgaggcaggcggatcatgaggtcaggagtttgagaccagcctggccaacatggtgaaaccccgtctctactaagaatacaaaaattagccaggcatggtggcaggcacctgtagtcccagctactcgggaggctgaggcaggagaatcgcttgaacccgggaggcagagactgcagtaagctaagattgcaccactgcactccagcctgggcaacagagaaagactccatctcaaaaaaaaaaaaaaaaaagaaagaaaaaaaaaaaagaaaattaaattcagtaactttaaaaaacaaatttttgttacaaattaaagaaaataattgacttccctatttattttgactcaaaactggacaaccactggcatttgactgctataatgatttaaaaattaataagctgattcctgctcagaaaatgcttcttctaatgcagttctagctacagtgtggaatatctgtctcctttaggtacaccttggatgatctggactctaaaaatccaagttacacccaagattccattatcctgtggttactcacttggaccacagacatgtaggacctgtctgaaagaaatataagaatcaagtggaagtcaaccagtgaatcatccctataatgtagtgaaactttagaaagaagagccgggaggatgtattggttgttaggaaaatgtaggctaccagtagaaaatgacattctctattaataagatctgaggtgcgacacacataattgtcccaatttttaagattgatggggagcatgaagcatttttttaatgtgttggcaggccccattaaatgcataaactgcataggactcatgtggtctgaatgtattttagggctttctgggaattgtctt

SEQ ID NO: 34667 - DNA, 2300 bp, Homo sapien
aatagcaaggaaacaataaaccaactaaacagtgggcaaaggacttgaataaagatttcttaaaagaagacacacaaatggccaatacatacatgaaaaaatgttgaaagttatgttaagcagtggatatttattaaatacgtagatcatttctagctaagaaactactgaaacattcattgctaaacctaaatttgagctcatataattttggcttctaatttttatagaaatattaatattattaattactaaacgtggaatttttcaattccacattgaaaaattgcactattacagcatatttataaaatttgctaatcttctataaaattcttatatatgacagataaatcacaacaatctactttctcattttctctgtaaaagaaaggttactaatgattgaacattataatcaatatatgtgcataaaaacactagaaataatgagggtgaagggaagcaacattgcatacatgaaaagtatgcaaggaatattgtgtgtgtttctattcagggggaaaataaagggtaactttatccttaagtaaaatgaacaagttgatttcagttacacaaagtaaaatgttacttttgtcatacccgagtattattaccataaataatagtaccataatataagcaatgaagagccaatggaggacttgagtagggcaacaagatcagatttgtatttggatttgtgtccaccattcaggtaatatctgtacataaataaaatggataaactaccctgcaagtcaaaaagaaggcccatcatattcatgtataaaggaactatattataaaaatattacttttccaaaatttatgtgactccttcatcaaaattaggtgttttttttttggtggactagatacaatgtctctaaattacatctgtgaagacacatttttaaaaatatccaagaacacagtaaacaaccgaataaaaaagggatgggtggactactttatttcaccttatatctatttatttactgaatacttaccatgtggcaaattcaatgctcttcactgtgattacaaggtaaaaattattaacagatataggcaaggccttttccttaacagagcctatattctaataaattagaaggcagtattttgaagagattaaaatcactggctttgggaaaagcaagatttaatgaaaggaagaggggtacttttttttttttttttttttttttttttttaccagaaaggtgaaatgtgttatacaaggcatccatggtaaggttctaagaagactgttggaggataaattgaagggattttttttttctaaacttagagcaaatgtagagatagcaagtcaacatggtctttggcatgaatgtcatctctgtccattctagcatggttagtagctagttggtagctccagcaaatgaattatccctttgagttatccctatctcagtttctttttctcttatacaagactcagagtggtatatacctcacaggattattatgaggagtaaatatgatgagaaatgtaaactccatagccaggtgccgacagaatgaaaagaatgaatgaaggtgtagatccccaagtaagttgatatggagtgaagaataaaaacagaggaaaaaaacgtagatcataaaaattccagaattttaaagtaaaagggaaaatagtggacagggcttgttcatcctgaagtttgtttactcagcaatgaagagatgaagttttccactcaaagtcatgtgggtggaatgggatcagatagtggaaataaattgcataaaacaaagaaaatggtatgggacatgtggcataaagtagggacatgacattaaatcagaagctttcactggagtctaaagagcttaggtaaataatgatgttagcaggatcacagagtcccctgtatggaactttttctatctttctccacaaccaaggtctggagcaggaaaataagaagctgaatttatcccaacttggaagaaagaaggaaaaatagagagcaggacatcaagagaggatggacgtgttaaggagctaattattaacgtcagactgtggaattcaagctagtacaggaacacaaagccacaaaagagtgctaactactctaggagagattaaagcctgtgaaatagaacttttccagataatggcgagtttttaggcttgctcatgctgaagcttaatataagctaataagtagagaaattaggaggcttggatattgcaaactttattggttggggtgttacccaggctaatagaaaaaaaattatatcctagaaag

SEQ ID NO: 34668 - DNA, 2300 bp, Homo sapien
catacaaaacgtgtagattaactgtttatgttattaataaggtcaacagtaggatattaaggatattaatagttaaattattgaaaaataaaaaaattgtatgttaatttttcaactgtggtggtgtcagcaccccggacgccatgttgttcaagagttgaatgtataatgtgtgtgtgtgagagagtgtgtgtctgtaaaatctaatttaacactcaaaacaacctatgaggtaaatattatttctgtcataaggatgaagacactaaagtatcagatgttaacctaaatactaaaagacacacagtcaacattttttagaagaaagattctaaatgggatctactcaatgcccatgctcttaactactagattacattgcctcccaaacagatataggagtaaaatattagagattatgcaatatcatttattagtcacttaatatgtcttgtagatgctagttttagaatgtactaaaataaacctgccaagcagtaaactagtgggacagtctactgccttcccccaggtcttcatacatatgtccttaaactcaataagcaaactgcagctatttggacagttgtgcatggacaatacagtttacaatctaatgtcagcaactcatagcattaactcttggtttgtaaataataataacaatcacaataatattattaaatgcactgtgctttagagcagacttttatgtatatgattccaattatgtgaactctattgtggctaacaacaggccctattggactgggatgaaactcagtctctgggatggtctctgttgtttgccaactattctagttcttcatccaaccttcaggtcagggaacaggtcaggacaaggtaagactgtgtattaatctgttttcaagctgctgataaagacatacccaagattgggtaatttataaagaaaaagaagtttaatgggctcacagttccacatggctgaagaggcctcacaatcatggcagaaagtgaatggcatgtcttacatggcagcaggcaagagagaatgagagccaagtgcaaggggaaaccccttataaaaccatcagatcttgtgagacttattcacttccatgagaacagtatgggggaaactgcctccatgattcaattatctcccaccaggtccctcccacaacatatgggaattatgggagctacaattcaagatgggatttgggtggagacacagctaaaccacatcagattgattgcactcactccatacataacaaagcatgtgatggccacgagaccatgaggggaagtgacagcagtattgctctgggctggaagttttaattgctaaaatgagaactccttgagaacgaactcaacttcacttcaccttgactacagtgttccaaatagtgatgactctgcccacttggcatccacagtgaaggcaatgtagcatgaacagctgactaccatacaagtgtagcttgagtaagaaacaaagttttgttttaattcacagaaatcttgtggttacatgttatcacgacataaccaagccttttggattgataaaggctcacagcatataacgacttatccaagattatacaggtagaaaatatcagaagtattatgttagtgcttttctccatacctcataaatgctaatgtcagtgttccttccattaggtcccagtttgcttcattggttcattgcctcaaaaataaacaatatttccccaggtgccaagatataaacgtaggtgtaatcagtctaatcggggtttaatagattccagtttcgtaaaataaaggaggtttgagattttcacttatttcataactaagtcaagaagctcatacttagtctcttctagttcatgaagtttagaattcttaacagtcccacctttggggaagatagaaaatacttcttacctcaaataatcaaatcattggtcagataagaagtggcagttcagtaacaaggactgtaacacagcccagggtgtggcaccgtgctttgagatcctctggatgacctcacaggaaaggcggagaaaccaagccttgcatatatataaacatgaccccttacctgggatatggtcgatgcagctgtagtgacaatctcagagcagcttctacaccacagccatttccagcatgaagatcactgggggtctccttctgctctgtacagtggtctatttctgtagcagctcaggtaagttaaggtcagacagtgccctatatagccattaagattgttttcataaataatccctcctgcgatgtgagcatctcag

SEQ ID NO: 34669 - DNA, 2300 bp, Homo sapien
cagagtagcagctcagaggcagttctgcactcatattttacccacttttaattatatgcaaattcagggacagcttatgcagaaatttctaggatgaaggtggtaactatggggttgtcaggtcattgccatggaaaggggcagtaatgtctgggtgttgccatggcaatggtaaactgacatggcatactgtgaggcatgtcttatggagaagtccttatgctctggacctgttttggctagttcccaatttgttccagtgtccaagctctgcctcaggagtctagtcccacctcttccctgactactacttactcttatgaccttgaaaaacttatttctctgtacctcacttcattcatttttaaattcttgattgtaataatacttgtctcattaacttgttttgaaatttaaatgagttagtatacttatagcagttacactagtacccgaggcatagtatgtgctcagtaagtatgcttactgttattgctattatcatcacctttgcagggtgattcctttaattctaatataatagaattattataataggaaagagagattgggctcaactctggacacaacagggacaagtggggatttatagccaagaagaataatgagggggtcagtgcatagaaaacttaatagaagacattaagggtaggggggattcttgataaaaagacctaataggattcttactaaaggcaggctaagcaattatatgtcagaggtggaggataaggaactttatcagatatcaagggtgatcagatattaagaattgggggggatgattatgatttagtaggattctttactaaaactaaatttagtaagttctttactaaattgggagctggggaggccaaagacaaaatgagggccaatgccaaggcctagtcaagaaaagggtccagaggaccttaaataagtttgatcaagaagataagagtctttcggttgggcacagaggttcatgcctgtaattgcagcactttgggaggccaaggcaggcagatcacttgaggtcaggagttcaagaccagcctggccaatatggtgaaatccggtctgtactaaaaatgcaaaaattagccaggtgtggtggcatgctcctgtaatcccagctacttgggaggctgagtcaggaaaatcccttgaacacagaaggcagaggttgcagtgagctgagatcacgccactgcactccagcctaggtgataaagcaagactctgtctccaaaaaaaaaaagaagacggtctttctcaaactacatgagagcagtcagtttttcatggactgtggcatattcaagataaaatacagtctctaagacagagtaaatgctcattaatatttatgagatgatcaaatgaagattaaaaaaagccaaggcttatagcggataaatagcttgtacaaggtcacatggagagtggtgtagctggcaattagttcaggtgtgcaagattcccaaagtttcagctctcagagatagtatgatgatcttgtccccagatcataccagaataagtttcagctatctctttactttagaagggaaataaatgtgaaattcagccttagatactaatacttccattagtagtataaagtgtcctccaattctacctacaacacctgcaagagcttcttccagagttttctcatagtcactctatctgaaacctagcccattccaaaatcagcacttttgtagcctttattaaagaattcaaatgactcatggtttaattaaggaacaattaaaacttattaaaccatggccaaaagattgctggcttgtctattgcaagttattgtatgaaatgaaaaatgccactgattatgtacgtaattgtagttcaaagcaaagctaccatctcattcttcatccatcagcctgggtttggggactagctattaaaatggcatgtgcaattacctgtctttcacaagaaaagaatccccatggctcgcagacatttctgacctctttctggagttgtactacttagaaattgctatttcacaattgaggcaggaattcttgaaaatatataaggcaggatcaaagtgagctggacggacaccaggtcacttcttttccctacatctgactgccttggccacttcagtactatgagagcaacagccatagtcctactcttggctctgacacttgcaaccatgttcagtgagtatctctgataatactgcccctgcccttgtactaatagctcatgcagtcttctgcctatgtaattctgggatatatgtaattcat

SEQ ID NO: 34670 - DNA, 2300 bp, Homo sapien
tctcagtcaaaacagctacaatagtttttttttttcctttttaccttcaaaaaaaatcctgtatttgaattcatagtggagttctgccatatacgccaagtctaagggtagttaagaatagccttgatatgcatagcaccttctgcagttgtgcactgaacaggctccatagccatatgaacctgtcctgagcaaactccaaccactatccctgaccaaaacttctcttgagtattagtcatcattttaacaaagggattatctgttgtttaggtacctaaggaatttcaaggaagaacacgggctgatactagaactcatggaagaatgaaaagagatactttagaatttaattaaaaagtggggattgaaaattaaaacaacacagcggtttaaggtcatttactgtagggcaaactttcctgcagcgctcagggaccccatgatggtgccactgtacaggagaaatactaactcaggacctttttaatgaaaacctgtaacatcaaggtacaaataaatcctagagatgaagggatacatataacatgctctacctgaaaatgttaaaactagttttgatatcttattatatataacactcatagcagtgagaaaatatctttaacatttattacaatgatttgtggtaggaaattttctaaacttgaggtaggaaacctttcttactcatgagtattcatttcaggtcccactacagtgctttttacaaaaggaggaatgctaataaaatgaaaatcatattccattgaattaaaaattcaggccaattgtgctgaaataaatcttactgaatgccttctaaatatgccatgccctgcactagaaactttcgtaattcctatttattcttcagaataacctgggaaacagaaaaagctaaagtctgtttcctttattaaagtttgaatatgaagaaaccgacagaagcaaatagcataaaaattcatttttgtcttcaattacaggaagaatgtaacatgaaagctgagattacaatgaatagtacatgaatatgatgaggttttgttttgtttgtcctaccagagctccaaataaaaacacagatatatggtttgacatacggaatgggatagctaaaactgtgactgcctaagacaagctgaaacctaaggtgccgaaccatattggggaaagaggggaaaaaccagtaggtctgctatcaatcaagaaaagaataagaagaaatgggattcccaagccttcttcagctttttcttctccagcagaatagcctagtcaatgctacgtcttgtcaaattgtgtctcacatggctttaatgcacactaactttcctaagaagtatttgtatctatttaaatctagggattttagcccatattaattacatgtatattagggcaagaacacaggatgtaaaaggtaaaaatctgaatttcagtccatctgcgagacattgtgaaaatcaattacactctctgaagacaattccttatccattaaacaacagaaaaggtgattaagttgatccttgcctacatgtcagagtcgtgtagagtttttaatgacactcatgtgaaattcctttggactgtaaaatactattacttacgtgcaaagataatgtcccgaaatcacagaagggatgacttaacattaacatctttaactgcgcccccgtccttcctctcaaaaaaaaaaagttctctatttttagttgaatgattctgggaaaatctctattggaacctatcgacttcgcaaatgacaaaggcgaggtccagagacttatccaagaccccagagtaccagtggaaatcaagaccaaaccacacggtggagactggttccgacgtatcagactcagtgcttccggcatggcgctttagtgtcaggtgaaagaacagcaacccgccccgcttctccacccctgacaagccttccgaaatgccacgctgaacatggctgccgcgcttcgatgcttcttcacacacacaatatggacacgggtttgaggctccagccccggatgacaacactccggaaatatgcgagcggcggcggaagcggaagtgcctcagcggtaggggccggggaagtgtctgtagcgtccctccctctcaaccacaataacaggcggagggtcggcgtaggtgaggcggcggctgagtgggcctggggaccgggagcggggtggcaaagcccggagtgcgtgcggcagggctgaggtagctgggtggggattctggaacttccgaccgcttaagctcggcctctggcccccttggggcctaga

SEQ ID NO: 34671 - DNA, 2300 bp, Homo sapien
tatattctcaatgatcctatctggtcaagggcttccctgcccttcaagtttctcatgcctttctttagtttctattggtttcagcttgctcatatcaaagtaatcttgcatatcacttaatttgacctcacagaccttaattgacatcatagactatcttgtgtatctactgaccaggacagcctctcttgtctaaagaaataccacaccacataaaccaaactgctcagataaaaaccacacacaaacaaaacaaaacaaaaaccccccaacaggatgatggtgctgaaaaaggcctaggaatcatccagctcaacccttcgttttacagataaggaaagtgaggcctagagatgttagatggcttgtccaaagtcacagaggcaggatgtaccagtgtgaagcagggatacaggtcttcaactcctttttaattttatttcactataccaccttatttcattttagtataccaccaattttacttcactatatcaccctatcttactggaatctagttgtccctttttctcctctgctatgcattagtatctgtttgactaaatataaagtgtgtacctctgggcacacagccatttaaacaaagaggcacacaaaactctacattctttacccaaggaggacatcagaattacagcatcacatattttaaagaggggaaagaaggcttacagataatctaaaatgttaattctcaaaatgaaagttaaaaattacaagcggatttttttcagtctatgcctatgtaatacataccctccagactggacctcctccttccctgggaaaatcatggctttatagaactattattttatccttcacttgtgctgggggaatgggaaaggggattaaaaaccagtgacctaatccaacgtcttcctttagcagataaaaaaatctcaagttcagagagaggaagggatttggccaaagtaaaccatcaagttaatagcaactttggaacaaaaatcaaggtctcctgtttttcactttgtagtgatttacactgctggtttaggtgtataaaacaaagttttctggacagagcttctcattgcacaggaaccttcctaagtgaccagttgcccttggccagcttggtgtctgcaaagaaacacggtagacatctcttagtcaaattctgggtgtgcagagtgcagggagaatatgcttttcaggtctgtaaagactccatgaaaagggagttaagaatctgatttccacagctagggcacggacatcaaaggcatccaacacagataagcaaactgcagcacagaaaagctaatggacctagacaaggtcacacggtgtgtaggtggaaggggtgaaactagaattcagggctcctgatactcaggcgtggcagccaaagatgtgttcactgcttcctgctcagggacatctcctcactacgctgaacacagacctccttcactttactggccgaaacaccgacttaacattaaaatcatgaaattcgtgacgcccggggtgggagacagtcacagaagctgtccagtccaacaccctcacccatttcattgaggaaactggggcccagagagagttctttatgctggattttggggccaggttcagacaagcaggcaacccccgcaagcacggcctagaaggccaggaactacaaattcaacccctgatctctcaaggagctctaggccccaagggggccagaggccgagcttaagcggtcggaagttccagaatccccacccagctacctcagccctgccgcacgcactccgggctttgccaccccgctcccggtccccaggcccactcagccgccgcctcacctacgccgaccctccgcctgttattgtggttgagagggagggacgctacagacacttccccggcccctaccgctgaggcacttccgcttccgccgccgctcgcatatttccggagtgttgtcatccggggctggagcctcaaacccgtgtccatattgtgtgtgtgaagaagcatcgaagcgcggcagccatgttcagcgtggcatttcggaaggcttgtcaggggtggagaagcggggcgggttgctgttctttcacctgacactaaagcgccatgccggaagcactgagtctgatacgtcggaaccagtctccaccgtgtggtttggtcttgatttccactggtactctggggtcttggataagtctctggacctcgcctttgtcatttgcgaagtcgataggttccaatagagattttcccagaatcattcaactaaaaatagagaacttttt

SEQ ID NO: 34672 - DNA, 2300 bp, Homo sapien
tgtgtgtgtatttgtaatagctaaatccttgggaatgagtacaattgcccagggagaagagggctcgaggataaattagcaaaggagactgagcagtggtcatagaggaacgacaagaatcgagaatatcactttcggagccaaaggatgagagggtttcaaaggagtggtcagcggtgtcccataatacaaatgggtcagatggggaagcactggaaagaggctattggatttgttgactacatgttcaatgtaaccttagaggtttcaggagctatcataagatggaaagattcatttggaggaggcagggcagtaaacaagaaaaggtgggcagtggttaatcagaagcaggtgagtttatttatagcttttcttttagcttgggcagttctgagtatgaactttatttttccggaggcctcttagccaaaatgtgatagacaacataggagtaagcttctgagaagttaagacacatgtcacaaattcagggtagcatagcccatataccagtccacacacattgatttctctggtttctcaggccgtactggttagaaacaacagaagaggggtgtgtgtgtgtgtgtgtgtgtgtgtgtgtgtgtgtgtgtgtgtgtgatgagaggcaagcatgctgacagcctcaagaagtaaatagcacataacctttcagtgagggaagaagagaccagaacacacacacacaggcagaagaaatgatgaagatttacttagcctagtagagtgtccatttactgctgaggcaaaaaaaacctcaggaactgcatatacttaaagtaccctctgcccaccaggtgcctttctcctagtgagttctttcctactttttgcagtgttaattcctgctctcccttcagttatgggctcaattgtctttccctcaggagaaccattagtgactcaggcccctttgttatatgaggcttcacaactgtgtttactgtctttgcagcagttatctccgtgtgcaattctgagctcatttgcgtggttatttaattgtgtatctccacttaactctgggccgtttgtttacaatgggcccagagtacataagtggtattcaaaataaatgtgccaaggcatatttaaatgaatctgaatgcacctcttttcagctgtcatcctgtgcctcctccatctacaaagccattaatataaaagagaccaatatttcctataaacttccctatatctgtaccaacattattaaaatattcctagacaatttgacaatcaaggtgttaactccacatgctgatcaatagaacagaaaaccatctgggtgctcatgcaacccattttctccctgctttccctctccattcctcctctctcccctcttttctttctcttttcatccttctctaaagcttattttaaaaacaaaatatgcatgtgatgcaaaagtgaaataccatgtcaatattcacaagagagggagaagggatgtttcattctttctctgaagttgtatataagcttgtgtttattttttaggagttctctagtttttatcagattcacaaaggggtccatgactaatctaatctctgactttataggtgagagaatgaagaattttaaagattgatgcaagtttatagaaataatttggggcagaatcaagattagaacccaagaatctcttctcctttccactatgttagggtcagtcctagaaagaaccacaagctcctggagctggaagaggttttgattcctcatttaatgatcacacgttacatatgaagaaattgatacttggagaaattgagtgaataagctaagaagcaacagtacaaattaaagcacaatactcatgattcctggatttttgctctttctaagtaatgcatatttatattatcttcagaagttgattatccactcatcttgagaaaaagatgttctgtgctttttgcacagaacaaattaatatttttattaatttgaatgtgatgtgtaccattatgatacctctgcttgtgtgtgtttgaaaataaacattgtttaacctgggttttagtagggggtgtgtttttttagtctacttcgttctgtttgcttttcaggtactttgaactcaagtaaacaaaagggaagattttctcgttgatactggagactgcacaacaatggggccacgaaagaaaagtgtgaaaacatgtatcatgaataatgaaattccagaagaaatgacagcagatgaaacaaaggactatatgaatcaactttcacatgaagtactttgccatatttttaggtaagat

SEQ ID NO: 34673 - DNA, 2300 bp, Homo sapien
tatgaaccagtatgatagatccttcacttatgctttaagaatttttgccttttctcttctctaaacaattggaaataatttttcctactagctgtcccttgacttttaatataatttattattttgtacaagaagtgctaccatatgtacggaatacctaacctaaaattatacctgaacccaatgataagcagatgatacagaatgatggtagagactttttatactgactggtaagatacaaagttggtaacactccctaacacttaagaatttgactttttttttttttaattgattgctctttttaggcagaatggctaatgcggatctggtgaagtatggtttggctgatgtggtagaaaatcctggtatcatcactgatatagggatgaaagcagtcaatgaagttttttcctgtatcaaatatctggcaatttacaattgccctcatctacacaacccatacaattggatctcaggtattacagacttaaaaatacagctatgttttattgatactgaaataatacaactttccatgttttctatgtgtgatatgattgcattcctaatgtaaaatgtaggtatttcatttggattgttcatacaagttctggtaacctttgataaccaagttggaagtatattcaatgcctctttaaacttctgacgttctctgcctagaagtgtatactctccaggttgtggattcaagtgccctgatttttatatgtacttctttgggctaggaacataaaattaaggttagttcattgttacctaggacttaggatattgtagttattttctcagaattatcttcacaatagcacatcatctgaaaggacaaagtaggtatgtatgttgaactttaattaagtgacattaacctgagataaaaatttctattgactagaaatcccagtctatttcagatctccccctccaatctcctatatgtagaagtgtgacttttgcacttgatatttttcccttatggtgggagttcattttcctctcagagtaatgtcatctgttttcttaaaggcccttcttagataccgaaatttacaaaccattaaataaattgagagcctgaaaaagttgtacttgtgacaaagcctctcactgacacctacagaacagcctcctctgctattgagtcacttgaccgggatctgtatctcctcacaaagctactatccaggcctattttagggctctgggacctctgctgagatcactcgttaatatagtcatgtctcatgtgccagcagcagttaaattctatccctggccctgctgaaccaagaagttattgggaaatatgaactttaggatgtagcaggcgtagatgactttaaaaaaataacatttattgggtttttggtttgtttgttttcttaaatacagaagagtataaagaagaaaacaaaaaatggcctataatcccatcactcagaattcctgttaacacttaaaaaaataagtaatacatgcacttgataaatttcaaacagtacagaaaggtacaaaatgaaaactctcctcttctcaaaggtaaccatcatcaacagttttttgtatatttttctggacaaattatgcatattgcagcatatatatgtgtagcatttaaaaatgatttatattataccaaaggatcttactctgtatacactgtcctgtagcttgttttttgtactaagtataatttggagagttttccatgtcagcaagcatattaagctctccttaattcttttgaaatagctacataatgttctattaaataaatatgccataattttttaattcagtgtcctattgttgaaaagccatgtaggttgttgagtggatcacatttaaatcagggctgattggattcaaattaatgttccccaggccatttagttctcacaatggaattaggtatgtaaacatcataatttagaatcatcgggttttagaagtcatgaaaaaaaggaaaagttattttaaaaaaaaggatttgaaagtctttgtgacctgtatcaaaattcatcagtaatggggaaaatgttacttagattttctctggtcatgtcatttctttaacagaccactcaagatggactcgattggttgatatcaacctagtacggtgccatgctttgaagctggactcttttggccagtttattgaattattacccagcctagagtttatttcactggatcagatgtttcgtgaaccacccaaggtaagatacatttgagggagtttttgtttattttgataggaaagaaaataaaaa

SEQ ID NO: 34674 - DNA, 2300 bp, Homo sapien
aaatcaagccattatgctttttttctttacttcctacctgctctccaagacgttgagtcatttaccaactcttgttgaatgtctctgaaacatctctccagtatgcctacatctctcctttcccattgtactaccactacatcagacctttctcttttttttttttttacctaaatgttttaatagctttcaaactggcctattttcttgcccagctaaaattagttcttatagcaaccagggcagtcttttaacaacaaaccaaacaatattgataccttactcaaaactttttaatagcttcccattgccttagaataagatccagcttcttaaattggaccaccaaatgctgtacgatctggcctgccctcatcttgtactacttccaccactacatcattcttgaacatgacagctggtgcctagcattgcactaactactgcctcctagaattccctccttccatgttttcatggctggctccttcttgacttttagttcttagctgaaatgttaatctcagagatgtctttccttgccatctgatcttaagcagccaccagtttattctctgtcacatcacactttttgttacataaggcattactatctgatgtttttatttttatttttaaaattttttctcccccaactagagtaagccatgagactagggatcttgaatttcaccactgtttctcagctccaaggaatactaacaaattgtagtaagatgctcagtaagtattcaaatgaatgcaatgaaagaaatcgtttaaacaacttttgggtatcatattaaatgtttgcacaggctattctggcaacctaaaagcagttgatcagcaactttggaaaaccttatcacattgatgtttgaatgtacttcttttcatgccattccctgcataaaaacctagtggtttccctctgcctactgcaaacaattctaagctttttagcaaggctttccaagcttttaacaatctggggcccaggctaccttttcagccttgttttttctttcgcatctctatcacaacacagataactggtttgtttgtttgtttgtttgtttgtttgtttgttttaaccactggactactattcttccaaaaaatgtagcattcttgtatggtggtatatgaaatgtcaccttatttcagtgaacccttccttgacccaatgagagaattagttgtttcttgtctgtgttccctttgaacttttgaactgttatagctcttagcaagtatattctgaccttattctatgtgtctaacatctttgccagaatgtgtgcatcctctttaagagcaaggagtataaatttcccacttgctcatagttcctgtagtgcagtaggctctagaaactcctcaggttaaatcctagcaaactgttaaaacctctagacctccatttcctcaactgcaaaaatcaggctagtaataatgccctcacacaagattgctacgagaaataaataagaaaatgtttctataaacatttagcatagagcctgccatagagtatgtacacattaattactgctactcataattgttagtcaattgaatgaaagaagaaaattgattggcttttatcatgaaaggtttctaggcaaggtcatttctcattttggcaataaccaaaatatagatattgcaggctagagctgggcaattattcagggggaggtgtgctgttgtgcttgtttaaaaccaaagcaattcccactgtccctgtgaaatttcaaacctctcccatataattcagtgacattaatctgaatggcatctttttggcttaatcatattttgccttgtttctttgttaactgtttgagtttgtatgagtttgatgggctttctccaacaaatgatcctttcccatctgtgattttctctcctgtagactgattaaatacttcttaatatctgcagtaacaagcacagtgtatgcagtatatgctgttctttcagggcaggcctagtaatcagcgggactgttcagttcttagggcggccacagttttgcctgccattgtagttctttatacttcttttggtttttactttgtgtatattttcgttgaagcattaaatgagatggaagacatcgtccaagaagatggagaggtggtggccgagagtggaaataatactccagctcacagccaggcaattattcctgtggatgttgatgaggaacaagcaggtaatcatgtgatccatcccacattcatcattctgaaactacggcctaactgtaatgaagtacatgagacagcgag

SEQ ID NO: 34675 - DNA, 2300 bp, Homo sapien
ttttaggatgattttatgatactctttgaaatagtgaaggtcctgcaaggggatgctgtatcattttctattttaatttgcctttggaaatgcatcaagttggttggcatattaatcatatttaatgttgacataatggtttagagttgagttgctttcacagtatcttatccaagtgcattatcagttaaaatgtgtgccaggggaggctgtatagagccacaaagcatctctgttgattccagatccctggaaacagtactttgcattagatcctttcttgcgcaaaaagtaactgttaggcctgtgcttttttttaaggacccagtggtcttcagcgtgtagtaaaaccaacctcaattactgttcatgattcagagagtgatgatgaagaagatagtctagaactccaagaagtctggattcctaagaacggtactcggcgttactctgaacgtgaagaaaaaactggagagtcagtgcagtccagagaattgtcaggtgagaaattgtctttctctgaactattaatgagagtcactatcagaactgacacacttggccttaatatgacaacttgggtgcagttaacatatattacggaatgtgacaggaagcaagaaatgcacttgcccaagtaagggaaatctgggtggtgctcttgtaggcaatacaacacaacagtgttgtggaatgagggctcagggaagaagagaagtaaggattataagtctacagtggaggcttcagttgtggcatcagggtgtcagagattagtgagcgaaaagcctgtgccttatgtaagggatgactgctgagtcatccagagcaatgaaaagcaaccattccccagttgataatctgtccagttgtgcttaatgaatattggtggctagtttggtgctggaaggagtcctaaagcatatttttataatccctcacatccctttaaatctaggcaacaaccctctgcagtgcctcaccaagaaactgtacttctctcttaactttgaagttcatacttcttccttgtctttccttccctttggtttcgcagaaccacgtgcttaccacttttagcaaaagatggatattttgcaaattgtgcagtcatttttccttgggtacccttactccttaatatttttgaatgttcaaaacacatttaacactgaccctggaacatttatgtagtactattatctggaaagtttagttctttggacttgaaataatttgctaatcattgactcattattcaatttttatttcttttaagaaattcagataactttataatgtggttgaaagaaggttttatggaaactgaaatttaggaaaagtaatatgaccagctgactaacctaccttcccagacagtgcagtttctaaatttagcaactaaatcctctgttggccagacaaaacctatttattcctttatatcttcattgagccttactatgccccaggtactgtgttaggcactgtgagggatacagagatgagtaagtcatggtctgtctttacagaagttctagtctagttgaagagtcatgtcaaaaacaataggtagtaatattacagggcatatactacaactacagttgctttggggtgggggtgcagaagagatggagtagaggaccagggaggaccacagctgacaaattggtgagaacaaagcccctgaggtagtaaagcaggggtattttgagagaaaagctggagctggaatgtagaatgtatatggagggtacgacatggaaagatggtttggaatcagatcatagtgaggtttgaaggcatagctaaggagtataaaccagatagacactagggagccatagagaattttatagcagctcagtgatgtgatcacagttatactttaggaaaattagtgtttagtatacattatttcctgttccaaatttactcttgcgttttgtccagaatttatactgaaatcttttcttttcctcgggccgttcttctttttctataagcagtaagtggaaaaggcaagactccacttcgaaagaggtacaactcccatcagatgggccagtcgaagcagtttcccctcgaggaaagcagctgtgagaaaggctgtcaggtcaccagtgagcagatcaaagccgatatgaaagcagctagggatattcctgaaaagaaaaaaaacaaggatgtttatcccagctgcagcagcaccaccgccagcacagtgggaaactccagctcacacaacactgcttctcaaagccccgactttgtaaggacggtgaacagcggcggct

SEQ ID NO: 34676 - DNA, 2300 bp, Homo sapien
gaaattggtggcttggacccagatgctgggtccagaggtgatgagaagggtcaggagtaggaataattttcttcctttcttttactttttttctttctttctttttcttgagacagggtctcactttgtcacccaggctggagtacagtagcgtgatcttggctcacagcagcctcaacctcctgggctcaggtgatcctcccacctcagccccccaggtagctggaactacaggcatatatcaccacgcccatctaattttttgtggagatggggttttgccacgttgcccaggctggtctcaaactcctgggctcaagcgatccactcacctaggccccccaaagtgttgggattataggcatgagctactgcccccggccaggaatcattttcaaagtagagagaatgagtttgctgatggtttggtcttagggtatgagaagaagtttttctggtctgaaccactgggtaaatggtgggccatttactgagatagagaacactggggaagagcaggtttttgtgtcggagatgagaaaggaagagtttagtttgaaatgctttttaatcatccatcttgagatgctggatgggcactgtctacacctgggaaagtctcaacgtagggataaaattttgggagtctacagtgaatagtattgtaattgtactgtattttcagccaccagatggatgtgatcctctcaggaaaaattttagatagacaaggaaagaggattgagacctgtcacttcgatagttagggctttgtacttgtatatttccagcaaaatattattctacattcaaaatataaaacagacagatgtggacagagctactttccttcagattaggggagggggctcagagttctgcaggtggagcctttcccatgcctgccccaggcccagaaatgcccatgggagctcctgttaagtttagaggatctaagaaacaaacatcgaaaaacacagagagtcgaggtcctttccatatctagtgatctgccattctcttcgtggctgccagccacatctgtttagctcaccctggccaaggtgtccaagggcccaggctgagtttcatggttcttttatgtagataacagatttccaggttcttcttggtaagattcaactagaaaactagcaaacagaactatagaatatcagagctaggagtgaactcagagattatttttttccaatctcttctctttactgagaagtgaatgatgatgttcagaaggaaaagggacttgctcatggtgaccctagaagagacagccggaccctgcccctacacttactgattcatcatgctgtggaacagatgtgatgaagatataaaaatgcaaaaatggaactgaacaattagtaaagagggttgattttgtggagatcagtgaatgcccatccattaaagagtgtgaggtcttctgagggtctgtgatagaggaactttggtaatttgaagttaactctccttcgattgggaattcttagcctggggttcctggatgggcctgggattcctggattcctgagttcaaggaatcatggactctctggaaagtgtgcatgtgtgtgcatgcgtatctatttttttctgggcagacagttctcaagagtttactagattctcaaaagaatctgtgatttcctacccttaaaatgatttaaacatttttttaaaatcctcataggaacaaaatggccattttgggcaatatactattttaagcataagaatgtagctacctatcttcactaattactgtcctaatgcagatcataaaaataagccatgtttctggaaagaacataaataacaataaatggagcaaaaagaagcacccatatgttttaatcacaaagcgatcagtagggtgtaaataaaccttttgtgacactcggctgtaccatacgtcaatatgccaaaagctttttgctttagtattgtttattaaatatttccacaaaacaagtcataataggaagcaatagttatttgagttttttaaaacaaggacttgtatttttcaatgctgctttcttttataacatctttttacttcccccattttaggaccctgtgggcattgaaatccaactcactcatgcttatttcctgtaatggacaaacttgatgctaatgtgaggtatgttacctttctgtacatattgtgttgtaaactgagaacatttctgctatgaagactctaaaaatctgttgttgtagagttataaagttaatggatgtggattttctttgatgtttcatatataatcatg

SEQ ID NO: 34677 - DNA, 2300 bp, Homo sapien
ctgcaaagtcccttttgccatgcaaggtaacataaccacaggtccttgggattaggacatggatatctttggggagctgctttctacctttcatgggtattagggttttagagcaaagagtgatgctgttggggatctatctgcctgaggaagaccatgctgagctcaatgaagaggatggactggagggagagaagaccagttagacaatctttgatgattacctctctctctctctctctctctctctctctctctctatatatatatatatatatatatatatacacatacatacatacatatatataaaattaggcccagtggaaataagaaggaagggacagatgcaaatgacagagtggaaatagagtccccaggaactggcaaatgtttgagtagaaagtggggagaaggggaacagaggtggaggtgtcaaagatgattcaggctctgagcatccatgagtgaggataatggctttatttaagtgaggtgtttggtttagggaaggggagtagtggcaaattcaagtttagatcttattgtcattaaagaaacaatctacagctcctctccttttaaatttttcataggggatatgagataaatacatattcaagacatacacaccaaggaaagaactaacaggtggaaatggctgagagatgttgagacaaaaacttggcacaaagatggtgaagaagacatacacagaatggggactcagatgggaggagaaggaaagaagagagaaaaaagtgtaagagtaagatggggaagaaatatagaccatgaggaagaaggaaggacctaacaaaatagagggaaaatgagagacaaggcatgtcaacagagagaaactaaaaaagggaccaactcaaaggtttctagcatggataagttggtcaatttaaatttccagttcacttgagatgtgcttacaatcgttaagttaataatttttaagattgtctttgcagatttatttactttcagaagttaatcactgtccacagcttctctgttttgtttaggttccaggaggcctcagtggcccttgagggggtgaattattcacccattacccctttgctccctgcctgcctccgtgaaggaaggctctgctcgctcctgcccttcccaacatgcttaggctaactcttgaattattttatccttggaatttgaggcttttgtcacatgtgttgaggaaaaatatttttcactctgtcaccgtccctcacaggtactgcaactcactaagtggcacacctgcaccacacaactgtgagtttatgcccgtgttacagacgggagcgttgaggcttgactcttgtttaattacatgctcaaggtcacaggtggtcaaagctgggaggacaggctaagacagcaaatagtggactatcaatatggacaggatcatttaggaagacttcaggcaaatggaatcattgtctctggaaaacttgagtcttatatccaaggtgctacgaagctcactctgaaccctgcacccaaactctccctgctctggcagaggcagaggcataagaaggaagtaaactatacagggataggatttccctggcacagacgccacaaacgctttcatgtttattatatttgaatagaggaagtgggcactcagagaggctaaccaacttgtccaaggtcacccaggagcctgcagtcagcccagggctccttcctgccctccatcagatgagcagcgctccggccagggagggcgcgtgctggccagcccggaacgggtgagatcgctccagcccgcctctgtgcccactcccctgtgcgccctgccggcagagcggcacccccgctgtccctggcgcccagtgggggcggcagcgggcagggcagcggggaccaccggggctgggggctgttgagcccgtggagtccggctcggttggggagaaggacgatgcgcggcgagcccaggtgatccggggctggggtcctgcgcccgcagcccctggcccgcgcctcacgctcgccggctccccagcgcgggggctggagcccgcacccgagggggcggcagggagggcgcaggcagcggctgggagcgcagcggcagcggcggcagcagaagctcggctcagcggctgggggtggccgctcgaatctgccagggcacctcgctccctcgcctctggcagcgggtatgtgcggcaagtgcgccgggggtcgggaccccaggagcccacgggtgccggtggggacgcggcgggggcggggcagcacgacggggtcgggggcttgggggttct

SEQ ID NO: 34678 - DNA, 2300 bp, Homo sapien
tgcccactttagagatgaagtctgtagaggggaagtagtttgtccagtgttacgtagcttataactcagatgcttggcacagcatcaattcctgtgaataatggaatacacaagtacttcctgagacttagatacctgtgtatggctccctggttgtctctcactgaatccacctatctctggtagccacagtatcatggacctactcctcaattatccttgccctcaattcagatttcattttctctttgaaataaatgtgtgtaccgtttaacggaaaagtgatttccctggagcaggggcctctaaaattatagcaaaatctatttttttttcaactacagagggagaggaaagtggccaaatgtgaagctttatgattgaaggtaagttttcattccacctagagctgtattcctgtcatggcaacacatgcagtacatacatacacacacacacacacacacagacacagacagacacaccccatacagagcaaatccctcctcccaaactcttcagatatttacagtgtagctacatcttagacttgattttaaaaattagttgaaaggttaaaataacatggacaaaaatgatagcattaacacatttccttataaggacagcattggaaaccgttatgccatttcggaataaatccaacccagccaatttcttttacagcttagaatggattgttgcttctttagttgattgtcacatgatattgcttgtttgtatttatgaagaatgccatataaaaagtgtattacctgagacactaaaatcacacttagcacagtgagaggctttctttgggaggagtacaagaaaactgggaaataaaatttatgcctcccatatgctaactctagggtatatggttactgaatgaaatggatgatagaatttctcctagtatttgaattattttctctatattttgacaaacatgtgaaattgaacttgtgcaagttaagtgaaaatgcgtgttactcctctatatactcaaacttccagtccctctgataaacaatattaggttcttatagatctatcacttatgagggttcttgagaaaggcgtattagtgatagcagggtgtatttgtctttaatgagcttgaagaatttatgaattcattcacttactcttagaatagtaacaggggtatcatctatgtgtcagacgctgtcccaggtgctgagaaatttgagagaaattaagagatcaacgctgtctttaagctactcagaaatgctagatggtttactcattaaaaaaaaaaaaaataaatgtccaggagcatatgagtattgtcccaatgagtcagataaatattttacattttatcttatcgttataattattcctactattattagaaaaagaaggagaaataggcttgcaggaaacagaatgttgaaaaaagatttcagaacctcttgatctgatgggtcctactgcagtagacaatatggcagagtggaataagtctgagctttggagatggtgtgaaatagatactttaggtacttaagtggaaaaagagttggaggctagaatggcaattattagtttttttctcatagagcatctctattttaaactgcatggaacaaatgcagacaaaaagatctagtctgttaatgtactagtgtgaatctgttactgcaattctgcccttttggaaatttcagtgtatatctctccaaaggtttaaaatcattaatcttaaacctcattttttaaggctaaaagctcaggagcatcaaatttcccattaatttgcaatgtaaatatgtacctttctgattaatttttgctttgttttttccccctaagttcactactttgttttcctctgtttttaaaagctgattggctaactcatttcaaaggcatctccttgaccttatattcttaatctggaatttattatatttactgttaccaaaatgacactatctacatcaacttgtaccttcttccattttctctcttcaaggtactttatgccccgggctgccttctggatcagaaagatactcaaagctataaagttcacacaaagccaggctttgttatcaccggagtgtgcagaagggcactagccctgagtatgtgccacctcgtacgcctctcacatgcttctccgttttccctacttcactttcctgggttcattccaagacggagaatggaagaaaccagagctaaacttgtgtgcctgcagtccagctgtcgtgcctggaggtgagttgttctgaacctatggacacataagtttagagtat

SEQ ID NO: 34679 - DNA, 2300 bp, Homo sapien
tttttattagagacgaagtttcaccatgttggtcaggctgctctcgaagtcctgacctcaggtgatccacccacctcagcctcccaaagtgctaggattacaggcatgagccactgcgcccggtctgtttcctgatgtgttaatgatcgccattgtatctggtgtgagatggtatttcattgtggttttgatttgcatttcactaataaccagtgctgatgatcttttcttcatatgtttgttggctgcattaatgtcttcttttgagaagtgtctgttcatatcctttgcccactttttcatggggctgtttgttttttcttgtaaatttgtttaagttctttgtagattctggatattagccctttgtcagatggatagattgcaaaatttttccccctttctgtaggttgcctgttcaccctgatgatagtttattttgctgtgcagaaactctttagtttaattagatcccatttgtcaattttggcttttgttgccattgcttttgatgttttagtcatgaagtctttgcccatgcctatgtcctggatgttattgcctagattttcttctagggtttttatggttttaggtcttacgtttaagtctttaattcatcttgagttaattcttgtataaggtgtaaggaaggggtccagtttcagttttctgcatatggctagccagtccttcttgatttagtatttgtgggttttaaaaaaggagtttcccaaaatattcagttaaacttttaagtgacttacgtgtatatctaaatacatgatcagttaatatttgtcttaaaggggttttctttgttcttttcttattataggaaggttaaacaatatgcttatttatgccatagcttcacaaacaggaaggaggttttaaatggtttagttccacaatttgagtagatgcatatttaaagaaacgttgttgcataataaatactgcctcttcctaaaatgcatcatgccacagccaattttggaaaacacaaatatgaggtgagtgtattttgaaaactatgtgaatataatagatctttaattcatatttgtggattttatgggaaatacttgttttctaaggcatctgtcttgcaaaaagtcagtttctgctatgaaggatgttaaaggggatatgtaggttaaattctgtttctgagctttgcttccagagtaaacacccaacttacttttgccctaaagtattttattgttctagtagagaagactaacaacatattctaaaccactaagtaatttatgtaaacttcgcttacaaactacacttgtgtgacacttatatgagcaaaagcattttcatatttcttactatatcattcaattcttgcttaccccaatggaagtgactttatgcccctttagagacaatggaaatcaggtacttcgtgatttctcttaaaaaaaaaaaaaatgaactagaaagctccaagtttggtgaatctggaacctgggtattccagttccagttgtagcccttcctccctatccatcactcctgtctgcatgtaattatgcaatacattgaaaagattaaaagatgggtcttggactcaggcagacctgggtcaaatccagattctggcactgcccagccattgcccctgggcaagccattttcctctttgaacctcatttgtgaattaagctaaaaatagtccccacccccatgggactgtgggaaggattaaatagaataatgcatgaaaagcaaatagcagaatggtccataaatgttaaccattgttatgttattatgtaatctacaaagtacgtttagttacacttcatgaaatactttcagtttttcaaagacaccactaatacatgggaaatcaaaccctgaaaattaatttcactttagcagtaaagtcacatgccagatggaaaggatagtatttcatgaacaaagatcttacttttgagatttggtcttacttttttctttttcttaagggagaattatcttgtgttttttgttttgttttgttttgagatggagtcttgttctgtcacccaggctggagcgcagtgacgtgatctcggctcactgcaaccttcacctcccgggttcaagagattctcctgtctcagcctcccgagtagctgggactacaggtacgtgccaccacacctggctaatttttgtatttttagtagagacaagagttacaccatattggccaggatcttttgctttctatagcttcaaaatgttcttaatgttaagacattcttaatactctgaaccatatgaatttgcca

SEQ ID NO: 34680 - DNA, 2300 bp, Homo sapien
caaaaaccctgcagagatgaagaagctgtggtttaaggcagttatgtaacatacccaagttcacacgggcagtaaaataggctattaagcagggccttagtgagtgaaaattgattataattggatcaaaacagccttacttaaagaagttgaactaatgagttctaatttccttttaaacaccaagattctgcatttatgtgtttttcaaaaatcaccctagagatgatactctgtaagtctcatgtcagaaaaatgatcgagtggtatctataggttactttgctcccagcacagacatgaagtcttttgagccctaatggagatatgatagtgggccaaatctatataaaaatgacattccacacattgaaaaataaaagtggctattgctgctgggaatgcaaaatgaaacagctgttttggaaaatgctttgatagtttcttataaattaaacatacacttacaaagtgatccagaattgctactcctaggtatttatatcaaagaaatgaaaacttatgtatacaaaagcctatacacaaatgtttagagtggatttattcatagttgccagaaattggaacaacccaatgtcttcaaactgggaaatggataaacaaactatggtgtattcatacagtggaatactactcagtaataaaaagaaatgagcacccaatacatgcaacaacttggagttacatcaaatgcattatgctaattagaggaagtcagacttaaaatgctacatactgtatataatccatatggcattttaaaaactacaggatcagcaaacagatctgtgctgtgagttggaggaagaattgatgaaaaaagacacaagaaaattgtttgaagtgatggagctgttctatatcttgattgtagtagtgatggcattgaatgcatttgccaaaactcatagaactctgtaactaaaaaataatgaattttattatatataaattataccttcataacagggtaccctcaaatgagtagtaatatatttttgcgtgtgttttgattttaagtgctttgagtgaatagttttttttttttccagaaaagtagctcattcttattcagtgtttgttttctgaggatgtcaagtggagtcagaaccaataaaagttctatcaagaagagtctcagttaaccagattagcttgcccaggttggtggaaccatgaaaaccagattaaaaataatgggagtaatcttccattgcttccatccctaggattcacttcctgtcctgttttatacactttgtaaatggtacctctataacccattatgctttttggcatcattgctcactttgactatttgcagattacaaattatttgaggtcaaagaagtgagtggagtacataaccttcaaggtgaagcaggaagcagatgcctccttctgagtataagttctcttaggtcagatactgggaacaaatttgtttacagcaccaagcacagctctttgagggttggaatacccactaaacatctaagcaaatgtggacatttacccttcagggatacatgctgacaaattccttcctatatgccaacctgaaagaccaaccttggagatatatgaagcattgcctagtccagagtgaggcagaagactgagtcaggggtttcgacttagtcaaggaatgctcaattttcaccttttccctcttcctgcataccttcctcatgagtcatgagcccagacaaggccccagggtttttcccaatatagttcttcaggaagtcactataagtcaagtggagttggtatttatatggcatttgttccttttaaaatgtatttttaattgataaataataattgtatatatttataatgtataatgaataaactgaaaaattcaatagaaagcttcaacagtaggttcaattaagcagaagaaagaataagtgaactcaaagacaggacacttgaaattatccagtcgaaggaacaaaaagaaaaaagaataaaagaagtctatgggatctatgggaaaccatcaagagaactaatatttacataatgcaatttcagaaagagaagagagagataaagggacacaaagcctatctaaagaaataatagctgaaaacgtcccaaatctgggaagtgatatcaatattcatgtacaagaagttgtatgcaggttcttttcactttgagaaacagaaggtgaaactcaaactggcttaagtaattttaaaaaaatgtattggttcaagtgacttaaaaaccacactggttccaggagcaggttgatagtacctcaa

SEQ ID NO: 34681 - DNA, 2300 bp, Homo sapien
ttgtttgatcatatttttaataagcatgtattaaaatatattttttaaaattaaaaatatataatacaagctcatcaaacctatgacttcacagatattattgcgaaggatgaggcaagaaaaagagttgatgttaagaataacacaaattaaatgaatgtccagatattaagcagatatgtcaaaaattgtgattgttgttcatcaccaactgaagtttaggaagcctcattatctaatttgatcgtaaaattttattcattcagatattcatttatttatttgttcagttgtttattcagtcatcaaatgctagcaaatacccagtctgtgccaggcactgagctaggggtggggaagaacagggaacgcgtctctgactgttgaggggcttattttcatatgcattttgtagatgagaaaactaaggttcagaaagatgaagtgatttgcctaaaattctatcatgataaaaacatagaaatgaccactttttgagatattcccacactatgcgtgtactcatgtgtgcttcatagatagcaccatggatgctaggggagcacacagctgagaagggaacgactttccacgtgaccttgggaaaagccgcttccctttcctactccaggtttccccaattataggaagcccaatgccctctacttcttctactttaagatctgggcaaaacatcatgagcaaggatcaggagagagagggttgagtaaaggcacacagggaaacatggctgactcccctttgttttagtccactgccgttccccaacccctgcctgtagaagataagtctcctagctatggtatgcactgaggattcctagctagactaaggttccttgggcttctgttcctaggctggagctgttcctttagcaaggaggttgaaggcggtgagaactgagctccggattttcaataagctgacagagctgcagattagcctcgaaggctatgagaaggctttggaatttgccaccctggccgccaggctcagcacagtcacaggtgggtggtcttcactattgggtgtgttgaatgagaggggtgattagtcaaggatagacagcaaagcaataacaccgcaggccctggagtcagactgtgtgggttcaaatcccaggtccaactgtcagagagaccttagttaagcaagttgcttaacttctataagcctcaagcttgtcatcaccaaatcaggattaaaaatagtgcccacctcatggtagttgttatgaagaccagtgattatccatgtaacagccatagcacaatcctgggtacatggtaagtccttggtaagtgttgcctgtgccacactattattatattacaggtgctgttgttccccaagtgtaaagtaaatgatattttattctcttcataagctatgttcccattgcaaaaggactgtgccctgaattttaaattagttaatttttagttaaaagtgcattttcccatgaagctaaaatgtaaatgaaggtcaggttcccattaccctaactcagaacatagctgaatatcttgtgtttatgtcaaaagctagtgggaaacaataatagtcatcagaacagataaatggcagaataaaaaagatttaaaaacccctcatcttgaatgttggtgtttgaagaaaagcaggtttgatagagaagccttgattagatgtaagggtaaatgtaatattctgtgatgattccaggagggtcttctgggcattttcaagggcatcgggtgtggatgataccggactttattttgtctaattgcattcttgagagagccttccctcttttccctacctttttccttattgcataggatctcatctgagtgactgtgtgctaatctcaggaaaggccttggaggccccaggcagttcctctgagcactctttatccctcactggatgggagctgaagggaggttgtatgcatcctttatataagtacttcccctgtggctgatttttccatatcagagaattttctctctcttagattttcttttttaattttggcttttggctctttgaagcttaaaagtgatgtttttagatggtatcccacagccaccttgcaaatattccaaagacatgattgtaagcctttgttccctgtaaaagattgctctgtattaaaacaaatccaccaaacaacaagtcatagacccgttagaaaccagcattctaaagcatggtttaagtgtgaacaggtgtttgtagcttatctgagactgacagtaggtaaaggggccaaggagagactgctacatggt

SEQ ID NO: 34682 - DNA, 2300 bp, Homo sapien
ttggatgcattattagttttttttttctaaaacacattaaaataaatacttaactagtaaaacaaaatgtttttctatatactgttaaaaataatctagcaccaccaaaagcaatctctcataacaggatggggaaatgccagactggagaatgtctaaagtcctcttaccagccctaggagtgtgaagacatttaggatttgggggactttagcagaggattagttgatttaggtggtctgcgtcttagctctgccagtcctgtggaggtcaggaagccctcctctctgcctttaacagctgtctctgtcccacctaggcagccatccagacagccctgaagtcagaggagcctttgctggctctcaaactttatgaagaagcaggtgatgtgttcttcaatgggacccgccacaggcatcatgcagtggagtactaccgagtaagtccaagctgtgcagtttgctgagacaggtcctggcacgggcatgggaagggtcaggctggacttcggcctgagtccctcttctcctctcttgcttgtatttcatttttctctctttcttgtccagtgcccacctactcactctctcttcaacctagtgggagctcagggaaggttctgataaacttagtcattctcaggcttgataagttatccttcttcggataatacatcaaaataattgagtccaggagatcaagaccatctcagactcttgggtgcatggtactttatggtctgcagcacacttttgagtttaccagtgtttcccatttactactgggggtgtggtgggagattatttaaagggttatgtagatgaatgcttttgtttgatcatatttttaataagcatgtattaaaatatattttttaaaattaaaaatatataatacaagctcatcaaacctatgacttcacagatattattgcgaaggatgaggcaagaaaaagagttgatgttaagaataacacaaattaaatgaatgtccagatattaagcagatatgtcaaaaattgtgattgttgttcatcaccaactgaagtttaggaagcctcattatctaatttgatcgtaaaattttattcattcagatattcatttatttatttgttcagttgtttattcagtcatcaaatgctagcaaatacccagtctgtgccaggcactgagctaggggtggggaagaacagggaacgcgtctctgactgttgaggggcttattttcatatgcattttgtagatgagaaaactaaggttcagaaagatgaagtgatttgcctaaaattctatcatgataaaaacatagaaatgaccactttttgagatattcccacactatgcgtgtactcatgtgtgcttcatagatagcaccatggatgctaggggagcacacagctgagaagggaacgactttccacgtgaccttgggaaaagccgcttccctttcctactccaggtttccccaattataggaagcccaatgccctctacttcttctactttaagatctgggcaaaacatcatgagcaaggatcaggagagagagggttgagtaaaggcacacagggaaacatggctgactcccctttgttttagtccactgccgttccccaacccctgcctgtagaagataagtctcctagctatggtatgcactgaggattcctagctagactaaggttccttgggcttctgttcctaggctggagctgttcctttagcaaggaggttgaaggcggtgagaactgagctccggattttcaataagctgacagagctgcagattagcctcgaaggctatgagaaggctttggaatttgccaccctggccgccaggctcagcacagtcacaggtgggtggtcttcactattgggtgtgttgaatgagaggggtgattagtcaaggatagacagcaaagcaataacaccgcaggccctggagtcagactgtgtgggttcaaatcccaggtccaactgtcagagagaccttagttaagcaagttgcttaacttctataagcctcaagcttgtcatcaccaaatcaggattaaaaatagtgcccacctcatggtagttgttatgaagaccagtgattatccatgtaacagccatagcacaatcctgggtacatggtaagtccttggtaagtgttgcctgtgccacactattattatattacaggtgctgttgttccccaagtgtaaagtaaatgatattttattctcttcataagctatgttcccattgcaaaaggactgtgccctgaattttaaattagttaatttttagtta

SEQ ID NO: 34683 - DNA, 2300 bp, Homo sapien
cccccagatgcctcacctgtgtgattacatttagtcctgggactctggccagcaatttgtgacctgctttgggtcacaaacctgtgtttgcaaagtctcagtttttctccttggctccagacctacatcattatctgcctagagctcctgcagctacctcaaaccccaaaggtctaaaactgcactccagattctcccatcctctacttcagtctcagatgcatccttgctcctttttattcgcccttcacttctggcccctcgcccctgccacttttacaaacacagtgtccagcccagtggacacatggaaccaatgtctgccaagtggatgaatcatgaatgaatggaggaggcaagaaggaaggatgtgatacatttagaagtgggaggcagcaccatgtgctcccacgtgttctgtgctgggagttgtgtcctggctccatcgtgaactcgctgagagatttgggagctgcatctctctgatcttcagattctatcaggacccccactgtccccaccccccacccccctacagtacccatacctcttgacatagagcctgtgtttccaggttttcttctcggactctgagtttcacgtataccttggttcccaactgtaaagtgcatgggttaaacaagatgattaggcccctacagctcttaagatgatgggtgaaaggataattctgccctgttccttaatgatgactgaaggtcttgaatgccaaggctcctaagaggccactgatctggggtacacctggaggcatgggcatggtggcccatcctgacctaacaccagacctgttcttcatctctacttaggtgggtttgaatccatccagaatcctccaaatgatctgagtggtgagtagcgatcatgctgaacctgacattcatccttgaggacagcacttctgtcctcttgccaagagcggccaccttaggtgcaggtgcccaaggttgctcaactttgcctgtccttacagcatcccagcctgaaggtttcaaggaggtcaggcctggcagagcctgggaggagcatcaggccgtggggtccagacagtccagcagctctgaggactccagcctggaggaggagctcctctcggccacctcagacagctatcgcctgccggagcctgatgaccttgatgacccggaactgctcatggacctaagcactggtcaggaggaggaggctgagaacttcgcccccatattggcttttctggatcatgagggttatgctgaccactttaagagtctctatgacttctccttctctttcctcacttcttccttttatagcttctctgaggaggatgagtttgtggcctacctggaggcatcaagaaagtgggccaagaagagccacatgacctgggcccatgcccgtctctgcttcctcctgggccggctgagcatcaggaaggtcaaactctctcaggccagggtgtacttcgaggaggccatccacattctcaatggagcatttgaggacctatccttggtggccactctgtacatcaatttggctgccatctacctgaaacagaggctgagacataaaggctccgccctgttggaaaaggcaggtgccctgctggcctgcctgcctgaccgtgagtctagtgccaagcatgaactcgacgtggtggcctacgtgctgcgccaggggattgtggtgggcagcagcccgctggaggccagggcctgctttctggccatccgcttgctcctgagcctaggccggcacgaggaggtcctgccctttgccgagcgcctgcagctcctctctggacaccctcctgcctctgaggctgtggccagtgttttgagttttctgtatgacaagaaatatcttccacaccttgcagtggcctctgtccagcaacatggtatccagagtgcccaagggatgtctcttcctatttggcaggtccaccttgtcctccagaacacaaccaagctccttggctttccttccccaggctggggtgaagtttctgccttggcctgcccaatgctcagacaggccctggctgcctgtgaggaactagcagaccggagcacccagagggccctgtgtctcatcctttccaaagtgtacctcgagcacaggtctcctgacggtgccatccactacctgagccaggccttggtgctagggcagctgctgggtgagcaggaatcctttgagtcttctctctgcctggcatgggcctatctcttagccagccaggccaagaaggctttggatgtgcttgagccactgctatgctccctgaagga

SEQ ID NO: 34684 - DNA, 2300 bp, Homo sapien
ttcttgccacaagccacaagcagatcatattgccttatgaggttgagcaggaagctagagttgtaaacactgcccagtaggcgggagcctgatgtctgaaaattgaggtgtactagcagtgttccttggggagaaggcctgggcacagacttggatcatgatttctgccagctgttggtccagtggtggggaggatgtaagaggaggccccagacagcacttgactctcactcaaagatcaggagtgcagctctgcggcgtgcagtccgcaccttatggttgtgcaggctgccccagcaccaagacaagcagcaggagaacatcttgttggtaaattgcagcttccccaaggcgtataccatagggaaggatggccctttgtaattcttcctcctagagaggggacaccattttgtaacttgcgcatcactcatactcttggccagaagagaagaggtggcccaagaggggcgtgtacccctccacatcagagaggccagggcatttgaacagctctccttagccaagctctatagctcttcatctttagctgcggggctttctaccctctgggggttacagatctggaggttctgcaatgacaatctctggagatgccatcctggagaacagcaggaaaaggtttgacttggtgaggggcttgctggtcctcaaagttcactagagaactcagggtggtggcacagacagttgttacttctctgctaagaagaggtagaatcttccctctagcagctaccatcctgtggagtgtgaagctagccttcacctccacagttccactgtggttgctttagccaacagtggtcacttcttcactgccaaacccaaggtgtcttcttggttcttacctagtccggttgcacttggtggcaataggtggttatgttttaagtcaccttggcctctgtaacccccttttctctctgactgtgccttttcagtctccctcactggctactggctgccagtgagttgcccaggcttattaacaaactccccctactccctcactccctcactcccctgctgcttttcttttcccccagatgcctcacctgtgtgattacatttagtcctgggactctggccagcaatttgtgacctgctttgggtcacaaacctgtgtttgcaaagtctcagtttttctccttggctccagacctacatcattatctgcctagagctcctgcagctacctcaaaccccaaaggtctaaaactgcactccagattctcccatcctctacttcagtctcagatgcatccttgctcctttttattcgcccttcacttctggcccctcgcccctgccacttttacaaacacagtgtccagcccagtggacacatggaaccaatgtctgccaagtggatgaatcatgaatgaatggaggaggcaagaaggaaggatgtgatacatttagaagtgggaggcagcaccatgtgctcccacgtgttctgtgctgggagttgtgtcctggctccatcgtgaactcgctgagagatttgggagctgcatctctctgatcttcagattctatcaggacccccactgtccccaccccccacccccctacagtacccatacctcttgacatagagcctgtgtttccaggttttcttctcggactctgagtttcacgtataccttggttcccaactgtaaagtgcatgggttaaacaagatgattaggcccctacagctcttaagatgatgggtgaaaggataattctgccctgttccttaatgatgactgaaggtcttgaatgccaaggctcctaagaggccactgatctggggtacacctggaggcatgggcatggtggcccatcctgacctaacaccagacctgttcttcatctctacttaggtgggtttgaatccatccagaatcctccaaatgatctgagtggtgagtagcgatcatgctgaacctgacattcatccttgaggacagcacttctgtcctcttgccaagagcggccaccttaggtgcaggtgcccaaggttgctcaactttgcctgtccttacagcatcccagcctgaaggtttcaaggaggtcaggcctggcagagcctgggaggagcatcaggccgtggggtccagacagtccagcagctctgaggactccagcctggaggaggagctcctctcggccacctcagacagctatcgcctgccggagcctgatgaccttgatgacccggaactgctcatggacctaagcactggtcaggaggaggaggctgagaacttcgcccccatattggcttttc

SEQ ID NO: 34685 - DNA, 2300 bp, Homo sapien
aggagaagctcaaccctatctcagacctttactaagcatttgtagtttaataagatccccatgtgatttgtgtgcacattaaaattcaaaagtgcaattatagaagatacataaggcctagatcagcacaatggacagtcaggatagaaacagacaggcttttgcatcttaggaaacagaagaagcctcaagagaagcaatacgagtagttcatgtttatagccatgtttaaaatactatatataattattagagttttacaatttacatagtttttagtctgcttttaccagagagatcttctgggcattggaggaggggcagggtcagagctggtgggtggaaggaaatcctgactcctgaaattcactgagggggagccatgtagaacctcctcagccactgcatcatcagggacacagtagtttgaacctcaggtcaggagaactttaagggggcactaggaacccccatagtcaacactgtaaacttggagacctccgtggctgtattagaaaaaggcagttggttttggtcatctcattatgcatttatggaaactcacaatatgttgaaatggtaaataacatttagaaatgacttgtatttcccaatagatgttgagaagactcaactcattctagaaaatgtctggctttgcctcttatgttgttttaattccagttaaatggcaggttggggcttgtggtctgggaatcaagctcaggagggaattttctcactctcttctgtgctcagctatgtcagaaatcattttgttcagaaatcttgttggcttgacttcttaggctacgtatccatgtgtctagaacatctcctctttgaccacaagtactggctcaactgcatattggtggaggatacagagatccaagtgtctgtagatgataaacacctggaaacaatatacctgggactcctgatacaggaaggtgagtgtggcataggggtagagatgggatcttattcagatatttgctaccagaggccatgaaataagcaggatgcaaagggagggaaaaatcattcaaacatggaatattcacaaatgaacccacctgttataatagtactttgaacattcctctgagttcaacactgacattacacgaacagctgtgctggtcagtctcactgattgatgttagaactgcttggagagttttactaagatacccaagccagggctccacttaggcccattaaatctctgaaggtgaaggcccaagtattggcatattttggaaagttttccacataagtctaatgtctacccaaaatcgagaaacccttttccaaacgtgataaaatttgattgtaaaataaagttgcaaatgttgcaaaacttgaagttttttatgaaagtgaggaaagtgatgttgaggaacctcttggagcacctcttgatctgtttataggtgagagtcccatcaaggttatcatctaccaattaacaactatgaggtggataagcctgatgacatcacagacacgtggaaagagccagatttgcatatgatatttttgcaaaaaggactcttatgattgcattgcagaaatattgcatgaaggaaagaatttaatatcatgctattataaaacttattggagtaattatattcacccaaactaatttaatcaattcttttttggttctaattttaatcatgaggttgcaacaataaatgaaattctattaaatataaatatattttcacaagttttcatctctttttcaagataaagtcccaattaagcctttttctcatagattattagaaatgttggtgtctgttttaactgaattccctctcaatggcttttttcttcctggtatcagtgttcctgggatcataaggcctcttttagtgtctcccctgtgaaacgtctactttacttccaggaagaaaagtactccagctctgaatagaagcattactttgtgtgataatccgttttcacttcctgctactccttagaaagccattgcttttctcattatccacaggccacttcttctgcagagccctgtgctccgtgactccaccagccgagaaggaaggggaatgcttgacactttgcaagaatgagttaatctcagtgaagatggcagaagctggctccgagttggaaggcgtgtctttggtgacaggtcagcggggcctggtactggtgtcagccttggagcctctgcctctccctttccaccagtgagtagccatctgcctcctgggagcaagtcccagagcagactgaggtttgcacagaacagagtaggc

SEQ ID NO: 34686 - DNA, 2300 bp, Homo sapien
attaaatggaggcccagggagagcgcgagttatactggggtcatcaaaatggaattaacaatggtgaattttattgtgctcaactaactgtgcaccagactgtttcaccatttcacatgtagacttaatctccaccacagctctatgaagaagacataatcatgtcataaaagctacagataaggaaactgaaacacagagaagttaaataagttgtcgaggcaagtaaaagaaccaagataaaatccagacactttggcctcaaagaccaagtgagtagccaagatgacaactgcataactagagctagaggaagtcagatctagaaccccgatctccgaccagtggtcctgcacgtctccctccatgctgtttctactctcatggggcacaatgacaataggacttagggggagggactgaaaagtgtttacatctgagaaatctggagaagcgaaattgttcatagctaaagtcgtgccttttgtgccaagggcatcatttggggggacactccctgctgtaggtgccaaggtgcctagatcaagacttcaagcagaggaagcagaatatggttgttttgggttcactttaatgacctcaagtgccttctacaagcccaagtcataagactaaagaagaaagttgtctgtcagagagtagaaagccctcagctaggggatgctccttagctccttctctcaggaaccatggtggagctccaggaagacacagagttctaacaagggttaggaatgattccttggagcaatgttcccctatctcccaagcaagcctccccccaccaatctaaccccacatttccccaaagccaccactcatcctgataaacaccacacaagagaacacagggccctaccttgattctcctctgaaaaaaagcaagaaggttgcttcagggagaccaaccagcctggttggcctggaactgacatatcccagcaaattcctcagtcccaggcaaaccataatggctggtcaccctaagtcactctcccatgagttgacaatttcttagagcaacaactctccattgcctcaacttgatgcacacactcacacatgcactcacacacaaatcactctgtaataggtggaggcaggaaactgcctgtttttctccagtaacagcaaccctgacaaaaataggcttgaatgactaaggccaagtttatggccacccataggccacagaggaactcactgcctgaactttcttcctgtcctggggggatctcgggaagaaaggaaggaagggcttagtcacaccctgggagtggcagccaggagcagtgctgctcagctcctgacagagtaaactcaaaggctctttcttcaggaaaaaatagatgcttccaggctttgctccctttttacagagccagcatgacaaacacttacccagggaggaaggagaggcagccagaaagcacaatcatctccccatctttgggagaaaagtttctccaacccagcaggtccctgagcctctactggaccatccactttggccaagccacaggccaagggccccctgggaaactcacctgggccccgggtcagactccgctccctggggatgcagaagcagccacccatgtgtgtaccatcctaccctggccgaggcccttgggaacacaggccagaagagtgctgcaagggacagcctcccaacggtgtccctcctcccgcctcctccctggcacacgagggaccgaggcctgctcaatgcacaatgcagcctttgatatcccggctacagcaggaggcccagggagggtgggaggggcagcccagcccagcctgcaggcccacagctcctgcactgtcaggcctggggaacagggctcctccctgcctctcagcagatcgcttcatgcctatcagcctgcagcacattcctcgcattctaggattgagatacacagtttggttcttgtgagggcagccagggctggggaggagggcagagaacatcccagagatcaagactgctcttcttgctccctccccgactgacttggcccacactgactggcctgccacccctttacagtgatctccacccagtctctctctgcaaaggcctcccttggctctctgataaagttggagctgtgggtgcagcatttcacttggacctagcagcatcaatgagccagctcctcactggggaacatgcaaacccccagctgctggtgtgcaggaaaagaatccaggagatcacctgatgaagcccagcattttacaggtgaggggatggagaaccaaatacatca

SEQ ID NO: 34687 - DNA, 2300 bp, Homo sapien
tgtaagagtggttggtgtgcagaccagccaaggagcaatgataagtctgcgcatctgtcagcgtgtgtaagttagagcatggggcttcttgtcactgcctgactttcaagtacatcccagttttaagtggctgttttctaaagaaactcttgtcctttcattgtgggcccaagaaaacatttgaattcatattcaaaaacactgtacttcagtaagggaaacacatgagaaacgtatgggaagtagatactttaaatagacctgcacagagaaaacatcctccccggtggcaatgtgatcagagagaccccatccctcctgcgctctactccctgccccagctctcatctcctgggctttgtgtaaatggttagctggctccagaggtttcagtccttcctaggcctttctcattgtgtgtcctagtagtcatgggagaacccacaatgtatcccatgtatcagaaacgtgattcttctgggctgtggaatcaactagaccttgctcagtcttgactctgacattcataaatggtgggagaagggagggagttggacaagttatacactcctctttatccgtttcctcacttacaaagtagaaatgatgcctacattatggggctgttatgggatttgaatagaataatgtacagtgagagcctggcccacagtaaacattcagtaactgtgtctcaggatgagtcaggatggagacgggagcagtgcttcagagacaggctcaagaccctgtcctctggggctaggctggtgtgtgaggtggatactcctgatctctggtgggactgacccctaggccattcttcacctggtcacccaagtgctcctctcagaatataaacttgatcaggccactgccgtcctaaaaatgctggtgatactgacctcaagttcagcctccaaatagcctgcaacataggcctggcaggaccttctcttggctcacacctcctgttctttgggcctctcaccagggtcctttcaccactttgctctagtcatgaaggaaacattgggtgagcagtgctctttgagcttggttgttagagcagtcatgcttccgtcctaccttgctggcattcagccatattttctccatctcctttgcaagatctcatgggaggttttctgaaatttagccacagtgtcaactggattcccctgctccactgcctatctgaaacaggaaagaggttagtcttgtgggaccagttttgcttgcatacctgtagacttgctgtattttttcttttagttttatttttaattgacacataataattctacacatttatgggctagaatgtgatgtttcaatatatctatgtattgtgtaatgaacaaatcaaggtaattatcatatccatcatctcaaacatcattgtttttttgtggtgagaacattcaaaatcctctcttctatgttgaaatatacaatacgttattaactgtagtccccctactgtgcaatagaacactagaacttactcctcctatgtaactctaaccttttacctattgaccaacctctccccatcctttgatgtatttggttctccatcccctcacctgtaaaatgctgggcttcatcaggtgatctcctggattcttttcctgcacaccagcagctgggggtttgcatgttccccagtgaggagctggctcattgatgctgctaggtccaagtgaaatgctgcacccacagctccaactttatcagagagccaagggaggcctttgcagagagagactgggtggagatcactgtaaaggggtggcaggccagtcagtgtgggccaagtcagtcggggagggagcaagaagagcagtcttgatctctgggatgttctctgccctcctccccagccctggctgccctcacaagaaccaaactgtgtatctcaatcctagaatgcgaggaatgtgctgcaggctgataggcatgaagcgatctgctgagaggcagggaggagccctgttccccaggcctgacagtgcaggagctgtgggcctgcaggctgggctgggctgcccctcccaccctccctgggcctcctgctgtagccgggatatcaaaggctgcattgtgcattgagcaggcctcggtccctcgtgtgccagggaggaggcgggaggagggacaccgttgggaggctgtcccttgcagcactcttctggcctgtgttcccaagggcctcggccagggtaggatggtacacacatgggtggctgcttctgcatccccagggagcggagtctgacccggggcccaggtgagtt

SEQ ID NO: 34688 - DNA, 2300 bp, Homo sapien
tgaactttctcccagaaaaatgtttttccaagcattagaatctagcaagttacctgcaacttggaaactgaacaaggaatcccatctgaaaatgtagaggacacataaagtggaataatttaaatatttactaatcacttacgttttcaaagctattttaggcctctacccttttcaaagagctgtctatgaatcacctgggatgcttgtttcaaatgctgagcaagggagtccagggcctgggaatctgcatttttggaggtatctcaggcgtttgttatcgacacaaaattttaagaacgaccgtgaggacattagggctatttttacctccaccccattggacaaaattcttttttaaaaaattattattatactttaagttctagggtacatgtgcacaacgtgcaggtttgttacctaggtatacatgtgccatgttggtttgctgcacccatcaactcatcatttacattaggtatttctcctaatgctatccctcccccagtcccctatcccacaacaagccccagtgtgtgatgttcccctccctgtgtccatgtgctcttattgttcaactcccacttatgagtgagaacatgtggacaaaattcttaacaatctatcaaatgtgtttcaaatctattgatccttaggtttatccaaagattctttaatcctgatcacctctcggggtcatgagccatatcctttttttcctccctgtgtaaggtagaaacgttgtatttatctaaaagcattgtataaaaacatcgtatttgtctttccccaattttaatagggcagctatctaatctcacactgatatcccagactttagtgcactgagccactctcacacaggatcaagctagaagtgagaagatctggtccgattctgccacaagatgctgtgtgtcttagggcacgttgcccagcctctctgacaccctgtttccttgtctaagctggggctgtgagtgttcacagccttttgagtctgcacatgctctaattgaagtcatgctatagacaaggatcatgtgccctcacagtcttgtttttcagcactcaaaagtcatgcttctatgatcatgaattaggttcagaaagtgacagagtaagtagtcacaggaatgtaaagagccctaccccactgaatcaattgtgactaaaacactttggaatataaacttctacaatacacacgtataagacataattacaaaaaaaaaaaaaaaaacaacaacaacttgggggaagagttagttgaccatatgaaaactagggtggacctgtgaggccacatacctgctgttctcctcagacggggaagtgtttcagggtggggcgcctaggcagtctactcttagggctgtgtaatattaaacccagaaaatgtctgggttgctctgtcaacaaatatttattggtagccactatatgccgggccctgtgctaggtattgggggcctgtaggtgaaccctacggacagacccattctttcacggagctaacattctcgtggggaaaagaggtaataaacaattctaatgatgaatcagcgatagaggataaagggaatctgtgagggaagaggggacataaacgctgggaggctggaagagccccttacgtgttatccacttgtccagacgccatattcatagttgagaaagatgaggcagagacggtagtgaccggcttgagcctagactgcgccaagcttgccagagcagagccgggtggaaactgtcttcctgcaaagccaggttttccttcacggcccctcctaatgatgtttcttttcctatcattgtcgagcccttagaaccccaggatcgagggagggaaaacaagcgctcaagcactccctcgttggtcccaggacacaaggcctcgtccatctcacaaggcctcgtccatctcccatcacaccctagggcccaggcagaagcccggcggggcggggcctcggacacgcgccggtgcgtccagcaggtggcagcagcgagcggccgcgccccctgcgctgccaacccgcgagcccgcatcatggatgtcgagctcccctatttcgcattgctagccctggaattcgagaccccagacgaggaccaggattcatgaaatcagtcgcaggggccggggcaggggcctctggctcccgacactggccgagaggtgggttccggggcgggtcgctgctccttgaagccgggcggggacgcgctgcccccgccctgcctccctgtggtccacaccccctttgggctccggagccgctgggcaggaatag

SEQ ID NO: 34689 - DNA, 2300 bp, Homo sapien
ggccaacatggtaaaaccccgtctctactaaaatacaaaaaataataataataataattaaaaaataaaataaaatacaatttatggccttgtttccaagtgttcagagttcaaacaataaacttttaaaacttaatccactggtaaattgttggttggctgctttagaattgaaactgaccttttcaaattggaaaaggggacagcaacaaaaaggaactcagaaaataataatggctcatattttatagctgtttgtggtttataaagtgggtttgtattatttcatttgccctaccaacagtcctgtgaggacttacagtatgaggcttcccatagcacagatgagcaagaaaacctcattgacgaaaagttattatactatgtagtatttagattggagcaaaagtaatagcgttttttgccattactttcagtggcaaaaaccactattacttttgcaccaaactaacagaacaagagccatgcacaagttttcatacactgttcacaacatcacatttggtctgagtgctcacacacacacacactaaattactgatgcaatattttaagaaaatgttaattttaatttgcccataaaagcaatagagaaaatattcccggccaggctaggtggctggcgcctgtaatcccagcactttgggaggccgaggcaggtggatcacctgaggtcaggagttcgagaccagcctggccaacatggcgaaacgtcgtctctactaaaaatacaaaaatttgcccggagtgatggtgggcgcctgtaattccagctactcaggaggctgaggcaggagaattgcttgaacccgggaggcagaggttgcagtgagccgagatcgcgccactgcactccagcctcggcgacaaagggagacttttcaagaaaaaaaaaaaagaagaaaagaaaatattcccagtccaggaaagtacaggagggtctttcccaggccttttgttgcctccatacctctgtggtagctgttccctgttccagaatgttctaagtagggaacagtggtcagctcaaagctgaaaaccatggcctggcccatggtgggaggagcagtgtctaggagaacaattggtcctggactttatgaagggtcttaaagtcagacatttgatattgtgtataaatgagtgagacctattttcacagggatatactaataaggtgaagaagttgacattcttcatacagctttaaacttagatcccattactgttccacactggtcatagcaatattttctacaatcttgcgaaaagtacacttatattgcactgtattttgtatgctaaaagtattcatttccacattttttatcaccctgttctgcatgttttcacgtgttactcatttttctattctttttctgaattctcccagatcctcgttatgttttcacgttttagtacacaaggaacctcaaaagttgaaagtgtcccaagcccttgcccacctttcagcaagcctctctttctccctttcccaggtgcttttctttctgaagatctttgttattatttaactcctctttcgcaacaccactgacattgcaccggcatcgccgcgggcccactgtctggcttagaaggtgctcaagaaagacccgcggcgaatggagaagacaagcccaaagccaggaaatgggtggcggctgcagggaagggggttttgattccctaggataaaaacgcgctccaacagtctccgcattccggcatggagccggctgaggggtgcggtggtaagaccccatcgctagcggagtgcaagcaaagccgcacacctcctgggtccgggctggggcaggccgcgcgggcgcgggaacgaacgcgtgcggacggggaaaagggtcctccaagcccaagtgggagcgccgcggagggcgagcgagcggcagggcgcggcggggcgtgtgcggcaccacgggacagcgggctgcggcccagggggcgaggcgtgctcgggtctattccgggagcggctctgaggggcgggcgcgggcgcgggcggggcgggggctgccggcgagcatcctgtctgggggaggggaccgcagagagcgccggccgctgggctggcctgagagcgcagcgcgccggccgctaccagccgcgccggagcccctgcgccctgcggcccgctccccggggaccgggccggcgccatggaccgaggccagggtaagaggggccgcgacgcccgcacttgttgcggcgccgggcgggaaagggagactggacgatctgaagccggagaggaggaggga

SEQ ID NO: 34690 - DNA, 2300 bp, Homo sapien
tttagttcttcacaggagtgagtgtagcaagagggctgaggtggtcaggagatcaggggagagaggggcaagcaccacaaaagacagagcaagaagatagagacagagcaagagggaagatagagcaagtgggagaagatgggaaataacaattagtaagcacctactatgggccaggcactgggagctaggcaaatattattgcatttcagtctcccaactatgggtgtcattcttcttgctttacaaagactgaggaaacaacttggttgggtaacttgtcttagtgtgggagaggcctagaggctatgagcacctataacattgggatggggcagggagaaggcagaaaaggcttcctggagggatgaggcagtggttatttaacctagacttattcgacccccaaatccatgattttcacatctctgcaaattaggagaatacatcagaaaggagtagaggctcaatcaacagagctacaggccaggagatgggatttgatggaggtgaaaggctagactttggtccaatggaagtggaagccatttgtgacccgtcagagagggttctcagtggagggtgtgattggaagcaaggctgcaggaggtgaaaggagtgtgcaagaggagttgctgaccatttgagaagtttggccaggaaaggaaggaggaaaatgctggggtttggtgggggtgttgcacacagatgggttcacttttttgtttggttctgaggttttcttgaagattaagaagggtatgagaagctgatggtatctaaaaccaggattgtttttctggaccaaagatgagaatggagtaacgatatgttcttggcagagggtgggagggaggaacttacttggcagaatgcttactcatgtgaaaacgggagtttgaaactgatatttgagggagaggctggcaaaactttgacaaaaatggagaagccaaacagcttctgtgggagacaaagaaatggaagcagtgcccagtgaccaggagaagcctccatagggaacagagttaagtcatacggccccgtatgactccttacacccattgcagagtgtggttaaattctgagtgctagactacatgtattactcttgctatgacattccaaatgaagacactgaagggtcagaaaaagtgactgcccaaggtcatacaaaaagttgcagtcaaaactcaaactcaaatttgtccattctctgaaccactcagctccactgggtcccaacactgacaaagatgacccatgacatatgtttggatcaaaaagatgattcgaatatggataagggttcctttcaaaagaccattaccatagaaggagtaggaaatgaacttggatgtcagggaagaggtatgtctgcatggaaattcacagccttggggacagaagttgggtctcaggtcactgcagggggaggtcatcatatggattagctacaggctgcctggtcaatggacactgtagggaagacatggccttcctaatttggatctcaaaagctggttcaacggaggcaagacacaggcagaatggattctcagatcatctgttgagcaatgaaaatctcatttcatgaaaagaagagcatcagattatttcttgaattgcccagtagacaacatgatctccccaagaacacagaacgcagcaaaagaaattcctgtcttgggttcaattcaactgcagtagttgaaaaagaaccagttgtgaaggggaaaggaaaggaaccttgagggaaataaatcactccacatgagcctgggagatcagacataatgttggacattaagaaggcaaattttaaaaaatcagaaaaaattcagaccatagccttaaagagatggtgatccaagaagaatgaaaagttcacaaaagcaaaactgtgatgacatagccacagtcagtaggcttgaatagagagactatataacagaaaatgaacatttcagtcactcagcaatgtcatttggacagtggtccagttattgaaggtcataagtggatttccaagagataagcaccataagggatcactgtgatacaaacaagattataacctgttccctgtctttgagttgtacacaaagctgtctaattcagtatttaaaacagagcagggactcaaaaagcaacatcagagttggagtagcttgtggaagaagcaagtgaagttctgtaaagcagtcttattaatggtgagtgtgggaaaaaaaaattgtaattactaaaatagccagcatttattgagtggatcccctatgctaggtattatttgtagg

SEQ ID NO: 34691 - DNA, 2300 bp, Homo sapien
tgatgaccatgctgcccctcctctcaaggccaggatcctgagcacctgcttgacacatatccggggcaccccaggaactgtgctagccactgaaatgcagtccaaacacaaacaggtgcaagccctgccctcacagcatttccagctcagtaagaagcagacatgaatcaaatagtcacacggacttataaatgccaagctgtgtaagtgctagaagggaaaagtaccaggtaccctgggcccctgcctctgcctcagcaccccaggaaggcttctctgaggaagtgacatttcagatgaagatgaaaaattagcagggaagaggaaggaaaaggcattgtaagcagagggaaaaggtgcaggagcaggaagaagcatggaactgaaaacggccagtatggctaagctcagagagaaaggagagcccaccagcctattagagtatcccagaaagctacagtgagtggaacaggggcccacgctggctggaggggcaagaaggatgagggaagacgggcacctatgttgagccttaaggcataggcaagatttcactgaggcagaggtgggccaaggggagggaacagaagcaaaggtatgggatgaggcagagtcaccaggagtggaagatgggtactcatgtgcccaggtggatgcaggaggagaagctcaaccctatcctcacttagcctttgccattggtgaggccggagggaaagcagcgttgacagtgtcagtgtgtgtgagtgtgtgtgtgtgcacgcacttgccagcacatgctgaggtgcagtttgaaagatgtgtagaggggaagaagaagcaagcttgcagagttgagctttcctgtggctgagcatccacagggagggtaactagaatgttgggggtggtattttgggtggagagtgagggtgaggatgtgatattggtgggtctgttctccatagaatcatgtgattgcagtgtcaccatcgagttctttccaaagtgctcatattacctctttgtatttgctctatctgatgaaaaacttaccatctgtacaccattgcagaacacatagagccataacttctgtttcaccatttgaagaggtgattctttattcttgacagttctgtcccctttctgacagctgtcatgtttccagccctttggaaactgagaggtgcacatgatctcctgtcctctccgtcccccggtgctatgcttatggtgaagcataagctgagcctggtttgagaggatcttggcaggaaaggctttggggcctcagagctctgtaattccaccttcttaagtgggtggatgtcatttaatcctggcccaagtgtggctggcacagttcagcttcttgaagaaagatggcagcacatcacacaggtgttagaaatgatacagtccatgggccttcacttgagctggctccgtcacagcagccctctgaagtgggtggaattcaagtgaaaaaacccagccttggggagacagaaggactttcccacattcccacagctaataagtggtaagagagtcatcattgcttccactctacatcccgtggtacctaatagacacttaatggaccttgtatgaatgaatcgatgaatggtctagagttggtgtcatgagtaaaactaatttgggctggcaatgaaattgttgacatgttgtgtgtgggtgtgtgggtgtgtgtccccttcccatcctctcctccgagttaggatcataatggactcctgctggtcaccaggtcccgccatgactgttttgaaaatgtctgccagctcatctctttttctccatcctcactgtcatcttggttcatgctcttgtcgagtctcatcatgaccaggatgacattcttttaagtggctcttctgcttccagtcttgtctgcttttgtctgtccccacaatgccactggaagtaacttcctaaaccaatttggattacatgagtgttccacttaaatactttcccagctccctgtcacctgccaaatacagtccaaattcctaagacattcatttcaaagtgttataattaattgcctccctccccaaatggactgtgaattgcccaaagacacaaccatatctaagtcatggttgtcttttcaatacctggtatggtatgaggcacaggatagttgctgacaaacatttgttagctaattatcatgtgctgggggagttggagggagattgaaccaataaagggaaatttgggtacttctgaatgtgccctctgatgagggactgcctgtgtccctcctcagaggctgtcccaagagaagc

SEQ ID NO: 34692 - DNA, 2300 bp, Homo sapien
atccatcctctcagtctgtcagctttccatcctaaatctctaaaattcatccatatcttcctatcttcactgacactatccaacttaattaagtcattcaacaaatacttgagtacctactatactagatgtcagaaatcagtggtgaacaagacagacacctcatgaagctcacattctagttggaggaaaaaaccttaacaaggaagcaaaagaaataaaatactaagaaactaaaagggtgctggacacagttactttacagtggttaggaaggtctctctctgttcttccaggacagaatatagccccatcttgcctgggctactgcaacatattgccttccctacctcttttcttacaccttgcaatctgcttcacacagcagtcaaagtgactctttaaacatgaaagcctttgtcacatgttccctgtcaatctaaaataatttaaaaggtcagaatctagtttaaagagagtttattcaagcacaaaggttgaggatggcctgcccaggaagcacagaatggaaaaatatgtctgtcttaaaaaagatggaagtcagtgttccaaagtgtgaaaggttgggttcagtgaggtttaacagaatttcaacatctttctatgcaaggcttaatgcacagttacaatgatctgagtagttaaggtggtctttttccttcaagaaaggtacatttaacatcacatcctgcagatgtaactgtcatggggtcagttcagttcagggcaccatctagtctgagttaggtgcaggacaataaaggaggctgtctattacaaacatcagtaattgagagggaagaaatctggtctctgctctttcctagtcattacagaacaagaacaatgaggaagagaattaagctataattctaagaagcagaactacaaaacatgctacatggactcagaccacagccacatctctctcaaagcttcaagtatttgggaggttccaacagcttttaggttttatttattttcacattccattgcaatcagaatcagactaaattgcattcagcaaaaaagttttttgaagccgggggcggtggctcatgcctgtaatcccagcactttggaaggctgaggaaggcagatcacctgaggtcaggagttcaagcccagcctaaccaacatggtgaaaccctgtctctactaaaaatacaaaaattagccgggtgtagtgggcgcctgtaatcccagctactgaggaggctgaggcaggagaatcacttgaacctgggaggcagaggttgcagtgagccgagatcgtgccactgcactccagcctgggtgacagagtgagactccatctcaaaaaaaataattttgaacacctacattagggcactgctcaatgggaatgaatagacaatatctctgccttaaaagagcttatattttagtgagaggaaatgagaaaatacacactatttaaaaaaacaattcagtcgataagaagggcattagagaaaaagactgggaggagtgatgggcaatggttcaggctgcgatgttttaaaccgctcacgtgatctagcccttcctaaccaccagtcctgttgccctcccgcctcagtatatttcagtcccttacatgcaatactcttctctctttattaggcttctgcagatgtttccctctgcctgaaccctttcttcagctcagctcaaatacccccttcctctgggaaaactttccacaaggctagatttctattctaggcttccgcgacacctgcccctcaccttcaaacaccgctcatattctgactttacatcccgcttgtatctgtttatcgctcataatatcaagtaagctccatgcgggcacagctatgatctgctttctttgctgccgaccctgcgcccagcacggagactgtagttactactaggacctcgcctacccgcggaacacactgagagccggaagtgttgccttagctccggacgaccggatggggaacggcgcggcccatcgggcaaccggaagcatagcgttcctgtccggaagtcctgagagggaaacgcccgcaaaggctggtttttaagcgggagcatctcttcactcgcagcaagtgcgcgtgcgctgcctctcagcccaaattggaaacatggccgtacggtcgctgtgggcgggccggctgcgggtgcagcgcctactggcctggagtgccgcgtgggagagcaagtaagcattgcaggcggggagtcgggagcgtgaggactctgaggggctagcgagccagccggggtggttgtgggctggaagg

SEQ ID NO: 34693 - DNA, 2300 bp, Homo sapien
gtgtgagcaaaacagatgactgttactttaagccactacattttttaatggtttgttacacaacagcagataaaatgatacagtcaccccactgcattcccagtctggcacctttgtgccacaagaattgtgcctacttgcttttcccttatcagctctttcgaacctctcttacaatgttgatgagcgcacacattgtcaatgggctagtagggttggaagggcttcctaacagaaaaaaacagctctagatttaagagttacaaaggaccctaaaattacaagcaaagtatagtcaagaagatgaatttgaacactaacatgatttaccctacaaaaaaatgacaagaatcagaataagttcataagagaatttggcacatagtggtcaatgagtgcttgttttaaaaactgtttaagggagtatcttgaacctttggaaatgaacttaaaaggtgttgcatcctgacacaaacattgccaaaaaaaaaagtttaagattatgacaaatgcatgattattcatctaccagtttactagtagtaatccagtttggcccaagtaaattaagtctcagtgctgagttagaaccccagctataagctctttcaccattctctgaatcacttcagttttttgtttttgtttttgtttgagtcagagtctcgctctgtcacccacggtggagtgcagtggtacaatctcggctcactgcaacatgtgcctcccaggttcaagcgattctcctgccccagcctcccgagtagctgggattacaggcgcacaccaccaagcccagctaatttttgcattttagcagagatgaggtttcaccatgatggccgagctggtctcgaactcctgacctcaagtgatctgcccacctcggcctcccaaactgctgggattacaggcatgagccactgtgcccggcccagtttcttattttagccataatctcactgagtaaatatggatttcatttatttttatatatttatttatttttaaagacagggactcttgtcactcaggctggagtgcagtggcacaatcatagaacactgtaacctcaaactaccggtctcaagcctcccacctctgcctcctgaatagctaggactacaggtgtgcaccaccactcctggcgaattttttttttttaagagacggggtctcagagtctcattatgttgcccaggctggtctcaaactgctggcctaagcgatcctcccgcctgaccttccaaaatgctgggattacaggcttgagccacccccagcctccggattttctttattctgaaactcatccctaactttattttctgccagaggaagtctgtttttcacagcgtgataaactagcaagtctgagctgctgctcttgtcttcttagaggatgaaaatgggagtttatccctccttttctcctttctgaaaagagagtagatgaaaccttcccccgccttttggtttttaggaagcagaaagcagagatattaactatataaaaactgcaaacacataaataacagcagtatagaaagcatagggcttgtgtcagcatatgaatgaggtagcgtcttaccaccctggccgcatgcttggtcagcaatttccagcacttgcagacactgcaaaaggcttcccttatctcataagatggttacaaccacctagaaaggtggagcaggattcttcgtctgtgttataatagaggaaacagacacagagaagatacagagctaataacgcagaggctggacataaccgaggtcttcaaagcttcactttggtctgtttcatccctctgccgcagctgggccctggtcctgatgctgaggacccgaagcgggcacacctgcgccgggcaagaatgaacccagccaatgaggagcccgcatgcggggggcggggcggaacggggaagctgccaatgagagagcctaccccgagagagatggagctaatgagggcctcgtgctggagagggacggcggcttggccaatgcggagctgggtctggcgcggcaggaaggcgggactgccagtggggcgccggggcggggcggagagccgagcgccaacccgctagcgcctgaatccggcgtgctgcccgctcgccgcccgccatggcccgcgcagccccgctgctcgccgcgttgaccgcgctcctcgccgccgccgctgctggcggagatgccccgccgggcaaaatcggtgcgggaaggacgcggtggggttcccagctggggagggccggcgggtaaagggttctcagttctcagctaggtggg

SEQ ID NO: 34694 - DNA, 2300 bp, Homo sapien
gttccatatgctgcccttctcatgctggtctctttgcagagtgtgcgtgtcctctcactgacaaagctgattgtcctccagcatcttgcatgaaatcttatttccccaagaaggctgtgtccccacaccctctggggcagaattcactgcttccccttcaggactccctggaaccctgttgcacttcatcatgggttgtcgttgctaattgcgcaggagtctgtctgcccattccatgctggggtcctgggggacagaagcctgtttgatttttctttgtgccccaggacatcttactgtaaattagagaattggtgtcagttgtgttaaatgagctggttcacaatgaagtggtgtcttctgcttcctgatcttgggcagcttctaggccttaatatcaatttctctggaaaaatgggtaatttgggactctttgcacatggaggggatgggagcacactggttaaaataaaatccaaagctgtcttggaagtggctttgtaagtactgtgagaggaagtggtttattctttcaacacagaaaaaatacttcatgaactctactgtccaccaggatctggggacatagtgatcatgcactctctctctgtccttaaataacttgactacagtacggctaagcagagtgtgctgtgggaatatgcaggaggaacacctgactcacctcaggtgggtcagtcaagccaagttataggtgacatctgagggctgttgaagccagtgagacacagggtgatggcactcctatcaaagggaacagctcggacaaaggcccaggcatgagagaacaaagctatgtgcccacaataagagaagcctagacagacaagaaggtggcatcttgggagggtaaagcaggaaatggaataagtaagcagaggccagatcatagagaacctggtgctgtctgaggattgcctgtgacttctggcaggaactggtactctgtgggtccaaatgggtccagtaaggacaaattacaccagatttatttaattttcttttggggtaaggcctctggactgtctgatgagaagagagtggtgtttcagatacatggtgagcaaaaattataggtagggtggtagtccagttcagtagcttcatagctggtttatagttctctcacaggactgtttaatgattagtgtcaggtgaggcacagtggctaatgcctgtaattccagcacttggggaggccaaggcaggaggatcacttgagctcaggagttcaagaccagcctgggcaacatggtgaaacctcatctctacgaaaaatatgtcgggcatggtggcatgtgcctgtagtctcagctacttgggagcctgggaggtttgcagtgagccaatatcatgccactgcactccagcctgggcaacagagccagatcctgtttgaaaaaaaactgattgatgtctgtccaggcagtggtttcctagcagcacctccaagccctgtcccaggaaacattcttatcagtgacttcgatgagaatagtgatggcatgtaaaccaagtttacaaataacaggaaggcaggaggtacagtaaagacagtgtatgataagacccaaaaaagctgaaactttgtaacaagatttcaaactggaatatagtgtcctgtagggtaatgaacaatccatcatagagtacattccagtctcttttttttgagatggagttttgctcttgtttcccaggctggagtgcaatggcacgatctcagctcaccacaacctccgcctcccaggttcaagcgattctcctgcctcagcctcctgagtagctgggattgcaggcatgcgccaccacacccagctaattttgtatttttagtagagacagggtttcaccatgtttgtcaggctggtctcgaactcctgacttcaggtgatctgcccccgctaggcctcccaaagtgttgtgattacaggcgtgagccaccgcgcctggcagatacattccagtcttgacaaacacagacataaggatgatttaggtgtccgatagtaggttggactagaccaggagttggcatacttttttctgtaaatggccagagagtaaatattttaggcttttcaggccatgcagtctctgttgcagctactcaactctgcctaaaatgaaaacagtcatagacaataattgaaagaaagagcatcatggctgtgtttcaataaaactctagtttgcaaaaacaggcatctttctggatttggcctgcaggctgtagtttgccaatccctggattaaggcctggtttccaaacactgatc

SEQ ID NO: 34695 - DNA, 2300 bp, Homo sapien
attttcttttggggtaaggcctctggactgtctgatgagaagagagtggtgtttcagatacatggtgagcaaaaattataggtagggtggtagtccagttcagtagcttcatagctggtttatagttctctcacaggactgtttaatgattagtgtcaggtgaggcacagtggctaatgcctgtaattccagcacttggggaggccaaggcaggaggatcacttgagctcaggagttcaagaccagcctgggcaacatggtgaaacctcatctctacgaaaaatatgtcgggcatggtggcatgtgcctgtagtctcagctacttgggagcctgggaggtttgcagtgagccaatatcatgccactgcactccagcctgggcaacagagccagatcctgtttgaaaaaaaactgattgatgtctgtccaggcagtggtttcctagcagcacctccaagccctgtcccaggaaacattcttatcagtgacttcgatgagaatagtgatggcatgtaaaccaagtttacaaataacaggaaggcaggaggtacagtaaagacagtgtatgataagacccaaaaaagctgaaactttgtaacaagatttcaaactggaatatagtgtcctgtagggtaatgaacaatccatcatagagtacattccagtctcttttttttgagatggagttttgctcttgtttcccaggctggagtgcaatggcacgatctcagctcaccacaacctccgcctcccaggttcaagcgattctcctgcctcagcctcctgagtagctgggattgcaggcatgcgccaccacacccagctaattttgtatttttagtagagacagggtttcaccatgtttgtcaggctggtctcgaactcctgacttcaggtgatctgcccccgctaggcctcccaaagtgttgtgattacaggcgtgagccaccgcgcctggcagatacattccagtcttgacaaacacagacataaggatgatttaggtgtccgatagtaggttggactagaccaggagttggcatacttttttctgtaaatggccagagagtaaatattttaggcttttcaggccatgcagtctctgttgcagctactcaactctgcctaaaatgaaaacagtcatagacaataattgaaagaaagagcatcatggctgtgtttcaataaaactctagtttgcaaaaacaggcatctttctggatttggcctgcaggctgtagtttgccaatccctggattaaggcctggtttccaaacactgatcactgaacagaactggtcagtaacttttaacaattcatagggaaataagaaagttagaagcaaggtagtgagttttatataaaactaaatttattctctttaattggtcatcctgactttcagtattctttgctggtcttttgctgcaaaatacctttttctttatgaaacgaaagtatagtaggcagcagttttcaggtttgcctttgcttattaatagctctactgacaactcagtccgcagatttccttttggaaatgttataagcctaggaaatttaagcacctgggaaccaccagcgcaggaggatacaaagtgtgaactacagcctctcactctcatgttctgtctctcttcttccctacctcccgggcctgctgacagcggtggttggggctgggattgggggctctgctgtggcccattttctccagcagcactttggacctcgggtgcagatcgacgtgtacgagaagggaaccgtgggtggccgcttggccaccatctcagtcaacaagcagcactatgagagcggggctgcctccttccactccctgagcctgcacatgcaggacttcgtcaagctgctgggtgagtggtcagtcctggggctccagtgcccagcgccctggggctggtgacagcactgggcccttctcagacttcccagaccatcaaggccagaaggtcatgtggcccaatctcattttacagatggagcaacagaaacaagagaggggaaggaacttgcctgaggttacacagtgagttagttgcagagccgggattagaactcaggtttgactcctaggccagtttctttccctttcaatttgctgcctctaaataatcgtgattatatcaccttccacatgctagtgcttgccaggcaccttctgggtggtatgtaggcattacctcagctcccctctaccaacctgcaagatgagtgttatatctcctcttaaggcaactgaggctcagaaaatgtatagatttaagctaaagccattaca

SEQ ID NO: 34696 - DNA, 2300 bp, Homo sapien
tcccagtgcatctgtttactgtttattaacaagcagcacaaatgaacaaaccatagcatttgtgtttcctttaatggaccagtccatttgcatcaagagggccccaagtcttggaggggacctgaggggctcctctttgtctctgcagggctgaggcaccggcgcgaggtggtgggcaggagcgccatcttcggcggggagcacttcatgctggaggagactgactggtacctgctgaacctcttccgcctctggtggcactatggcatcagcttcctgaggctgcagatgtgggtggaggaggtcatggagaagttcatgaggtagggctggcagagctgtggggatggcgttccaggggaaccgagaagaggtgggggaggaaccagcttgcctgtactttgtgaaaaaggaaaaggtccttgctgaattgagccagcacaattcagtgcaggctcagagcaagcccctggcatgaggaatggccgtatttggtccagtaatggtctccctagtattgtcacattgactctcattttcttaccctctactacactgatactaataaaagcatgggttgcaaactcagtcgcttaacaagggctgaactgggatgcgagtcagtgaatcagcaggtggaagagagcagaacaaggccccctctgaaggaggcagccagccctccaccgcagccatctgcagccagccgtgtacaatgcccacctcatgtggctagatctactcacttttcagaagaagctggaaatccagagtcgtgtgtgaaatcttttcagtttttcaacatttgcaaccaattcatcttgtaagccaaatgaaacacttctgcagggcagatgcagcctgtggaccactcatttgcaaactttgttgtcctcatttttccatctagaataaacacctttcttcaccactcctcctatccctgggctccagccccctccccatcacctttggtcccagatgtggagggcaagtggtctgttccctccctgttcaccaagctgtcactccacctttccccaaagtccctcctgaaggtgctccctgcttccagcctaaggcgcaggggctgctccccggaccccatcactgtctgcctcccttcagtgtcactcaagtgtggcctgtgccctcctgccctggttcctggcacttctccactcccttcccattctataactctgctgtttatagcacttcttccttatattctccagatgtcacccaaagcttatttccttacctctctttctgatatttttctcccttatcaattatatccagaccaataatgttgacttctacgttttatgggaaatgacttctccctctcagccctagtttcctcttcacttccagacccacatttcaactttctggacacctccatctcgtgtcctattgataaccaaactcaacatgtttacaaaagaagccctagaatgggcaacatttcaaaggccagccagtcaggaaatccatcgatggttccaatccatgctagtgagattgcatgagtgatagagcgacaggacatgagcctgggggtgagtgggagccctgtcagatgaagcgagaggagaggacaggctggactggcagagaaggtgacagtatcagcatgaagttgcagtgtgtcatcaggtcctagaagctgtggcagaaccgacactgttggagaaggagatgtgtcagcaggggtgggccgtagccccagctgggtgaagaaagggttatgaactatgacctcaggcagggagtggctcagagcagtgatacagttgttactcagcacagccgtgatgtgaagccaggcctagaaggattccataccttcacactccctttaggtgggacaggcccgccacagtcagagaacaggtgccagggaacatgaccagcctcttctgccaccactccatgtagaggaagtgatgggttcctggtgggcctcccaggcactataacccaggggcaggtggtcaggcaaaaagccttcctgcacaaggactccagctctatgtgtcttctaggatctataagtaccaggcccacggctatgccttctcgggtgtggaggagctgctctactcactgggggagtccacctttgttaacatgacccagcactctgtggctgagtccctgctgcaggtgggcgtcacgcagcgctttattgatgatgtcgtttctgctgtcctgcgggccagctatggccagtcagcagcgatgcccgcctttgcaggtaagcgtccaacccttggcctgcccacctgccc

SEQ ID NO: 34697 - DNA, 2300 bp, Homo sapien
gtgaggacccgtgtagctcccaaactggcctcgtgctaagatgcagatttttgcgctgctacttcagcatctctggggctgggaccctgaaatctaaagtagcaagcactgcagctggagcaggggaagctgacaagtcagtcctggcttggggaggcagaagtgaggggtgcgtatttccagcaggtaaggagaatgtgttggtttcaggggtcccccataccccagcatccatctttcagtttgccactgttctgtggatatgggagggtcaccccagttgcatgtctgtgggaccccactgctagcagcagcagagtgtgtgcagagagccagcacagaacacagccaggccgcccggccagtggggctggggctgggacagcctgcggtgggggcggggcccttgttgcctgaggaggtattttcagagtacccctccctctggagtttccaacggtagaatagagccctgtctagtatttgaccaaatatggtggcatctctcatgctcgagccccagccagcatctcagttatgctgtggaagcctgccccggacagattaatcttgtgacattcaggagcgcctctcaccctgccttcttcccctcggacgattcctgtaaatggccaagaccggccctcagcacgacagggccgtcctcagtatctgttcacaatgcccctcctctgtcctcctcacattccctcccgccattcctgcctccctgggtggatgtgcccgcttacattgggctgggctgttcacctgaggtgagagacattggccagaggaggtggtcagttgagcatgtgattccaggacctttggaccctgaggtcatccgacctcacaaacttgtggcctgaatcttggaggcctagacctctctcagcagccaggagggtgggcctgagggggttgaagggagagtcagtagagaaatgagaaccatgctacctctaatgctaattagaacaactaatgtttataataattatacaattattttataataatctctataataaatagctaagtgtttattgagcacttactatgtgccaggtactgttgccagctatttaacataggtgatttcctttattccttatagcagttttaagagggtgccatgattcttcccattctagagatgtgggaactgaggctcagaaagatttcaggagggaatgggccaggccaccgtctacttctggatacacccaccattttatggaggagggaactgaggctgacagtaaagctcacatgcagccacacagtctctgagagcggagaccaccccaggagggagagtgctgtgtcaggaaggccaggacaatcagccgtaagtcctcatggatctgaaacttggccagagtgagggcgtacagcttcagaaatatgttcacagcaggctgaaattgtgcggaaagtctcccaagaaaaacaacatggggtggtggatagagccctggatggggacagggtgagaatagcagctctgacacctctaactcactgttaatagtgacaagtccctttctggctccagcctcagtttccttgactgtgatctagaggggtggggctttggtctcctagggctgctgaactcacctgaggccggcagaggctggagtgcctgaggctgtttccctgggagatggggcctgtgtcccactcctggccagcacaatttgagaacatttgctctcctgaccaaccaacggcccatccctcctccaccctcaaccccttgccatcccctaagcaaacgaagctgattgtcttagctggccctgtgggtgctggctgggcggccggccgcaggccacaggcggaggtgccaccggccagagccccaccagacacacagggcattgtccctcggtcaacagcccctgggcacctcagctcggctcctggcctgcccccacgcccctcaccgcctgccactgcgctaggctcagccagctgggggcccaaggctcccagctgatgacgagcccacccactcactcccccagcagcccccagttgagctataattgcttcgctccatcctgttgctgccattctctcggcggcatctggggttccaggcgggcagcagctgcaggctgaccttgcagcttggcggaatggactggcctcacaacctggtacgtggcgcttccctgccgcacccccacccctttttaagagcccaaatatgtcagtttttctttcctatttattaatggctgcctctgtttggtttagaatctgcagaggcaacttctctgtcttct

SEQ ID NO: 34698 - DNA, 2300 bp, Homo sapien
gcaccccagggcatgcacatgaacggaattcatcttcttggtttggaaaagaagggggtgacattagtggcgaaacctccgtgtagagctctcgcaccgcaactctgagtcatagcttacatcgatcaagcactcactctgaagcaggctcggggctaaaccttcacaaccattgactctgtgctacagaggagacagtgatcttcacagaagttagttcccagagggctttccccagccccaccattgggagcagaggggcagggctgagcccagtctcactcgagtcctgctcacaccttcctccaggactgcacgggccacctcgcccagccctcatggcaatgctgaaggcaggtgtgattctcgccattttacccaaggggaaagggaggcaccgggggaaagggaggctgggagcggcagacctcacagctaggaagtggccaaggcaggaagaagcccaccggcctttcaacaccaacagaattctttcctcagaaggaatgagggagggtggaggggtaaggacatggcatttttaatcctcctgttggactgggaggctctcaaggtcagggacagtgtctgattcagcaccccaccccctcgggccctcaactggccccactcaggatgtcacaaggccccgtgtgctgctggagggggtcccagggtcggtgacaggcagaccacagcctctggcctggaaggaggagagagggattggcaggcccatccaggctgggggtctgaggaactgtgaatgaggccgtgaacagagaccgctggggtccagcaggcctggctgcagaagggaagctctgcgcagtggaaggcaggacccggtggcagccctgggagcaggccccgctggcccctgggagaagacctccatgggcctcagcacgacactcctaggctggcagccgaggcctggttcacgtgatcccttgatttgtgttttctgacctttcttcacagacactctaggaagcctggggacacagagcctgccaggggaagtcacactctcatgaaagagctagccagcaagaaactagaaccgtggacatgtaagataggcacatgcgtggcgagtccgaagcgggaagcaagcagagggtgtgacagaatactgagggggccagggaatggctcttccagaggagacttctgagtgggagacaggagcaggggaaggagcagcatgagctctgggaagaaggcatttttggcagcgagcaatgcaagtgcaaaagccctgaggcatgaaaaacactaaagaatctgtaggaggccaaggtggccaagcaaaaggagaaagagggactccggcaagagatgggcatttctcaggactgcggtggcagggaaaagagagccccctgaaggacattccacattcaaacccctgccctgtggtgaccctgccaggtggctgggtcaggatcttccctgtcaggcccaggcctcgtttgcatgatgatgggagtagcttcccacggtctgggctctccttccccatgttctcctgttcccccaattcccatcacccagattccaggagccaggactggtgtctcccctactggaggttcccagaaagtctcagaactcccactgcagtcctgggacacaggggctgggggaggaaggaaattctcacacagctttctcccagggagtttgctcttgttcccaggctgacaactggcaaccctcagaactctgttccccacccccttcctcctcctcctcctcctcctcctcctcctcctcctcctcctctccctgcctccctctctcccctgccccccttctcaggcttaatgacttccacatgggcctctggtggctggagccaaggctcccagcattgtctgaaatctccaaatttagaagaaatatgaaaattgtcaaccactccttccttagggggtaaaagcaacattcagcaccgggggcaggtcaaggcaaggtagtcacgtggggggtgcctgggccaatggggggccctgggagggctcagcacccgcctcgccccaatacggggcttgcctcttcagctcatataaggtaaaaggcagagtggcctctgtggccagggagccgcaggcaagggactaaggggaggggggctcagtgccagctgcttaaaaatgcccctgtggcagcgaggggcaccagaggctgggtctaattagttgagaagcagtgacacccccaaccactccccaaacaggctggctcccgtctccaggccccaaggagccacacctggaccagaccccaggaaa

SEQ ID NO: 34699 - DNA, 2300 bp, Homo sapien
tgccctatccatgtcttaaagatgagaagttggatccactgagttagtttcattggggcgggggaaagaactgtaattaaacttgtttaatccttattttgtattgtagctattttttgtaaaagcaacttaaaatcttttaaaaattttatagtgacattagagacaatggtcatacaaattatcacataaacatggacttgaaaaattaggcttttcataaaacacatcacatgtcattgactgctttttagaaatacacttccaaggcagtacatctgtattgctactgaaaagtgccatttcacagaacacagacttctttttgctctttgacatcttgaaaacatctgtttttcttttttaatacaaaactttgtgctcaagacaaatcttacatgaaactctcataaaccatgaaaatgtagctggccttcgggccttaggcatgaaataagcatgaggaacatattcccctaacttctacccccagcccagcaagttatcctttaagaaatctcctaggaattctggagtttgaaaacaattgctctatgttattcctgcttccagtctctaagtaacaagggcatttaaaagcatagtctcttaaggtccactatagtggttctttatttaaggaataactcagctgggtgcagtggctcacgcctgttatcccagcactttgagaggctgaggcaagcagatcacttgaggccaggagttcgagagtctggccaacatggtggaaacccatctctacaaaaaatacaaaaattagccaggtgtggtggcgtgcacctatggtcccagctatttgggaggctgaggcaggagaattgcttgaacctgggaggtggaggttgcagtgagccaagattgtgccgctgcactccagcctgggtgacagagtgagactctgtctcaaaaaaaaaaaaaaaaggaactcatacagctcaatgattcattgatcccaataataaatcgttttaataatgatgaaaacatcctactggggttttcttgttaaaaactttaggacaggcgcagtggctcatgcctgttattccaacacatttgggaggctgaggtgggagaattgcttgaccctaggagttctagacttgcctgggccacatagtaagaccctgtcccagctccctccaacatcgtccccaacccccccccccccaaaaaaaaaaagcgccaggcgcagtagtgagtgcctgtgatcccagctgtgttgggaggctgaggtgggagtatcacctgagccctggaggttgaggctgcaatgagagctgtgatcatgccactgcactccagcctgggcaacagatgagaccctgtgtcacaacaaggaatttttagaaggtgctttttatattactcttcacagagttaaattttcagaggatttagtattattgaactaagtttcataagtgtattttaagcaagtaaatctctaatgtaggaaaatccccaaaatggtagcatttactaatgttttatatggtaatttttgaaaaatatatctgatatttcttcagtaaaaatggtgttgttttaataacttaataagaatgtttaaagattctttaagtctggcttatctagctaatgtgggcctattaaataataggcagacttctgccttccttatattctttagatcttttcaaatactccattccaatatccatcaaaagacttctctttatgccacttattatctatactagtttttaatgttcaattactacaagattataattactgtttttattcatgttcccaagaaaaatacataagattcacacccaacacacttcgaaatttatttcactccctttgactatatgtgattatcaaaaaagtatttttcaagatattaaaaataagtaaaggaaaatgaaatatttttaggacattcaaaatctaatgaagttcagtgtttctttaattgagggcaggcagaggtgggggagaatttcagaaggtagtgaacccaaaggtggattcttggataattctactattctgtactctcatcatcttaacccatctgtttactaccctaaccatagttactaagcagagttttatcataataatatagacagctctcaaagtattgacattcagaggggattacaaatattatttttctatcatattgacctaccatgtccacagtcttccttgaattaccttccagttttactgggctgcatctaccgtttatgtctagtttgactttttctgagttcaccaattgctgctaggaatgtgct

SEQ ID NO: 34700 - DNA, 2300 bp, Homo sapien
catattagatataagtggctgtcagtgccttctggaactctccaactttgtacagtaccaaataaaaagcaattaaaatatcacatagtcatggagtctgatcaagtggtagcagtcctaaactagggtagggttccttaggcacaacccagaactggtcttgaaaaaggggggggaatagattacatgtggctcaaactcttagttggaagagagtaagaattgaggtaatccgcccaggtacggtggctcacgcctgtaatcccagcactttgggaggccgaggcgggcagatcgcttgaggtcaggagttagagaccagcctgcccgacatggtgaagccccatctttactaaaaatacaaaaattagccgggtgaggtggtgctcacctttaatcccagcgactcgggaggctgaggcaggagaatctcttgaacctgggaagcggaggttgcagtcagctgagatccccccagtgcactccaacctgggtgacaatgaggctctgtctcaaaagagaaaaacaaagaattcaagtaatctgccaggtgcaatggctcacacctataatcctagcactttgggaggccgatgggggtggatcacctgaggccaggagctcgagaccagcctggccaacatggtgaaaccccgtctctgctacaaatacaaaaattagctgggtatggtggcaggcgcctgtaatcccagctactcaggaggccgaggcaggagaattgcttgaacctgcgagacggaggttgcagtgagccgagattgcaccactgcactccagcctgggcaacaagagcaaaacatggtctcaaaaaaaaaaagagagaattcaggtaatcttttaaccccagaaaagtgtcttccccaggtaccagtcagacatcttattcccaaacttccagttgaatatttactcttacttgtttttaggaagtacctcctcttatgagtattcccctagataactgacagcttgatttcatgtttcagttttcatgctgcctttttcatctataataagaaatattttagaagctgccacacttgaggaaatattcgttgtgtaaagaaatgctgtcactgtcttaaaaagttagtaggttatataactggactctgttattaaaggattaacataaaatattttatgtgttccaggaccctgaaccatcaatatgactacacatttgattggacaatgttaaagcagaaagcagcacagcaggcagcctcttccagtgggcagggtcagcaggcccaaacccccacaggcaagcaaactgacaaaaccaagagtaacatgaaaggttagtagccaagaaccaagtgacgttacagggaaaaaattgaatacaaaattgggtaattcatttctaacagtgttagatcaaggaggtggttttaaaatacataaaaatttggctctgcgttaaaaaaaaaaagacgtccttggaaaatttgactactaactttaaacccaaatgtccttgttcatatatatgtatatgtatttgtatatacatatatgtgtgtatatttatatcatttctcttgggattttgggtcatttttttaacaactgcatcttttttactcattcattaaccccctttccaaaaatttggtgttgggaatataatataatcaatcaatccaaaatcctagacctaacacttgttgatttctaataatgaatttggttagccatattttgactttatttcagactaacaatgttaagattttttattttgcatgttaatgctttagcatttaaaatggaaaattgtgaacatgttgtaatttcaagaggtgagtttggcattacccccaaagtgtctatcttctcagttgcagagcatctcattttctctcttaaatgctcaaataaatgcaaagctcagcacatcttttctagtcacaaaaataattcttttatttgcagtttacgtatgatcttaatttcaaaacgatttctttgtttttggcttgatttttcacaatgttgcaaatatcaggctcccagggtttaatgtggaattgaagtctgcagccaggccttgcaaattgaaggtaactggggcaaatgccattgaaaccgctagtcttatttcctttctacttttctttggcactcttactgcctgtaaggagtagaactgttagggcacactgttgctatacagtttaactcccattttcatgttttgtctttcttttcccatttctggggcttacctcctgatacctgcttactttctggaagtagtgggcaagtaagat

SEQ ID NO: 34701 - DNA, 2300 bp, Homo sapien
ggaaaactcaagatgcttaaacttggcttttttttttttaagaccagaattgattaattaattaattttttagatggagtggagtctcgctctgtctccaggctggagtgcagtggcacgatctcggctcactgtaacctctgcctcccaggttcaagcgattctcctgcctcagcctccctagtagctggagctacaaggcacatgctaccatgcccagctaagttttgtatttttagtagagacagggtttcaccacgttggccagaatggtctcgaactcccgacctcaggtgatccagccgcctcggcctcccaaagtgctgggattacaggtgtgagcccaccatgcccggctgcattttatatcagaatttaacagcagattttaacttagtcaaaacatgctttagagtcaccaaaggagaatgatgtctaacagtgctgatttgggagttgggcaccctgagtgttggttgggctttaaaaacttcatgctaaacttcaggggaagtctcctcccctctctcttcagttgtcttccgagatgaaccctattactaattacttgaccacctttcaaagttgcagttaaaattcttcacatttttctcccatttctatttaattaattattttttttttgagacagggtctctctgttgcccaggctggagtacagtggcgtgatctagtctcaccgcaacctccgcctcccgggttcaagcgattctcagactcccgaatagctggggttacaagtgtgcgccatcacacccggctaatttttgtatttttagtagatacggggtttcatcatgttggccaggctggtctcgaacaactgacctcaagtgatctgcccgccccggcctcccgaagtgctgggattacaggcgtgagccactgcgcccgccccccatttctattttaattaaattttatttaggataggcttagcttaaatttttacgactgaggtctgacttaagatgatagcatcaaccatggagttttctttcgtgaacattattattactaagcccaattttcccaggtcaaattttgtaaaacaaaacgtggtcaaaatttgattctctgatcgattttttgtaaaaaagaaaaaaattaccgtgtagttttaaatgttgtcaattaaattttgtaatagttacctctactctgttcaggttaatactgaggttttcaacaagaccaacatacgattcttttttttttttttttttttttttttggtggggttgaggggacataacagttttttcactcttgttaaattaattttctgttgattccatctatccttaatcttcattatgagcaacataccaggttttcttctgaagatcatatgtggtagtgaggcaataatgcaaagacataggatggcagggggattccggcttctttctttcttcccctcctgtggaaagagggtctataacactccgtagtagataggacaattctaattatgaagggtaattagctaggctctgctacaaccgagagccctgagagattcctcgacgctggctgcttttctcttcctctccaccagaggcgacagcctctttccaaacagaaactgggttggaataggccggtccgggggaacggccagaagaaagatcaaaggttaaaaaccgcctcaaagagcacaggtcaatacccaactcctaaggaggccttaagctttcatctgccacgaaacatgaaggtgactcctcccaatatcaaggccggggggccactcagccttccagagacccggcgggtccgaggcgagtaacaggtaacacctgctgagccgccgccgaccggaagtggaagagagcccgggacgggggtgaggacaggccgcggcacgcctgcgcagtcagcaggagttgcagcgctcatgcgcagctgggcggtgacagggtgacgctcggagcgtgggccgcgactctcacggatccggttccgccctctcgctgccgatccttcggagcgagcgcccgagatccctttcccagagtgctctgcgccgtgaagaagcggctcccggggactgggggcattttgtgttggctggagctggagtaacaagatggcgtcgtccgcggagtgacaggggtccctctgggccggagccggcggcagtggtggcagcggtatcgccgccctagctcaccgcgccccttttccagcccgcgacgtcgccgcgcaagcgaggcagcggcggccgccgagaaacaagtggcccagcctggtaaccgccgagaagcccttcacaa

SEQ ID NO: 34702 - DNA, 2300 bp, Homo sapien
gtttttaacttgtaccagacttttctttgaagcatccctaataagcttctctgcttgaatgtttacttttagtgacaggatatgctctccaggcaactgatgttattattattattattattatttttgggacagagtctcactctgtcgcccaggctggagtgcagtggtgtaatcttggctcactgcaacctctgcctccagtgctcaagcaattcttctgtctcagtctcctgagtagctgggattacaggtgcccaccaccatgcccagctaatttttgtatttttagtagagacggggtttcaacatgttggccaggctggcctcgaactcctgacctcaagtgatctaccctccttggcctcccaaagtgccaaagggattacaggcgtgaaccaccgtgccccgccaactgatgttatttttgaaatactcaaattgttagaaaagttcttccttacattttaaattgcaatgcatctccttacagctttctgcatcctggtggcctctaagatcatacaggttaggtctaatccatagggctacttttttgaaaagtcctcagcttcccttgcttttcttttttctttcttttctttttcgagacggagtctcgctctgtcaccaggctggagttcagtggcgtgatctcagctcactgcaacctccgcctccaggattcaagtgattctcctgcctcagcctcccaagcagctgggattacaggtgtgcaccaccacgcccagctaatttttctatttttggtagagatgggatttcactatgttggccaggatggtctcgatctcttgacctcgtgatctgcccccccctcagcttcccaaagtcctgggattacagccgtgagccaccgcgcccggcacccttggtttttctcttctgcaagctataccacccctctccccttcagttgccctcatctgtcacattcaagaggagacacttttctggttttcatgtttttctgagtgtagagtggtggttaagcagcctgaaccctcagatagtctgaattcgaatactggcactgtcacttagtagttgtgtgtcatgggcaagttattttcacctctgtagcttaagtttctctctcttgaaaatgaggataataataatgatacctatctcttagagaaattgtgaatgagataattgagacagtacaagtaaaacatttagtatagcgcctggcccttagtaagcaatatgactactaccagcagtaataataaataataagccctaaattaagccctaaaaatgaaaataagaataaaagaagtggcagaatgagaaaagctaatctagtccattcctgacgctacaaacaaggtttggttgccccgatatgaaactttacatgcgtttcatagcaactatcactttcaatggtgggtttagtgtcttgcacaggagcccaataaggccaggaccttgtctatcgtgttaactgttgtgttctctgtgcccagaacagtgtcttgctcccagtagagtgaaagaatggaccaacaccgtcatgtcatggaagcgactggccgacttggctaaggttgtgcagggctcccaggagagctggggcaagaaccaagggctcctcggcagccaacactaagaattaaattgaggcccagccctacagtttggtgattcgggcaggagcaaaggtatccagtaataccggggtcagcattcccaccgggtggcctaaatgccggctcctgttttctggatgacgagcccgcggagaaggtggcttaatgagaggccgcgggagggtgggtgccggcacgtcgctaaactccgcctgcaatccttcgggttggctgccagccagggcacggttccgagccggccggggctgactccgggagcagcgaacagaaaacaacctggctccagaaagacaattaacaaaggctggagaccagccaccccctcgcggcgcacgcacgcaggcagctgcgtgggcatagccgcgcccgccagcgccctcggtgggcacagccacccggagcggcgcgggtgccgggagctgggcgacgcgcccctcctgccccggctgcgctgttgcccgggcggccgacctccgtgcgtgagcgccggcaggcaccttgcgcgcgcgggtgagtccgctgggcgtttggggcctggtcaagcaggatggggctggagaggggtgcaggaaacagctgctgggaggatcagaaaagggaggtgggacagaaaggcaggatgcgacgacctcccgggtcccaacttgcttggtagct

SEQ ID NO: 34703 - DNA, 2300 bp, Homo sapien
ttagccaggcaaggtgtcacacgcctgtagtcccagctactcaggaggctgaggcaggagaattgcttgaacctgggaggcagagattgcaatgagccaagatcatgccactgcacaccagcctgggtgacagagtgagactctgtctcaaaaaaaaaaaaaaagaaaaagaaaaaaaccccacaaaggtggcatgtaaatgtatgaagttcaagaagcactggaatgaggagaaagatgttgactcagtctaaggcggaactttctaatcacttaagctgtgtgagaatagaatcagctgtgtgtgtccctctcattgggggtgtgtagagagcctggaaaacctcttcaaggtatggtggaaggggattccagcgtaagatggccatgacaggcatgattggatgtttctccttggtactgggtccaggctttcctctacttcaggccgcacgaatacaatctggacatccccgaggggcctgcagtgcagtattgcaatttggcaagagaccttcaccttgaggccttcctgaaatttgtgagtggaacctttcctttctcctttctttgttaggcaggtggtagagcttacaagaataatatttagaagtcaggcactttggccaggcgtggtggctcacgcctgtaatcccagcactttgggaggccgaggcaggcagattgcctgagctcaggagtttgagaccagcctgggcaatacgatgaaaccccgtctctactaaaaatacagaaaattagccgggcatggcagtgtgcacctgtagtcccagctactcaggaggctgaggcaggagaattgcttgaacccaggaggcagaggttgcagtgagccgagatcatgccaccgcactccagcccggagacagagtgagactccttctcaaaaaaagaagtcaggcactttacacaattgccacatctgtaatcttcctgagtggtcagcagcatagagattattattagtgcactttcctgataaaaatagcccccactaacatttattgagcctcactatctgccaggctctatgctaagccctttatattccttacatcatttaatcctcaccatatggttttgggggtggctactttgaataaccccattctgcaggtgagagattgaggctcagagggggtcacctcctgggtcatttatacagatggtcagtgataagctgggatctgagccccaaagactcttgaccaccactctatacaaaatcttttctaaggctgggcaaggtggcttatgcctgtaatcccagcactttgggaggccaaggcaggaggattgcttgagcccagttgttagagaccactgtgggcaacatagaccctgtctctacaaaaaataataataataaaattagctgggtgtggtggcatgtgctaaggtgggaggatcgcttgagcctgacaggtaggctgcggtgagctgtgattgcattgctgcactgcagcctgggagacagagtgagaccctgtctcaaaaaaaaaaacaaaaaactttttcaaggtctttgcataataatgattcaaagtgctatataagattgaatgcctactctgtgctaagcactctgttaagctcattacatgcatcgtccccatttttcagatgggcagattgaggcccagagaagttagataacatgctaaaggtcccagctagtcagtgggagttagactggaatccaggcctgcatgcttccaaagccccttctcacagcccctgccctttgccacctcctttcccgactcccacgctcatgtctccccacagaagcaacggctagaaggcctggtgtggcagccactgtgcagcctggccaaagccctgcttggccctcagaacctgatcaagaagcgtctggacaagctactggactttgagcgggtggaagagaagctgctggaggtgggcagtgtgacctaccaggaggaggccgcccggcacacataccaggcactcaactcgctgctagtggctgagctcccacagtttaaccagctggtcatgcagtggctgggccagatcatgtgcacattcgtgaccctccagagggaccttgcaaagcaagtgctgcagagggcagagggaagcatggcccaggtaaggcctctgagacttggacacctgtggggagtagccaggcaaggccctgcagccccatcagccagctgtgtgtaggggctaggatggagggaggatgggcctgaaaacaggtcatcaggcccttaggaagaggcagtgggaaccttccagatctctct

SEQ ID NO: 34704 - DNA, 2300 bp, Homo sapien
actaaatgacttgctgtggttccaaatcaggcagtgtgactccagggcccacgctcttcaccccctgaattgctggatactggaacaagatgttccagtatccagatgcagggtctgaaacagaacccaggactcctaactcctagtctagggctctgaggctagatgcaggctctctgttggaatgcattgttccttaaaagcacactggccttaagcccaaagagtgaaatcacggcctgcggttctgggaacctcagactggagaaggaagcttttgccctggtgttcaagtctcagcaggtgtgctggggactctccctctatttccttctcccgctggaagggagcccttgttaggtgggcagggtggggcagcccttatgagtgtagggtgggaggagggcaggaggcaggcgtgcccaataaaacagacctaaagcttcccgccttcttgccttcatccaggcagtgccctcatctcctgtttggtaaacaacagggcatgatgatgagagttcaaggttggagtcaggaggtctgagttctggttctggctcaggcagtcactccatgtacacattgacagtcagtttccttatctgtataatgtgtggtggtggtggtggcagagaatcaaaattctccagctttttcagttaacacatcatctattaagtgcctactatgtgccagaaacggcagatacagcaagtgcaaaagcagatttaggccctgctttcatggtgttagagtcttgtaaggagagatacaaagattaagtcttcattgcaacaaatgtaaaacggcaactgtgaccagcttttagagaaaaaaggcctgctggtggagctaagggagcccatgatggtggaggtggaaggagaggaaatggcttgacagtccaaggggtaatagggaaagatgccccgaagagattactaggtgagtggcaagcccgttgtgagcgggcctgcggaggctggcaggagcccagccccttcatgcattgtgggcattggtaagagaactcattggagttttttgggggaagggtgctggggacgatggcagagagagatatatgatcaggtttagcacagaatataggcaaacgcacccttcaagtaaaagataaaaatgcctcctcctccaaggagacttccttgatttctttgcttttgatctatggtatttctccctccttctctggccttgtagcctgggtagagaaacagtcctccaggggagtaagacctaagctttcccttcctgcaactgatgtgcgctgtagctttgaacgaggtcctaggtatatacatacatacatacatacatacatacatacatacatatatatatacatacatatatatacacatacatatatatacatacatatatatacacatacatacatacatatatacacatacatacatacatacatatatatacacatacatacatatatatatatatatatatatatttttttttttttttttttttcaggagggatatgaagagtgacttacaggcgcccgccaccatgcctggctaattttttttgtattttcagtagagacggggtttcaccatgttggccaggctggtctcaaactcctgacctcaggtgatccacccgcctcggcctcccaaagtgctgggattacaggcgtgagccactgcgcccggccttcgaacgaggtcctattccttctcgagcctcagtttccccagctgtgcagaagaagcaggttgtctcgcaggacccgcccagcgctaacgcaacgtgattcgctctggcaggagccgggggctgcccgcattgctgcgcaggcatcgggctgctggctggggcaccgccacctggctgcctgcgctttaccccttgctgagggctgcgtgagctggtcgcggcgccagacacggcgcaggaaagtgggtgagcgacccccggctcccgcgggcgccgcgcggccccgcccccgcagctagcggccctgcggcagccgggggctcgagctccgccctccgcctcccgccggcctcactccctcctccctcctcccttgctcgctcgctggctccctccccccgggccggctcggcgttgactccgccgcacgctgcagccgcggctggaagatggcggggaacgactgcggcgcgctgctggacgaagagctctcctccttcttcctcaactatctcgctgacacgcaggtacggccggctggggctgcgggcccggggccaggggtgctgagctgcgggggccgcagctgcagccgcgg

SEQ ID NO: 34705 - DNA, 2300 bp, Homo sapien
gaccctgaccctgacccttctgcctccctcttaaaaagaccctctgatcacactaggcccacccaggtcatccggggttatctcccatctccgtattctgaaccacatcggcagagtcccttttgccctgtaaggtagtatcttctcaggtttgggagatcaggacgtggacatctgtgggggaccttatgctgcctgctgtggtggtgcactcatcatctccagagccccctcacctctgcagcagccagtcagcctctgtcctccctcagggttgtgggagcccctgccttccttttatatatccttttttaatatttatttttatttttaagacatcatgcctaagcccctgccttcctgccagatctggcctcttcagggggagaagtgcaggagatgaccacttcagtctggaagccttcctctctggctgtcaaattctattcaacttcttaggattcaagtttaaaaaaaggcgagaacactctaattgtttccttcctagaatcatgtgtcttttgccccatagcccctcaaagtataaagacgtacaggacatcatcgcttcctccaaaaagttgaagatccagataggggaagatgtgggtgcccacacaaagtcaagactgtttacttccaggcagttatcagctgtgtcatcctgggcaagtaacttaacctcttaggctcaatttctttacctgttaagtgcaaatagtaggaccttccttttctcccaagggttgtgataagaataaaatcaggaagccgaggcaggaggattgcttgaggctagcctgggcagcatagtgagaccctgtctctaccaaaaaaaaaaaaatctgctgagtgtggtggcacatgcctgtagtcctagctacttgggaggctgaggtgggagaactcttgagcccaggagttcgaggcttcagtgagctatgatcactgcactccagcccggacaacagagcaagaccctgtctcttaaaaaaaaaaaaaggaataaaaattggagaatatattgaaacacaagggttgattggaatagtatgagacaccttgagtgataccgaagccatcataggacttgattaaatgtgacacaaaattattacagggtcagggcttgctgtcgtttatgtgggtggggctactctgcagacgaggacctcaggctttgaaggcccctcatcattatcatctccaaacttcatgttctagaaccttgaaggaattgggtggctggtttgttgagagcagggtgagcgtacaaatggaggctccccgcctgcgtgtggggggccgtgtgcgcatgcaggcggatgctgcacctgcatttctaagtgccggccaccattttccctgcaggcagccactgcctggtcacaccttgggtctaggaatgtgtaacccccactgcacagtcatcctgaggatgatgggcccaggaagagacctgcataggcccctggaagcaggctcagggccatttaggtggggaaattggggtcccaaaggcatctgcagcccaggtaggcaggtttccttacacaagtggactcccagatctgtggggagggaactgctggaggagggccagagtgatgcccctgaagggccaagctgagggcagggccctgattgcccaggtctgaagggctatggagatattctagtcaggtgtgacagcagaggtgggcaggggatggggaactaactgggtatcgtcttggacctgtgaggccagatttaaggcatagagtaacaggagccacctgttaccgtgtcctacataaattatagcaagaggagtattttcttttcctctgccagttttcatgaaagacagagcaagccgtattcctttttccttgttctttctgtttgcctagcaggcagcactccacttgctccgccttacattcagtggtgtgctgggaaatgcataacaactggttctggaggtggggtgaggtgggaggctctgagttgtagcattttcaggtgtccaggaagtaaatatccccaccatggccaatttcatcctgtttaagtgatgtcactgaacgttgtccccaagctttagcattctgctttacattctcattttaatcctcaagcaactctgaattagttgctgttatcccagacttacaggcaggaagcaggctcagagaagtgaaggtttccaacttagacgtgccaggctgtgcacaggtggggacctctgaggggcctgctctgatctgggttggggctgccccaggacccttggaggagccgccaccagagcaatg

SEQ ID NO: 34706 - DNA, 2300 bp, Homo sapien
tcccccaggctggagtgcagtggcatgatctcggctcactgcaacctctgcctcccgggttcaagcgattcacctgcctctgcctcccgaatagctgggattacaggcgtgcaccaccacgcctggctaatttttgtatttttagtagagatggggttttgccatgttggccaggctggtctcgaactcctgacctcaggtgatctgacccacccaccttggtgctgggattacaggtgtaagccactgcgcctggcctatttatcttttttgccaatcacataatgttaaattcactctggttaaataggaatatgatgggttgccactatatgacttttggttaataaacatgggaaacctaattaactctttcataattcctcccatttcaaagcccagggccatggtggagctgtgggggttccccagggagcccagtgtgggaaccacaggaccagatgggctgtgaggcccctccagctcccacgctgtgcagcagcaggggcagctgtgggccgagcactgctgagtcatctctccctcggcctggtcatgtgttggctgacaagcccaggctggtgtggagtcctggcctgggttattggggaactgacttcagctctggcctgccgaggcccccagcctactgggaagggggaatcgccagctacctactgcctgtccacccacctgagggtcccctgtctgttcataaaccccaggagccggccacctgagagggctgcatatcctgggtgtgtgagtgctgcctgggggctctggcatgacagcaaggcggcagtcagctccaggcagcactgggctgaaggtgtgcactggcatcttgctgccctgttgagcatgacatttccttaaatgccatgaaggggctgcctgaccttcactctcttgccaggaccccctttctacctctttctgggttatttataacagtgtttacaagaaaaagggcttctcagctgagccctggccctgctccctcggtctctcctgccagccagggcaggagatgcggaaatagaaccagagaacgtggacactataggaccccagaaaacacctccagatggagtgtgtgggacactttgtttttttaggtctctgggacttttttttttttttttttgagacagtttcgctgttgtcgcccaggctggagtgcaatggtgtgatctcggctcactgcaacctccgcctcctgggttccagcgattctcccgcctcagcctctcgagtagctgggattataggcacccaccaccatgcccagctaatttttgtatttttagtagagacggggtttcaccatattggtcagctgctctcgaactcctgtcctcaggccgtccacccaccctggcctcgtaaagtgctggaattataggcttgagccactgtgcctggccaactttttaaaaaaaattgtggtaaaatgtacctaacataaaatttaccctttttttttttcctttttgagacagggtcttgctctgtcatctaggctagagtagtgcagtggtaccatcacagctcactgcagcctcaacttcctgggatcaggtgatccttccacctcagactccagagtagttgggacaataggcatacgctactgtgcctggccaatttttgtattttttttttttttagagacagggttttgccacgttgctcagactaaaatttaccatttataaagtacaaaacagtggcattaagtccattcaccatgtcataaaactatcagcagtccagcacttttctgtcctcccaaagtcaggtactttgtcatcctcctgacacaggaggatggctggcatgtccctaggcacatctgaattttgaggaaatcccacacaacatggcaaggaaaggaagcacctgccagctcatgagcagggtgtcagtggtcgccccttcagccgtgtgacatgagcaacagtcaccctttgctttccttccgactcaggaccaaggtcagaattccagcgagtagactgccagaggacatcctgattgcaggaagaaccaggaatctgctccagtctctttcttttcttaagcaaaatcgatgcatttcactaacttcactcctttcattagaaatagggcacgtgttttgtaactcacctcaaagctgaatgccaccccccatcctggcaggccattcaccatctttgagaagaatttaataacagttcctggagagtttcttataagcattttacagttttcctaaatacctcatgagggctggagcaattccacagcaacta

SEQ ID NO: 34707 - DNA, 2300 bp, Homo sapien
aggtgtctgttggggctgcagccttcagctctggtggaggatagcgagttcagtcaacctccaatatctcttcccactcctcccacagcccttgtagctggtgtcctgggcactgcttctggagatccagcctagtttagggttttctggaaggagccctggactttctcacactttagtgttccagacactggtagatgttaatgcagcttagagcaaggatgaggaaagtgtggccaggcttcagaggactgtattccaacagtgtgacagaccaaaatgcaagattgcgctggttgtggaggccacagtaaatagtttggattttttttcccccctcagggagcccattggagggtttaaagctctgccatagacatccagggtcaaagaacatcccttttcctccttgagccccatcttccaagcctaacaagaagaggcgtaacaggtgtttttcaaagggtcctgtcctcaaaggctacacacaacccctcctcttcctggtcctggacgcttctcctgggaactgttgcatccaatcctacatcctcagaggcagaatcgggacctctcagacagcagctcagtgtaggagcctctcccttgctggggcttctctggggaatgagtccctatgctccctccctatttgtcctggctgaccctcctgaaacaaaggtccaccctctcgtgcctcattctgttgaaggggcagcagccacaccccattgtgagccagctgtttgccctctgggagcctaagaagctccccagagaggtgagatgcatctgacagccattgctagaaagtcccagcacaacgatgagtcacacttggggggaaagccccagtgtggacaagcggggcgaataagactggagaggttggctggtgcgagtgcagaggacctcagacacccagccatggagcctcccctttatcctgtgggcactaggagctactgaattttttgtttttttaaactttattgaagtgcaatttacatacataaaagccacctattgtaaacaattctatgacttttagtaaacttatacccatgcaattgtgaccattatccagttttagaacatatccatcattcaggctggtcgcggtggctcacgcctgtaatcccagcactttgggaggctgaggcgggaggatcacttgagctcaggagttcaagaccagcctggccaacgtggtgaaaccttgtctctactaaaaaatacaaaaaattagccgggtgtggtgatgcacgcctgtaatcccaactactcgggaggctgaggcaggagaatcgcttgaacctgggaagcagaggttgcagtgggccgagatcgatgaatcccccagtgctcatttgtagcaagtccttcctacgcccagctccaggctaccatgaacctactgcccggctcttggctgaggggtacggagcagggaggcggaatggtcagagtggggctttgtcagtgaatctggaagggtctgcaggggcgaaattccatggctgggagagctgttaggaggctggtctttccttcattcctcatccactgagcacagccaggtgcccggctctgtgtgggaagctggggacggaatgaaggaaacctggctgttcctatgatccaggtgagacacaatgggccagccagtgaccatgcggatgagacacatgggaggagtgtttgggcctccttcctcactctggcctctctccctctctaggcggacagcacccaagacaagaaggctcccatgatgcagtctcagagccgaagttgtacagaactacataagcacctcacctcggcacagtgctgcctgcaggatcggggtctgcagccaccatgcctccagagtccccggctccctgccaaggaggacaaggagccgggtgaggactgcccgagcccccagccagctccagcctctccccgggactccctagctctgggcagggcagaccccggtgccccggtttcccaggaagacatgcaggcgatggtgcaactcatacgctacatgcacacctactgcctcccccagaggaagctgcccccacagacccctgagccactccccaaggcctgcagcaacccctcccagcaggtcagatcccggccctggtcccggcaccactccaaagcctcctgggctgagttctccattctgagggaacttctggctcaagacgtgctctgtgatgtcagcaaaccctaccgtctggccacgcctgtttatgcctccctcacacctcggtcaaggcccaggccccccaaagaca

SEQ ID NO: 34708 - DNA, 2300 bp, Homo sapien
acacccgggtgtctgatctgtaggtctggggtggggcaggggcaggggcaggggcagggattggcgtttccaacaagtccccaggtgatgatgatgacattgctagagtatcatactctgagaccagaatttaggtcttgcgaagatacctcttcttcccttctaaagggactagcaaaaaaaaatttttttttgttaaataaaatgtaaaaagacttcagctttatgtttatacatctacaacaagtgttcttaactgtttgaaaacctgattaaagcaaaggcccatctccatattaaaatgtgcatacacatctaactgggcattcaattttagggggtttgtgggctccccgcaaacttgttaagaagccctaaattttttgttcctcaaagtgaggtccgcagcaatttctccagcaagcccttactgtagaagctaggattcgtcagtcacagctgcgttctgccgacttcgctgagcctctctttctggctccattctttcccgggggtagcttctgccctacagtggtccaatgtcaaaggtttggcttcagccttgctttgctgtgagctaaagcactccatctccacattaggcagttgcccaggttctcttcatgttgaaatacatcccccaagctggagcttccctggtctcctttctctcctgcccagctcagaggtgtttgggctgggcctgcattcatagaattgcctgggaagagtcgagaacttctctagaaacccccatggattttcctttttctcttctcacttttgggccaggttcagggctggctttttctgctcactacagaaacttaattgggtaacctggctcctgctcagctacctggctgagctcagtacctggtaaacctggtaagatactaatcagccttctccagacctgtaccaaacactcagcaacagaaagcacgttaagctgggttaacaacacaaatcttgaactccacgataccttccaggcactctcagctcttcaggtggggaaattctaccaattctgttgcaaaagggatgataatacaataattaggtaaccctttaaagttgcaagtaatttcccctcccattatcctactagagcttcacaggtgcacctggaggtatctgctgcttatccccattttatagatgaggaagctgaggctcaaagagattacatagaaaaatagagcaaatatttacggagcagttcctgggctaagcattgacatgcacttttaaatttaatcctcacaaatggccaagggatggacacaattggttatccctattttatagatgaagaactgaagttgagagggcttctgtaactggcccaaggtcacccaacagggaggcggtggggccaagcttcaaactcaagctgtctgactcacaagcctgtgttcttgtcctctgtgctgtatttgtcagtgactcagactggatgagtgagggcagcgtgcaagcaggcaaggaaggctgcaggtgggtggcacctgggagcctgctcgggctatgggactaatgagcctgatagctagcctggaagcatggagctgcaatggccaggggctgctgcttggctgaggcatgaacccaaagggaacagtggttctggaatcagaaggacctgcttctaacttctctgctttctggctttaagcaaatcccatctcaaacctgagcctcagatttttcatctggaaaatggagaaacataaaacctcatggggtttaaaaaaaaatcaggtcaaataagataataaagcaaaagggcttttctacccctaatggcatagagaggcaaggctcagaatggggtgggattataatgagcaacacagtggttcccggtgatccagtccggaagctggcagtaggcatgtgtccagatgttcaggcccacacacagccctgggccgtcgttgcagaaggggaagctaggtttctgcgggaggcagttccagctgtgtgccctcgtgaacaaatcctaaggaagcatcccttgcgtcctggagcagatccgcccccacccccatggtatctcccgagagtgagtgcctctgctttgcttgttcactgacagatgtgagagcagagggccgtgttcagacagaacgccaagcatccggcacgccaggaagcggcgggaaaaggccattgtaagtgatctgggggcccagagcctggagtgaatgggaacggacaggaagtgtgtgggggcttcatggaccaaagccttttgaggctggctggtgagcccctcagtcttcggcctctgc

SEQ ID NO: 34709 - DNA, 2300 bp, Homo sapien
tctacttgctatcccgtacataaaatgctacaagttctaaaatttaccgaccctgcagacaacctctatcccgaaggactcattcggtgctgtgtattatttagggcaactccaaggtctattcagaaaaacgagtgaaccttggtctctttcccaccaaattgaggagtaacccagagggagcagctgccattggcaaccatctcgttgtagctctgtcctagtgtttgctcttgatgatgtttacatgtgatcgccataaagcttgctgtagactgtgtcgatagccgcccgcacagggcaggtcgtactgtccgtttctgtgccgtgctggtgttttccaaaaatgtctgatccaaccactaagtggaattcttccatctccttcctcagtctgtacaaggctgaatcagaatccccattctcgggggctctggttaccgaaggaaaatgcatcaaagagttaaagaatatgagtggatggagtgcagctaaggcccccaccccctgctccgtcacaacttgccccctcaaccaaaaagctgctttgagtcaaaaagcacccataagatacctgcatctgccttgaaatcttgcagcatggagtgtcatatgtactcaggagagaggcagggctttgcgggcaggagaaggaagggaggaatgctctgagctgcaaagacccagtactcaagttctgacgtgggaggagatgcagtgagacgtctcttgttgcctaaagcctgttcctgttggttttcttagagtgatttctcctagacatgtgcagtaggcccactggggctgctgtgcagtggtgagtaaaagggcagggaaggcatggacagcctggtccttctgcatggacagctcagtccatggcccatcccaggtatagagttcagttaatcccatttgagcctgcagcttaagagatggctcatcctaactgtgaagcaaaatcagccccagaggatgtattgatctgactcactgatgtcaaaattgcagtatttttttagcatttgagatttagcagctgccttcagtttggggttacccacatcccagcatcagatatgattaaggaaagaaattggatgtacaacagcaaagaaagtgaatgtcatggtttccctggccaaagaagagggaccctgtcatccttaccaatggggaagaagaaaactagtgcatgtgcaatatgtcaaagttagtcccctagtccctgaggggtttttacacacagatgggctccaggtctgctcgtcaagtttggaggtaccgggtaaatggaggggagctgcagagttggaaacccacatgcatggatgtgtccttggcccagaaccaccatgggatgggggaggccctgagccggctacaagacacccaggaagtaggcaaaggctgactttgcattaaacaataaaagcactttgagaaaaccccaacacttcagcctgggtccgtgtttctacactggaaaatacgagtctcctttggctgtgtgaagtgatcttctagagactgggacagggagtttgggaatggggctgctgtcaggtaggagagagcagagatgcctttggagatgtcagcagcaggagagccagtgctggggccaaccctttgctggccttttgttggaagcccttgaaacagggagccatgggtttagatcttggtacctacctttacagaaagatgaaaacagcccagctgagtgaaatgagtttgtagagtaagtcacttaactgtaagccatctcagaatcagaaaccctaatgtttcttacttgctatgtgaccttgggcccctgtttcctcatctaccaaatgagaatgttgaatatgagcattaaagtccctttcacctctgagaggctcagatccccaaccaggagcattgggaatccatcactcctccttgaaactgattccattctctgacttgacccagctcctgttcagggtgagggttctctgcaagaaccaaccagcagtaggttcaatcccactgtgtcctggctgagttgccttatccaagaagaccagctccccgggacagatctaagccatagtttctagtggggacagtaaggaattaaacccccaacttggctaggtaacgatgtcaaatctcacattaaccttgtctttgtccccactggatagctgttaatccgaatgttgtgaccatttggctgtttctctcttgttctcagacaatactagcaatacactttttttttttttttttaaagaaaaacagcttaggagcttttcacacatttcttt

SEQ ID NO: 34710 - DNA, 2300 bp, Homo sapien
attgtggtttagtctttcaggtgaccagcccctcagcctgaagctacctagggattaccaggcactggtcaatcattggtatacaaaaatacatcactctggagattctaaggattttagaagttgtgttacctggaaatggtgttgaagaccaaatacatgtatcacaatatcacaatactgaataccaaggatgtgtcaggcacccttgcaaggcctagggaatcaacactgacaggtccctgccctcatgaagctcacagtatagtgggaggccagacaataggacaaggaaacaaaaacaaacatgataattgctgatagtaataaatgtaatagaaaaaataaataggctgatatgacaggcagaaaccggggagagggtatttgggggctacttgggataagaaaactagagatgacctgtatgacctgaaatctggaagttaagaaggagatggcatgcagagagctgagaaagcgcattaggttagagagttccagttccttatgatgggagtgtctggaaggtttgtgctgctacacagcctgccagattggggggtgagcactcgtgcacactgctggatgagtgcagtgccccaagaatttattacactctacaataaaggaggcaatctgcttcccagtaaaggtcatttttgaagttcaaagtgctagcaactgtctataattatgcgttccacatagtttacaacatagaggtgccaggctatagtggatatagtcatggaagctaaagtaagtttcatccagaaagaaaagtgctctgtctccttcctagtgggcaggaagggcattttaatgaagattctggtatttcaagattcactggagttgctagaatgtggaccattgtgtgtatttctttctttccttttctttttttctttttgagacaaagtctaggtcttgtcgcccaggctggagtacaatggcgcaattttggcttactgcaactttgcctcctgggttcaagcgattctcctgcctcaggctcccgcgtagctaggatgacaggcagtgccactatgccctgctaatttttgtatttgtagtagagatggggtttcaccctgttgcccaggctggtctcaaactcctgacctcaggtgatccacccaccttggcctcccaaagtgctgggattacaggcgtgagccactgcacccagccccttgtgtgtatttctgacagacaacccaagaaattacaggctgaaaccagaaaagaacacattaaagcaccaagagaaagttggagtgggttgaagggaaacagatttttaaagttaaggctctgtgaaatgggtagaattaactacaggttaaaaataaaatgttaactaaaggttgcctctgagtaacaggattatgggtgattttaattgtcttctttgtgtatgttcaacagtgactataatatgtattacttttggaataaaggaaaacctgaaaggtgtgttgttttataagggcccttaggttgccaaaattagagtcattgaaatctaaagctgataaaaactttagtgcaaagattgtgacatgggagactacacataccagatccataatgtacatgaggacagtaggccgaggggccctgcacattgaaagcccacatgggagaagcccttgggaaggggagtggaaggatgaggcaaggggccggggggatgcagaggctggcaggcagtcatttctcagcttcagccattcccgccatgggggaatgtggacagagaagccaaacaaatctcctaaacagtaaatgtcagtcttctgtgtcagatatttaagaaaactaacagaggtcagagaagacacacctacagcaagtagactgtccctgtgctgcctttttgcaacccctgctttggcagtgctcaagcccacctcctgctctgtgcagacatctcttctttgctcttactagaccaaggtgaaagaaaactctcaccttctcccatctggccccacagcatctggaacacactgatcctcataatccttgttcttgagaaatattaatgacttaatctcccaagcttgctccctctcctgtgcaggccatctcagtatgttttgcagacaagacccagagaagtccagactggacttgttgcagactgcaaaactgccattggaaggcctccgtcccagtccttctacagagtagccagtgggattcccagccatgggcgaggtgacagcagaggaggtggagaagttcctggactcgaatattggctttgccaaacagtactacaacctcca

SEQ ID NO: 34711 - DNA, 2300 bp, Homo sapien
cctctgtctactgggctcaagctgtcctcccaccccagcctcctgagtagctgggactacaggcacatgctaccatgcctggctacttttttctatttttggtagagttggagtttcaccatgttgtccaggctggtctctaactcctgagctcaagtggcttataggcatgaaccaccatgcccggccaaatttggccaatctttattggtgcctgttatatgcaaggtcctggcttccccacacagacaagaaaacaaacaaataaatgaataaatgtcagctgcaaggattggagtggattcttgcatttgcatagcacagtgagtgtagtggttaagagtgggctttgcagtcagacgtgactgtgttaaaatcatgctactgtcacttattaactgtgggacgttgggcagatcacctaacatctctgagcctcatttcctcaccaaaaaaaagaagaatcataatatggcacctcctctaaagctgttgtgaggattaactcatgtaatgaatgtgaagagttctgcgcaggcacgtgataaacatccagaaactgtttattctgcttgttgtgcagtctttagggcttaaacaaagtactttacactgattgccttacctgaccctctccaggactctgggtgctagggcattaactaccctttgaaaggtgaaaacattgatgcccattgaggtgaaatgatttgtcttcagccacaaggggcagcatcaggagtagaacccaagtgtttgtgttctgattcccaagacagcttatgacgttttggaaactctgaatctgatgggtgacagaaacttggggatcatctctagataagaaagggagttccttgaatgactgtgaagacgttcaccggaaagggaaggaaaggaagttaatcatgcttccttcacaggccctccttcacccccatctagtgggcacatgcaagctacaaacaaggtgaggaatgaacaaattaatacatactcaatagtggccagttcgaggcagataattaaatcaagatgacctgaaaggatgtgactggctgtggctagtttacacagggtggtcagggacggcctcgccatggagagggctggtgttttggctgagacctgagagaccagaagaaatctgatggccagaaccaatgtttaggtccctaaagagaacaagcgtggcgagcaaagggggccagtatgggtggagatcagcgagggaggggggcagagatgagtgcccgaagcacacagtaccttggcatagggagggtttgattttacctacaaatgccattaaacccactaaggattttaacaaaaactacaattacattttaatttacattttatgttttatagagacaaggttcggctatactgcccaggttgatctcgaacccctgggttcaagcgatcctccctactcggtcccccaaagtgctgggattacaagcgtgagccgctgcgcccggccttttaatttacattttagccttccggttactggaatctttgatggggaatgagttatagtgaggcaagagcctctaacattctaggagctcttttcccgttcggggcctcaatttcccgttctacaaaggcgggtgggagggaacggggtcccaagtagtactggataaagaggtggccgatcgcaaacgctgagcacttcaaaactctgggcagagcgcttccgcgcctctcctgctatttcaccctggccacaggctagccgccgaggccggtcatccgctctctccgcggaggagtcaacgccacggaagcagcggcggaacctctctaagaatccttccagcttgtgctcttctgtccagggcagccaatcgcgaggaggagagtagtcagagggcggcaccctccccggtctgggccgagttattggctggtggtagcgtcgctcgcccggcagtaccacgtgacggcctcggccgcgggcgtttacactggctctgcctccggcatctcttcgccggtgcgtcctcgccgcgcccgtaggtcccggcagccgggccccgcctccttcggagtccgagcgatgggcggggaaagggacaggcaggtatagctctgtcggcgccgcggtgtccacctcagtcaggccacggtggaagacgcgtgccgcggcgcctggttgcctgcagcggcccggacccgagaggtgagaagagggaagcggaccagggaagagggagggagcggtgctggccgccaagcggtcagcgggcccctcccagagtcattctgcctgggtccccgcgcgg

SEQ ID NO: 34712 - DNA, 2300 bp, Homo sapien
tctggtgtggtaacagccctggttcttttgttggtcctcctagtaatagctcctttgttctattcccttcaaaaaagtgtccttggtgtgatcacaattgtaaatctacggggagcccttcgtaaatttagggatcttcccaaaatgtggagtattagtagaatggatacagttatctggtttgttactatgctgtcctctgcactgctaagtactgaaataggcctacttgttggggtttgtttttctatattttgtgtcatcctccgcactcagaagccaaagagttcactgcttggcttggtggaagagtctgaggtctttgaatctgtgtctgcttacaagaaccttcagattaagccaggcatcaagattttccgctttgtagcccctctctactacataaacaaagaatgctttaaatctgctttatacaaacaaactgtcaacccaatcttaataaaggtggcttggaagaaggcagcaaagagaaagatcaaagaaaaagtagtgactcttggtggaatccaggatgaaatgtcagtgcaactttcccatgatcccttggagctgcatactatagtgattgactgcagtgcaattcaatttttagatacagcagggatccacacactgaaagaagttcgcagagattatgaagccattggaatccaggttctgctggctcagtgcaatcccactgtgagggattccctaaccaacggagaatattgcaaaaaggaagaagaaaaccttctcttctatagtgtgtatgaagcgatggcttttgcagaagtatctaaaaatcagaaaggagtatgtgttcccaatggtctgagtcttagtagtgattaattgagaaggtagatagaagaatgtctagccaataggttaaaatttcaagtgtccaacatttcccagttccacagtgggaaattttgcacacttgaaattttaaccaagtggctagatattattcctcctttgaagctaatggcatttgtatatacacactgcagcagagcttgtagctggacagagtcaaaaagaagaaaatacggtttcaggctttcttgcagatatgaagtattcttggaatgcaataagtatgtattgaactgtactgtaaagtagctccaaaacttaattactctcctgttttaggggttatacatttggactgtgcattctccaagagatgaagcggtgaagttgggatttacattggaagtgctgtagacttctttatgtggctcagtggagagagggaaagaatgttgcacctgctctagtaccataggtcaagaggcttctggatcacaaagtcataactagacaggtttgttcttgtagttttctatccccagtctttgctccccagatggcagtagtttttagtaggaaagtgccattcctgtccttaaggcacagtctcatcagaagtctaatacctgggcaggtttataacatcctgagagccagcctgacattagacagaataccctttgtaatacattggaaatttttactcatgcctttttgtttaggataaataggtaagcacaaagagctcttcaaaatcagaaaaaacaataggagtccttccttgtcttttctgtgatctctgtccttgtttctgagactttctctaccattaagctctattttagctttcagttattctagtttgtttcccatggaatctgtcctaaactggtgtttttgtcagtgacagtcttgccagtcagcaatttctaacagcattttaaatgagtttgatgtacagtaaatattgatgacaatgacagcttttaactcttcaagtcacctaaagctattatgcaggaggatttagaagtcacattcataaaacccaagtgctatgggtgtattattcatgatagctggcccacaggtcatgaattgaggaggaatttgctttcaaaaagcaagaatgtccaacactgaaagtttatagttttatatttggaccttgaaaggtaagaaaaaaccaggttctccaaagttaggaatagggaactaatttatgaaacagccatcttaaaaaaaaaaaaagtaaactgcaaaagtacaaaatcatttttcaatctgttcccagtttctaaacaattttaaatatttatgagaagcaaaccctatgtgtagggcatctgttggagtgggatgcttttagacatatattaagtatgtacatgtttaatatgtatatttaaaatgcatatatattttattatatctatattatcctatatagatatatgtaacttagctttattgtt

SEQ ID NO: 34713 - DNA, 2300 bp, Homo sapien
gccttcgtaggcattttatcatgagaatccttaaaggacaagagaacctgctgtgactttatgctatgactgtcccttctcaagggtagatttttactatcacctccatacatgtatccatccattcatgacatgtactatgtattaagcagtatgcttgatgccagccatacagagatgaatggagcatagtgcccacctttgaggagcctaccagggaagacaaacactagagcatgtgaaaactaaatcagaggttacggagtactactggaacataaatgtgcagataatcaactggaatggagcatggatgggcagtgcacttcaaagagggaataatatggtgggccttaaagaataaacaaataggaactcatgagatgaaaggaaatatttaacatgaaaggcaatgaaatactatataggaaatagaatgtcctggtcaggaacaaaaaattctttggagaagaaagcaaggaccaaatcacaggaagtcctagtcaggtttctagcttgctttgggggcattaagaggcttttgacggttttttggttttgtttttctggaatgacatgatcagatttacaatatagtcttttggttgcagggtagagaacctaatgggtaaagttgattttcctaagagatggccttaaatctgaagataaaagcaggctaaaccagtaggccatatacagtttggatgttaatttgagtgcaataggaagctattgaaggattttaaggaaggagagatgactgctgtgtaaagaatggaagggtatcagagaaaaaagcaggagtccacatgagataatggtggcttggattagagtagtaatagagagatggtgagtagtagtcagtctggggctatgtttttgcaagccctgtgctggaccggatgtgaggtgaaggaggagtcaaggataacgcccaggtttctggtttgagcactgaggaatccagcagatgatggtgccatttactgaggtgggaggatctactgcgtaaacctcatttgttaagcactttacttgcttaatattgcttacttgtggcagggctgggattcaaacccaggaggctcacaacaaagctagcactccaaacactacagagtgctatatagctggttctgggaactactaatattgagaggagacatagaaagagaatgaagcaagagccaaatcagacaagtcttggtcaagctaagacgtctgaattttattttaagtgaatgagacactggagggttttaagcagggagtgacttgatcagacttacagtgcaaaatgatcaatctgactgcttcgtggagaatggattgtagaggggatgtggggagaactacatcagtccaggcaggagatgatggtggctagaaggttggtgatggcggtagatgcagagaagtaggcagactggaatacagtgagggttgtgcgggaacttgtacaaatgtggacaacttgtgacactggagagaaaggacaatccaatccaatccctatttgatttacggaagctctccatacggtcattcagctcagcttgagtcactccaggaactcactaccatcactattcgtgggccagtgggagagacggattgagggcagatcactggagtgatgaaggcgctacttgatgcggcactacgtatgaacccgatcctgaatgagagggaaagactgagacaggctgaggtcaggccttgaacgtcgtgctgaggagagggtggtattgtaggcttcccagcgcccgacgtggctctgaaaggtgaggcggggcctagatccctcacgctcagcacagccccgcccctgttacctgaacgccccacagcagtgcccgggggctgagcggccggggcgtcccaccgccggcagccacagcttcctcctccgcccgggacctctggccggaagcagtccgttcgccttactagacccgctccaagcctttgagcagttcgtgtgggtccgctcccaagctagggctgggctgttgcgcttgcgccaggggtcgcatgcagtcacgcgctgccgaccgcttccggtgcgccgcgagggccgccgggacgggtctccctggcgatccgtggtgtgccgctactgccggtgcagccgccaaaccggtgcctcggtgacgaccgtgtccctgccgtcttcctcgagctccccggggcttgacccccggggccctcggcaggcatcggtgaggagcctgcggagcgaacctgtgctcctattcttgcccttcaggaccccatatcgcgactccgaggag

SEQ ID NO: 34714 - DNA, 2300 bp, Homo sapien
aaaacagagaatctactaacagcttttatgtctaggaaaagaggcataaaaaacttaataaccagttcaagaagagttagttttttttgtagccaagttctaaattggacttttaccacaagtctcaatccttggagggagaaaggctcacagaaaccacttgaattttacaagaggaaataacatagttgcccctgaaaatctgtcaggaggaaatttagaattctgggaagaggcagttgtggtggtaaatatgggactgatacgtgcagtacaaagcccacacacctctcatttagacctcactccacaaataaggtataatgagcactgcatgtggagtcaagagacctaaactctaaccttatgatctcagagaagtctattccacatcctaaatttcaactgtttctactgtgagaaaaggatgaacccagtggctcctagtcttttggaggcaagaattcttttgacaatgttgcgaaagcttaaaaaaacaaacaactacaacaacaaaaaacctctcctagaaattgcagacacactgtatttcacctataattttcaggatataccccaggtaaagcacacattattccttaggttcttcctagttctctgtcatctctaaatgattcctcttcctattaaaaacaaaaactaaactaacaaagaaaaacaaaacaaaaacctacattctaactgccatagtgcaacccaggaagagaacacagtctacaacttggctgggtaagcaataggccagtaaaggataagggaagcagtagttcaaatcaaggctacgtggggactgcgcttttttgccctgaattgacttctgggcggctgaaagccttgtggagaagggcagtaactgcaggagagcatctgtaatgaatggcatatagggtactaagcaccctgcgcaaaacgggttaggaaacactcattacagccaccttgggctgagggcaggaagacaacaccctacggttttgtttgttttattaccctgttctaagcctgagtacaagtttgttatcagactcgaggcagcagtatagcaatgcaaaaaaaggcaggacaatttaaggttaaaaacgaagggctctagaggacagaaaatccgggttctagtacagactacaccagtcgcaccagcacggggacctctgaccttaagcaatctacttaccctaagtctccgttatttcatctgtaaaacagagttaaggtcaatacctgaaatatgcgagacactttctctgtcccatcagatcctccttggaatctcacgagattgcctttgagggctcagccatgggccacagtttgactctgggctagctcctttccctcattctgggtcatgaatgaagcaagagccaaaccagacaaagtcttggtcaagctaagacgtctgggacatccgaatgtcccatacggattgcggaaggaggacactaaggctcagtggccctactttgtggaagactcagtagaggctcagagagccgcagcatccaactcgaggtcgcccagcggctcggcgcggccctcgaaggcgggacttacccggaggagcgtgcaagctgcgccgctcacattcccggaggcgcttggcccggcggctggacgagggggatggctggcgcactcgcgctccccgctgtcggcgagaggcggctccagtcgtgacagcagcaacaaggaagtggaggcgagggctcgcgcgcgcatcccgggggctgaaggagccccggccccgcggccccgcccggcgacacacggcgcggagtcgcgacagcccctctcgcttcccctcctcggagtcgcgatatggggtcctgaagggcaagaataggagcacaggttcgctccgcaggctcctcaccgatgcctgccgagggccccgggggtcaagccccggggagctcgaggaagacggcagggacacggtcgtcaccgaggcaccggtttggcggctgcaccggcagtagcggcacaccacggatcgccagggagacccgtcccggcggccctcgcggcgcaccggaagcggtcggcagcgcgtgactgcatgcgacccctggcgcaagcgcaacagcccagccctagcttgggagcggacccacacgaactgctcaaaggcttggagcgggtctagtaaggcgaacggactgcttccggccagaggtcccgggcggaggaggaagctgtggctgccggcggtgggacgccccggccgctcagcccccgggcactgctgtggggcgttcaggtaacaggggcggggctgt

SEQ ID NO: 34715 - DNA, 2300 bp, Homo sapien
aaatgttctacatctgtgctgtcaaatatagtagccaccagccacatatggctatcgagcacttgaaatatggctagtgtgactgaagaattgaattagttttatttttaaatttatttatttttaagacaaggtctcactctgtcccctgggctgcagtgcagtgatgagatcctgtctcactgcagtctccacctcccaggctcaagtgatcttcccaccttggcctcccaagtagctgggactacacatgtgcaccaccaagtctggcaaatttttaaattgtttgtagagatgagatctcattatattatccaagctggtctcaaactcctaggctcaagcaatcctcctgccttggcctcccaaagtgctgggattacaggcatgagccaccaccacacctggccaattgtaattaactgaaatagcaacatatgctaggagctagagacagcacagatctaaacagtcatctgaccaaccaacatcagctctctggtgctgggctaaaaaacagagaatctactaacagcttttatgtctaggaaaagaggcataaaaaacttaataaccagttcaagaagagttagttttttttgtagccaagttctaaattggacttttaccacaagtctcaatccttggagggagaaaggctcacagaaaccacttgaattttacaagaggaaataacatagttgcccctgaaaatctgtcaggaggaaatttagaattctgggaagaggcagttgtggtggtaaatatgggactgatacgtgcagtacaaagcccacacacctctcatttagacctcactccacaaataaggtataatgagcactgcatgtggagtcaagagacctaaactctaaccttatgatctcagagaagtctattccacatcctaaatttcaactgtttctactgtgagaaaaggatgaacccagtggctcctagtcttttggaggcaagaattcttttgacaatgttgcgaaagcttaaaaaaacaaacaactacaacaacaaaaaacctctcctagaaattgcagacacactgtatttcacctataattttcaggatataccccaggtaaagcacacattattccttaggttcttcctagttctctgtcatctctaaatgattcctcttcctattaaaaacaaaaactaaactaacaaagaaaaacaaaacaaaaacctacattctaactgccatagtgcaacccaggaagagaacacagtctacaacttggctgggtaagcaataggccagtaaaggataagggaagcagtagttcaaatcaaggctacgtggggactgcgcttttttgccctgaattgacttctgggcggctgaaagccttgtggagaagggcagtaactgcaggagagcatctgtaatgaatggcatatagggtactaagcaccctgcgcaaaacgggttaggaaacactcattacagccaccttgggctgagggcaggaagacaacaccctacggttttgtttgttttattaccctgttctaagcctgagtacaagtttgttatcagactcgaggcagcagtatagcaatgcaaaaaaaggcaggacaatttaaggttaaaaacgaagggctctagaggacagaaaatccgggttctagtacagactacaccagtcgcaccagcacggggacctctgaccttaagcaatctacttaccctaagtctccgttatttcatctgtaaaacagagttaaggtcaatacctgaaatatgcgagacactttctctgtcccatcagatcctccttggaatctcacgagattgcctttgagggctcagccatgggccacagtttgactctgggctagctcctttccctcattctgggtcatgaatgaagcaagagccaaaccagacaaagtcttggtcaagctaagacgtctgggacatccgaatgtcccatacggattgcggaaggaggacactaaggctcagtggccctactttgtggaagactcagtagaggctcagagagccgcagcatccaactcgaggtcgcccagcggctcggcgcggccctcgaaggcgggacttacccggaggagcgtgcaagctgcgccgctcacattcccggaggcgcttggcccggcggctggacgagggggatggctggcgcactcgcgctccccgctgtcggcgagaggcggctccagtcgtgacagcagcaacaaggaagtggaggcgagggctcgcgcgcgcatcccgggggctgaaggagccccggccccgcggccccgcccggcgacac

SEQ ID NO: 34716 - DNA, 2300 bp, Homo sapien
tgttttgctcagattgcttaaattacccaatctttctgtggtgatttttgtctaaaatagcctacttagtaggcagtgtttgctcaaaaatcttatctcaaaaaatgagtttagtctcctgtttttctgctaaattttccctctcctgcagtaaataagctctgtgcacttgacttggaatttttctccatgttaactcactcttaggggctattatgtgttagaatctgagaatgctttaccaaagagctcttaagaggtcacctgttactggctctttttttttttttttttttccagacagggacagggtctcgctctgtcacccaggcatgaatacagctcatgcagcctcagcctcctggggtcaagtgatcctgccacctcagcctctcgagtagctgggaacacaggcacacaggctgcataccaccatgcctggctaatttttttttttttttttttttttgtagagatgtggtcttgccatgtttcccaaactggtcttgaactcctgggcttaggtgagcctcttgcctcagtttcccaaagacttaggatcacgggcatgagccatgacgcctggctgttaccagttctgaactagaagtgcagtatgcagatggctttggaaatgttgaggggtttttgggtagtaagcgactgggagataaatcattgaaatttagtgacattggcacagacactaaactttctgtaatgtgcagggaggtcctacacactatagaattaggtcacccaaaatgctgtctggctcctgttgacaaatactgagagcccaaccctttgctatttcataaggggaaatgaggattcaattgaagcttgccttataccacataactaattaggagtggagctaagcttgatagaacccagcctttatgtttcctagtttacagtgccctttatgatatacatggtgggtagaaaacctttctgaagacaaccactatttaaaaacatttttaaaagcgtatgtgtgtatatataatactattatttccactgcagtgctaattggataaaagctaagacaccaaggactttttaaagccaggtctagctgaaatagcagctgccatttttagtgagtttgaatatttgtagcacataataatgcatgagttaatttgatccagtgcaaagtatgtgacatatgtgcaagtcattcttaagactctccttaaagaatctgggacaaaaaacagaatttttcccaaaggagatgggaaaatttgaatctgtccacatgaggttgcggccacattgggattaactgaatctcataaaaggaccaccaaggtgaacaacttagggcttttaggccctgtatggcagtatgtcaccctctttctagacacacagaagtagcctttgaataatgtaaaactaaatgtaaacctaaaaaatgccaacatttggttgatgaaacctggagaagcttttcaataagaattcattagaagatgaacagttttattcaaacgaaggcatttaatgctatagtgaaaggaacctgtagccagaaaacttagattcaggctagttttacacttgagatcttaagttaacttcttcctttcatggaccttagtttccttatttattgcccatatgttattaaaaatgagagaatgtttgtgaatgtcatcaactgtaaaatcccttatgtatacaaggtattcttatttttctaggaaaagccagccaaagtaaaagtggaattggcttctggcgtctcttccaaaggctctgtggtgaaaagaaatcagcaacctgtcaccactgagcaaaattcctctaaggaaaatgcctccaaactgactctggagaattcggaagctgtaagccagctcctgaacgtagctcctcccagagaagtaggtgaggagagtgagtgggaggaagtgatcatctccgatgcccatgttttggttaaggaagctcccgggaattgtggtacagcagtcactaagacgccagtcgtcaaaagtggtgtgcagcctgaggtcactctggggacaactgacaatgacagtcctggagcagacgtaccaacaccatccgaggggacaagtacctccagtccactccctgctcctaaaaaacctacagggtaagtcagtgtgtttgtataatatagggctttggaaatgccccatgtttcttttatctcatgtctgtacagcatgcctgagagaggcagcagagaccaggcaatggttcctgttttagagatacagaaaccaaggcctagagatatataaagattgtcc

SEQ ID NO: 34717 - DNA, 2300 bp, Homo sapien
ctttgctctcccttgtggtttcagcctttgcacttctccttacccttcttcactgggaacacatactccaaaatttgcttttgtgcagattagtgcattatgttttgtgcacatataaaatcacccacttttatttgtcttaaattgactgcgcttaaattcctcagattcattcatttcaggatttggtgttggagtgatttcatagcctttgttgtaccccttacacattcatgagctaaaggatgctcctggcctttccccaggtgaagttgtgtgaggtgtaaaggaagagtgatacctttggtcctgaggactgagctgggtgggaagaaagtgttccttttttttattgggggaaaaagatctactatatgtactatttcattattttttgtttgtttgtttaatgatgtattataggcaactttgcgtcagaacagttagatctacttctttttaaaaaaaaatggattccatgttggaatactttattctttttaatgctttctattttatgaattcaccataaattaattaaccctttccctattgatgggcatttagttgtggggtttttgttttgcctttttcaagatatataacttgaataaaatagagatggggctttgctatgttgtccaggctggtcttgaactcctgggctcaagcgatcctcccaccttgggagactacaggtctcccaaagtgctgagactacaggcatgagattacaggccatacctggcctgttttgtttttttgagatggagtctctcactgtgttacccaagctagtcgacaactcctgggctcaagcgatcctcctgcctcatcctcccaagtgcctgcaactacaggcacgtgccaccgcacccagctggtgtgtattctattttttgccattgtgtatgatacattaatttccttgttgcctcttcttaacctgcaggtctctttaatgtggggaacaagctgctggtaagcctggacttgctttttgcaatcagaaatcagatcaagctcggagaggaccccagagtgtccatcaatgttgttctgaagtcggtgcaggagcagacaggtaaaagttgttttcttccctttcccaaggttagtcctaagctccctcggaattttcagtgatggcatttggttaaaagactcattttgaagaagagtctgattattttgaaaaggagacattcttgacttcctaatacactcttccttttgaattttacaaatgccaaactaattttggaaagcatgaatctttttgtgcatccagggacccttagcaagagattacgagtgacttgtagaagtaccttctttggtcatagggagacttggccccattgcatgttagactcattctgaccacacagctcctggatatctgcttccagtcccaaggctcatgccaagacctaagagtgaggaccatcctttctgtctagaatatttttcctccatgccctctttactcctatttgtgcttttcccatcccattcctataggctccaatccccctctaccttacctgctgtgagaacagatggagtagagcctactagagttacatgggcctgtgtttcagtcttggctctgccactgttgcagtgtgattttgagcaagttattcttgtgcctctgtttctccagttataaaatgaggataatagctcctcgttcataaagaattaaattgaggtgagattaatgacataacatatccaaagctttcagcacagcatctagtacttagtacaaggcagctatcactccagtgggaattgctctttgggttgccacctgagcacttgcaggccagatccctgaccctcagggtaggtagtacactggagtgttctttaaggtgaatcagtctggcagaattgctctacttactacccactggctcatccctagtggcttcagtgtctttttctgtgcccttctcagtgttcttgctcttctttcagagaagactctgacctcggaggagctgagccagctgcaggagctgctgtgcaatggctattgggcctttgagtgcctcactgtccgagactacaatgacatgatctgtggcatctgtggtgtggcccccaaagtggaaatggctcagaggagtgaagagaatgtgctagcactgaagagcgtggaggtaagtgcctcttagccaccgtgagggacctgcggaattttctcattttggcacctcccttcctatatgatatccccagggggtggatagctccagtcctgtctaggtgaggcaagtgagtttttc

SEQ ID NO: 34718 - DNA, 2300 bp, Homo sapien
gatattgaggctgggcacggtggctcacgcctgtaatcccagcactttgggaggcccaggcgggcggatcacgaggtcaggagatcgagaccatcctggctaacacggtgaaacaccatctctactaaaaacacaaaaaattagccgggcatggtggcgggcgcctgtagtcccagctactcaggaggctgaggcaggagaatggcgtgaacccgggaggcggagattgcagtgagccgagatcgcgccactgcactccagcctgggcgacagagcgagactccgtctcaaaataaataaataaataaaaataaaaagatactgaggtccacctcatattcctgctaatattttaagggcccaggcatcttttttttttttgagacggagtcctgctctgttgcccaggctggagtgcagtgttgtgatctgggctcactgcaactctgccttccgggttcaagcagttctcctgtctcagcctcccaagttgctgagactataggcgcacgccaccacaccaccacacctggctaattttttgtatttttagaagagatggggtttcaccatattggtcaggctggtcttgaacttctgacctcagataatccacctgcctcggcctcctaaagtgctaggattacaggtgtgagccactgcacccggcccccagggattatttttttaaggtgcccccacatagttctcttgtgctagccaggttcaggaacgttgtgtagagggcacttttaaaccgagagctgctgttcttttcttattgatgcagtcatggtaagcatctgaggtcttggttctgaaaaaccttagaagactggattaaaagctgacttattttagggtttttttcagtggcggtatgcaggatatctcactcagatgttccagggcagaaagccagttgtaatagacttcaaatatctgcagaaagcgtggacctgacttgagttccacctctgccagcactgggggagggcttggtgcagagctggcttccactgtttgctgttttgtgggcctagccttggcctctggtgactggcggcagcaccctcccaccagcactgttgtctcttgcaggcagtggcagtgccttggtgaggctgctccaggagggcacctgcaagcttgatgagattggctcctacagtgaagagaagctgcagcacctgctaaggcagtgtggaatcccctttggggcagaagactccaaggtgagtgtcaagggcagtggtggatatcggggcttctggagtaggctgattggtccactttttaggtcagggatatgaatatctgtgatggcatctgccttggacacaaggtgctggcagtcagggatgcctaggagatggtcaacagctagatgtgacatgtatgtggggcctggcctctaacagttcctcctgttgaaggttgtgagcctaggctctggggtcaggaatcctggctctcctccttactgtgtgtgaccttggataagctgctttatattttgagcttcattttccttgtttgtaaaatggaaataaccaaaatactaaccttgtgagattgttgtaaggaatgcactttacacagtgtctggttactacctatgcaagctcttagaaaatgcctactgttacatagtgtatgtgtctatgtgttttattcatacattatttactttccctttcatatttctgtgctgttgaaaatgttatgcttccttcaagatcagattcaaatgttagctcccctttgatggtttctttgccctgtaaaaagtgaaaggactcaggcctcagagtctggcagcttgatcagcagtctggctggctttgtctgtgacctaatcctttcagggcctccgattgcttacctgtacctagaggaggttgggctgatgaggctccaaggcccgctctgacccaggcagtttattcttttgctttgggtgttgggtgagtgtgtgatgctgagcaccagccgtggtcccttagcattcgcccttatgtttttaatcttgtccttctactccaggaccagctctgcttctccttgttggccctctacgaatctgtacagaatggagctagagctatacggcccccacgtcacttcacaggtggtaaaatctacaaggtgtgcccccatcaggtaagaaaataactagggggagcttggagtgaatttgctaatgttgaacttcccatacagggactgatccagctcagttttggggggctagacttaggtcactgggcaacctccggcatagctgcccacgggtcagg

SEQ ID NO: 34719 - DNA, 2300 bp, Homo sapien
gtctctactaaaaatacaaaaattagctgggcatggtggcgcatgcctgtaatcccagctactcgggagtttgaggcacgagaatagcttgaacgcgggaggcagaggttgcagtgagccgagattgctccactgcactccagcctgagtgacagagtgagaccctgtctcaaaaaagaaagaaagaaagaaaaaaaaaaaaagatttggtttgctagtacatttttgaaaatttttgctttctatattcatgcatttgtattggtctgtagttatcttttctggcaatgtcttggtctagctttggtaccagaaaaatgctggcttcatagaatgagttgaaaaggattggtattaattcttctttaaatgtttgggagaattcaccagtgaagccatctggtcctgggctttgctttgtcgggaggtttttgattactgattaaatttcttttcttgttataggtttatttggattttctttttcttcttgagtcagctttgattgacattcatgattgctaaaggttcaaaacacttttctgaaaaagaaagtacatatatacactcataaatatacatacaaacacacacatacacaccacacacacacctgagtacacgggaatgatcattttcctggatcaatgttatatcaggatttttcaatttcaagaaggaactttaggctgggtatagtggctcatacctataatcccagtactttgggaagccaaggtatgcgaatcacttgagctcaggggtttgagaccagcctggacaacatggtgaaaccccatgtctaccaaaaatacagaaatttgctaggaatggtggcacatgcccctgtagtcccaactactcaggaggatgaggtaggaggatggcttgagtccgggaggtggaggttgcagtgagccgagatcacactactgcactccagcctgggtgacagaaccaaaccctgtctcagaaaaaaaaaaagaaaaaaagaagaagaaatgaccatgttctttagagataagaagtaaaatactaagcgaatcaactaaaagaggtaaaagcaattgcctccaggaaaagagggagcaaaggaatgctatatattttaagaattatgcagaacaattagattctttgtaaaaataaataaacaatgtaagtaacgcacaaaagatagttttataaccagactgctgggatccaaatcctatctccaccatttggtagctgtttgactatggacaagcttaaggcatttgatctctctgagctttagttttcccatctgtgaaatgagaatgacaatagtacttacctacataaagttttgcagtactaaaggagacagtgaatgtaaaaggtttggctagtaaatgtcctgtaaaaggaagcttattgccaatattatcaggctctcccagaccaacctgtatacaggaagaaaacaaactccgtttctcctatagtctcacaacacaaaatacttctgaccccagatgtagaggatggggcatatttccccatacaccaagcaatcaaccaattgttcagattctgcagcagacacgaatctggtgccctccgattcaatttgaacactatatttacctagagataacgtcagatctcacagcttgaaggcttgagccaggagtttgaggctgcagtgagctatgatcgagccacagagctccagcctgggcaacagagtgaaactgcgtctctaaaataataataataaatttttaaaagatatgcattactttggagattccaaggattttaggagttgtaagccaggacatcagggtaaagaaaaaatatatatgtcacaatatcatgcaacctaacttctctttgggatctgccagagccacctgatcactctgaagaccctcatttgtgctactgactaacggtctggctgctcttggacatgtctcttctcccaagaccccttgaagatggctttagaagggccccaaacttagctagctccccccaagctcaggctggccctgccccagactgcgacccctccctcttgggttcaaggctttgttttcttcttaaagacccaagatttccaaactctgtggttgccttgcctagctaaaaggggaagaagaggatcagcccaaggaggaggaagaggaaaacaagacaaacagccagtgcagaggagaggaacgtgtgtccagtgtcccgatccctgcggagctagtagctgagagctctgtgccctgggcaccttgcagccctgcacctgcctgccacttccccaccgaggccatggg

SEQ ID NO: 34720 - DNA, 2300 bp, Homo sapien
cttgatgacccagaatctaggattctctccctggctgacaggtggggagaccgaatccctccctgggaagattcttggagttactgaggtggtaaattaacttttttctgttcagccagctacccctcaaggaatcatagctctctcctcgcacttttatccacccaggagctagggaagagaccctagcctccctggctgctggctgagctagggcctagccttgagcagtgttgcctcatccagaagaaagccagtctcctccctatgatgccagtccctgcgttccctggcccgagctggtctggggccattaggcagcctaattaatgctggaggctgagccaagtacaggacacccccagcctgcagcccttgcccagggcacttggagcacacgcagccatagcaagtgcctgtgtccctgtccttcaggcccatcagtcctggggctttttctttatcaccctcagtcttaatccatccaccagagtctagaaggccagacgggccccgcatctgtgatgagaatgtaaatgtgccagtgtggagtggccacgtgtgtgtgccagtatatggccctggctctgcattggacctgctatgaggctttggaggaatccctcaccctctctgggcctcagtttccccttcaaaaaatgaataagtcggacttattaactctgagtgccttgccagcactaacattctagagtattccaggtggttgcacatttgtccagatgaagcaaggccatataccctaaacttccatcctgggggtcagctgggctcctgggagattccagatcacacatcacactctggggactcaggaaccatgccccttccccaggcccccagcaagtctcaagaacacagctgcacaggccttgacttagagtgacagccggtgtcctggaaagcccccagcagctgccccagggacatgggaagaccacgggacctctttcactacccacgatgacctccgggggtatcctgggcaaaagggacaaagagggcaaatgagatcacctcctgcagcccaccactccagcacctgtgccgaggtctgcgtcgaagacagaatggacagtgaggacagttatgtcttgtaaaagacaagaagcttcagatgggtaccccaagaaggatgtgagaggtgggcgctttggaggtttgcccctcacccaccagctgccccatccctgaggcagcgctccatgggggtatggttttgtcactgcccagacctagcagtgacatctcattgtccccagcccagtgggcattggaggtgccaggggagtcagggttgtagccaagacgcccccgcacggggagggttgggaagggggtgcaggaagctcaacccctctgggcaccaaccctgcattgcaggttggcaccttacttccctgggatccccagagttggtccaaggagggagagtgggttctcaatacggtaccaaagatataatcacctaggtttacaaatatttttaggactcacgttaactcacatttatacagcagaaatgctattttgtatgctgttgagtttttctatctgtgtacttttttttaagggaaagattttaatattaaacctggtgcttctcactcacagactttgtggtctctctcgggtttgggttcctgcccatagggagtgtggagtggggcacatgaggctcacccagacgcagacccccagacaggtcccttcagctctgagtctcatttcattcatctgtaaagtggggattttcgctctcccacccctcgctggaagctggggggcctagaccttgggcttggtttcccaaggtgggaagcgagcaggcttttctggctccacagagcctggccttgagtcgggcaggagggtgtggggctgcagggctgctccaaggctctggtgctgaggcgtctcactgcctccaccatgtgctttggctttggctatcagctgggacaccctcccctccactccgcccacaggcccggattgaggccggcgtgctctgtgacaggcagctgctagagcccagattccaggtccaggtgagtcatgatcaggccccaggtaggagaagggcagacagagtgtccaaaagcgtgagagcacgaagtgaggagaaggtggagaagagagaagaggaagaggaagaggaagagaggaagcggagggaactgcggccagggtaaggacaggggagggaatagggtggcgaccaggctgtggctttgagggcagagaggtgtagacctggcaggacccagacccctcac

SEQ ID NO: 34721 - DNA, 2300 bp, Homo sapien
ctaggaggggagtcgtaaatttctgacggaatctttgggcacaagaaatccctgtgcaagcctgaccttgtggcctgtgggatcttttcacattcccctatttccctgttgccacaaagacctggccaggccccctctctcggggtactcttatggtccccaacccgtggctgggaaccagtctgagaacacttctccttctatgtggtccagcccagatgctctgctgggcaatcccgattgggactagaccaagaaatgcaagatagttgactgtggtgggcatggaatcccagctcacgcaaatcctctgctctgtgaacaggggtctgggggaagctgaggaggaaagacttagcggcgcagagggaaggagggcagagccagcctctacctgtgtcacctgggacagctttcttcaccctctggaattcagttgccctgtgggtgcagtagtgggagcaggggtggtaagcccactctatatgcccttctaaaataatgccctttgccatctgagggctaggagtctgtaactggagatgtcttctgatctgagaagctgagggtggaagaagagacccagctgggggaactggaggagtcttggcagaccctggtaggaaaggagagccagagaatggaaatggaacaaaacggatacttgaaagtatcttgttgaggctgggtgcggtggctcaagcctgtaatcccagcactttgggaggctgaggtgggtggatcatgaagtcaggggtttgagaccagcctggccaacatagtgaaacccggtctctacaaaaaatacaaaaatagccaggtgtggtggtgtgcgcctgtaatcccagctacttgggagtctgaggcaggagagtcacttgaacctgggaggcggaggttgcagtgagcctagactgcgccattgcactccagcctgggagacagagcaagactccatctcaaaaaaaaaaaaaaaaaaaaaaagaaagtatcttgttgagtgactgaatgaaagagccacagggggaacctaggaagaaagcagggcagggggttcatctacactggaataggggtctcgggtgggggtcagatgacttgtgtctcttccatcatgtgtctcatgagacctagttctgccccagctctgccattgctgcgtaagcttgggaagcttattttgctcctctgggcctcagtgtccccatctataaaatggggcaaataatcctctccttgcaccccaggggctttgagacgtgaaaaggaatgtatctgtcaatatccagagatatccaatctgtgctggatgaccttgaccaaatcacattccctctctgtgccaattcacccctgggccttggtttgtccttctgaaaaacggctgatcatcttggaggatctttccatctcctccatgtcacctcttctcagcagtgctctctgattctctcaggcttccgttaggggtccttctaaatgcactctcagcctcctgtctgccgaccgggcacctgcttgcccaatgaatatcttgctcactagcctggtgcttctgaggtcaggaccacgtcttgctactgtcccctgcacccagtacagtgttagaatgtagtaaatgctcagtatgcttgttcaatgaatgaaggttgactgaatcaaccacagagatgatcagagtctcctttacagatggggaaactgaggcactgagaaatgatctccctgggtgccatggcaaggggaggccgccacccgacatgggcatcgggaaagtggggccgaggccactctttgacaaaagtgactcagcagctggcggctggcgtgggctgtggaatttctaagcatcccctcacatcctgagcgaacgggcgatgggagggagtaagcagagtgaaaagaagaaaaacaagaaacttgggggaaaagaaagagagagggggaaaaaaactgaaattgaaaacagacgcacgcgtccaccctccctgccccgccgcccccccttctcccagctgggccaatcagaagccaccctgcagcctttcccccaaagtggcgggggaagtgggggggcatggaagcccatagtggtgtgagctcctgaggctgccagcagccagcagtgactgcccgccctatctgggacccaggatcgctctgtgagcaacttggagccagagaggagatcaacaaggaggaggagagagccggcccctcagccctgctgcccagcagcagcctgtgctcgccctgcccaacgcagacagccagacccagggcggcccctctggcggctc

SEQ ID NO: 34722 - DNA, 2300 bp, Homo sapien
tgaaaacttgagtcctaagcagagcccagagctccagagaaacatttcagcaccgcatccacttcctgacctgggaaagtgggatcttccctgctgaggcagccatgtgctcatctgtgtcatgtgctgatccacacacatgtggacagccatgtgctcctgcaaggtagccaagggctccgcccggtcagcaacagccaggatttcccttcccctctcctacaagcagccttcatgttgcagcaaacactgggcattactcctttcctttctgagcctcaatgcttctacctgtgcaatggaaagggttcctctgagcaggaagcggagggagccctgtgctggctgagtctctggctctatcacatatcagagccccagaagagcaagagtctcaccagggccagcttcccaggcgggtcaccattgcagtcacacagagcccagtgtgtggaagggccccgggctcaggtgaatgctctgctgccaccatcctgaaatccttaatcatttttgaacaagggaccttatattttttattttgctcccggccctgcaaattatgtcctgatcccgaaacatctgcccagccctgagatgatactgaccagcccccggctaatatggtgacccaagagagagacgggttgaacagataagaccctgattctgaccttcttctggggaccacacatccctgcacaatgagaggaacccaggaaatgtgggcccatccaatcccacagggtgcttctgcacagctccctggcacaaagcccttgtgcggagggaccccatctgacttcctgacccagagccctgtccttcatgcacccttccccaaatccctcagccttgtccccactcccagttcactgacaccccctcaagtgttcccagcccccactcccccttaggtagctatgaaatgtttgccagtccttcatatggagtggaggaacacgtgatgcatttaaaatcccaagggggctccagccataataaatggatcagggcttttggatcccgattcacacaaacagactgctaaaaagacatttttgaatcaattggagtactttgaatacgaactgtgtgttaggtaatacccaggaatttgtgttaattttgctagatgtgataatggcatattatgtaagaaaatgtccatgtgttttagagatgcgtgctgaagtatgtaggggtaaaatgacatgatgtctggaatttgttttaaaatacttcagaaaagcggggagtaggtgaaataagtgtgacaaaaccttaatagttgttgaagcggggtgatgggtacacagcagttcattatacaattctacttttgtgtatgcttgaaacctctcaattaaaaaaagagggtagagagtcatcaagataatttactaaaagtttcctgtaatgtccccagaagacccccctaactcacacacacacacacccacacacacactgccttttgagaactttctctagaaggccaacccaggcagtcccccaactgtaaggaagactcgtgtatgtatgtgcatatgtgcatttccccagggaaaaacatccacagcttccatgacgagaggggtcgtgacccctccccgccaaaagattaaggacctgcgatcctacagaccggagccctgtttgaagtctgcgttgcccctcacctcaagctggtcactgtgtgaagttggcctagaatcccccggcccctgggagcttgttcctccgcctgtaaaatggggctgcagggccgtccacgcggccaccggaaggacaaggtgttcaggccgctaggccgctccctggcaagcgattcccactcgcagcgcggcctcgaccctcgcccaagacgcgccctccgcgcccccaccccctccaggccctggccagtccacctcccgcttggggcggcaatttgtctccttttgaaccccccgcccccgacgggtttccccctttgattcgcggcccggaggcttccccccgctttgaaatgcaaacccgcctcggctggggccgcgggcggcccggagctataaaaggcctgggtggggcgggcgcggcggcaggacagccgagttcaggtgagcggttgctcgtcgtcggggcggccggcagcggcggctccagggcccagcatgcgcgggggaccccgcggccaccatgtatgtgggctatgtgctggacaaggattcgcccgtgtaccccggcccagccaggccagccagcctcggcctgggcccgcaagcctacggccccccggccccgcccccggcgccccc

SEQ ID NO: 34723 - DNA, 2300 bp, Homo sapien
gaggtgggagggtagcttgagttcaggaagcgaaggttgtggtgagccgagatggagccactgcacatcaacctgggtaatagagcaagatctctctcaaaaaaataaagaaaagaaaatctttgagttttgtttgttttatgaaagggcagactttccccaccagggctgtggggatggaggtgatggtggcagagaggtatgagctagagggcagagcctgggtgaggtcagactcctaggttatagacatgatcctgtctttactgaatcactgagtgattttgcaaatcctgcccctctgggtctcagtttccctatctgaaaggcatgggcctagatccatttgcacctcacagtcccagtgactgccacagtggctcagtggtcaccccctgatgtgtctgctcaagggaagctaaagccctggtccactcccttcttctcccccagggctgggtccgtgaagtgggaggagcaggtgctgctaggaagggtcataaagaggccagtcttcttggctcctgagccaactgcctcatccctgctcgctgtccctgtggccctctgtgccttccaaagggtctcatgaaacccaagtgccaatgggagggagtggttgagcaaggttgagcctcttttgtacaagatgcattgacaagccttgggtgagggatggggaagtttcctgcctgggcctccttggattcaggagcccttggcttctgcctttcccagccatgacccacagctttcctggcttcatccccaacgcccagtgcatgacttcactcctctgggacagtttccacaggtgtaaaatgagatgcacaaacatgtcttcccagacagttggaaagaattaaaaattagatgttggatgcaaaaatccttcataatgcacacagtagggctccataaatgctccttctcttcacactcacagccactcttggccccatatgggtcagcaggcagggggcagaggagacaccttcctcctgggtctggagagcccctggtttgccctttgtggccaggctcaaaggggagagaagtttgacaggacctgggcaggggaaggggtggactggagcctggccaggcctttacccaagtccatgctttgacttaaacccctccaaccttttttcaagctccagaggtgggagagagcagaaccttattctcatctctccccaaaggcctcccaccgtgtcaactgatagtgagccaaacagatgtatggttaatgtctaaactgggacacttgcgagggtgaaaaggacacaatttgtaatgtatatactgatccgctagtgtctatcagtcagtcccagcaaaccaacgtgtgccattgctccagctcatcatttcccatcctagccacaggctcactggaccctcagaacattctgaggcaacaatgcatgggcggctcgtggcccattttacagatatgaaattagaactttccagaagccatactgctgctggacaggaaaccagttactaatcatctaagtcacagatcacagtgacactgtggcacttgcctgtcccttctgctcacccaaacctccccattttgctttcatcttaaggaaaggaggagagttgaagactctactagcctaaaggtccatgaagcctgactctgtccctggtgtcactcattagccccgtgactttgagtaagtaacttaacttccctgtccctcagcttcctcatctgtagaataggagtaacgacacctgtctctccaggttgagaaaataggacacctagttcaggacctggcacattttaggtgctcaataaatactgatagattgaataattggactaatggtggcgtgggcaacccacagtcagtgaataaatgttaactgagcacctactatgtgtcaggctctttgtgctagatgttttctatgctccatcttcctgaattgctcacactcctgtaagagaggagagattcttatcccctaaggtcgcacagcaaagacgacgcaggggggtgggctgttagtgttccttgcccaactgtggaaagggagtcccagagagggcaggtcgcttgcccaaggtcacgcagaaagccgagggtttccgtcgcgaacccccctccccactcgctcagggctctccaatccgcagctctgcgtgcgggggcgcgcgcatccccccgccgtccgtccgtcagctgtctgtctgggtgtctatgcgggcgcagcagtgcacccttccccagcctcgggcgctgcgcagggacagacaaggcattcgcagcgcc

SEQ ID NO: 34724 - DNA, 2300 bp, Homo sapien
gctcaccctttattctcccccacagcccactcccaggaagaagggcagaatgggagggttatccagatgtctccagggggcccctgcaagtagggtagtgagtcagggacttcatggggttggagaataccaacaagcagataacatgtcctgcaagtgagaggactagcaaggcaatgtggaggttcagagcgggtgggctagaatccctgagggtctggatgcctggatccttttatccaacccatgctcgctgggggcaggtgctggcatgaagcctctgcccatcaagctgcgaaatgggccaaggcaccctttttcctcagtggagaggggaaggggtatgcagggtctgagatgccaagcccaagctagagtgatggggtggtcacgggccagctttaaaccttcattttcctcctctagagcctagaaagaggcctcctatttacatagttcccaaaggccttcacagcccttagcccactccatctccacagccttcccctgcagggcatcttcattcccctgttgtgtagaaaaggagctggaggctcagagagggtgagtgacttgcccgtgatcactcagctaataaatgtccaaaggccgggcatggtgcctcacacctgtaatcctagcactttgggaggctgaggcaggtggattgcctgagctcaggagtttgagaccagcctgggtaacatggtgaaaccttgtctgtactaaaacacaaaaaattagccagacgtggtggtgtgcgcctgtagtcccagctacttgggaggctgaggcaggagaatcacttgaacccaggagacggaggcttcagtgagccgagcttgcaccactgtactccagcctgggtgacagagtaagactctgtctccaaaataaataaataaataaataaataatataaataataaatgtccaggaatcagagctcaaactcagatccttagtcttaaactccagtcccttttcttcctaactccaagaccttggagtaagatcttgtggctgtaggtatggctgatgccctgaagagttgaagttggcagggaaggtgcccagaaaattttggattgaagatttcatggcaagtctctggccagtggcctagcccgggtaagccatgctatgctcacctccccacagccccctctcgcctttttttttttttttttttttaccttgactggaagcacaagcagaaactgggacatgagcaccaggagaccagatttccatggtcccgttgggggcatggggttggggagaggttgcagaggagggctctggaggggagcaactgtcacagctgtgagaggtgggggtgagcaggcagtcagggctgttccctccagaatcctggggtgtcctctgcacttctgcgccaagctggagtgctagtgtgatggacaaggtggtaagagagctgaaagagcacgagcataacaagaaagacagaggcagaagcaaaaaaaaaaaaaaaaaaaaaacagagggcaacagagagacagttacagagactacagtgatccacagagggagagccatccctgtgaattagccatcatttccctgtaaaccttagaacccagctgttgccagggcaacggggcaatacctgtctctctagagatgaagttgccagggtaactgcatcctgtcattcgttcctggggaccatccggaatgcggcacccactggctgttaccatggcaactgcctttttgccccacttaatcccatcccgtctgctacaagggccccacagttggaggtgggggaggtgggaagagaaaagatcacttgtggacaaagtttgctctattccacctcctccaggccctccttgggtccatcaccccaggggtgctgggtccatcccacccccaggcccacacaggcttgcagtattgtgtgcggtatggtcagggcgtccgagagcaggtttcgcagtggaaggcaggcaggtgttggggaggcagttaccggggcaacgggaacagggcgttttggaggtggttgccatggggacctggatgctgacgaaggctcgcgaggctgtgagcagccacagtgccctgctcagaagccccgggctcgtcagtcaaaccggttctctgtttgcactcggcagcacgggcaggcaagtggtccctaggttcgggagcagagcagcagcgcctcagtcctggtcccccagtcccaagcctcacctgcctgcccagcgccaggatggccaccatcacctgcacccgcttcacggaagagtaccagctcttcgagg

SEQ ID NO: 34725 - DNA, 2300 bp, Homo sapien
tttttcctgtctgtcctcaacatgtcttctgccagaacaacaagctcagttttcccttctgataaatctggtcaccctaaatatggggctttgagcaaatgggagcggctggccccacgcagccctcatttcaaaatgcagattcacacgggctgctattttggaggtctggtttctttccccacacgcagtggttttaagtaagagggaagggatcatgacagaatcttggcaggggaaagatgctaggagagaagatgcacctgggcagtctttgcttcccaaagtccccaaacactggcccttcaagaagctggttggggggtggggggagcaggaaagagggtccatggtaacataacactgggaaatacagcctaaccagcccctcctgcagatcagcagtgtgcatgttaaacatttgaaatcctagaagtaaagaagcctaactggttttgtttagcccagtttttccatttaaaaatgtagcctagtaaaattttgcaaaacaatgatgcagagcagagcttgcaaaccggcaccgatggtctgatatattcctgggagaggtctgatttggcctacaaagtgcttaaattttgctttcaattagtcactaacatttcacaattggaatagttctcctaatagataaagagggtattcctcttgaaaaatcagaagatctggaaacactggtccgtattcttgcctgactgtagtcagctggaagccaggctgtggtttttaacttgctgcagcccctgtgtctccttagggcaagacaactatctcttgctctactcatttatgatgctcatcgggttccagagtcccccaagcttgccttctctggtgtggaggtttccttgggtaggctggcctaggtgaccattggggcccattcatccattcactcatgcaacatatactgattgagcttatactgtgtgctgcaccctgtggatacgagatggataaaacagcccctgccctctggattccagcgctggcattctaagattctagttgggaactgcagaacgaggaggagggaggggttgaggagaggggagctggcaaggctacaaccaagcttcctgacttgcagccgcgggggcttgccaaagtgcttgccattctccatcgctttctctaccggctcaccgaagggagccgccactccaacagccacggtgagccttagagacatagccactgacttgttctgtgacttagacgcgttgaggctcatctccgggcctcagtttctccatctgtagaatgacccggttggactaggaaatgatgggctttccttccagggctggcactcagagaggctaagactccatgatcgaggaatgtctgacccagccattctggagctgttccatcgaattccaagcagccccactccctcctttccccatcccggtcaggggcgggcgctggagccagcaggccgagagggccggggcttcccgcccgggaggtggagccgctgctctgcgtcccgcccctccacctggggctcggcccggcccggcagatgttacaactttttcgaattctctcccgccgtgtcccctcgacccgcccaacttgtgcctccctccccttcccctctggggtcctgcccacctccctgcagggagctgggctgttttaaggactccgggtggggcgagaggccgggaaagcagaggagagagaaattaggaggcgggagaaatccagggcaagaaggaagaggggagtcagaggatggtagagagcactttttggaagctgccacgccgcgtctcaggctggccgggctgagctggggaagagggagcaaaggcggcgcagggcctgcgcttaggcagcgggaggcagctcggcgcgggcctgacctccccagagcgccccgctgcggccgagcagatccggcccagccgtccggcagccagtcccggaccagacactggaccgtccccggggggcgctgaactccctcgcagcatccgagccggcgggccggtggtgcgccctgggcgcgcgaggtggtgaggccccaggagcccggcgcgccgggacgcgcgggccggcttggcgatgcacaccctcactggcttctccctggtcagcctgctcagcttcggctacctgtcctgggactgggccaagccgagcttcgtggccgacgggcccggggaggctggcgagcagccctcggccgctccgccccagcctccccacatcatcttcatcctcacggacgaccaaggctaccacgacgtgggctaccatggttc

SEQ ID NO: 34726 - DNA, 2300 bp, Homo sapien
ctactcatacccaccagacacactccactctccactgggcaggcacacaggtcacagtaaaattcagatttcatcctgtacctcttgggcttacaccgtcagtggcttccaatggctcttaggatggaggaaaaaaaaccctgatgtggccaatccttcacatggagtctgccctctgcccaccttctacactccccagtccccctgctctccctccggactatgctacaaaggcctttttgtgtctattctctcagctgtaccttctgccctaggccctttgcacaggttcttccctctgctcaggtttcttctctctgactctcccttacacacagttctggtttcctcataaccattaatttctcagggaatccttccctaactcccaagaaaaaaatagatccctccttcctgttatatgctttcacaataatagcacacacgcacacagagagcgctattgttcagagctcctctaagcatttctgctgagaattcatttactccttatgacaacccagtgaggtagaaattataattatctccattgtacagataaagaaactgagtcacagtgacttgcccaaagtcacctagttaatgaggcaaagccagaatttgaacccaggcagtgtgactccagtgcagcttttaaacactatattattacataagaaaacactatccttttccttcctgcacttacccgctgtttgtaacactgtattgtatgactattagtttagtatgtgtctcctccgttagactgtaagctctattggagtagagacaattccatcactagactgtaagctctataggagtagagactattccatccccaatggtaggtactcaataaatatttgctcaagaaaatgggaaatgttgaatgtgtacagacacataacattttccattcaagttcaagacaaagataaccacatacctggacctcctagggttagggactcctgcgcccgtaagaaacatgctgccctcagattctcaatgggtcggtgaagttaagaacagctcactctaacattctccagcctacctcaccttttccctgccatccttccctcaacaactacaacagcctcacatttagtattaatggtatgtgctttggttttagcaatcttttaaaaacacaaaacagggtcaacctcctcggaaaagccagtcagagactatctaatgccctcagagcaaagtccaaactctgttgggggtgggggagttgtaggccttgtctacttcttcatcctcatgtgccctcatttgttccctcttccccacctcaccccaccccacctggacagcccagcagcgcagactaggggttctgggtttagggttcccaggcaatagcagggtgttttctcatgcctagactcatgcagtgccctctgccagtcctctcctttgcacccagcaatttcgggtgtctttatgcctcagcttagatatctctctggggttcggtgctcctccttggggcgcccataggctgcatctgtccctgacaaggcacacaagatattgaactatagttgcttggttacggacagtcgtctctgtgagctttgagggcaactgccatgtattatgcatcttttgaatccccctagcctagccgggtgctagcccaagttaggtgcttattacagatttgttcagttagcgaatgaatcaatgaataaactggcaattcgtgtctggttcatgggcaccaaaaaccgtgcgaaatggataaatgagcaggtaatggcagtacaaagttcggatctagagaaagatccagattagggagttcagagatgagtaaaacgcagacccagccatcagagaattaacaaggaagataaatctcttcaagaagccagccggaaggattaaaagagagtcgtccaagtcccggccggccccgggggcgggtccctgtctagccccgcatgctccgcgccaatgggcggtattgttgatcacgagtctccgcccccttcgccttgaggggcggggccggccactcccggagaggggactacgtttcccggcgcgccgcgcggccggagcgaaagaggagccggaagtgtggcgcgcgaggtctaagggcgcgagggaagtggcgggcggggactaaggcggggcgtgcaggtagccggccggccgggggtcgcgggtatggccgaggccaggaagcggcgggagctacttcccctgatctaccaccatctgctgcgggctggctatgtgcgtgcggcgcgggaagtgaaggagcagagcggcca

SEQ ID NO: 34727 - DNA, 2300 bp, Homo sapien
ctcagcaacattcttcttttttttttttttttttttttttttgagacggagtctcgctctgtcgcccaggtcggactgcggactgcagtggcgcaatctcggctcactgcaagctccgcttcccgggttcacgccattctcctgcctcagcctcccgagtagctgggactacaggcgcccgccaccgcgcccggctaattttttgtatttttagtagagacggggtttcaccttgttagccaggatggtctcgatctcctgacctcatgatccacccgcctcggcctcccaaagtgctgggattacaggcgtgaggccaccgcgcccggcccaacattcttcttaacaaaaagaaatctgagatttaaggagacaataccctggtataaaagcactgagaagctgggtgcggtggctcatgcctgtaatcccagcactttgggaggccgaggtgggcagatcacgaggtcaggagatcaagaccatcctagctaacacggtgaaaccccgtctctattaaaaatacaaaaaattagccaggcatggtggtggacgtctgtagtcccagctactcaggaggctgaggcaggagaatagtgtgaacccaggaggcggagcttgcagtgagccgagattgtgccactgcactccagcctgggcgacagagcaggactctgtcccagtaaataaataagcactgagaatcagtgaatatcgatatctaacggggcccaggtggcatggttcagccacctctccactaagaagccatttgaattccaggcaactttctctgtggacctgaggctggctgcctgcctgaccactgccccttcttgccgaacagctttcagggctacagtgtggtggcctgtgtgaatggtgcccattgcagtgtgcagtgcccagtaggcagcaagaatgtgggccagtccttttccctccaggggcctccacgtctcatgctgcgggggagttgggaatccatcaaggatgcagacacatagcttcatgttaccatcctcttctctcttgctcctggtggacctggctgatgcatcacagagctcattcctgcaagtctgggctcagcctcagatcctcatgccagcaccaggcagccaataccaatagaattgttaggtgagatgaaacctgtttgccattcatagatgagaaaagctcatctggctcctttagcagatgtttgtttcttgcagccccaagactagcatctaccaactcctcagtcctgggggcggacttgccatcaagcatgaaagaaaaagccaaggtgagtgggactgccttccaagctattgcctatgggatttaaggtgcctggtaggggacagtcttacatgtcagagaaggatagggttgtgagtaattgccccacctggattcagagctcaacctgtgtcaccagttgtgggatcttagtcccttcacctctctgggcctcagtttacttttctataaagataaggatgatgcctgctgcagtgggccactgggcacattctacacctggggtaggcgatttctttcctctttcatgcctgcgttcacccgttcactcaacagatcttgactaatacctgttatgttccaggcactgtgctaggtgtggaggcaccgtagtgatcaagacatctgtggttctgaaactctaaaagcattttccaaactggaaactgctcaaaaaacaaggtgtcattttctaataatccagaaagcagagttagatacatacatgtataaagaattgtgcctctgcgattgcctggagcattagcaacaatgtctcaaagtaattatgaagtaatgataagatcaacaacaaactgctacttaccacttagtaaataactaccatgtcccaagaactgggattctgttttctcaacacctctggtgagaggaggtgctgtttttaacctcactttaaagattgggaaacagattgaaggggtagtttacccaaactcacacagctaagaagtggtaagattgggttcagatgcaagtggcctgtgctcttagttcaccatgccataccagatgtgtctgtcactcttgttctctgtaggcagagacagagaaagctggcaagactgggaattccatgccacaccctgccactgggaagacggtggccaaccttctttctgggaagtctcccaggaagtcagcagagccctcagcaaatactacgttggtctcagaaactgaggaggagggcagcgtcccggcctttggagctgctgccaagcctggtaagaagtccccacctctag

SEQ ID NO: 34728 - DNA, 2300 bp, Homo sapien
gtcattccaggcaggggctcagcaagtgtcaaggccctgaggtagaagtaggactacgaattgtgacaaattgttgttcccaccccatctacagggaacttctacgcctcggctgtctattttgcagtgtctgggggctacacagtgttggatgggcatccactttgagaaggaacacaaatgtgaattttttttttgagacagagtcttgctctgttgcccaagctggagtgcagtagcggcaatcatagctcactgcagcctcactcctgagtagctaggaatacaggcacacaccaccacacccagcttgtgtgtgtgtgtgtgtgtgtgtatagacagggtttcactgtgtttcacaagctgtggactcaagcagtcctcccaccttggcctcccaaagtgccgtgattacagatatgagccaccgcacctggccataaatgtgaacttttatgtaaaatctgctttctccatgttggctcaaaaatttaaaaaggagctagccaagcaagacctgtgtggagcagcctgcactttctgcatgagaagcttcttagaagatcagagctgctgttttctagggttgttggcccagggctgaacacccagggccttccagggaagacagggcctgcagccaccctgccaaagccccaagacagtgcagagccccaccgaggagttagtgaagagggggccaggtgtgcaaaccttgccccatgaggctgagggtgggcttccaggggtcctgctgctgtccatgtgcagaaagtccagtgagggcctccctcagtcccttccccactttcagactgcctcttcattccttcccttccctgggcctttgcacaccccctccccacagcccagtctgatgatgctcccgataagccagtgcctgtgcctccagagctctctggccagtgggagcccagcagaggacaggctctaactacccagtgtgctggggcaccagggggaaccatgttaaggaagtggtgtctcttagggagccagagacagaggaggcagtggctaagtgaaatggaacagggggcatggaggctccaggagtgagagtgtgtgaagctgatcgatttttgagaaaccaggaggccagtgtggccaaagtatcagtcaaggtggggagtggggagggaagcaggggaggtcttaggagcctcattaaggcctctggactttatcctaaaggcatcaccagagagttttcacaagcaggagagcaagctgccctttctttttcaccaggtaaaggcctctgaaaaaattctccaggtcagagctgcctcagcccctgccaaggggacccctgggaaaggggctaccccagcaccccctgggaaggcaggggctgtagcctcccagaccaaggcagggaagccagaggaggactcagagagcagcagcgaggagtcatctgacagtgaggaggagacgccagctgccaaggccctgcttcaggtgaggcctgaggagggagactccatgcagccaggcccgtccccagaaggccttctcaggacttgttctcccactctgggccagagccccgggcgtgcctcagaccccagccccttactcccctctcactgtgtggcatcatttgccctatctggtcttctgtacgtggtgtcctgtgtctcctcacacgtccatcctctgggctgtctccccttgtcttgtttctccaggcgaaggcctcaggaaaaacctctcaggtcggagctgcctcagcccctgccaaggagtcccccaggaaaggagctgccccagcgccccctgggaagacagggcctgcagttgccaaggcccaggcggggaagcgggaggaggactcgcagagcagcagcgaggaatcggacagtgaggaggaggcgcctgctcaggtgaggcagaggggaggggtggagagtagccccatgcctaaaccccagcacctgcatgggtgtggccacctttgccacatccagctcctgtctccacacgtccaccctctgggctctcccctcatcctgtttctcactccaggcgaagccttcagggaaggccccccaggtcagagccgcctcggcccctgccaaggagtcccccaggaaaggggctgccccagcacctcctaggaaaacagggcctgcagccgcccaggtccaggtggggaagcaggaggaggactcaagaagcagcagcgaggagtcagacagtgacagagaggcactggcagccatgaatgcagctcaggtgaggctggaagccgccctgcatggcctgtgccctgc

SEQ ID NO: 34729 - DNA, 2300 bp, Homo sapien
acagcagcctctgtccctgtccttgtggagttggggtgcaccaccctcctggcacatggatgtgttcgtctactcgaaagctctccaaacctagttgtttgggatttttatgcaagttccattatgtagacatggttggttaaatcactgattgaactcaacctccaacccctctctcctctctggaagtcggggtggggcgggtgggggtgaggtctgaaagtcccgaccctctcctcacatggcacccagcctccatctgaagctctctaggggctttcagccaccagcatttcctgaatatataaaaaaagacattcttctcactctggagatacttttttttttgagatggagtctcactctgttgcccaggctgaagtgcagtggtgcgatctcgcacctccgcctccagggttcaagcgattttcctgcctcagcctctcgagtagctgcgattacaggcacacgtcaacatgtccggctaatttttgtgtttttagtagcggggtttcactatgttggtcaggcttgtctcaaactcctgacctcatgatacacccacctcgacctcccaaagtgctgggattacaagcgtgagccaccgtgcctggtctttttttcttttttttcttgtttttttttttttagacagagtcttgctctgtcacccaggctggagtgcagtggtgcgttcttggctcactgcagcctctgcctcctgggttcaagcaattcccctgcctcagactcccaagtagctgggattacaagtgtgtgccaccatgcctggctaatttttaaattttttgtagagacagggtttcaccatgttggccaggcaagtctcgaactcctgacctcaactgatcctcccgcctcagcctcccaaagtgctggaattacaggtctgagccaccacacccaggcttactctggagactctttggttcttagtggtccttgtgtcaggaaccagggacagagaccagagacgtttttcactatgtcacagcacaggagccttgccaacacagtcccatcctcccaggcaccctttcccaggctgtcctcttccctcccagcacaggcccccattctcctggatctgaaccacacaaggaggcagaggggtggagtggttaaaaatgcaggcgctactactttctggaggtgtgatcctggacaagagcccctgtgtccctatctgtaaatggagatgataaaacactcctcaaagggcctccgtaaagatcacaggaaacaaagcatggacaacgtgcctggcacgaaggagagcttggtaagtggaggcaagtctgagtgccagagccttaaaaccatggactcttaggtttgaaggaaatcaaaatattcctctctaaaaacctgcggattttagttaaaggtaaaaggttaaaacccaggggcaccctctgccccttctctctgtcttgatcagctcagaagcagagctcagaggatcctggatcagacttgactgttcccatacattcaccttcccacatttccagccctttggaaccctgaagatatcctcttctctgtcctgtcactctatgggacttacggctctttgttaaaatactatttaagcaaggcccctaagccactgccttgagagagaaatacttctcaactgaggcctctactgcataatgggtacagcatgtgttaatcaactttggctgatttttcttttgttaagttgacttttgtttccaggggagcgtgtcaactaagaacctaaacagggaaagaaaagaaatgttttcacccctgcacgtcgtccaaacttcctcctgcgtgtttgagacgacataacggaggccagagaagaggacttgtctgagctcaccaagggtgcacagcccctttctgcacccactcatctgtggatgagaaggggagacaaacaaaggtgtcttctgtttcaaagtgctttcctgtctagggagtggacatttgcctgtttcttgaaacattcaaagagccttatgaatccaaaggcctgcccagaaacaagtgatgagggccctgggcagccaatgggatcgtgctggcctttctacctgcctggggagcccccccgccccacatcctgccccgcaaaaggcagcttcaccaaagtggggtatttccagcctttgtagctttcacttccacatctaccaagtgggcggagtggccttctgtggacgaatcagattcctctccagcaccgactttaagaggcgagccggggggtcagggtcccagatgcacaggaggagaagcag

SEQ ID NO: 34730 - DNA, 2300 bp, Homo sapien
aaatatgctattatcatcccatttcacagatgagaaaactgaagcccagagaggttacaatttttgcccaaagaaccatagctaataactgcagaaacaataaatatgttgattaaataaagtggagtttgaaagcagtgactttgatggtttctgggataaagataggcttccctgtggaaaaatttgtcctgaggtgattgtgtgggctgccttcagccataagatcaaggcttgctccctccatgaagccacatgaggtttggaggtctgtttaatacaactcttaatcaaagcggaactcactccacaatactccagtctctgctaacatactgggaagctcattaaaacaaaaaagccctctccttcaaaaaatacagacatttcacagaagagatgcaaatggttaaaacaatccgtaaagagatgtctgacgtcactcatcatcgaagaaatgcaatgcaacgagaaggtatgttgaggctgggtgcattggctcacgcctataatgccagccctttgggagaccgaggcgggtggatcacctgaggcaggagttcgagaccagcctggacaacatggtgaaaccccgtctctactaaaaatacaaaaattagccgggtgtggtggcgcacacctgtaatcccagctactcgggagatgaggcaggagaatcacttgaacccaggaggcggagcttgcagtgagccaagatggcgtcactgcactccagcctgggcaacaagagccagactccgtctcaaaaaaaaaaagaaggtatgttgagtttttcagtttagcagaataaattttttttttttttgagacagggtctcgctgtgtcacccaggctggagccacgggatatatttatatatttaaaatatatttataatatttatatagtatgtaatacaaaaatactatatatattccatataaatattacatatagtacatagataaaatgtatctaccgcttgcctagctctgtgaggtacacttcttggcccttccccacagctccgacatattctcccaagccttcaaggtccttcaatattgttattagaggctgggcacggtggctcacgcctgtaatcccagcactttgggaggccgaggcaggtggatcacgaggtcagaaaatccagaccaccctagtcaacacggtaaaaccccgtctctactaatacacacacacaaaaaatttgtcgggcgtggtggcacgcgcctgtagtcccagctacttgggaggctgaggcagaatagcttgaacctgggaggcagaggttgcggtcagccgagattgcgccactgcactccagccttggctacagaacaagattcggtcgaaatatatacatgtatattgttattagagggctatgtggaagtagctattaaacacgagggctttgaagctagaattccaaacccttctgcaaaggtgtgctctcagttaacatcctttatctgtaagagggaaatcaaaattatttgataatgtcttgaggagtaaatgaagcaatgcatataaactgtttagcccagaccggtctgaaaatacatattgaataatttattcttattttgcccattatataatatgccaaagtaagtgattacggtgtgttttccccgactatgttgcctaggctggcctcgaactacttggacgaagcgatcctcagcctcctgagtaactgggaccacaggccggcgccaccctagctttaattaaggccgttttgttgttgttattcccctgctccacacaaggggcgctgccgctccaaggctgccagggcgggagtcaggatggcggaagtctgtctagccacgaccaccgccatcatggaatacaggcccacctcaccccgcgggtgtagccgcttcgtactgtcgcttaggccgacccgctcgcagcgacaaccagccctctacctcttttcgctctcccttaagtaataaaccgtctttccttatgacgagtcttaaactctttgggaggaataatgccggcgtcttccggaacccgacctcgccccgtgacctcagaggtatacttccgggacacggaagtgacccccgtcgctccgccccctcccactctctctttccggtgtggagtctggagacgacgtgcaggtaggaggcccgggcgcgacaatcggggggcatcctgcggcgaggggaccctgtggggcttgggacgagagacgggggtctttccgtgggaaccgagctaggtgccgggcaagagacgcgcggctggcccacctggatcctggcca

SEQ ID NO: 34731 - DNA, 2300 bp, Homo sapien
tttttttttttttgagacacagtctcaatctattgcccaggctggagtgcaatggcgtgatctcggcccactgcaaactctgcctctcaggttcaagtgattctcctgcctcaggctcccgagtggctgggattacaggtacgaaccaccacacccggctaatgtttgtatttttagtagagacagggtttcaccatgttggccaggctagtcttgaactcctgaccttgtgatccaccaccttggcctcccaaagtgctgggattataggcatgagccaccactcccagcctttttttttttttctttgagacagagtcttgctctgtcacccaggatggagtgcagtggcatggctcactgcaacctccacctccttggttcaagtgattctcttgcttcagcctcctgagtagctgggattacaggcacctgccaccatgccccgctaatttttttttttttttttttgtatttttagtagagatgggtttcaccatgttagccaggctggtctccaactcctgacctcaagtgatccgcccgcctgaacctcccaaagtgttggggtcataggcatgagccaccacacccggccttgtatactttttgagctttgttcctacaattggatactctaaattttttttttttttttttttttgatacggagtcttgctctgtcacccaggctggggtgcagtggcacgatctcggctcactgcaacctccacctcccgggttcaagcgattttctcctgcctcagtctcctgagtagctgggattacagacatgcgccaccacccccagctaatttttgtattttcagtagagaggaggtttcaccatgttggccaggctggtcttgaactcctgacctcgtgatccgcccgcctcagcctcccaaagtgttgggattacaggcgtgagccaccgcgcccggcccagttggataatcttgagcctctaaaggtccttaggaatccaccaatccactgtttcccagactcaggatctccagggccgggtgatctgcatccttacaagctccttaagggattcactcatccaaccccaccctgctcattttacaggctggctcatgggtggcagaaagccctccactgggagcaggccgatccgagtgccagcctaggctctcattaacctgccaaatcatctcatctctctgagcctcattgttcccatctgtttaacgggaacaaccactgtcatcctgcctaatttgcagagtccttgggatagctagaataacaggggttggggggcaggctcagcgggagaagagatttgcacaaggtcatttacctcttcatctgcttgttttgtgccaggagagaggattctgctgggaacaacttgttgggaaagatgacattctagtaaacaatgaaaccagtaaatgaaccacataatcacgataaaggggttttcgagagtcagggcaaaggtgtgtgttgggggagggagggtctgcccaggaggggtcattctggcagagcactggtggtcggggagctgtcccaggaggtcctggagagctgtcacaagcccaggggtggaagagcctggaggccctctcgagcccagccagagcgttcccagggccctcggagccgccgcgggcgcgggtctttgtctcccacattctctctgccgcctctcccgacccccagcgctgtttcgtctctgaccccgaataacttgttggtttccccccgggctttgtttcccgggggtcaccgcctcggggacgccgggcagccgccccggccctcgtgggtcctgcatctgacaccccctccggcccccgccccctacccgctcggagataggggtcaaaggcagcccgcgtcacgtggtcgccgagcagcaccgaatcggccgggagggccgagggagaatccgggtggaagtcgagaaatccagccccgatagcagcgctcggtcccgccccggcccccgccccggggcgctcaccgcacgcccgccggccgccccggcctccggagctcttctctggccggcacccacgcggcatcacgggatcgaaccccgctcccagcggccgcgattcggggaggtaggcgctgggccgaggaggtaaggggagacgggcttgggggctctcggcgcacgggtacgcccctctgggctagggggcgaggcagcgcgccccaaccttcagtctccagggagacccctccccgctgcgggacgagggggaggctgcgagctgccccggcgcagcgccgggccgggactgggggctgggcac

SEQ ID NO: 34732 - DNA, 2300 bp, Homo sapien
tgcttgcacattgtggagaataagaacctttgtttttgagagagggtctagctgtgtcgcacaggttggagtgcagtggtgcaatctgggcttactgtagcctcaacctcctgggctcaggtgatcctcgcacctcagccctcccatataactgactataggcacacgccactacgctgtctaatttttgtaatttttttttgtagagaaggggttttgccatgttgcccaggctggtgttgaactcctggtctcaaactcctgggtcaacctgccttgagctcccaaagtgttgggatgacaggcgtgagccactgcacctggcagtgagcaccttctaaaaggctcctcgcgggcctcacctgagcctagtcctgggtgagttcctgatctaggactggaaccctggtctcctggccccatgaactgttctggacccctgcgaggtactttttagagtctcgctgaggcctcctattcctctttaaaaggagcctctgtgaagtaggtcacccagtgctttttgctccacgtttctgttctctagctgttgtctgtgtcctagagaaagccgggcccacttgcccccacctctccccaccttctgccccctccccctgccagctgcgcctccatgtaagtactttgagtcccttaacaccccaaggcgtgttggtggccagcttttgtcgtgatgacaagccccagcaagtctacagggactggctgctttcatgtgggccctcggtgaagcctccttggtctcagcaggccctgtgttgtacccaccaggcctctaggagattagggggcttctgtggctccagatggctcaaagcttttcccttcctctgtgttatccctagcccacctggcttccgtcctcactggccacggggcttgggggattttcagtctctccaaggctctggcatcttccagagtgggctagtcttggagtgtccatctgagccattctttctgtcaccactgctgggcctgcctgctgggccttaggtgacttcttgagaggtggccaaagctgctaatccctggaaggggctcctaggatttccctgtggctggcaggacccttggccacccacgtggtgtgacatgaggagcctggaaagccagcccaacctccatccttaagccccacgtataaacataccttttttttttttttaactgcagctctcagagcctgcagttctactgttgtcaggttgccttgtgctctccttggcatcctctaagaaggcaaataccttttcagctgggtgcttttaagcatttgctgtcaagaagcaagccctggccagcctggcccttttccagtgttctgtgtgaccgtggccaagttgcttctcttctctgggtctcgtctttgtaagacccttttcagctctagcactttgaggctccagcatggattcttacaccctccacacctttgccggtcacctttcttccttctctgcagggtggggcacagggaagggcctggcagctgagctgggtggggccaggggccaaaagccagcatcatagacacttttccctccagctgggcataccagtccttcctcttcttctcaggacaggtggggaaactgaggtctggagggggaagggccagggctggaaccaggacccagttatccttattgccagtgagtgctcctcctgctgttggctgctacctctcttgagagggtcagaagacccactagcatgagggtcagggacatgctttttcctttcccgtggaaggctcctccaggcagggcttgggtgaggcaggcgaggtgccagtggttccctgggcacggggcagaatcggaggaggacatcctctttctgaggttaaggaggtaggggctggaggccttgacaagggaggtggcatgaaggggcgtggaggtttctaggaacgtggttggtggcgcagggtgctctagggccacctccctcccttgcttctgccttccctttctcctggggaggggactgggccaacagtaatgccatttttcctggccctgggattaggtgcagccgtgttaaggagaggacattcgagagggcgtggcgaagtgaagaggaacctcacgccactgcctggagctccggtgggtctgggtctggtcattgtctcgctggctcctgtccactctgaccactgtccctggccccctgccctgtccagtccttccaggtccatctgagtgtgtgtgtgtgtgtgtgtgtgtgtgtgtccccaggagggatctgggggtacaggctggcacttgagc

SEQ ID NO: 34733 - DNA, 2300 bp, Homo sapien
cttgtattataattgcttttttttttttagatagagtctcgctctgtcgcccaggctgcagtgcagtgacgtgatctcggctcactgcaccctccgcctcccaggttcaagtgattcccctgcctcagcctcctgggtagctgggactacaggtgtgtgtcaccacgcccgactagtttttgtatttttagtagagatgaggtctcaccatgttgcccaggctggtcttgaactcctgacctcaagtgatccacccacctcggcctcccaaagttctgggattacaagcatgagccaccacgcccgacccttgtgttataattcctaaatacaatctcccattgtttgggatttgctgttataagcagcactaggatttgtgttcttgtggaaaaatctttacacacttctgcagtaatacctctaggataaattcctggaagtgcagctgtcgggtctggagcatgctgtacccatgctgagcacatcatatagtcttggagctggaagggatttcaaagatctttaccctctaggctgggcccaagccttgaattcccccctggcctctttagccctggctcttacaccttccatctagacctgggcaactctccttctagctttgagctgctgtgactgatagttgctccttgggggccaggcgtggtggttcatgcctataatcccagcactttgggaggccaaggccggcgaatcacctgaggtcaggagttcaaggccagcctgatcaacatggagaaaccccatctctactggcatggtggctcatgcctgtaatcccagctacccaggaggctgaggcaggagaatcacttaaactggggaggcggaggtggcagcgagccgagattgcaccattgtctagcctgggcaacaagagtgaaactccgcctcaaaaaaaaaaagtaagaagaaaagaaagttgctccttgggttgctgggaaatctcacttcttgtgacttcattactatttaagggagactggtagactgtgtttggggttgctgtttgggatgagacaattggggcctttgtgtcgtgtatgtacgtcttcgttaactctttccagtgagatgagtataggaggcgtggcctgggtgcaggcggtgcggggggttcaggctgagggggaggctggaacccagagttatggctgcctgggtggacagaaggtccagggcgggggaggcctcccctctgcatcctgtggtggcagtatggcgatcctcaggaaggctatttggtcatctgttgtcctgggctgctgtgtgcacctgtgggtacgtaccccgaggatgagagatacctggttgcattatgggcaaatatgacagctgccatgtttcttgtgccaagctcctcagacatatttacttaacgctcagctacagccatgagctacaggggtgctggtgttacagattagctcactgatgctttaaaggtgtaatggtcacctgaggccttctcacacagctaaggcacacatgccctgcagcctgctaatgaatcctggcttggcttcattctgagtcttcagaatgaaaagactgatggagactcagtcttttcatctatcatatggggctgctgggctcattcaaagagagcaacgggttaggaagggaatggaatatggtgaggatgtggtattcagtcgtgatttagaattctacctctagttcccaggctgtgcaaatgtttatcatctctccccatccgtcctgctcctggatttttcttggcctagtcttggactctgataatgatcaaaaatagcaactccaatttgtagataccatatgctaggtactgctttaagtcgtttacaaacgttgttggacttaatcctccaaccccttatgagatgggttcatattatttattgtctgccccattttacaagtagggaaactggggctcagagatattaaagagcttgctccaaatcatgcaaccttggttcggcagccgtacttgcatttgggcattcctaggtcagctcctgtgtgtccacagttagctgaaccctgaagcccgcactctgacgctcctgttctctccactctccacagccttagccccgtgggccccacggagtgagcggcatgcagcacccccgggcctgtccagtgtcctctggcctgctgccctgcacccccagaaggccctgacgccctggggcacttctgctctgcacaggaccacgcgggggtttgccatggtgacataaaggggcgcggaggaaggaaggagcgtgaccagcctgtggact

SEQ ID NO: 34734 - DNA, 2300 bp, Homo sapien
gtttattgcaagggtgacgacaaggacacggaagcgcttgttcaggaagctgattctggggccggatgcaggttacaccgagggccacccatgggcaaggaggcctgtcagggcctgttgcaacccagacaggatttaatgccaggatccattctcaacacaaaattccagacagggaaatcaccatgtaccgggcgaagcccctctcacatcctttaatatcacgtgatgctcacagttgagtgaaacgacgatctctgcttcacaggtaaagaaccaggtccttagagaagggaccccacacacttgctagtggcatggtgaggccaagaacccgggaagcaagcttctgcatcagtgccccctttttcatggatggtttgggggtgctcttcctggcaggggccaggaaagtgactgttattggctgtagagacacccagtggtatgcggtgctgagtagtcttgggaccaatgctggggccaagtactgagtgagccccaggagggtgacccgcactggctctggagtcagggaatcctggttggaggcccagcccccttaccaccagtgtggcctagggagacatctaaacctctctgagcctcagttgccctaaagtgaggatgactgtggtacctactgcaaagtgtatcggagaagagtccctgagaagacatctgcgaagacagaggctctttctgtactgtgagcctgggggtcggcggtgggggcttgtcttacagtaactactgcagtgccagtgctgggcacaggcttgattgtagcagggactcaatcaatatcatcataataaagtgtttgcatttatcatgggcacttagtaagtgtcaagcactgtgttaactgcttaactaaatggatggttaggcagttgatgagaagggattgaattctaacaggagaggggaactgaggccacctccggagaatgaatagacatgagtggggaaactgcacagaccccaaccgagggaccctgcctggagggagctgggaacagcttgccggcaaaaccttgccagcaaacacaagctcagaagagccggggtcgattttctgtcctgccatcattttgctgcgtgactttggccaaacctcagacctctctgggcctctgcttttgttcctagagaacagatggagggcgagaggggacttgggagctgaactgtaaaggagggaggctcctgcacctgaggcttccaggtctgttgggatctgccggcctgaaggggatttcctggggccagccccattcccagccctgctgacgtcacccctggatgggtgcccagagttggaggggatgcccagagcagcactccagtgggaaaggcaggcgggcactctcccagcccacacaacagccctccctctggggctctggggtctccccagcccatcccccaggcagggaagtggggatccctcctgttgaaagaagaaggcacagccccttggcccaaatccggatttgctgtgtgacctgaggcaagtccctgcccctttctgagccttggctccccatctctgcaatgaggatagcagagatcccaagctcttctggaactcttaacactcagggatctggctggggggttaagggatccgggaaagggaaatggggcagggggctggattccaggggcttgcttcccacaatagcacagaaggtatagcgggtggtgggaagtgctgtgggataaagggagccccgagtcctccaagtggctccaggaaggggcaaagccagcctaaggttttggaaacatatttatttttaagtgtcctgtgtcgctgggggctttttcttcaggttttgaaatgctacagaagtcagtactctgatgtgtgtgtttgtcaagcagaatatgggctgtatttattcatcctttagcccaagcccttaaaaatatagacggctaatgtcttcagtatgtatgaaatatcccatatgctcggaaacaaaaggggctctgttattaaagtttcatttccacacgccccctcccctccctcccgcccgcccccctgacaccctgccctcctcccatcccgctcagcctgctccagacagagcgcgagtgaggagcaggcgggcaggcggcgggcagccgggcagccgtggacagaggcccgggcacagccagttgctgtgccagagggtgtggtgtccggctacaggtgagggggcgaccacagggaaagagaacagggccttccaggggagagggggcctcggggtccctgggatggccagtggaggagtgggggt

SEQ ID NO: 34735 - DNA, 2300 bp, Homo sapien
tcctccagcatcatctggctcagtctcaccatggtgtcctccgggaatctgactacagagtgcgaaaagcacctgccccagttcacagtcctgtctcttctgagtgctgctggcctttgtgagattctaagattctttgaaactcaaatggcagaaatctggcagcagctggtgagtgagaaagcacctggagatgaatgagggcctggagcctctcctccatgtctctgaatccaccatcatggtcaaggtgtcagagctaggttggaatcccagcctggccacttattagctgtgtgccttaggcaagaagtcacttcacctatctgagcctcaatttcctcacctctgaaatgggataataataaggtaattctctcatagggttgatgtgagaaattacggcaataacctaagtgaatgacccaagatagaagaggtgcttctgttcttccccggggggcagaaggtgggcttctttctcctgatttccctgccactgaggctgctataacaggtgcctggttatctttctgatccggatggttgtttgcctttcccctggttggctctgattttccctggggcttggtaatgcgcttatctctctgcctgcctgccagactctcctggcacagtcccagccagaaaccaagaccttgacccagcctgctgcagtgggaggtgcctgacccctgcttgggggcggaggcgtgaccacagcagctgaggtcagtccaggtcctcaggtcactcatgtccacagactctcacaattttcaggattctcactgctccccattttgcagtaggataagtgagagtaagagagttcacacttgcctgagttcacacagctaagtagcagcggaatccagtctttaagcaagatcccttgattctagggtttcctcccaagtgtaattggccatctgctctgtcttacgcactacctgcccatcctgggcatctcacccatctccaccctttgcctccacaaatgatttctagatatttgtccccagcctggaattctcccctgttctctagacccctatgtggaaccgcccactgctcatctcccctggaaatccaaaacctaactcatctccctgctccactaaacagctgctccttctcatttattcctgatctctattaacaaaatctctgtcaccagagctaggaacctgggctgcatcctaggctcctccctcttctccacacccactctccatctgcctccaagcccagccagttcttccacccaagtatctctcccatctaccccctcctcaccaccccttacagaaagcctccattccctcttgcttggattatcatcattcttaacatttatataaataatcatacaatgattattgttgttcctgctatcattcacagctctcctcaccacattttaaggcttctttatccctctgctatatccccagtactttttatgatgtctgaaaaataataggatcctaagaaatttttgtggaatgaaagaacagccaacatgtattaaggtatggcttagaaactgtgctgagtcctctgcgtgcattttttcatgtaatcctcaatgcaatgcgaagttagaaatattacaatacccattttacagacggggaagtggaggtttagagaggtcctgtggctggcttgttgatcgtcacacaaatggcagagctaggattctaactgcaagcctgggcacagaaactgaaagcacaccactgcaccatcttcttttgttttttttggctgagtttctgctctgttgcccaggctggagtgcaatggggcgatctcggttcactgcaacctccacctcctggattcaagcgattctcctgcctcagcctcccaagtagctgggattacaggtgcctaccactacgcccagctaatttttgtatttttagtagagacagcgtttcaccatgttggccaggctggtcttgaactcttgacctcaggtgatccacccgcctcggcctgccaaagtgctaggattacaggcatgagccaccacccccggactgcacagtgtttcttgttgcacaatctcctccaagggctcctatccccagtttgcatcttaggtcacaccactcctgtgattcctgtggtgtaggtacctttgctgggatatgagtgaattctttctaggtggtgtctagatacgtgttgttaaataactagatatttatttaatgtgcattgggggaaaaggactgagcacaatatacttgtggtttctctgcaaatattgcttaagataattctaa

SEQ ID NO: 34736 - DNA, 2300 bp, Homo sapien
ctgagtctggggacatttacagaggacagagaccagtcctggccctaggctggcacagggctaaggggaaggaccacatctttgtggcgggcccagagtgtgtcaggccctgggaagagtggaggggacccgcagatgacctaggccctgccctgaccctggcagaggcactgtttaggggaaaccacctctttccctgccctggcttgccacctttttgtcttttagattatgtgttttctctggaaaggcagggtatgatggttctttctgtactcccaaggcttccagggagctggggctggggagagtgaaacagcaggagggggcttcgtgagcacaggcttagctcaccagggttggactggagaggtggaagcctgggctgtgatcctgtgatcctctctgtgagccctcccttttcagtttgctgtatacctggggctcagcttgcctctctctgggttaccatctcaaagtttctaaaaattgactgattatagattaataattaccccagtagaatgggcaagagagaggctgtggctcctggcctttggcagggccctggtcagccaacagggagcagggcttgtggtctgcaaggatagaagatgggtcaggcttgcgctgactgtggagccctcatcttagcttccccttacccatccatctctgccctccctgatcccgacccactgccagcagagagaaaccagaagtttggccaggcccagcctccttcccctgggtttctgagttttctcaacctgccgtttcctctgagctctgttcctgctctggggcctctgggccaggttgaacaggggaggagcactgatctaggagtctgaatggattgatgagggcttcctacaagaagtggccgttgggctgggcctggatgggtgagtaaggaaggtgaatttgctttgtggggagctcttcagaaggaaggcgtccaggcttgagatcagtcagaccgcaggggccccttgctaagctgtgagacctggggtgagttagctgcttctgtgtgcctcatcttccttatctacaaaatggggataagggaacctcctctatgagttgctgtgaggattaaatgaaaaaaggcatgttaaacccttggcttggcagcatctggtgctcccaaaatgttggctcttgtcattctcatagatttcatgtttattctgcaagtgccaatggaagatgtggtggggacaagggaggaataccgaagtgaagcagtagaggcccctgccctcgaggccgttgcagtctctgggggaaaatagggcccagaccctcattgctacaaagcaaaacactgggagggggcagcatggcccacgtgactggccctgcactgggcattaggccaacctgggcttgaatttcagctcttcctctggctggctgtgtgaccttgagcaagttgctgcacccctctgagccagcgtcttctctaatatggagatgaggatagtgctggcctcatgggttgctgtggaagtaagtgaagtaaggccctgtcctgctacctggcatgtggtgagtataccctgaaagattacttttactagaataaataatacacaaggtggtggttattaagtgatgcagacagaacattggtgaaggctttttggagggggtggtggcattctaggtaggccggaaatctgaaggattagggcatgtagaaaggatgtgagacagaggagggttcccggtagagggggtctgtgcaaacgctgctttgcaggcaggaattcattgggcagctgtgggaactgcaagccactgaactccctccactgttgctgagggcacagagagaaggtgagtgagctcttgggcaggccccgatagcaggggtttgaatgccaggatgaggactctcctcttgatcctccatgtcctggggaggcagcagagggttttgagcaggagagaggcatgagtggagcccggagggaggaagatgaatctggcagcgtggggcgggtagattggcgggggagagactgggggtggagaggccatttaaaaggctgttgcaaaatcggttttcctgataaagagctgggctgagtcatctgtggaggagaaaagtcacatccagctccttcatgttgctgccgatgtgggattttcctggcttcgtcagccaagcaattggctgcctttgccggaggctttgagaaccaaggcttgaaggccggcaggagcatccagggggaagcttggcttcagggaggacctagcagagtgagtaagatgagcacccggag

SEQ ID NO: 34737 - DNA, 2300 bp, Homo sapien
tgctttggaatgaaagagtgaccttagagggctccttgggcctcaggaatgctcctgctgctgtgaagatgagaaggtgctcttactcagttaatgatgagtgactatatttaccaaagcccctacctgctgctgggtcccttgtagcacaggagactggggctaagggcccctcccagggaagggacaccatcaggcctctggctgaggcagtagcatagaggatccatttctacctgcatttcccagaggactagcaggaggcagccttgagaaaccggcagttcccaagccagcgcctggctgttctctcattgtcactgccctctccccaacctctcctctaacccactagagattgcctgtgtcctgcctcttgcctcttgtagaatgcagctctggccctcaataaatgcttcctgcattcttctgcctcctgtgtcattttcagctgtgtctgatgtccttcccttctccccaagcatggagcagtccatgggactctgggtggctgggaatatttgagacatatgggatgggagcttgggaagaagcagccatggggagagatgggaacaacggacaacttgaggccatagaagtacctggactgcagtcctggtcctgtcatggacgagcggggtgaccctgggtgagcccactccttctctaggcctcagcttccccatccgtataatggggagagtgggtctaggtaatgtctcagggtggtattgtccaggccctgaccacagagcactatcaccagagtgggcagggccaagctgggtcagggctctgtgctctgaggctgtttcctcatggcaggtgggggtgccagggcaggaaaggcgccactgtaagaggtcccgtctgagccaggcagccccagtgaggcaaggactcgggccatgaggcatcctctcctggcaggagtgtcctttggccagagaaggggattgtgatcctgctcccaggtgaggctaagcttgccctgggaacacacctcactcttcctctctagaagctcaggcccaccgagggccaggaagctaaggtcagggtggtggacagcagaatctaggcttctgatttgagaggtgtcagaaatacaccccaggatagtctgccagcacacagacaccggtggtccccaccctgcacccagcccatccttgctaggcccacccttccccaggagtgtgtgccttggacccaatctttatcttcggctggggcctcactgcagcacagtgtcccattgcctactggtgatctcatcccagtcccccgacacctcaaagttcatccaaaactgacctcagtgtctgcccccacccctcctgctcctccccttccagtcacccaagcatgaaacaggggagtgggactccctttcctcaccttccacatccagttcctcaccaagacccaagggttcttcaaataaccctcaactccctctcctctccatctccttgtcactgccctgatccagccacccctggtgacagtcaggtcctcctgcctccagtctggccccctccaacccatttcccacatggcagcaaagatatctttggaaaatgccaatccgatcactccatttcaccactttaatcttgtcagcaaccctttataaacacagtttccttttgaaagcctgctgggatctggccgctgcccccactgtctgggctaatctctcagcactgcccccagctccggctctacttgccaaccccctacccatctttgtaggtgacatgtccactgcctgccatgccccttctctgcccagtgaactcccactcatccttcaaggcccaactccagtgtgtcctcctctgggaagccttctcaccccccaccccaggctgagctggtaactccctcccctgggctctcccagagccttccccaaagcttgtttacccgtctgaatctgacctggctgagctccttgaagacagagccctgccttatttattttcagtccttagagagaggctcagggaatgtgagaaggtagagggagggagggagggagggaggaggggagaaaagaaggcaggcaggaaggaggcagaagaagaaaggcaggagagaagaaaggaaggaagaaaaggataagtcaagcaaagatattgaggagcaattcattcatccatctatctatccatccattccttccttcgacaaatatctgctgagttcctatcaagcaccattcttggcactaaggatataacagttaacaagcggaagctaccagcagctgaccctcaacatttccaggt

SEQ ID NO: 34738 - DNA, 2300 bp, Homo sapien
gtctgatgtccttcccttctccccaagcatggagcagtccatgggactctgggtggctgggaatatttgagacatatgggatgggagcttgggaagaagcagccatggggagagatgggaacaacggacaacttgaggccatagaagtacctggactgcagtcctggtcctgtcatggacgagcggggtgaccctgggtgagcccactccttctctaggcctcagcttccccatccgtataatggggagagtgggtctaggtaatgtctcagggtggtattgtccaggccctgaccacagagcactatcaccagagtgggcagggccaagctgggtcagggctctgtgctctgaggctgtttcctcatggcaggtgggggtgccagggcaggaaaggcgccactgtaagaggtcccgtctgagccaggcagccccagtgaggcaaggactcgggccatgaggcatcctctcctggcaggagtgtcctttggccagagaaggggattgtgatcctgctcccaggtgaggctaagcttgccctgggaacacacctcactcttcctctctagaagctcaggcccaccgagggccaggaagctaaggtcagggtggtggacagcagaatctaggcttctgatttgagaggtgtcagaaatacaccccaggatagtctgccagcacacagacaccggtggtccccaccctgcacccagcccatccttgctaggcccacccttccccaggagtgtgtgccttggacccaatctttatcttcggctggggcctcactgcagcacagtgtcccattgcctactggtgatctcatcccagtcccccgacacctcaaagttcatccaaaactgacctcagtgtctgcccccacccctcctgctcctccccttccagtcacccaagcatgaaacaggggagtgggactccctttcctcaccttccacatccagttcctcaccaagacccaagggttcttcaaataaccctcaactccctctcctctccatctccttgtcactgccctgatccagccacccctggtgacagtcaggtcctcctgcctccagtctggccccctccaacccatttcccacatggcagcaaagatatctttggaaaatgccaatccgatcactccatttcaccactttaatcttgtcagcaaccctttataaacacagtttccttttgaaagcctgctgggatctggccgctgcccccactgtctgggctaatctctcagcactgcccccagctccggctctacttgccaaccccctacccatctttgtaggtgacatgtccactgcctgccatgccccttctctgcccagtgaactcccactcatccttcaaggcccaactccagtgtgtcctcctctgggaagccttctcaccccccaccccaggctgagctggtaactccctcccctgggctctcccagagccttccccaaagcttgtttacccgtctgaatctgacctggctgagctccttgaagacagagccctgccttatttattttcagtccttagagagaggctcagggaatgtgagaaggtagagggagggagggagggagggaggaggggagaaaagaaggcaggcaggaaggaggcagaagaagaaaggcaggagagaagaaaggaaggaagaaaaggataagtcaagcaaagatattgaggagcaattcattcatccatctatctatccatccattccttccttcgacaaatatctgctgagttcctatcaagcaccattcttggcactaaggatataacagttaacaagcggaagctaccagcagctgaccctcaacatttccaggtgactttggtgtgtgcatatgtgagtgtgtgtgtacacgtgggtgcaagccctctgtctgcacaggcctgttgccagggcacctgtcttccctagggtctggtgcttttagcctctggctccagctcctattgcagcccgaaataaggctgtgacccatggcaaggcaggaatgattctcatcagctgaagccagagctggctgcaggggacaccctgctcgctgcctactgactgctgaccgctgactgcctacagggacgccacgcaactctcagcttcccgacagaggtgttaatcttgagggtctaagattccctcctgcctattgtggtcccatcctctcaggtaccagcatcctaggggagcttggggaactcaggggagtgggcagaggaggtgagccaatccccagagctccttcccccggagaggaagggccctgcagtggatctag

SEQ ID NO: 34739 - DNA, 2300 bp, Homo sapien
aagtgatccaccctcctctgcctcccaaagtgctgggattatgggtgtgagccactgcgcccggcctataagtggatttctttctgttcttagcacataaaaagtgtcctttatgtgtccgttgaaagaataaaaaaaaatcagtgtcctttttagacagctatttaggattccattgactggcatgaatcacagcacccaagtgacccccagtactgcctggtagccatgtccatctccctagttcattcactatctcatgctactctcttaatgactttggcaacccctcttctcaaacctccaatacctccttgcacaacctcattctcagctaaagaccttgcttcttattccactgagaaaaatagagtaaccagaagagaacatctgcaagcatcctccgccacatctgtctacttgcttgcatctgcacccgtgtttgtggttttcctttctgatatggtggatggactctcctcatacctgcctggtgccaattcctctggctgggctctggaaacccagctctcctgtcactcctgctcaaggacattccttcagcaattctcccctctctctattgcattgtcaaatgttcccgtcagttaacgcacatgctgttatttctccatttttacaaacaaacaaacaaacccctcttgatcccatagctgtctgtagccaggatcctttaaagcccaactcttccaagcagttgtctatattgttcttaccaatcctctctttctctctttttgacattttattagtcaatttccaaagacacatacaagtagggagtacatggtccctccttcattcctaaatttcaaagctaataccaaaaagcatgtcatttcaccccgcaaattcttcagaatgcatcaaaataataaaagggcatttccttacatgccacaaagatattagcatactgaacaaaatttgcagtaatgatttgataccatttaataagcggtctgtattcaaccttcttcagttttctagtttgttttcatcagcatccaaacaagggccacagtttttatttggttgctatggctcctaaatctcctttaatctaaagcaacccctctgccccttttttccatgtcactcacttgtttgaaaaaccaggccagttgtcctgtagaatgtcctgcgtcctggatttggcttatcgcttcctcatggtgtggttaaacttgttcttctgtccattttctcttgaaccctctccagttaggctttcacacccaaacactccatagaaactgctttagtgaaaattaccaatgaccttgtattgctaaatataatagtggattttcagccctcatcttccttgacacatcagcagcacttggctctgttagtctctctatcatacctgaaatgctttcatcatttatttccaggatgccatcctctttagtttcttcctatgttgtgggctgctcctgcccaggctcctggcttggttcctcctcaccgcctcactgtaaatgttggaggccccaggctccgtctctgatcctctttacctattctcatttctttatgatctcatccagcctcccagcttaaaataccatttatggagctggaatatgaacgtatgtgtatctgattttagagatggactaggcaggccgtgctgcccacacagggctctcacctgccaaggtcctcaccattctgtcccctctgtcctgcaaaaggcttcctttgttggccaaacgtgaaagtttgaatttggctggtaggaaacgcacaaaggatagggatgggtctcaaactactaagaacagccatcaccctgaaaatcctctaaatagctgtaaagactagttccaactatgagaaaagaaataaatgtaacgttcttcattgaaaaacaacaacaaataccagtaaataccagtaaaagctcatgatgcccaacatttcacctccaggtcagttttctccagattcacacatctatctccctcctcagcaccactacttagatgcctacaagtctcctcaaacttagtgtgcccagttttggagacaattagcagagtttggatatggactagatattaggtaaaacaaaaatttgttcacttggaaatgtggagatctttaacttgtaaagatcttgataaaacaagttacaggccgggagcggtggctcacgcctgtaatcccagcactctgggagcccgagggggggtggggggcggatcacaaggtcaggagtttgagaccagcctggccaacatgttgaaaccccatctctactaaaaata

SEQ ID NO: 34740 - DNA, 2300 bp, Homo sapien
cgcaacaacagagggtccctcctcttccagaagaggcagcgccgtgtgcagaagttcactttcgagttagcagccagccagcgggcggtgagtaagccaccattgtgctcatggggaaaatgaggaccacagagagccactggttagcctaaagtcaaacggtaagccaggctgaggactgtgatgttcccatcagattaggctcctgcctttcagtgtgatccttgaaaagtgttatctttttaggcatctctccctggatacagaacaaagtaaacaaagtggattagggggttgaggataagccgtggagtgaagggactctggctcctaccaaaaaaaaaaaaaaaaaaaaaaagctaagacaggcatgcactctaggctaaatttgcagcaggctggatctagtttagacttgggcctgatctaagatggaaaatgtagaatgcccttttttcttcttcccaccggagaaaggaaaggccatggaataatctgctggtggagaagaaaggcaagaagggtttttcccttggcttcagaaaggcagcaggcagttccagatacttctaaggaagccagggctattccatccaccctccacttaatttctgggctagacaggaggcaactgagagggagtgatgtggcagaaaaataaagatggcaaaacacccgcctttgctatgtgcctaagacaatgctagctaagcactttgcaggtatctcatttaatgctcatagacccctctgaggaagagatcttcatcaccatcatcctcattctatcgagaaggacattgaggctcagggaaattaagtatcttgcccggactcggcattacaatagcaattaacatatatcgagtatttctcggtcccaggcactgggtttagcgttgtaaactagtaactcatccttgttccccgatgatgggcgttaggattcttgcctccccccgacctttttttttggtggagggagaaccctggtcccctgccccgctgagcttctctgcggtttattctaccccctcgttcccagatgctggccggaagcgccaggaggaaggtgactggaacagcggagtcggggacggtgagcgtggaggggagctccctggaagggaagctgggggaaggggagcgcggctgggggcgggaggtcgtcggtggcctctgagaacccgcccctgtgcccaggttgccaatgccaatggccctgaggggccgaactaccgctcggagctccacatcttcccggcctcacccggggcctcactcgggggtcccgagggcgcccaccctgcagccgcccctgctgggtgcgtccccagccccagcgccctggcgccaggtgagtggcctcctcgggtcccgggaccagggctggggggcctgaagcatgggtgtgctccccatggggcaggaagagcacccagaaggctagtccgcccccttccccaacacacacgcgcacgcgcgcactcccctcgccagaccacgagccggaggggcgccgcgccccaggtcacacagcgagtcagccaaggccaagaccaacccgcgctgcgaactcgtggcttcctcactgcagtcctccgtgtttcctgggatggggaggggtctcctgtgctggagcaactgtggcttcccattcccgccgtcctctcccctaactccgatcttccctcctccaaccgcgtccgcggaatgggggtggggcgaggtggggttgggggctgagggtggaagaacggaggcgctcccttccccccgcgcccctaggctatgcggagccgctgaagggcgtcccgccagagaagttcaaccacaccgccatctccaagggctaccgctgcccttggcaggagttcgtcagctaccgggactaccagagcgatggccgaagtcacacccccagccccaacgactaccgaaatttcaacaagtaaggcggggcgggcagcccgggggacagaccgggaggggcgggaagccagtcacagccacagcgggagcctgcgtttcctgagcactttctgcaggccaggctctgtccccagcgctttctattcattgactgagctctggctggaacagcgcctccgcacctggtaggtgctcagttaacgtgggagaaatgaagagtgaaggtgccgcacatcttggatattctccaggacatggtgggcgggtgctatgagttttcctgttctgcagatgaagaggctgcggctcaggaatatgaacaacccggccaaagccacaaaacaaggaagcaccggcagggccgggat

SEQ ID NO: 34741 - DNA, 2300 bp, Homo sapien
atggccataagtagttgaaaaggtgtccaacttatttgtcacaatgggaatgcaaaataaaaccgcaattaaataccattacacatccaccagaatggctaaaattcagaaaaccatttacatcaaagggtggcaacactgtggagcaactggaactctcctacattgtggtaggaatgtaaagggaaaaagtctgacagttctttttaaaaccagacatgtttagtaattctgctcctaagtatttatgtattttttatttttttgagacagagctttgatctgtcaccaaggctggagtgcagtaacgccatctcggctcaccgcaacctccgcctcccaggttcaagtgattctcctccctcagcctcccgagtagctggaattacaggcacctgccaccacgctcggctaatttttgtatttttagtagagatggggtttcaccatgttgcccaggctggtctcgaactcctgacatcaggtgatccacccacctcggcctccctaagtgctgggattacaggagtgagccactgcgcccggccttaagtatttattcaagagaaatgaaaacatatattcacaaacaatttgtacaagaatattcatagtagcttttcagtagcaaaagaaaacccaaacaaactggaaacagccttggtgtccatcaatgggaggatggataagtgatggcatagtcatacagtagaattctatcctgcaataaataggaactgtatacaacattatggatgattctcaaacacatcctgctagaaagaagccaaatataaaagagttcacactgcgtgattctatttatatgaagttctaaaggaagcaaaactaatctgtggtaataaaaatcagaatagtagatgcctctggagattggtgggagtgggtattggctaggaagagcaggaggaaattttctggagtgatggtaatgtcctatatcttgacaggggtttgagtcacatggatgtatacatttgtcaaaactcttgaatgacatactcatgcattttagtctatgtaactttgaccttaaaaatccacaaaaaatattgaactctttcatccggacagatggaaaaaagaattgaactctagttaattaaacatggaccccaacttaggatggttcaatttatgatttttcaactctaggatgttgtgaaagcaatacaaccattctgtttttcactttcaggagactagtcaataaattacatgagatattccacactttattataaaataggctttgtgttaggtgattttgctcaataggctaagctaagctgtgatgttcagtaggtgtattaaatacatttttcacttaatgatattttcaacttatcgggatataactctaccataaattgagaagcatctgtatataaatgctgaaatgtttaaaggtgaagtctgttgatgtcttcagtttactctgaaatgcataaaaacagactgatggggctgggcacggtgactcatgcctataatctcagcgcattcagaagctgaggtgagcagatctcttgaggtcaggggtttgagaccagcctggccaatatggtgaaaccccgtattgtaaaaaatacaaaatttgtattgtaaaaaaatacaaaaattagccgggtgtggtagcacacgcctgtaattccagctactcaggaggcagaggcaggagaactgcttgaacctgggaggcggaggttgcagtgagccaagatagcaccactgcactccagcctgagtgacagagtgagattctatctccaaaaaaaaaagattgatggatgcataaagaaatggatagatatgtgataaagccaatatggcaaagtgttaattgtagaatcagttggtgggtatacggtggttcacagtaaaattattctaacttttctgtacatcagaaaatttttacagtaaaatgttaggggcaaaaaaaaaaaaaaagactacagaatctctgagaagagtaacattttctaatcttagaagtgatcttggctgggtgcggtggctcacacctgtaatcccagcactttgggaggccgagatgggtggatcacaaggtcaggcattcaagaccagcctggccaacatggtgaaaccccgtctctactaaaaaaaaagacaaaaattagctgggcatggtggtgtgtgcctgtaatcctagctgctcaggaggctgaggcaggagaattgcttcatcccgggaggtggaagttgtggtgagctgagatcgcaccactgcactccagcctaggcgacagagcaag

SEQ ID NO: 34742 - DNA, 2300 bp, Homo sapien
ttaaaatacatctgaggtctttttcctctttttttgtaccaggcctgcccatccaggttcgtgacgcaggattgtcttttaaagatgacatgccaaagtcagatgtcaacaaagagtactatacacagaatatggagagagaggtatgctgccactttttggataaaaatcctaatgaattgacacagtctgtataatttatcttttgaatttgtcatccccacttagatttctaactctgatggaacacggccagttggcatgctggggaaagccacatctaccagtgacatgctgctcaaactggcccggaccacaccctactacaaaaggaatcgaccccacatttgctccttctgggtgaaaggagagtgtaagagaggagaggaatgtccatacaggcaagagcgagcctcattttcagtatttgctttcagatgatttctcatctaagaagtgggaggtcctaacttaaactgtttctgctttaaaatctaaaggtcatacaactaatgtggtatacctcatgtcttagaactatgaaatttagaagagcatgaataaattgtagtttttacttacaattgagccttggaaactaaattgctatgccatacaatatagatgctgaccctaaacatttctgcctgagaagtaaatcttcactgccatggtttaaatgagttgactctcaatgtatagttgaagtcaaagtaaggtcagacttctaaagggtgtgtatgttttggttaagactgccaagcatctggattaggagttcttaatttgggattggttaaccccaccccctaaaaaataatgtatgtgctttctctggggcgaggttcatagctttaatcagattctcagtggaatacagcaccccaaatgtgttaagaatcattgacctagagaggggtaatcatgtgtccctttctggggggcgggagggggtggatcatgtcaagagtatttatttataaggaaagtttggcatcctagatggcctaatggcttttaggaggctagtaattccttccgtgatacagtaaatctcttggtattaggtctattttggtaattatattttggtagaaaccatagtttctagttcaaaaggcacttcagaatatgtatctaggactttaatatgtagctactcttggaagataatcattttttcaccttcgtttcacctttatgccttgtttttttcttgaatcatagacatgagaagcctacagatccagatgacccccttgctgatcagaatattaaagaccgttattacggaatcaatgatcctgtagctgacaagcttctaaagcgggcttcaacaatgcctcggctggacccaccagaggataaaactatcaccacactatatgttggtggtctaggtgataccattactgagacagatttaaggtttgtgggtataagttagagagttatttttgcctttaactgccctggaataatttatttgcaaaaactgcaagaatgatcattctgtacaaaatacatttttctgtagtctctctattgttagtatcatgctgactggaatttttgtaaaattgtcctttatggtgccacagtaataatgtgcttatgtggctgggcacagtgcctcatgcctgtaatctcaacactttgggaggatctcttgaaccgaggagtttgagaccagcctgagcaacatagtgagaccacatctctactaagaaatcaaaaaaattagccgggtgtggtggcatgtgcctgtagtcccagctgtttgggaggctgaggcaggaggattgcttgagcttgggagatcaaggctgcagtgagctgtgattgcaccactgcactccagcctaagcaacagagtgagaccctgtctcagaaccaaagctcaaagagtgcttatccatcctggcatatggtaataatgacataggattctatttgacctaacagccaagttttaaaggatggcacgcatccaagtatgatgaattatgtagaggagggagagctttgcgatgataaaactcttgtggtttaaattgttggtttttaaagagactggcatttgataaatttgtgttatttttggcttgtattatgcttggctagatgagacttctgggcagatagtaatggaaattacctcttccaaagagataaagtggagaagaaactcctgtaagtttataacctgcccttggtagcctgtctccattaaaccctatctaagtgagctagacaacccccaggggttggcagactttcgctgtaagaggctggatggt

SEQ ID NO: 34743 - DNA, 2300 bp, Homo sapien
gatggtttattccaggaaattcaggtctcacgttactaggaaggctcattcctaggaagtcatgttccatgttgctaggaaggctcattcctagaagtcatgtcccacaaagattaaaaaataaattgggggaggaaagagggaaaaaggaaggaaaggagatgattctgagggctccagacttaaaggagaaaagggtcctatctcttttctcttaatgttaaatgttattttgtttgtggaatgttcactctataatatatatgttgattaagtataccattatgcatgatttgcaatattgattgacctgtggagtgccttgagcctgtgtgtccaagactctgagtgctgagtgagtgggaagtactaaggagaattgctttcttggaaactccatgtagttcgtggcttttgtgattgaaatagcatcagtaaaagtctggcattgtggaaaaacacaaatgtacgtggactctgttatttctgaccttgcactcctcacaaggcatgtgaaattggagtcacagatgtagaaaccaggcagaagacagtctgaagagatgatacttgagaattttccaaatataataaaagacaacaaatcacagatccaagaagctcagataaacccaaggactttcttataaaggaaaagatatacttaccatatgatcaaataatctcactctaaggcatttacacaagcaaaatgaaaaccaatgtccatacaacgatctgtatgtgaatgtttataatggttttatttatattcactaaaatctgggaacaacccaaatatccagcaactggcaagtgaattgtatgatatatccatacaatggaattctactcagtaatacaaaggaagaaattattgatacatgtaataatatggatgaatctcaactacaaaatactaagtgaaaaaatatcagatccaaaaggatatataggattccacttatgtgacattctggaaaaggcaaaactagggacagaacacaaattagtgattgccatggtttgagtatgggataagtggactaactacagaaacaagggaactttggggatgacagacaattccatatttgactgtaagtgaatgtatgtacaaaattcaaaactaaaaaggataaaactttatgtaaattatactttaaatcaacttttttttttaatgaggtgatttaaataaatgtgttaggtagcttgatgacacggtaagtatgaaagtggtaccagaatggcttgaaactcataaaatattggcagagtggttatgagttattccaaaaatcaaataatgcatatgttgattcgtaagacccttgtcatttcagaagctggaaatgaaacagtactaatgaatttgtggcttcaccactttttagctccacaaccaggagctatatcaggagagattaggttaatctctctaaacctgttttcttttctataaaagagggatcatcatacttgcctacagggtagagttaccagataaaatacaggacgattggttaagtgatgtgaatttcaggtcaaccacgaatcctactttaggacgagtaggtaccatatatatttataattaaaaagcgattcgccgttaatctgaaattcaactttagacgttctgtaattcgtgcgtgtgtgtgtgtgcatgtgtgtgtgtgagtgacagagagagagagagagagagagagagagagagagagacagaatcagaatctggcagccctacagagagccctacagagaggttatgcgaataaataagacactggaaccgcaagacgttcgcccagagtttggcataataagcgcctcagtggtagcgaacgctattttaaccccagcctctgatgcattacgtcttcctttattctttcgcccaattgttaaatgaatcaactgtacgtgtggcccttcattccaagcaggcaaaaactcgaaggaagcatccaggtgcattataccaggaccccaattgttaagcttagaaattccaagagcgggcgacgtcatgacgcaaaggccccgccccggaagaagccctagacgcgtaaataagacgccgaccggcgcggcgctagcctcggggcttgacgggattgtggcggtcctctctcccaattcggaagctacagctacctccggacgctctcaagatggcgacctctctgggttccaacacctacaacaggcagaactgggaggatgcggtgagtgtgcctgccggaggaggatggaaggaggaggcgaagccgcgcaccttgcaagctggcaggaca

SEQ ID NO: 34744 - DNA, 2300 bp, Homo sapien
cctaggagcagatgtcacctatgaaactaaattagtgccaggctattgcttggtgaacaagtaatgacttttaggctcaattggtaaagcgtgacataaattgtgagattagcactgtataagctgaaaaggtctatataaatgtaaggtattattaacatcaccatattagaaaatatgctggagggagtatacataggggttatacctgcaagcactagagtcagagagaaaagggttctacctccatctatgaaaccttatagaggagtcactgcacttccctgtgcctcagtttcctgctctgtaaaatagaaataatgatagccacatgctttttggagctgttgtaagaattaaattagacaatgtatgtaaagttttgacacagtgtgctgcacttaataagtgctcaataaatgtttgctaatagtattcagttccctttcttctcaatcaccaactctaacgtcagacaggtaataatacaacactactacaattataaaaatgtagacctggtggcaggcaacagaggctccagtttctgctaggcagttctaggtggtcattttacatactggggagtcccagttagagaaagggagtcaggctagtgggaccaagggatagcaagaagagcagatgcactctaagtctgcctttcttcatggtgcaggacacgtagccctcctgtgcaaataactcacaatcttcctgcactcagctatcacgagacacatgcaagttagctccctgtaaccttggagttctcggtactgcacagcactctgcagcccaagaaccatcggataaaatctccagcaagcctttgtttccttgaagtcagctcctctctggctggtctgcccattgcaacctttcaacgtattttcataccttctctaataaatctgcatttctttacctaaaactgttgataaattattttcccacccatgtaataccagtctcacgtagtcgctgctcacccaagaggcagacctgagccttagtttacacattagaaaaacgtagacgcctaccaacattgttcattcattgatttcattccctccttttcatacttattgaaggtccacaatacagacttagacctaacgctaactatgtactcaaaaacctgcgtttcaaatgagataatgtatgtgaaagttcccaaaggccattggcaagactcagaagacagtgctggtgtgactcctgtcttgcagtccccacggagccctgtccctttgagaccttccatttgtctcctggatgctcgcctgttaagtggggcagaggaggccgtcgtaaataagacaaaagatcaggcttccattctggaagaaaagaataaaaggagctcactgagtccagacctaatggcagtaagggcagtggacgctcacaaaagcgctgggggacgggcccagagttggggagaaaacagggatcccagctgcgcacgcgcgctctggttttcgacgggcgcagagccggacgaggtgggaaacctaacgtcaaagtctacgtaggaagtcgtagggaaggcagcgaggaagacgctggctctcgggtcacgtgatgcgccgggagcgtcatcgcctcctccctccccaagatggcgtccttgctgcagtcggaccgggttctctatctagtccagggagaaaagaaggttcgggccccgctctcgcaactctacttctgccgctattgtagcgaactgcggtcgctggaatgtgtgtctcacgaggtaacagagtcgccctatagcgagtatgtggggtggggggggcgcggcgttcatgctagtcactgccaccggaaggctggagctattttccttccttactgattggttatgtcttccgtcactcgggtttgcctgcgatttaatttgcttctaatctgtcacttggaaaggaggagcagcctcgggtgggactgagcggatcttctggttctagagcggcctctgattggacaaacttgacttagggaccgtgtctgtctgcgatggggcttggtaattgggtggactacggagaaaggtctgggggtgcttagttcaggccacttaaggggcgaaaaactgcctttccaggatttattgcgaggatggagggaggcgcaggcgttctcattcatagttctcccatcctgaaagttctgttcctcttttgtccagaaactgggccctcgtcagactgccttgccctgttcctgactcaggccaaggcctgcagccgggaagaggttggggcggcgtgagttatgtgaaaagcgctcag

SEQ ID NO: 34745 - DNA, 2300 bp, Homo sapien
cagttcaactttagggtctctgtattagcctgagttccccctagaaagcagagctcaaaatgagattctgcaggcaggaagccaggattgagaagtgaatgagggtgagtccagggctgggtagagtgaaaaagcaacacaaggctacattatcaagctggtcaccattgtgcataactaggactcgatcctgctagaaccctgagcctttgaggatggaaagtatctcatttatcgctagttccctccccagtacctggcatgtagcagggacaagataattggccacttaattatttaaaatcagtgctctaaaaagtgtctgttttatgtggattcagctcaagtctccagcctttctgtacctgcaggctctgggacttcattttaacagcatagtccagaaaagggaatttaaactcagtagagactagtttataaaccagaaaaccaacgaattcattaacctaaagaaataattgcaaatgagttggctagtaatatattctctcctaggagcagatgtcacctatgaaactaaattagtgccaggctattgcttggtgaacaagtaatgacttttaggctcaattggtaaagcgtgacataaattgtgagattagcactgtataagctgaaaaggtctatataaatgtaaggtattattaacatcaccatattagaaaatatgctggagggagtatacataggggttatacctgcaagcactagagtcagagagaaaagggttctacctccatctatgaaaccttatagaggagtcactgcacttccctgtgcctcagtttcctgctctgtaaaatagaaataatgatagccacatgctttttggagctgttgtaagaattaaattagacaatgtatgtaaagttttgacacagtgtgctgcacttaataagtgctcaataaatgtttgctaatagtattcagttccctttcttctcaatcaccaactctaacgtcagacaggtaataatacaacactactacaattataaaaatgtagacctggtggcaggcaacagaggctccagtttctgctaggcagttctaggtggtcattttacatactggggagtcccagttagagaaagggagtcaggctagtgggaccaagggatagcaagaagagcagatgcactctaagtctgcctttcttcatggtgcaggacacgtagccctcctgtgcaaataactcacaatcttcctgcactcagctatcacgagacacatgcaagttagctccctgtaaccttggagttctcggtactgcacagcactctgcagcccaagaaccatcggataaaatctccagcaagcctttgtttccttgaagtcagctcctctctggctggtctgcccattgcaacctttcaacgtattttcataccttctctaataaatctgcatttctttacctaaaactgttgataaattattttcccacccatgtaataccagtctcacgtagtcgctgctcacccaagaggcagacctgagccttagtttacacattagaaaaacgtagacgcctaccaacattgttcattcattgatttcattccctccttttcatacttattgaaggtccacaatacagacttagacctaacgctaactatgtactcaaaaacctgcgtttcaaatgagataatgtatgtgaaagttcccaaaggccattggcaagactcagaagacagtgctggtgtgactcctgtcttgcagtccccacggagccctgtccctttgagaccttccatttgtctcctggatgctcgcctgttaagtggggcagaggaggccgtcgtaaataagacaaaagatcaggcttccattctggaagaaaagaataaaaggagctcactgagtccagacctaatggcagtaagggcagtggacgctcacaaaagcgctgggggacgggcccagagttggggagaaaacagggatcccagctgcgcacgcgcgctctggttttcgacgggcgcagagccggacgaggtgggaaacctaacgtcaaagtctacgtaggaagtcgtagggaaggcagcgaggaagacgctggctctcgggtcacgtgatgcgccgggagcgtcatcgcctcctccctccccaagatggcgtccttgctgcagtcggaccgggttctctatctagtccagggagaaaagaaggttcgggccccgctctcgcaactctacttctgccgctattgtagcgaactgcggtcgctggaatgtgtgtctcacgaggtaacagagtcgccctatagcgagtat

SEQ ID NO: 34746 - DNA, 2300 bp, Homo sapien
atagacaaatggacagaaagaagagttaagttcctacagcatatttctgataacaaaagtaccaccaaacttctaaataaagactaaaacacttccaatattgaacactgaaataattgtgaaccatacatacatttaagaaagattagtaaaaacaaggaagagaattatttacctgcttattccagtttagagttcagtggccagagcctgtcccggcagctcagggctcgaggcagtaaccagccctggacaggacgccatcacatcgcagagcagactcacccacacccacaatcgttcacactgggactacatagacacagcagtttgcctaacatgcatatcttcgggatgtgggaggaaactgaccggggtacctggagaaaacccaggaagacatggggaggacatgcaaatgccacacagacggtgatcccagcagggaaacaattttttttcctcatcaacgttataacagaaggatgttattcaggggtctgctgtatatgaataaaatatttactcatcataattgtaccagatgtgaggaataggtctcattttactattttatggagcttgggtgggctactgggtgacagactcgaaatactggttttctgatttctaatacaatatgtcatattattccccaaaagtaaataaatatatttgtacaagtgaaaaatgaaaagaaaatgtctcgtgtagatatgattcttaaagagggtatttgctatggattgcatcctaatgggggcctctttaggcagtggtttgtttgtttgtttgtttgtttgttttttggagacagagtcccactctattgcccaggctggagtgcagtggggcaattcggctcactgcagcctccgcttctgggattcaagtgattctcctgcctcagcctctccagtagctgggattacaggcgcccgccaccacgcctggctaatttttgtgtttttagtagatacagggtttcaccatgttggccaggctggtttcgaactcctgacctcaggtgatctgcccgcctcggcctcccaaagtactgggattacaggcatgagccactgcccctggccaaggccgtcttttgatggcagccaatgtcattagactacaacttcttctgtacaagttccccaaagtatcaggggctctctaagagagtattacttatttctttcaggtcctgatggttttctctttggagtggttgtaatagaggaccaaggaagttgtgagctgttttctggcttttgctgtaacaaaagcttgttgctgaaattgactatttcccccactcctgcatcccaacacagcatccattattcttcccttcagtgctctctttgcaaaatcagtctagcctaggcagcagacttaacatggtatgctcctgtggggattcatactttatttctggcttgcttttagggtcccagggcaagtcgatattaaagagatactaataaattgctaaatggaaagggagactaggactcagctggctccaggcctgagcttctgccttgtcccagagggaagccaatgttcacagcagggcacatggagttaccagttgtccacccaaaggaactctcatccccttcactaaccagggaaaatgtcatattaagattgtcctcctgttgcagtgagccgagatcatgccactgcactccagcctgggcgacagagcgagactccgtctcaaaaaaaaaaaaaaaaaaaaaaaagattgtcctccttcaatctttttttactattaaatgagagctttgtattaaactattcagaattgggttgtccttgtttttaggttcccacactatctcttttgaataaaacatgttgttgggtgacagcccttagggtttttctcaaatcatttctcatgtgaatccccttcatcctcactgtccttcccttaagaaactggcgtgtgataatgatgatttagaggtcatttctgctgacctcatccctgaatcagaggaaacagcatggagtaagttctaagttcggggcccacaccatatcaaatttaggcctggggaaggcagtatggctctttccaaaccctccaaaacactactgggctccaagactgctcaaggtctcactgatagtcaaggcttgtgctcctttttttcagaagagtaagattaaagaaaaccactgtgaattaaaaagtgtgggtgccaacatgggacgggagtcccccctcactccatggatgacatagagggggcagaagattacagaattggcattgtcctgcgtggaag

SEQ ID NO: 34747 - DNA, 2300 bp, Homo sapien
acagagtcccactctattgcccaggctggagtgcagtggggcaattcggctcactgcagcctccgcttctgggattcaagtgattctcctgcctcagcctctccagtagctgggattacaggcgcccgccaccacgcctggctaatttttgtgtttttagtagatacagggtttcaccatgttggccaggctggtttcgaactcctgacctcaggtgatctgcccgcctcggcctcccaaagtactgggattacaggcatgagccactgcccctggccaaggccgtcttttgatggcagccaatgtcattagactacaacttcttctgtacaagttccccaaagtatcaggggctctctaagagagtattacttatttctttcaggtcctgatggttttctctttggagtggttgtaatagaggaccaaggaagttgtgagctgttttctggcttttgctgtaacaaaagcttgttgctgaaattgactatttcccccactcctgcatcccaacacagcatccattattcttcccttcagtgctctctttgcaaaatcagtctagcctaggcagcagacttaacatggtatgctcctgtggggattcatactttatttctggcttgcttttagggtcccagggcaagtcgatattaaagagatactaataaattgctaaatggaaagggagactaggactcagctggctccaggcctgagcttctgccttgtcccagagggaagccaatgttcacagcagggcacatggagttaccagttgtccacccaaaggaactctcatccccttcactaaccagggaaaatgtcatattaagattgtcctcctgttgcagtgagccgagatcatgccactgcactccagcctgggcgacagagcgagactccgtctcaaaaaaaaaaaaaaaaaaaaaaaagattgtcctccttcaatctttttttactattaaatgagagctttgtattaaactattcagaattgggttgtccttgtttttaggttcccacactatctcttttgaataaaacatgttgttgggtgacagcccttagggtttttctcaaatcatttctcatgtgaatccccttcatcctcactgtccttcccttaagaaactggcgtgtgataatgatgatttagaggtcatttctgctgacctcatccctgaatcagaggaaacagcatggagtaagttctaagttcggggcccacaccatatcaaatttaggcctggggaaggcagtatggctctttccaaaccctccaaaacactactgggctccaagactgctcaaggtctcactgatagtcaaggcttgtgctcctttttttcagaagagtaagattaaagaaaaccactgtgaattaaaaagtgtgggtgccaacatgggacgggagtcccccctcactccatggatgacatagagggggcagaagattacagaattggcattgtcctgcgtggaagctgggccacccacagtggcgtgggaagcctctcagatgctggattctaatgggctcttgatcaccttggattgggctatttcattgttatcacaaaataaacaggatgctccaagtcatgttatggcagagaaccaaccagcttcacactggtcctctaaaccaatcctcacaacaggactgggagacaggtgttacctttcccactttacagagaatgaaacagagtggcaaagcctccgaaggaccctacacttcggacatcgcaaagcaggatctgagtcccggctcctctgtccaaacctacttgctaggctttctttcccatgtctactctatagctggaaaggtcgtggaggacacattttaggccaaccctctcggtttacaatccagagaggggagaccctcagaagccaagcgacatgtccacggctacgcggcgagtgtgtggcaacgtggaaggggagcccgagacgccctggtctctcccttctctcgcaggttcctttctccccgaacgcagcccgcaggggacgctggaggaggagctgagctggagttgccggggccccgggaccgggcgttccgggggcggtccccagcagccgcgcattccagagccagcagcgcgtcctggccgctcctgcgctctcccgcctcccggggctcggaggagccggggcacgttccaggagctgcctagggctgaggttccaggcctgggggtcgcttccagctgccagatcccgtgcagtcctggggaccctgagaagcaccgagccatccctgacccaggaactttccgcagact

SEQ ID NO: 34748 - DNA, 2300 bp, Homo sapien
ctgtcaaaatggaccaatcagctctctgtaaaacagaccaatcggctctctgtaaaatggaccaatcagcaggatgtgggtgggccagataagagaataaaagcaggctgcccgaaccagcagtggtaacctgctcaggtccccttccatgctgtggaagctttgtttttttgcactttgcagtaaatcttgctgctgctcattctttgggtccacactgcctttatgagctgtaacactcaccgtgaaggtctgcagcatcactcctgaaacctgtgaaacaacgaaccccccggggagaaacgaacaactccagactcgccgcctgaagagctgtaactctcacttcgaaggtctgcagcttcgctcctgagtcagtgaaaccacgaacccaccggaaggaagaaactctgaacacatccaaacatcagaaggaacaaactccggacacgcagcctttaagaattgtaacactcaccgcgagggtccgtggcttcattcttgaagtcagtgagacgaagaacccaccaattccggtaggagtaggaaatcacatcaccttcttttaatcagtctcaaatacctggccccttgtggaacctgcaagagccaggtttggcgaatgcaatgataagcaattgtctaatcactgccttgaaaaagagcagagcatttgagtatgctgtctcctcctctccctcacttcagttgggcccaacatgacagtcttaatggaagctcgggggtcaaaggctggtggcttacttcacgtatattgcagcatttcagtactgctctgcacgtgtgctcccccgcctgatgaggtaagtgttaaacagggatgatcacagcttcaagtaagcaatgggaattggatgttttatgtcctctggcgccatcttcagcagagaaatatataggtcacttttacttgtctggttttggtcttgaaatatgtactgaaacttgtgaaggagcagacctatattaggatagagtaaaagagggaaagacaaaaacctcttgggcttttcaggagacttggttcattctctgcttttcaagccatctcatggccacatgcctgctttggaggctgactcggaggcacaaccggcctcagggcgttcctcagggaccctacctttcttgctccctgaagaaatgtgcacattgcttgaataaaaacaatcaaagaacactcagtcaagatcgtctgctgcagtcttcgttgagggctggggatgctaaaagtcagatgattcatgtgtaccctgtccatcctaactcacctgctcttctacttccgcagcttactccagtgcccacagatacgacagagtgtcccaagtgcccctcacactctattagctgcatccttaacctctttttgccacaccataagcattgggttttgtttgttttgagatggagtcttgctctgttgccaggctggagtgcaatggcgtgatctcagctcactgcaatatctgcgtccagggttcaagcgattcccctgcctcagcctcctgtattagctgggactacaggcgcacaccaccacgcgcagctaatttttttgtattttagtagagaaggtttcacgatgttggccaggatggtctcaatctcctgacctcgtgatctgctcgcctcggccttccaaagtgctgggattacaggcatgagccacggcgcctggccagcattggggtattttattgaagatggaagccatgaatgttgagaaagcctcagcagatgggaacttgccagaggtgatctctaacatcaaggagactctgaagatagtgtccaggacaccagttaacatcactatggcaggggactctggcaatgggatgtccaccttcatcagtgcccttcgaaacacaggacatgagggtaaggcctcacctcctactgagctggtaaaagctacccaaagatgtgcctcctatttctcttcccacttttcaaatgtggtgttgtgggacctgcctggcacagggtctgccaccacaaccctggagaactacctgatggaaatgcagttcaaccggtatgacttcatcatggttgcatctgcacaattcagcatgaatcatgtgatgcttgccaaaaccgctgaggacatgggaaagaagttctacattgtctggaccaagctagacatggacctcagcacaggtgccctcccagaagtgcagctactgcagatcagagaaaatgtcctggaaaatctccagaaggagcgggtatgtgaatactaattcctgtcttcattaaacattttccat

SEQ ID NO: 34749 - DNA, 2300 bp, Homo sapien
acacaaaacagtgtttaactaaacataagttttaatttattttttctttataatcatgattcatttaacaaacgtttcttaagtacccagtatatgtcatatgcactggctagctgttgaatatcctgagcagatttacgtatagttttcttctggaaggactgcagagaaaaaagagatgtagaaaccaacattaacacatcggcagagatgtaaagagatgtagaaactaacattaacacataaaagttctgtagcagacatgggagcaggtactgttatagcagagaggggggaacaaccagatttctaaggaagtaggtaataggcttaaatgattattgaactttggctcatgagggaagtaggctgaggacaggaagcagcatttgtaaaagtagaaagggcagagtgattttaggaaggctgagaattttgaaactaaaatggagagtgcttcatggaaaggtcgactaaggttggtattgaagtgataaaatataaaagatcatgatgtttacagtatcagggaggcagtttggactgcagtagtcaagaacctagactattgagaataaatcttgcagataagagagttcatcaatcatatatttagtatgtaatcatctttggcaagtatttacttaaccactgtaatcctcagttttcttatatgtacaataggaaaattaacaggattgttatggacaactaactgtttggcagcttgacagagtgaatatggaattggtgtgggatgagagaaagcttgagatttgagatgactgagatgagactgtgttagcaaagaagaaaacaaaggaggcttttaagcaggcaatgttgacatttgaaataatcattttcattctgaaagtggtgtttggtaattatggaatatttggggaaaaagtctgaacaatttatttaaaataatacagatcactattagattagtttctgctattagttaacaactattgtgaggataatggtgacataattaaaatagtcaatgttccctccagaaacattttataactctactcttacccaaattcatttttgatgttatgtcactaatttgttgtggtttcttcattaatgttttctgtacatttttgttgagtttatcatttgggattccttattttttgttgctactgtaattggtatattcattctattactaactattgtatgtatataagaaagctattacatttgggggaagctaagatcattttcctatgaaataaagagattagattaatgatcttctagagctctgacattctatgattctctaaatgtagcttttctttttttaaaaaaaaatgtacttacaaagggcatttctgctctataatcattaattaaaattctcctgtgtcttattttgttacttttatggcctttagtactttttagagtttaaatttttattccatcagaatctattctttttcccaggtattatatagtgtattggtttgctaggattgctgtgacaaagtaccacaaactgggtggcttaaacaatagaaatttagtctcatagttctggaggctagaagtccaaaatcaaggttgttcttcaggactgtgagggatgtatttgtttcatgcctctctccttggcttctttataactatcttcttttttctctttgcattatcttccctctatgcatgtctttgtgttcaaatttccccctttggatgaggacacagatcatattggattcagtttcaccctaaatacctcatatggctaggtatatctgcaatgaccctgtttccaagtcatatcacattttgaggtactgggggttaggacttcaacatataaatattcaggagatacaactcaacccataatatttcttcagcattattcttttcctctttactattcattgtttcaaaacgattcatccaataatccatcttcctcccagttatttggatgctgcctttaaaatgtatgaaattactatatgtattaggtaggcattttatggtttacctctttttttctcctcatatgcctggctctgcttgctaaaaacaggattttattttgtttttcccaaaaactattatacaaaactaggtgtggatgtagttgtgcacattatagcagaaattatgagaatgatcatttcagattgaacaggaatttactattacaggggttagtatcattcaaggatgtggctgtggatttcacccaggaggagtggcagcaacttgacccttctcagaggaccctgtacagggatgtgatgctggagaac

SEQ ID NO: 34750 - DNA, 2300 bp, Homo sapien
tgatattctgaggcttgcccacagctatttgattgagtttggaagcatatcctcctacaattgagccttgaaataattgcagccctggcctatggcttgattgcaacatcacgagagactaaacctgaaccacccagcccagctgttcccattcttgactcacagaaactatgcgacaataaatatttataatttcaagttgctaagttttgggtaatttgttacacagcaatagataactaatacatgtagttttgctagatattgccaaaccctctaaagagggctgtaagtttgctgtcccaccagtaacacatgatatttcccatggcctaacagtgttgccaaacttagaaaatattttataagcaaatagatgggaaatggtattgtactatggctttaattttcttcctttcattatgagggaggcttcctgttccttcaacatcttctttttaaattaggtactacataaggacagctttccgtaattcttaagatgaagaactaaagtttttacaattcctacaaggctctccgcataggaatagtagtagagtctggccttttcctgactctacaacttccactggcatcactccttgagggtgaggtatctgaattaatcattactatatacctttaccactaaactcagtgtctacactgtcttaagctcaagtcaagaaataaatattgatataactgtggaagtctaaatagagatgaagaggttaagtgttcacaaccaactatttcttatcctctttgtcttgaccaacctttagtcagacttctctccttcccgcaggccccttcattttggcttcccctgagttgaaacactgcactaatgcactatgattcaaaacatctccccttaaccgcttattctcagaattccatgacaacagaaacaatttctgtagaaatgccctggttttgccacctgcacacccctatctcatatccttctccctacaaagttcctgctaacccttcttactcttccctataaaaaaaaaaaaagtcattttgttgatattgtgattcttgcagatttgagattggagcattcttcctaatgcaacagtgttctttctgaatacattgtcttcttatctaagtgcatttgttttgacatgagaaataaattgctaaatgtaaaattgctgcctatttcataacatatcaaaaagcatgactcgtgtgaaaattatgattcaaaattgtattcatttatacaaatgaaacattggtctgtgaacatgcattttgcttttttaaagcttgatgtaaggtctaagggttaagataacaattttagtattctctttggctggttcatttttaaaaaatcatgttgttgttgttgtttctgaaatctaaccttctcagtctctcccttatgtctgttccaattttcaagtctcttttctgtctcaatctgtctgtctaccacgctctaccccttagatccccacttctattcctatgtctatttttttctcttcagtctcccgtctctcctcctttctaggctggctcctttgtccccatttcccccattttctctctgattctctgcttctcacttccctctctttgtgcctcagtctcctcttccctgctcttaatttccctttttccttcagtcgacctcttattacttattactgcaatatcaaattcccttataaggattccttaccgttgttattggcataattacagtacacaatgattgttcagcccccagattttgtccctctctcccacagtgaaatctccctggagaggaccgcaccattccacgcttcccctctgagcagtcgaatctcccggcatggggctgtaccattcacaaacacgtccatggtaccatctaaaattcctcccctttcgtcagaagcatgcttccaatagaggaaggttcactccaacttcctcttcaatcccccttgtaaaatctttctgcaaaagtgtgctccttaatgctcctttcgcaggcctcctttccgtcgccttcccctcccttcgctgccgctgtggtacagcccattctcgggctcagcactgggcgaatcctccgctagtacgaagacgaccgggctctcaagatggcggccccatgcggaaacagctccagggagcagccatgttgcttcctgaacaaagcctctgaagatgcggaacgggcaaaaccgcccagtacggaacggcgcagcctcgggagcccggtgtggtgctcgcggacaggaagcaggagagtttgccaatagggatgtgacagcggt

SEQ ID NO: 34751 - DNA, 2300 bp, Homo sapien
tattagaacaggcctcactttgcaatctctgcaggtcacagactactctcaagttgaaaaccttcagaagttttctcaaaccacttgtcccctccataactcgtgccttcacagaagaaaacatccttcaaataaatatcaaaacaaatattaaaggaatgggatcattattgtcaattctttctagcccaaataaaccaggaataccctgtggttgaataagttaggaagctgagttaggatgaatcagttcagccctgtcaccacagggaactgttggggtatgtatcatcagtaagaatgtgttagaaagtatttgcaggatttggctttgtgttaggtgattttagggagtggttaaggaagtgggtcttactctggattgaatgctattaggaaacagagtaattcagtgacttttattttttaaaaaatctgggaatttcaataaattttatttagaaggaggaaagactagactgaagctaataagtaaaagtaatagctaaagaagtagcagacgggaggggagagagggatgattggtattttgtggattgaacaatattggtgtttcgtcattacatgatgtcagagtaatcttgtttttgtcttgatctatcctggtcacatagcggccttatgtgatgtttatgttcgtgtaattgtttatattaagtaagagagttgtgagtgccagacaggttcttagatatcagagcattctaaggcatattctctttcttattatgaaaggtgtagtttcagtcttgcttattcgtaagtttactgaaatagtttatgttctatttaacaaatatttattggacatctgctatttactctatggagggctgggtgttcagacattaacatgactatttgattgtttccttcctgatttattttgacaaaccctgggatggcacaaatgaaacaatctctctatcatgatattcccccgttgctctgaatgagttcagctctgtctgcatgatctatcccagactgaaaagagtttaccagctaagtactttcctgcaatgtagtatattcccgtttattgttccaacctgtcagtaattttttatacaggcaactgccttgttgaaaatcagcaataaaaatttaaaccaaagaaatcttaaaatcagcaataaaaatttaaaccaaagaaatcttaaaatcagcaattttaatccacaaatattgatttatcaagagaatttgctggtttggagtaaaatataaaagagcttgtcttactcagtttgggctgctgtaacagaatgccacagatggaggaccttaaacagcaaacatttatttctcacatttctggaggcagagaagttcaagatcaaggtgccagcaggtctagtgtttgctgatagcactcttcctgttttgtaaacttctcattgtatcctcacaaggccaagagacaaatcatctctctgatatttcctgttgtaagggcattaatcccatttattagggctctcatttcatgacctaattacctcccaaagaccccacttcccaatacaatcacattagaattgcaacatttgaattttggagggacaaacattcagtccataacagagctcttagaattttgtaggctgctttggtttaggaaataagggaatacactccttaattttcctcttggtcactcccattcttgtctccagggaacatctgcagttaaatatatatttctccatgatatccatgattattgtcttaagatagttctacaaatagaaattcaaatagaattgctggttcaaaggggaacaattaggtgtttgtaaatccacaggaaacatatctgcatttatctaattaaaaatacaccttgccctatgtgatcaaattatacacctagttctgtatgatcatatcatagtcacaaaaggactaaaggtggatacctccttcacatggtgtttgctataagggtcaaacgaccttctcccatcacgaccttctcccacaggatggcctatcagctacctgacttctggtggtggttgtttagagactggtgaatgttagttctggcccataaaaactccattctttcttccagacctgattcctcagacctctgccctatcggaagggaagcagaaaatgatcaggtctcaggtgagctgcttattttgtacttggttaccatgcaatcaaatggaaaaatacagaaagctaaaaattaggattaagaagatgtagagagaacaaatgataaagatttggaaacagcttctacgtaatatgccaattatgtg

SEQ ID NO: 34752 - DNA, 2300 bp, Homo sapien
tttaggtcactgagttttcttgacacggtagctaactgacacactttcatttaaagtgtgtctcataaaaaatgatatagattttgtattaatcatcaagtatgacaatctttgtcttaataggattttaatcactttacatataatgtagacactaatatagttgcattgaaccataatcttgccatttttttgtttgttccaacatttattttttattcttccttttttgcctcttttgaagcgatgaaatacaggcataactccttttactgtgcctcactttattttgcttggcagaggttgcaatttttgcaaattgaaggcctgaggcaaccctgcattgaagtttattggcaccatttttccaatagcatgtgctcacttaagtctctgtgccatgttttggtaattctcacaatattgtacacttttttattattattgtatctgttatgataatctgtgatcagtgatctttgatgttactattgcgattgctttgtggtgctacaaaccacacttcattggtgaattctgccaaacatttaaagaacaccaagccttctcaaacttttccaaaaagtttaagaggaggaaacacttcctaactcattctatgaggtatagcattactctgttaccaaagccaaagacactataagaaaacttgatatactgctgaaagctggatttgctatatactgtaagggaaaggaaaaatgttttgtttactggaagtacttgtttgtctcatcctgcacttgtacaattcagtctccgtaagtgctttcacatccccttctctattatgcccaatcctaaattcttttttgcatactgtgtagtatgctgttttaattatttacctccctaatcagttgtatgtatgtttatagccgtcattaaaatgtcttttcctggatgtctggatcatgctggtgttggtactataatcatacttatttttattgtctgaactcttagaaaacattgtcataatatttacaatgttaaaaattaaactagcacaataattggtagaaagcagcatagttaatccaacttaaacactcctgaatgcttatgatggcaatgcacttaagtcatacacttaaatcccaacattccaaagtgacccaacaatgggtaatccattattgtaaattgcaaattatggtcgccaacctcagggatgggggtaaaatagcaatagcgcctaggaaaaggcacagaatctatgccatattgacttgacaataataaccatccctttcaaccctactttttgggccacctagtgggttttgtatctttcgtcaaatttttcccactcatccagggaaactgggacttctgaagcctcagggagggacttcccgggacacagcggacttttgctgctaatcctataatagtttcaggcaaagagggaccgttggtcaccttacgcagtctccctctacattccatcagcgtcctccttttcccaggctccccacttccctctttctcccctctccttcgtcgtccccttgcctctgtccccagtctctcactcttggtcccttagtttcccattctctgttcttaggtcttgcgtctttttgtcccttagtctttctcatttccgcactttctcctttattttgtacgtccatctcctcttccctgtctcaattttcctcctttttttaaagtttgcccctgcaacttattaccgcgcagtattgtaatatctccctcggagtgtttcttatcattactcttaataaaagttcagtattactgttatcccctcccgaagtgaccgttcccaccatggtggccccagtctcccacagaggaaacgccccggagaagaacgtaccatttacaaacacgtttaattggaatcgccaacgaaaatattgtaccattctaaattcttcgcctttcaacataagcatccttaaatggaggacagtagcactccaacttcttctccaatcctgtgaaatctgtctgcaaaagtgtggaccttactgctcgtgtagtaggcctccttgccgtcgtcttcccctcccttcgcagtcactgtggtacagtccacattccggctcagcgcctggcgagtcctccgcttgtactgagacgcctgggatctcaaaatggcggccccgtgcggaaacagcgtctgggagcagtcatgttgcctcctgaacaaagccgctgaagatgaagaatgggcaaaatcgccccatacggaacagcgcagcctcgggagcccgttacctggctcgcgaacacgaagcgggaga

SEQ ID NO: 34753 - DNA, 2300 bp, Homo sapien
actcctgttttgtatggctcaggctttccttatactcttaggaatgaaaagccacagacaccaccactgagagactgtcaaagatccttgttaaataggtggacaactgagatcagagaaggaaagtaattttattactttccgtagcaatccaggggtagcatctcaggtctctggctccttcttgtctcccctaaagaaatagaccaccagggctgggattaaggtgagacaagtgagacatagagggtgcaaaatgtagagagatgcccgctgccaggtgccagcctgcacttgtgtgaccctaggtgccttcccttccctcaccctgctggtatctgctggaaacacctttgagagcagggactttggcttttagacaactctttagcatctctcatggtgttaacatgttgctaggtgcctattttgagggtcactagatgcctactgatactaatgaacaatggatttctgacaaactgatgtgcacacagatgtttatattttagggtaaatacgaaccttaaaagacaacagaacaacatggagagggcctgagactgagtctagagacctggattctggttccctccctgccatcagttggttatgggaacttggataaattgctcctcatctctaggcttcagggaaatgaggtggttgaataaaacgtattgagcacttactgtgtgtcagccattgttcatatgctcccaggctttaactcagctaaagacttcctggcctctgtggttccttccacttcaacaggctgtggtttgaggtgggaagacttcgtagagaatgcaaaacttgagagacatcttccaaattcccagggggatgttaatacctttaatcatagtaaaggtatggtttctcaaggcatttcttggtcagaagaaagttccagaaggcacttaatcctaggactcacactaccaaggctacagccaggccaactgcctcacaataaccttagaacatgtctgaagacagattttcagcttctgcccctagagattctaatgcagtgattccaaagtggggtccaggaatctgtattaaaggcttcccagttgactctggtggtcagagagatttgagactgattccatcacattccccatctgtgaacgggatcatacctagacagcccagccctagaactgcctggtctgatcctaagtgttccatggagattttgtttttttaatgtaatgaatgattaagtcagcaaatactttacatctcttgtgtgctaggccctgtgccaggtggtgattatgggccctattctcaaaggactcctggtctccgtctgtcacttactttagaaacaagtcatctagccagagccagaagggcactggagatcactaatcaatcccatcattacatagctgaggaaactgaggcccagagagtaactgcaacatgttaaagactacacagggagcaaatttattttctgcttctaagccaggtggtttggccacagataggccaagaagaatacgaacagacaagccttgctgggtttcccactcagtttattactattagaccattccctttttccccactcacatttctgcgcatttccatggtcttcatagaatctaagcctaaaaatagagttttccttgagtctttgggtcttcatttctgaagactctcatgtcacagaaaactttaattaaataaatcgttatgcttttctcttgctaacctttttctacaggcatgtcagctgtgatccttatgatggggaggaaaggcaccccaccttctctgtccctacagtcctaatgccctacccagaatggggttttcaaaatcccaggacacccactctttgtttcttaagcactaaacctatatatagtaaatgtttctggaagtttaacttcagctcttgctgaaattttaaaccctcaatttccagaggaccatcgccaggtgtttttaaaacctcgataggaataagaaatgcttcccagaatggagacttccatcagttctagggagctattagcccccttgccctggctgtaatggagaccgctgtgtctgcctcctttcgcactttggagccaaaagaggaagggaccgcctcccacgtccacagggacctgacttccacctctctgcccagatttgcttatgtcactgtcgccccgggacggggaggtggggagctgagggcaagtcgcgcccgcccctgaaatcccagccgcctagcgattggctgcaagggtctcggcttggccgcggattggtcacacccgagg

SEQ ID NO: 34754 - DNA, 2300 bp, Homo sapien
cccaggtagtaagtggctgagcagggattggaatcccattagctcaattcatagcctgtgtttatgacagtggtgttttctgcaaggcagtgagaaaaatcatgtcattgtaaagacaacttggtacagtggaccaagcacacaggactgggagccaaggccctggattccaaggccctggttgtgtcactcaatgtgtgtggcctagagtaagtccttttctagacagaggactcagtttacctatctgtcaaataggggtttgttatctatgggctccatggtctctaacagggtggaatgtcctgaagacaaaccaagacttcaaagaatggaagaggtgggggcagtcacgactttataaataaatgagttttctcacaaattggaactgttaagaaaaaggatccagaactaggaaatcagacaaaaagatgactgagtgccatttttttatgtcaagcttgagaattcccagcggacactttgagaaatgaaactgtctgcccggctaaggccagacatgctataaaaacagctgaaatagtgtggaaacaaaatgcaagtaattagagaccagccatttttaggtagattttagttttcagtgggtagagggtgggggtggagaagatgtgggttgggaataggaagagagccctgcaggaagagaattgggaagtacaggcacaaagagcaggaagaaaactggcaggtgcggacctgatgggtggagacgatgcctgggagctgctatgtaaaccagggccaggattcccagtttctctgtaggatcccccagtggtgagactcagtggtgctttggagtttgcatcgcttcctccctccctcccttctgaatcaaggcataagtgtaattcttttcataattaaactagaatgaatatcgttttgaagatctgataacaccgttgaattaactgaaggaaccctaggaggttacaaagccttataggagaatccccagattaggtatataatttgggcaagtatctgtgtgtgtattattgcgaagtcacagttgattgatgggtctctcttctgtaaaatgagggtgtgtattaaacagttccccaaatcctttcccctaattctttttgaggatgagggcctgtcaatgactaagttttcaacagtaccagtgaaatgggtcttttgcaataggtttttcataaagctatatttagtttaaagagctgttctttattccaaggttagaccttccactttttggaattaaaatttagctttctttctttttaaaaataaaaggataagcttttaaaaagctttcctacccttaaagcaagtttatgttccttaccggtctaggaaatcccagtctgttgggattatctagcccacatataagtaggtagggtggaaggcggcctctggatttgcccacccgggtttgaatcttgattcagccccttactgaggtcatctaacctttttgtgactcaaatattatttaagaaaaggtagtaaaacccacctccctagcgtgattgtgcgaagaaaataatgcacgcaaagcatctacaatgtctggagcaaagcgtttacgatgtctgggaatcctttacaatgtctggagcaaaaaatgttcgcggtagagtctttatgggtcttttcagctcggaatttctatagctttgttaagaagagtcctggagtgccctggacggaactctgggggcctgagctccagctctggcttagggccaaatgcttacgtgccttttggcaggtcccctccctgttctggcctgtgttcccctcggcacaaggaaggggctgggtggtctctgtggctcgcctccgctctgaaattccggctttcaaggtggccccaggccttcgacaggggcttccggcgctgggagtgcggcaaggcgccgcgcaggcccgggacggtggccccagggaagtcgctcctagaggggaaggccgccgaagggacgagagacaccgcgggcccccggaaccgcaggcagccggtgtttacctcgctcggtcccaccccaggcggccgcgggcccgcccggagcgcgcggcgcgattgggcgagtggcctgccagtctccggggactttcccaggggtggggcggcccggccaggcccccggcacttcctcgtcctcggcccgggtgccctgcccccgtccaggagccctaggagtgctacggggggccggagccttgcccgggccgctgccccgtccctggattcggggctggacgcagcaagcggggcgctgtgtccccaagctccc

SEQ ID NO: 34755 - DNA, 2300 bp, Homo sapien
cttgccacgtgtggcaatcgagctcttgaaaagtggcagtgccactgaggggctgagtgtggtgtgggaaagagcactggactaggagtcaggaagtccctctatttactcacttggaaatttatttcccctgtctggcctccacttccttgtctgtaaagtgaggccattgggctaggagatttagcatccccgtgtaatcctgatctgaagggcacagatgcagttggatgggattcaatggacccttctccgcccccacctcttattgctcctctcctcctgcagaggctgcatgtggccccttgtgacctggacctgtttatttctccaggtctacctctgtcacttcccccagtctgcctcaaatcccttggtctactcagactgaacagttcatggaatatattctctcttctctttctgttctcagaatatattctctattctctttgaatattctattccctttgtggagaacactcttccttatcttctttcttggctactttcaggtctcagtttaggtgtcacttcctccaggaagacttcccagatccccatatcctgaccagatactcttttgtccaggctcccaaagccccctgcatttctcctgccaaaacacatctttcctgtactttattgtaatctcctcctcatttacctgtagcccccagagcagtgctatccaatagaactttctataataatggaaatgtcatacatgcatgtagtctaatgtagtaggtgcatgtggctgttgagcactcgaaatgcagcttgtgctactgaggaattgaactgttaattctatttaattttaatctacttaatttatatttaaatagccccatatggctcctcagagtctgtgaactctgagaaggcaggaagcgggtctgattagtccactcttgtatcctcagtggtccataaatgttaccataagaatgaggaaactctggaaccaggaatgatgaagaaaggccacacctcatccaaacggccctcttcatcccctccccaggcatattttcaggggataaggaacaaagactttatgtttgtaaagcagtcagtagtttacaaaggatgtctacaaactattatttttatttctaaatttattatcatttttgagacagggtctcactctgttgcccaggctggagtgcagtggcgccataatggttcactgcagcctcaacctcctgggctcaagcaattctcccacctcagcctcccgagtagctgggactacaggcaagtgccaccacacccagctagtttttgtattttttgtggagacagtgtttttaccatgttgcacaggctggtctcaaactcctaggcttaagcctgcctcaggcctcacatagtgccaagattaataggcgtgagccacggtgccggcccatcattttattttaattaccattaaatggcaggagtcaggcaaagcaggactcattaagcaggagatcactagggctcaggatgatgaggtgacttgttcaggatctccagctggtcagtgcagaattccttgggctgcggtttctaaggccttacttgacatccaaatgtgactcggcatgcaccaaggaaggagtgggccccttcttcactatggatggagaagcctcagagagtaagtggcaacaggtaggataggaacggggtgggaggatgtgggctgggcatctggcagtttcctcagggccctgagcactggaatcccccaccttaggcgaaggaggaaatggaggtcttcaggacaatctagggaggccaggccaggttgccccagcccattctcgggtgccttttcccagcccagctgaggaagcatcaggcttccaactcttctccccagatcccccccaaccccaactccctggaattcacagcacgggacagccagtctgggaagtgacaggtggaggctgacaaataagggccctctgctctgccagcgggcaggatggggcctcagctgggccttgcggggctgcctggtggcggctcctccatctcggggaattcccctcctgcctaatagtcagctcagcccagccctccttcctgcagaagcacagtgagccgaggagccttcatagggacagccgcccctggtgcacacaccctcgtattctcctgcccttccccaggtgagtgactagatgggggccggtgggccaggacaggggaaaggacccaccgcacaagggtgctggggcaagcagacaccctcagctctgtgccaagagccacctggcctcccatgtcctgccagc

SEQ ID NO: 34756 - DNA, 2300 bp, Homo sapien
tgaggcatgagaatctgcctttcttccaagttttcaagtgatgctaatgttgttggtccggaaaccacactttgagaaccactgctcaaaatctttccaaaatctgaatctttagggtggagcctaaaccctgagttttaaacaagctttttgggtgattccaatgcatttaaaaatttgaggccccgtgccttgggttcatgaggagttaattacctttgaatcctctcctgaccttggttagctgtaagcaccttagaaggaagagagttgcaaccaattgagagccaggcctaaggatgggccagaggaggaagcatggggaaggggagcaaaggtgtcgtctgagcatgaccctggggttgacaatgatctgcagacccatgcagggatagacgaggtggggagatgggggaggccggtccagagtctgggttcacagcctctgaccacgttccccgcatctctctgctcttcctaccagttcaaagtgtcaagaacaagcctctcttctttgccgacaaactttacaaatccatgaaggtaagaaaacatgctggcgttcctttcccttcaagcactgacttacatacacacacaaacacacagatgtgcaccatcccccagatcaggattcctggcagctgtttcttcccatttgacatttattagcatctgcccttgtctggctctaggatggtatttcccagttgggggtgatttcccccgccttcccccgccccggaggatatttggcaatatccagacacatttttggtcatcacaacttggagattgttgctaccagcatctggtggggacagaacagggatgctgttaaacaacctcagtgcaaaggataagcttgcgcaacaaagaattatccagccccaaatgccaaggttgagaaatgtgctctggaggcacacagggctgggtaggacacagtctctgccctctcagagctcacaatctatccggggacacagggtctcctaggacaaatagtcatcaaaggtcacaagcgctcccctctgagtctagtcctgcccttctgggagagcccaagccacactggccaccctctcagccactggagtctcaactgcagatagcctgggcaggtgggagggtaggaaggaacctgagaccctcaccctacagtctccaaatgtgacagccattcattgagcactcacgatgtgtcaagcctgtgccaagggcttcatctctctgaccacagctgaccctcatggcagtcctgtgaaattgtggtagcatcctcatttgatagaggaggaaactcaggcctaggtagggtaaaacgttgcccacatttacatagctcctaagaggcagagctgggactcgaacctagctctgactcctaggctggtgcttgtcgctccctgggggcagaggcagctctggctgcccacacattccatgccctgtgcctgctccttgggcccggtggtagtttcctagggctggtgtaacacattccagaaattgggtgacaaaagaaatttattctcatagttctggaggccaaaagcccaaaatcaaggtgtcgcctgggttgggtcctcctggaggctctgggggagaagcactcccctgcctctcctagcttctggtggttgccagaagtccttggtgtttcctggctgtgaatgcatcactccggtctctgcctctgtcctcacctagccacttttctgtgtgtatgtctgtgccctccctcttctaaagatattggttattggtttaggcttcaatctaattcagtatgccttcatcttaactaattacatgtgcaaataccttatttccaaattacatcatgttctgagtttccaggtggacatggggacactattcaacccacacacatcttttttgcgtgtcagtctggccagtcctgggcacagagggattttggtcaggactgtttgcagaagacagaggtggaacatccgccctgtttttggaaggaacaagggagaaaggcagatgggataccactgtttcttgcctgactgggctctatctctccttccgcctgtgtctccctcctgcctggctccaccagggtgctggcacagatgagaagactctgaccaggatcatggtatcccgcagtgagattgacctgctcaacatccggagggaattcattgagaaatatgacaagtctctccaccaagccattgaggtaaggggaggggctagaggttagcaggaagcgggtgagtgtcagatccctaatataagattagaagtctttattcccatgg

SEQ ID NO: 34757 - DNA, 2300 bp, Homo sapien
catggctgatgggaatataaaatgttgcagccactctgaaaaaatgtttggcagttcctcaaaaacttaaatgtagaattactatatgacccagcagtttcattcctaggtaaatacacaacgacaattgaaaacaggtactcaaataagtatttgtatgcaaatgttcattagcagcactattcacaatcagcaaaagggggaaacaatgcactatccatcaacagatggatggataaacaaattatagtgtacttatacaacggaaaattattcagccattaaaaggaatggagtgctggaccggacacggtggcgcatgcctgtaatcccagcactttgggaggcaaaggcgggtggatcacctgaggtcaggagttcgagaccagcctaactaacatggtaaaaccccatctctactaaatacaaaaataaattagccacacgtggtggtgcatgcctgtaatcccagctgctcggaaggctgaggcaggagaattccttgaatctgagaggtggaggttgcagtgagccgagatcacgccattgcactccagccttggcaacaagagcaaaactccaactgaaactaaaaaaaaaaaggaatggagtgctgatacatgctacagtgtggatgaacttcaaaaacatgccacatgaggccaggcacggtggctcacgcctgtaatcccagcactttgggaggccgaggcaggtggatcacctgaggtcgggagttcaagaccaacctgaccaacatggaaaaaccccgtctctactaaaaatacagaattagctgggtgtggtggcgcatgcctgtaatcccaactactcgggaggctgaggcaggagaattgcttgaacccaggaggcagaagttgtggtgagcagagatcacgccactgcactccagcctgggcgacaagagtgaaaaaacaacaacaaaaacaaacaaacaaaatgccacatgaaagaagtcagacaagaagggttgcatctcatgtgattccatgtatatgaaatatccagaataggcacatccgcagaagcagaaagcaaattggtggttgccagagacgaggggtaagggaaagttaggagtgactgctcagtgggtatactgttttatttttccgtgaagagaatattttggaactagatagaggtggtggatacacaacattgtgtctgtacaaaatgccactgaattgttgactttaaaatggttaattttatgttgtgtggatttcatctacccaaaaataataccctttctttgctcaatatcctgcaatggatccccagttgactcagagtaaaagacagcgtgccttcaagggccccggaggtcccacctgattgggtccctcttatctctcctctccctcccactcactccattccagccacactggcccccctgctgatcctcggaggcgccaggtggcctcctgctaggagcatttgctccagcagtttcctctgcctggaacactttccgcaggtatctgtccaattcttctaacttcctcatcttctccttaccaatcccctggggacaataattctcagtttcctctgtattctcagtttatcaatttttcctgttctagcgctggattacaactgctggtctccctgcctgccttccctgcttcccagagcacgaagaagcttgcctccgcaacccactatttgtgtgaccttggtccaggaactggactgggctctcctcctgaaagtgggtaaataatgtcaccgacctaatgaggctgttgaggcatggaatctgatcaggcagataaagtgcccctggcaaacctcaattttctgtttctcaacaaagctttggcgacttataagaatttgcgggaaagtgtccagaacccggagtcaggagccctgacttctagccctgaagggccgcgtgaccttggccaaagcccctaatccttctcagtctcagatccgggggctggaaactgaggaggttctcccggcaagcccctcgggctagtgacattctaagattccaagagctaaggagctagaggggtggggtggaggagggaggcgggcgcgccggattggcctctgcgcgccacgtgtccggctcggagcccacggctgtcctcccggtccgccccgcgctgcggttgctgctgggctaacgggctccgatccagcgagcgctgcgtcctcgagtccctgcgcccgtgcgtccgtctgcgacccgaggcctccgctgcgcggtgagtgggctgaggctggagaggggagtcgctctgggaaccccttcc

SEQ ID NO: 34758 - DNA, 2300 bp, Homo sapien
cccaaggcagccaaaactgattacgtgtgcctaggagtgaggggctgaggtgattgccttctgtgtatccaggccccttgatgtagtaaccaggctattagctcaagaggactgagtgtgaaattgagttgggcctatttttccagggactgctggggagatcttggagaggcatgggccaagtgccacagtgtgattagattcatgggtggatgcacagggacctgtggaaggatgcagggaagcatctgactcaatgtggctgtgcaggaaagatttcctagagggagtgagatctaagctggagtctgaaggatgggttggaattctttggtaaagaagggtaggaagggtgcctcaggcagaaaaaaagcaatgtgttcaaagacatggaggaaaaaggaaaaatatggaatacctgaggaaccgaaagatgtccaggatgcctggggtatgagtttcagtgggagaggggactaaggctaagaacgtgagcaagggccagagtggaagccagtgagccaccttaaggggttgtgctctagcctaacggtagtggtcacggttcaagtagagaaagttcttggcagtgaaacagtttggagataagaatgtaccctgcagctgggggactattgtgatgtttggctgcaggagaggatgtatagaaggagcagtgagaggtgagcttggaaaaattcattgagcctggtttggatgtgttttgaatgccaggctaacaaccatcttttatagcaggacattgttccctgcagtatggggagccgttaaaggcattaaagcaagaggtggggttggtatgttcctttcatctcctctccttctccctctccttctccttctccctccctctccttctccttctctgtccccctcccttcccctccctatctccctccccctcccgtccccctcccctcccctcccgtcttcttttctttcctcttttcttttctcttctttctttctcttcccagcatgcaattctgcactgtaagggctggtagatctcaagcagtggtcgaagtatgttgatgttgcattgtcatgtagagtagccaaagacagattgaagaacccaaaaccgttctccctctgggatgtggcgaagttcacctacagcatttatgaggcaggctttgattgtctccatcccactccctgctccaggagaccatagacagactgacctcacagctggaggctttccaggccaaaatgaagagggtggaggagtccattctgagccgaaactataagaaacatatccaggtaggtggcagcaccctgggcgcttttcctccttgaatctccagggaggtcagggccgggcaacaggaaagaccagcccctcttcaaggacaagactcagacctggcactcttacctacacaagggcctggaaataaaagagttcccatttcaccgatgggaaaattaaggcccagagagcagcatctggaatagtaaagtgctcacgttctggattcagagagaactaggtgcacatagcaaacctgccacttagcacaagtgactcaacctgtccgaaccacagtctcctcatctgtggtgctagcacatgtctcaaaaggtgatattcggatacagggagataaagcatattaaacacttaacatgggctgagagaggaaggtgggtgacttgtgaaagtccaacaatgagttgctggcagaatggggaggagggaggtagcctactggcctaatgaggtcactctgtccctgtctaggattatgggagccccagccagttctgggagcaggagctggagagcttacactttgtcatcgagatgaagaatgagcgtattcatgagctggacaggcggctgatcctcatggaaacagtggtctgtgactgggagtggctgggggatgcagcctcaggctcccgctttctgggtgtttcctttgtaaagcatgcagaggggaggtggtttgaggaggtcccagcctagttcactccagctttgacctgccacctgtgctgaccactgagcatggtctgtggccaggctgggtcaagcagtggctccttatcatctgagtcctgtgccttttgaggctactgatgttgctgtagcttgggtgacactagggcaggtagcattgagaacacgggaggacagaagcctcagaaaccctagggttgaatctaagcagagattatgttgctgtagaagtctccctggcctcctgtgtgccttacaacttataattaaaaaaataaaactaaggagttaacaaaaagctgct

SEQ ID NO: 34759 - DNA, 2300 bp, Homo sapien
ggctcatgcctgtaatcccagcactttgggaggccaaggtgggtggatcatgaggtcaggagatcgagaccatcctggccaacacggtgaaactccatctctactaaaaatacaaaaaattagccgggcgtggtggcgggcgcctgtagtcccagctactcgagaggctgaggcaggagaatggcgtgaacccaggaggcggagcttgcagtgagctgagattgcgccactgcactccagcctgggtgacagagcgagactccatctaaaataataataataataataatctacaaatagtttttttcagcatcctcatcagcccatatcaactctcccattaaaaaatattactcatttggccaggtacagtggctcaggcctctaatcccagcactttgggatgccaaggtgggcagatcacttgaggccaggagttaaaaccagcctggccaacatggcgaaaccccatctctactaaaaatacaaaaattagccaggtgtggtggcacatgcctgtagtctcagccactctggaggctgaggatcacttgaacccaggaggtggaggttgcagtgagccagaatcacgcaattgcactccagcctgggcaacagagcaagactctgtctcaaaaagtaaaaaaaggtcgagtgcggtggctcacacctgtaatcccagcactttgggaggctgaggcgggtagatcacaaggtcaggagattgagaccatcctggctaacacagtgccaccccatctctactaaaaatacaagaaattagccgggcatggtggcatgcacctgtagtcccagctactcaggaggctgaggcaggagaatcacttgaacccaggaggtggaggttacagtgagccgagatcgtgccactgtactccaggctgagaggtggaggttgcagtgagccgagatcacaccaccgcactccagcctgggcgacagagcaagactcagtctcaaaataaatacattaattagttaattaattaaattttttaaaaattactcatttatgaaatctgggagccactgacactgctttgtgatgcagaaagcccttttgtattacttattcctcttagaggtttgggactttcacccccacccgacaacctctggggaggggagagggactagaatgtcaaattgatcaccaatggtcaatagtttaatcaatcatgcctacataatgaagcctccatgaaaaacccgagaggattgggtttggagagcttccgcatagctgaacacatggaggttcctggatggtagcccccaaggagggcatggaagctccctccctttctcccataccttgtcctatgcagctcatcatctgcatccttcgtactatcctttacaataaaccagtcattataagtaagtgttttcccaagttctgtgagccactccagcaaattaatcaaacccaaagaggaggtcaaggaaacctcaacttgaagcccatctgtcaaaagttctggaggcccagacttgtgacactatctccaggtagatagtgtcagaattgaattagaggacacccagctgatgtctgctgcagcactgatggggagagcccctcccacacacacagaagtcttcttctgtgtggatgattattgtggtgtgagagcagagaaaaaatggtttgagttttctccaagcaaaaatcatctccgaattgggggttgggaggtttctagggcacctcaagtgcatagctggagtgagggtaatagcaggtccggccagatcccgggagaagaaagaggtggtctgagaggcccccagggatggcagcaggagccagactgcaaggatctagggacaggtcaagcagtgtcaaactcccctgagggtttccctgacagggatgagaagtcctgttctggggcccctcccccggtagagggtctgctgcctggggctgcgaggcagcccaatgcgcaggcgtggggcagggtctggtgtaactgaaggtcctgccttgcctttggaagagtcccactatagcagcccgtcctcgcattgacctcccaccctctacccacgccttgctgttgtctcatttcttccagaagcgccaagaaccagaaccagaacagccacccagaccagagccccatgaattaggtcccctcaatggggacacaggtgagtagccagccccacaaaggccccaactgccatctgtgaggttcctaccttataatcaacacagatgatacagctgctgaaatatctcatgagatctcagataggttaccttaatagga

SEQ ID NO: 34760 - DNA, 2300 bp, Homo sapien
gaagactgaggctgcagtgagccatgatcactccaccgccctccagcctgggtgatattgcaagatcctgtctcaaaaaaaaaaaaactgttttaaaatttcaaaatctcaccaatacagtggtagtcactcaatttttttttttaatgaaaatgagtttgttatgttttgtaacacaaaaaattcatcttcatcagtatttttgctggttatgtggcattctatttttatggatatagcataatgtatttaaccaaccttcttttcttggctgtttaggttgttttgggttctttgtttttaatcatgagcactgttccaataaacattgttaattttagtataatttaagtatatcctgtttcttcagtacctgtggagcacgtcctatggcaggggttctcaaactttagcccaggccagacatgagtggagtgcttatgaagccatagattcctaagccccatccccagagtttaggccaggggtggggcccgagaatttgcatttccaacaaaggcggctggtagtgctgacactgctgatttgggaatcacactttgtgagccaccattctctattatacttgcttttgagaacctaataacacgtttccttagtttcctttcttacacacttttgcaattggttttgtaccctatggagggagcaatttttttgaggtctcatattctttccccattcatgactctaagccgttttcacagcacacctttccaagagttttgggcctgactttaatattccaatatacacgcaaataggcatacacactgattttcaaaattggttatctttttcctgcattgccatttcagaaacctcagctaataacaaagagaagataaacaaaagctccttttcctagacactgacattttatgtcccatagtcaccatacctggcctgcctcaagaggttgttgtgatgaataacatctatccaagatggatagagtcaaatattacagatgcttgtgaggtggaaaaaactatcagcccagaagtgaggaggcattaaaattaaacttagtattattggccaggtgtgggatcccaggactttgggaggccgaagcgggcggattacctgaggttgggagtttgagatcagcctggtcaaaatggtgaaactctgtctctactaaaaatacaaaaattagttgggtgtcgtggtgcatgcctgtaatcccagctactggggaggctgaggcaggagaatcacttgaacctgggaggcagaggttgcagtgagccaagatcgtgccactgcactctagcctgggcaatagagcgagactctgtctcaaaaataaataaatacaataaacttagtattatgatttatttgtaggccattgagtcaaagtttaggttctggagttagaactgtattctgtgcagtggctcatgcctgtaatcccaacgctttgggaggccagggtgggaggatcgcttgagggcggtcgttcaaaatcagactggaaaaaagaaaagaatttggttgggtatggtggtgagcctctgtagtcccagctactcaggaggctgagctgggaggctcgcttgagcccaggagtttgaggctgcagtgaactatgatagcggcaaaaaaaaaaaaaaaaaaggaactggattctatctgggctgtggtaacttactagccatgtgaccttaggcaaatcatgttgcatctctgaacaccattttcctcacctgtaaaatggaggaagtaatacctttgttgcactgatatggcaagaaatagaaataaaatgtataaaacaactgggacaaaaacagccctcaatgaatgatagttgttagtttatcaaataattgctttaattattttttcccccggccctttcttagctgagggttcggaaaagcatctgttgctccttgaggttttcttttcttctgccctgaccagagcttcctattatttagaaggattctggtcacctgcctctggtggcggcgccgctggccctgcgggctacactgaggccccgctcttcgggtatttacggcgggcggccgccccagctcaggctcaagacagcgcttccaggttcagtttcagggtctcgccggcagccccagccggcgggcgcggagcgggcagcggggcccggatcgcaggctcctctgggggccccggagttgggaagcggcgtccgggagcccccggaggaggatgggctgcagacacagcaggctgagcagctgcaaacccccgaaaaaggtaaagggcgccggcggagaagtttgctt

SEQ ID NO: 34761 - DNA, 2300 bp, Homo sapien
tggctggcttgccaaaatatgttaccagtagagggttttgactgaaagttgtctaggttcttggcgtttttgaacaaagaattggagaaaacacacagaaaagcaagggaaaaatggagcaatgaaagaacaaaagcaagggtttattaaaaatgaaagtacactcaacagtgtgggagcgggccaagcagcagctcaagggcccagatacagaatcttcttgggtccaaataccccctagaggtttcccattggccacttggtgctcacctcatgtaaatgaagtggtggcccgcaatcagtctgactggttaatcagaggccgaagtgaagttacaaaggtcatgctcctgtgcaaacatctgattggttgtggaaagcaaccaatcaggctgaagtgaagttacaaagttgcacttctatgcaattttaacatataaactgaaatgtagcatagaaatcgaaatgtactttcaatttcccatctgctgcacagaaaaggtggggggttgtaaagagagtagcctctggtcctcttgttacttaggtgtggaaagttagggttttcctttcgatttagttctaggaagtcagcgtgaaatggccttaggttccctgcctgcagactctattctcctacctcagttgggctaggtgaaagggaagagttgatcagaatgggaggatcattatgtaaagtatggagcttagttaataatagtgtaccaatgtcatgccctcagatttaaaaaaaattttttaattttttattcttttgccacctccttgtcgctggcagtgccccccagttatgcacaagcacaagctctgggtctgcagtctgaacccccggccaggccacgggtgtcttatcaacaatagaggaaacgaacagaactttgtagtatttttgcaacttttctgtaaaccaaaataaaaagtttactttaaaaaagatgatcaggtgagttttaaattctacacatgcattcatgtactcaacagattgtctattatgcatcaggcactgggtataaatgagtgcctgcatcatgatgccaccccttgtgtagtttacaatcctgtggtaaattggcggtattggtaacaacatccctgttttttctaaaagcaaatctccaactagtatattaacctgacaaaatcttggctgatggggtgtctaaaaagaagtcttgctctattccttcctagctgtgcgaccttggcagagctaacctcactgtgtatcagtttcctcagtgctaaaattggggaagaaaaaaaaaaagcattcccttgtgcgtccttagcatgctttcaagcagttactaaatgttagtttttataacggttataattattaaaaagatacggattcgtgaagtcaagagatcaagaccgtcctggacaacacggtgaaaccccgtttctactaaaaacacaaaaattagctgggcgtgtggcgcgtgcctgtagtcccagctagtcgagaggctgaggcggaagaatcgcttgaacctgggaggcagaggttgcagtgagccgagatcgcgccactgcactccagctcgggcgacagagcgagagtccgtctcaaagcaaaaaaaaaaaaaaaaaagacacacatatggggaagcgtaacatggcagagagtctgacatttttgtccggaaggacttggggatgaaaacactgaatccgcggtttcccaaaggtccttccaaaggtgacggccccggcacgagttcacaaaccacagctccgccccatcccctgcccggccccgcccttcccaggagctctgctccgccccgcccccgactccgctcggcccctcctcgcgccacgcccccgcccctcccgcgcgcgcagctccgccccgccctcgtgatcccgccccaacctcgtgctaagctcccttccgttccagccgccttcagccccgccgcgctcagttccgcccctttctcttccaactccgcctacgccccagagagggaaggccttgacacctacgctagagagacaggctccaatgaaaagagcgagggggcggagccgggaggaatcggtccaattctcggccgggaagtctctggccgggacggggcagggcgaacctgccagtgactggactcagcttctttgcgtaaccaatactggaaggcatttaaaggcacctctgccgccacagaccttgcagttaactccgccctgacccacccttcccgatgcagtccctgatgcaggctcccctcctgatcgccctgggcttgcttctcgcggcccctgcgcaa

SEQ ID NO: 34762 - DNA, 2300 bp, Homo sapien
atagactgaagtcacagaagtccccaacagttcatctgttctctcaacccaaccctctctcaggtcagcattgaaatgcaaagacctggttggttacagcttcttcctagccccttgccatgactctctaatggataagacaaagagatgtgagcactgtctctgctggactcacttgggcagttggttttggctctcctggccacctgcagacaatttaagtgtggcaagagggcattctctgtcttagcctgagacttcgtctgtatctcccaatggcatcttcaaggtacccttttgttcttgggtggagggggcacttctacttgcttaaaccagcccatgcttgcctttttcctatcatcccaattcttcttcctcttgaaggatgcgctttctaacaaatgagcaccatgaaggccaaaccaaaggtggcagtgaggatgatgatgatgatgagacaatgatatgacgatgatgatgctcacatctgtgaagcacttcatgattccatgattcatcatgttgttacctcttttgagtcttacagcttccctgggacataggcaaaactagaattttctcccttttttggcagtgaaacaggatcaaagcagctaatggcttcccaaagtagtaaccaaacacagtaggttagcggcagagctggaactcagaattaagtgctcccatctctgggttcaatgcttacgcatgtactttttatttaagttcctttttgattctgttctcatgatcctgttcccacctttcccacccaatccacatcaggattggagctgcctgggcaggagctgccagcacaggtgtgaagaatatttagaaccctaggccctagcaccctgctgggaccatcataagtactctatatgcacagtaacaattgctattaaattattaaattttacccagtgcataatgtcgatatatagcaattcatatatatataatatatatatatatatatatatcaccatgctcatctgactctactttgccacaattctccccacagtcctccccactccctagcatcacatgcagctcatttcatatatatatatatatatatatatatagagagagagagagagagagagagagagagagagagagagcgcacaagcaattcatattcacaatgaatattggttgaacaaatggatgaaggagtaaactaaaaccagtaaatatcccatatatggtagatttttgtttctagtgagtgagttaataaataacctgatgtctcactgtagactgaggcaactattactaatttttccattgtctatctaactgatagacatgtattaggtcacaataaatgttatttgagagaataactcatgaaagaaatcactggatgaattaatgaaccaaccagtactagagtgttatccagaatggtagcaatttttatttcctttagagcctagtgtgtattaaagatttgttgagtcacttgaactagcaccatccccagatcagatgttccaggacagacccctagaactgagagttgtctccaagtccacctcatcaggttttgcccctcttcctatcaggcgctctggagatgccagaaggaggctgagtttctggccatgcttcccttccactaacagtaccctctgtctccctactctccccaccacaggatgatgcaaactttgatccacttgttgaaatgcaacattggcacagggctcctggggcttcccctggccataaagaatgccggcttgttggtaagaggcatctgtgggatgggaactaggtttgctcatttgcagaagggggtgataggtcctgaaggccttcacactgttatcaatgggcaatttgggggtaccctctgcaattgaaaatgtgcctgttggcatcaatcccctggagtcaacctgggtccaacctgagcatccctgaagggggcacaccattactcttaaagactcaccatgctcatctgactctactttgccacaattctccccgcagtcctccccactcctaggatcacatgcagctcatttcgtcatttgcattaacagcccaatccctgcaggcatttgagtgtgtgactcctgttccaaaccacttgagggcgcatgagaaagtgtcttggacatgaagatagacgcctccatcaatcccaccaatccactctccccacaccagcctacctctttctcttttcctgtgctgttcctgccccctcatttctgtctttttaaagtgcctcctctctaaaactttacactttcttatgatcacta

SEQ ID NO: 34763 - DNA, 2300 bp, Homo sapien
ggaggctgaggttggaggattgcttgaggctgggaggaggaggtcacagtgaactgtgattatgccactgcacttcagcctgggtgacagtgagaccctgtctcaaaaaataaaaataaaataaaataataaatgcataagtgcaacaggggaggggaaattattttcaacttgagaaaaagtcttttgggcatcagaagagagagatatttcatctgatattcagaggaagagagaagctcccagtgctgattttacagcagcacaaagaggtggtgtggggagtaccttggcccccatgagcttcataagcaatctgtgcagtcatcccaaacaaacgtgcaatcaaagtccagtgctggtgcttgctctgcaaaagcagcttcaggacgcgattttgttaatgccagtcccattctttctgttactcatatcaaaaatattggagtcttccttgattcctctctcttttataccccacctcaagttcatcagcagatcctcttggctttatctttaaaagtatccagaattcagtcacttttcaccatctctttcactaccaccctggtttaagccactacagaccgacacctgggtcactgcaacaccctcctggattattgtaatagcctcctaattgatatcccttgcaccccttcaatctgctcgcaaaaaaaaaaaaaaaaatggccagagacatcctgtcaaaatgtttaagtcatgtcatttctctgctcagaaccctccatgatttctcatctctcttaaagtaaaatccaaagttgttacaatagcctacaagatcctgcccacccactccatcccgctttcattacctctttaaccacatctctggtgtgaccatgtaattatcatccaaaccaggatatctctttttattttattttattttttttttgagatggaattttgttcttgtcacccaggctggagtgcaatggtgcgatctccgctcactgcaacctccacctcccaggttcaagtgattctcctgcctcagcctcccaagtagctggaactataggtacatgctaccaagctcggctaatgtttatatttttagtagagatggggttttaccatgttggccacgctggtctctaactcctgacctcaggtgatctgcccacctcggcctcccaaattgctgggattttaggtgtgagccactgagcgtggcctattttatttcatttttagggtggtttcccaggctggcctcaatcgatcttcccatttcagcctcccgagtagttgggtctacaagtgtgcaccacctcgctcagctgcaggatacttttaataatgaagggaggcaccattagtaattatgccagggcaataggcacaaaccaggcgaatccattctcctctgtgtgctcccagatagccatatgacctcattgccattcctaaaacaccccaggcactctcctgcctcaggacctttgcacttcttgcccctctgctaggagtttcttacccaagacctacatgagttgtgttccctcatcttgttcagccctttgcccaaatgtcactttctaggtgaggccctctctgatcacccaatctaaaattgcgaccctccccctagctgaaactctccattacccttgcctggattttctctataccgctttttactaacagatacttgatatatttgtttcgtttattgtctgtctcccccagcccctccagattgtaaattccatgagaacagagattgtagtaagttttctaccctaatatattcccagcatggagaacagtttctagcatatattagatgctcaataaatattttctgaacaaatgattttttttaaacatgacctgcactcccttccaaatcactggcaggccatacgcctcctgtatagaaattctgagcaggtggcatttgaactgggccttacaagccactcttcaccccaaacagggaacatggtagctggattatgttctgttgggccacatctgcatcccaggattctgctgcagctcattggctgggcagcctccattgtgaggtagctctggttttttccttgccaaagacagacaagcactgagcctggccccacgtccaggcaccaggacctccaatccaatggtgtcttcttcctcccagtcacactgttcactttgccctacagcagcaagggctaaactaggagaggccaaaagcccaggcaagtcctggttgggcaagcaattgcgagtgaaactgaggaccatcctgactgagatgggtctttcataagtccccc

SEQ ID NO: 34764 - DNA, 2300 bp, Homo sapien
tgtcttttcaccagttgcctgccccacccaagaaaagctggcctgcatctcagcgttaccaaacaccccatccaagcccttggggttctcatgcctttggaagtcatctacaatctagtatccatcttgcaaaggggacactggagtttgaaggggaataatatctttccaagggttgccacagcttcatagttagagccatagcggaacccagggcttcggatgcctgggccactcgtgttggaagggcttattttggacatccccaccctaggagaagacctcctgcctgctaacatgtggtgcaatgagttggggtgtggagccccaccctacaagcttttttttcactgacgatgcctgggaagagctctggccaaacactgatattccagccacccctttccaaaaggcctgaagataattcagagttcttctcaaaacctggagaggaaggcaagaactagctcatatctaaacatagcaagctcctcaacaatcttattactgaccttgctcgagcaggaacacagagctccacctgcgacatcaaatctgagattacaaatttaaattgtggaatctcaggctgtaaacgagcaggtcacaggatgcagcctgctacttcacagaccagtaatactgccatgtaatggtgccagacaagggaataacacttctcaaatcacagcaagtgtttcagttgattcaggacaagaagctggcagggtggggccagcattaaaacaaaggagacagtgctgtggtcaaagctgcaggcttcagaaaaaacaaacaaacaaaacaaaaaacaaacaacaacaaccaaaaaaaacctggctagcggggagttcggatttaccgagttccagctgtgacctccagcaagttattcttttcctctctgagcctcaatttccacatctgtaaaaacaaactaacaaagctaacccacagaagtagccaggctttgtggagcttgaagcttatcccatggagaaggggaaagtagtggtaaggaggacctctttaagaaaaaagcaatacaaaattgtccattcaaaattgcatacaggaccttggaaagagccccatgtaagggaggggcctgacaaatctgtcttggatgctaccagttagcagtgacattagctaagcaaagcttgtggcatgtaataagcccttaagaaatgttagttttggggatgagatgatggaggagagagtggtatggcttgagtcaaaagctgtaattttgagggaggaggaaattttggcctgttcatctgcactgaagcagagataatgacagagagtgggatactagagaaacgcccaagaccatctttagctgcagagttctatcctggatttcatgtgtgaccttagacaaatctcaccacctcctggcgccagtatcttgcccagcaaactgtggctgggagtcatacaatctcagcctcttccccgtttccagaagaacactctttactcactccatggagcctcacaaaagctaagaattaattagagatgactgagtgactgtcccttttttgttccaatttaagaatggggtgctgcaagaagggatgtcttacagcagactgtggagccagtgagacatggaaacctctaccctgagatgaataaaaggagagggatttgtaggtattttcttggagacagaaataggttactggttgaaaaccttgacaaattgggctaggttccaactctgtcactttctagctatctgacctcgggcagattcctttacttcaagaaacctcagttttctccttacttaattgatagggttaaatgagaaaatgtagataaaacacttagaggattgcttatcccttagtacagggcttaatagatatttgttattaaaattatcagtataatagttatcattatgattattattaagtaataccaatacgaatgggtgatgccttttccaaatccctccttcctctcctcctcttcccaggagtcctcgtccactggcttctccaggcaggaagaggtgccctccagggaggtgggcggggcctcgttccagcttggccagagccagcccgggcacacaccactgtgctggggtgtacatctacactagacaccttcctgcttccctccttccagagcagacctctttgtcaccccgagctccttgtttcttaagcagtcatgtctgtgacaaaaagtactgagggtccccagggagccgttgccatcaaattggaccttatgtcgcctcctgaaagtgccaagaagttggagaacaa

SEQ ID NO: 34765 - DNA, 2300 bp, Homo sapien
gttgtttaagtcacccagcctatggtaatatgttatagcagcccaaactgactaaggcaacatcaaatcagactcgcagaagaaaagttaagagggaatatggtagaataaatatttgaaaagataatggctgagaattgtccagaaatgatgaaagacaccaacccacagattcaagagacccagtgaattccaagcaggataaataaaggacacacgtatctggacactttatagtgaaacttcagaactttaaagggatctaaagtcagccagattggtgaaaagtgttacattcaaaagggttgcagtgtaaaagaaatttcaaaaggaaaagaaaagatttgcagtcagtctgtcagctgttttcttaacagcagtggaagccacaaggtactggaatgatcacctcaatatgctgagaggatataaactatctgttaagtgcaaaatgaagacattttcaaacaaaagaaattggagagaacttcactaaaggaaaatttaaagtccatattcagaagaagatctgagatgcaaaaggaaataaagaacccaagagaggtaaatgtatgggtaaatcttgattctaataataaagtattatggagcataaggaaaagaaacttaaaatatgtgacattattattataaaaaatggaatgcagtgaatagagatttttttaagtgcctatattttctgcagtgactaaagatattgcttaactttttgttaatactttattaatttatacatgttaaaattactagggtatggctagagaatagaaataaagtctttaagttccaaattactagagaataaaacaaaataaaataagggaaaattaatctaaaagaaactcagtaaaggagaaaaaacataataggtggaagatatagaataaaataacaaggtaaatatgactataaatatatctgtaattattaatacaataaatagaataattttgaaaatatcaaaataatatttatgaaagacatatctaaaacataagaatgcagaaagtttaaagtaaaagggataggaaagatttagcaggcaaattttaccaaaagaaagccaatatattaatattaatatcaataattattactagtgcccctgctactactgtttattgagcacctactatgtaataggcaatatatgaattgcctattcatatatgaacatccctctaaggtagttacttgaaatttttaaagtgtagtttatatacaataaaatgcacagatcttaagtgtacagttgaatgagttttgacaaatgaatacactggtgcaacttacccagaaagtttctttttgcttgtttgcagtcaaacatcacctccctcacatacccaataaccactgtctagatttttgtcaccataaattagttttgcctgctcttgaactttatattaatgagataatacagcatgtattctactctttctagcctctacagtactgaaaggcagattgaagggtggttggagtggatgttgagggccaccccaccatatccaccattctgcaccttcctatggcaaattatgatcaaggactccaagggtctaagtgaggggtcacaggttctcacacaaccatatggcaaattgtgaccaaggaatcttagggtctatgtgagtggtcacaggagaacccacagattctcaagctggttgtaaagtgtaaccttgaacaaatgcctctgtctctctgaggctcagtttccaatgagtaaaatgaatgaattgccatagaccatctcaaataaattctaaaccctaaagccacagtatcatatataatgatacattatatatgtcctaggactatccagtcacgtttggtaggagaaaggtagctgaagctgggaaaaggactctcagagttgcaagatctgagagctgaacttctcctattcatttcattggtgagaaacagaagcccaaactgacgggacctgctagtaagtggcagggctggtctcagactttttttttggctcctacatcctcactttttcagtggcaatgggtggttctcctctcatctgagcactcccaggccctttgttcccattgtgaggtaacactgaggtctgcccaccctacagatggggctttgggggtttgctccagagctcttcatccgcctgggcccaaccctggaactattcctttcaatggtgtcttttcttgccttgtttcagaaggatctactagttggccctatcttgtgccaagactgacagcaaggaagctgctggctgagtaagagtttag

SEQ ID NO: 34766 - DNA, 2300 bp, Homo sapien
tttggaagtattccctctagctccattttttggaagagtttagtaacaaaccttcttctttgaatgtttggtagaagtcagctgtgaagccatctggtcttgttgggaagtttaaacagaaaaccagaaagtcagatagtccctgtctcatcttcaatctctttatttgttattagtctgttcaggctttccatttcttcctgatttcaatcttggtaggttgtatttttctagggatttctccatttcatctgggttatccaatatgttggcaaataattgttcacaatagccccatatgattctttttatttctgaagcttctgttgtagtgtcttcactttcattttttattttattagtcttcttttttttcttagactagcaaagggtacgtcaatttaattttttccaaaaaatcaactctagttttattgattttgtctgtttttttttctgttgtctatttgatttatttctgttctgctctttcttttcttcttttaactttgggtcttgtgagctcttctttttccagtttcctgaggtataatgttaaactatttaattggtctctttcttctcttttaatgtaggcatttattgctataaacttctctcttagaactacttttgctgcattccataagctttggtatgttatgtttccattgtcaattgtctgaaaatattttttaaatttcccgtttgatttcatctttgacccactggttgtttcgaagcataggactgggtatggtggctcacacctataatctcagcactttgggaggccgaggtgggcagatcacctgaggtcaggagtttgagaccagcctgaccaacatggtgaacctcgtctctactaaaaatacaaaattagtcgcgcgtggtggcacgtgcctgtaatcccagctacttgggaggctgagacaggagaatcgcttgaatccaggaggcagaggttgcagtgagccaagattgcaccactgcactccagatggggcaataagagcgcaactttgtctcaaagaaaaaaaaaagcgtgttgtttaatttccacatatttgtgaattttccaagattcctcctgtcattgatttctagcttcatattattatggtctgaaagaatattaatatgatttcaatcttcttaaatttaaggcttgttttttggactagcatatggtctattctagagaatgtttcaagtgtgttagagaaaaaatgtgtattctgtttctgttgaatggaaagttctgtatatatctgttaggttcatttggtttaaagtgcaattcaagttcattatttccttattttctctctagttgctctatccattgttgaaagtgggatattgaccctcctactattgtgttgctatctatttctcccttcatggccattaatattagttgtatgtatttaggtgctccaattttgcatgcatatatatttacagttgtgtcttcttgatgaattgacccctttattattaaacaatgatcttctctgtctcttgtgacagtttttgacttgaagcctatttgttacataattgttaaaggaaaagtctgtaacaaggaggtaaaaggagaagcctagataatacaatactgaaatgttgccatccatttaaaaatgttactttaaaaatttgaatgtattaaaagataatgttgccctaccccacagttccatttccagtagcaaccacagatgatagtttgtgtatgcttctgaaaaattggaagttttaaaaatatgcatatttcttattataaaagcaatacaaactcatcgagatgtgtaaaagaaaatacagccagtgtaaaaattagcaatatttcacaaacccacaactcaagggacagtgctcttcgactggactctgccccatgcccaagatcaatgccctgttcagttcctattcgcagtccccagcgcccaggaacatagtccttccagcagtggcagtaataggtcgccaggtggtgctgtggagcagagctccggagctcagtgagaaaaaaggcgcggccgctcaagggagcacgtgacctcggcctctggcgtgggcggtgggatcacgtgatgaggtccggaagcggctgccgggcagcaaaggaggatggcgaggggctgatactgaacccgggaagggtgggctgtgctgaagccagagccggagccggagctggggccagaacccgagcagtgagttcctccactggctgccggctggcggcgctcgccgccttgggcaggacccacctcgccttcctcccggcgtgg

SEQ ID NO: 34767 - DNA, 2300 bp, Homo sapien
cagacgggaaggcaggacaggtttatgggctaaaccgaagctctgttttgcacattatttcccagttgtttgtgagacatccaagcagaggtgtccagtgggtagctgggaattggagttggcagctcagaggattggtagatggccctcaaagccaagagcatggatgtgattgcctagggagagatgagagagaatggcttcctgacctctgtattctcagacccaggcacacgtcctgcctagacaggagcttagtaatgactggcatcatcaccatcaattgcattggtcccgtacttccacttccatgcactgggaggcaccataggccagcaaagaaaaacacaggctatagacacagataggtattcagattctgctcaggccttatctgctgctgtatgaccttgggcaagttacttcacctctttgagcctcagttatattttttgtaggatgggtgacttgatagtacctatctcataagaaggataaactaggataatgtatttacagcattatcatagtttatctatgataatgactagcattgtactcagttaatgttagctatgtattatatataatcggtagtagtagtattgttgtaactaatgttagctatacattataattaacagtagtgttaattattattgttgctattaatatctcttcggtgttatgcatgacttccagcagtaggtgtaatcttatcaactttcttgtacattaaaagtgttggagtgcaggtgaacaagatattactacagggaaaattgtggagaccctcgttgacagctgaggaagtgataacatcactgaggagaagaaggcaagcctgtcctttctaagtcaggcaggaagttgcagggatgtgtggtgaaacatgaaaggaaaatgcgtttatgatttacattcttttccctacttaagtgaggtcctgtcaccctcacggcttttcacagttctgacattaactgcaaccctgcgcgtgccagcccatcagtgaggtcaggcctgcttccctgcccacttgctccagcaccagtgaccccgtctgtgctgttgaacacaccgccttcattcctaccccaggaccttacacttgctgctccctctgtctgtcgcctcttcttctcatccctcaggactcaaatgtcactccacagagactccttctcttctacctgatcaaagttaggtctctgtttatttccttcccagcattttatccaagttatttggtaacttatttattgtctcttttctcctggccacagcagaagacttcgttgactgactagaaggacaaatcccgactcccactccaatcgcatagcaaaagggaatcccaaggggaattttcgtaggctgagcagggtgcatggtgcatcagaattgctgagacatctgagggcgcccttgaggacagggacagaatgagaaacttcatgaggaagttagcccaagtctatggctggagagatttaggaagaggctcagagagatgtcacatgaggaaactgcattgttttactgcatggtataggatgtaactccctccttcaatctctacaaaaccttcagaaaatctttcttttctgtcagtgcttttggagttaggttttttttttctaaatgcaacaatgcgctgagccagccctcaagttgggcgtggggcagagaaacgtagctccacaaggaggcccagcctcagtcgggcgcaagagcactgcagttctgttgggtgacagcagtgtttgttttgcccacaggcgtcagacagtggcatccctcccctctcgtctttgacgtctgtccgtgtccatgtcacagagcagagccactatgcaccttctgctctcccactggagatcttcatcactgttggagaggatgagttccagggtggcatggtgggtaagatccatgccacagaccgagacccccaggacacgctgacctatagcctggcagaagaggagaccctgggcaggcacttctcagtgggtgcgcctgatggcaagattatcgccgcccagggcctgcctcgtggccactactcgttcaacgtcacggtcagcgatgggaccttcaccacgactgctggggtccatgtgtacgtgtggcatgtggggcaggaggctctgcagcaggccatgtggatgggcttctaccagctcacccccgaggagctggtgagtgaccactggcggaacctgcagaggttcctcagccataagctggacatcaaacgggctaacattcacttggccagcctccagcctgcagag

SEQ ID NO: 34768 - DNA, 2300 bp, Homo sapien
gcctaagcttagggcaccaccaacagaatctcaggagttgggaggcgggtggtagggaagctcgaagggtgggacatattgaaattattttctgtcacaggccttcagaccccgatttaggcagacttttctattcctgcctcttatctcggaatgctgtcagcatgatcttggggaaccctgtgcccagttcacacaggactctggcaagacggggctccaagcctctccttccccctttgccttggaagtttaactcttccttggctttgaagagcaaggcaactggaaaatcaggtctggccagtttcatccaagaatgctccagcgcatctggctggcagccatgaagctcctaggaatcaaggctcccaggggcaagccaggcatcagcctggtgcaccagacctacacatggccctgccaaaccctgccccgctcctcctgccccttgccccatccttggccctggtgagtctcacattttcacccaggctggagttcggggatgggctctgtgggaaacagcaagggtctaagagaggcgaagcatttattcatgatcagttcaacaagaactaactcccagggactagttcttacccggccacacactgtgtgacttggagcttgactgatctcgactctggggctctatttccccatctatactcatctatgatgaaaagcagggacagaagcccatcatctctaatgtccatttcaactcagacattccaggagcctgggagttttcatgttccaggttacatgatgagtcagagtcatgccctgtctataagggacatgtggtgaaacaggtataaataggactggggcaaggaggcaaccctggtctgtgcaaggagctcccactagctataaggccctgggcagctcccttccttttatgaaccttagtttcctattatcaataatggctgacattaaattagaactgacaataaactaggcactctgataagtcatttacctttattatttcactgaattttcacaacaatcctaagagattgatgattttcttatccttattctacagaaggtgaaatgaaggctcatgaggttaaataacttgctctaaaagtcacctacctagcaaatgacagaggcagggctgacagccaggcagcctgatgccacgcctgggatcttggtcactttgctttcctgcagcctctgcatgtgcggaaacagctcagtttggctagagctcagccccagtggaaaggccttgtaggaaggagagagaatagtagtttagaaccagatagctaaacttggttcctggctaagagttgggactatctcaccatcgcccaaggagtcacagaaagtttttgggaaaaaagagtaagagttcaggactgtgttctagctgctgagtgtctttgagagagcattttgaactagtctgctattcttcagccacggggtttctcaaccatggcactattgacattggggctggataattctgttgcagggctgatatggtttggctgtgttcccacccaaatctcatcttgaattgtggctcccataatccccctgtatcatgggagggatccagtgggaggtaattgaatcatgggggtgtgtttttctcatgctgttctcgtgatagtgaataagtctcatgagatctgatggttttacaaaggggagttcccctgcctacgcgctcttgcctgctgccaagtaagatatgactttgcttttcctttgccttctgccatgattatggggcctccccagtcatgtggaacggtgagtccattaaacctcattcctttataaattacccagtctcaggtatgtctttattctcagtgtgagaactgactcacacaaaggcactgtcctatgcattgtaggttgtttagcagtatccccagcctctacctgccagatgccattagcaccaccactcccaagctgggtcagccaaaagtatcttcagacattgccaagtgtcccttgagggtcaaaatcacctccagttaagaatcacagcagtagaaaccattttttccccctaacttgcaccctgtcttttattttctgcccagggtttcgggagttttccaccatgactattgccctgctgggttttgccatattcttgctccattgtgcgacctgtgagaagcctctagaagggattctctcctcctctgcttggcacttcacacactcccattacaatgccaccatctatgaaaattcttctcccaagacctatgtggagagcttcgagaaaatgggcatctacctcg

SEQ ID NO: 34769 - DNA, 2300 bp, Homo sapien
cccaagatgagtacttcccaatgctgaccagaagatgagatggccttctcctgtgccagaggaagttaaaagtgatgcattttgaaggaaattttggcaacatttgtcaatgttttagacacacatacattctttggcccagcaattccacttctggaacttcatcccacagaaacccttgtacatgtgtacagagatgtatgtaccaagttgtcctctgtagtgtgctttgtcagtgcaagacacctcaagagacagtaaagggtgtgcttagcagtaagtgcagcattaaactgctacattggtattacaaaataccatgcagccaccagaaggaaggaggcaaatatatctcattactatggaaaaattatgagtgatattgattgattgattgattgagatggagtctcgctctatcgcccaggctggagtgcagtggcatgatcttggctcactgcaacctccgcctcccaggttcaagcgattctcctgcctcagcctcccaagtggttgggattacaggtggctgccaccatgcccagctaatttttgtatttttttttttttgagatggagttttgctcttgttgcccaggctggagtgcaatggcacagtctcagctcactgcaacctccccctccctggttcaagcgattcttctgcctcagcctcctgagtagctgggattataggcacctgccatcacgctcagctaattttttgtatttttagtagagacagggtttcaccatgttggccaggctggtctccaactcctgaactcaggtgatccacccccacttggcctcccaaagtgccaggattacaggtgtgagctaccatgcccagactaatttttgtatttttagtggagataggggtttcaccatattggccaggccagtcttcaactcctgacctcaagtgatccgcccaccttggcctcccaacatgctgggattacatgcgtgagctaccgtgcccagcctatgagtgatatttaaaattaaaaacaaagcatggctgggaaaggtagctcactcctgtaatcacagcattttgtggggccaaggcgggtggattccttgcccctaggagttcaagaccagagtgggcaacatagtgagatcccatctctacaaaaaaaaaattagttgggtgtggtggcacacaacctgtagtctcagctactcaggaggctgagccaggaggatcacttgagcccaggaggtcgaggattcagtgagcccgtgtttgcactactgcactccagcctgggtgacagagtgaaaccatgtctcaaaaaaaaaaaaaacaaacaaataaataaaagcacatcaaatatattgtgttatcccactgatccaacaaaaaaatgtgtatatgcttatgtattattttatttttatagtttaatatgtatatttccagaaagatatgcaagaaatattcatagttaatttacttcattttacacccttatgcacagtttgaagtttttgtttggtagatttttatcacatgtgtattactttcattgcaaaaagaaaattgagatggaatttgctcagctgggatcatgtagtcatccagttacttttgggactggaaccagaccaggtctcctgacttgtctcttttgacttttgcgcactgccttctcttctaagctcaacaaccagacttagggcagagagggctctgcctcctttccatctgtccaatggctgagaactgggggtatgaaactgtcagtgctcagggatgatgacattctaggtttttgggcttctgcctattggattccttttctggctgcaccactaaaagtagataataagcaaatgacaaattccttctcttttctgagactcagtttccccacctgcatagtggtagcgtgggtgtgggtggtgaagtgaagctcactccttcaatgtcctgagaaccttttagctgatgctgctgctcctccaggcttgggagcatggggctcaggagttttcattccttgagccaggcttccccctgctggtctctgccagtagcgctcggtaagcttccagtaaagtgttctaactggccgttggtggggcaggagctggagaagctcgacatcctgcagtgggtgagacagttgtgcacagtgaagaattgtctcacctcctgcatggctttccaataaacagatgatctgagcttggaacgaactcccctttacaaacatcaacaaagtggtttgggtttgtgctgttttgtgttgttttgctgtgtttagagatggtctctgttgccc

SEQ ID NO: 34770 - DNA, 2300 bp, Homo sapien
agtcatgtgagcaccgtggaacactcaagcagctcccattttatatattttatatcctaggtgtctacctaagatttagcttggaaaagtatttctgctgctttgaattcttataaagtctgaaaatcactgatccagaccaattctttcactttacagataggaaaattgacatccagaggggatgacactgtgaattttaacagatgtcatcatcttcctcacagtgtgatattattagtagtattattaggcaatttttcttgccatttcaacttggagtaggaggaagcaagaaaacacacaactttgaggcccttagctggctggagctgcttcaaaacttaatgccaactttgagaaacttttgcctccatctaccagcctgatcaagattgccagggtctgccatcactcccacttcttagtaaacagaggatgaggggatcacaggttgaaagaaattgcactttttgcctgccctgtttcttcctcctctccttgtgaaggcttccagatgagctgtggataactactcctgtccctgcatgcaatgcttcgaggaactgtctgtcaatcaaggggccccactctcacctggccaagaagctggctcaggacccaagctcagccagattggctctcattttttgaatttataaaaaccttcttggcacattctctcaagatgtgaaaattgctggagttgattcattcagacagcaatatctcagagactgtccattagttcttaactcccaaagcctagagctgcccttttccagtcctccccaaggcctttaatattataatctacctctgtatcttcccctccttccccaatttagtcagattgaactgttgcttacaaccaaacaaccctcactgtttcagaagccaacacattcctctctctatagcttgaatctcttctaataccacccctaccagaaatcccccacatcctgtctcctgcctgcttgaattcctcatatgacaaagaggtcatttccttctaaagcaatcctagttcattgctgggaggctctgactactaagaagtttatctaacattacatggaactctctcttctctgatacctccacccaatggtcctcatcccagtttttatcccgagcttcctaacttaagaaaaaaaaaagaccactaacttgaaatggggaagtccctgttccctttcagcatccagggctggcaggctcagaacccctggtgctagcggtaggaatgaaaacaagaagacatgatatttaggtacttacaggggctgccaaggccctcccggccaggcaaaggagaaagaagatccaggccctcatggtgctgggaaccctatggggaggagagattgagagttcagtgagggtgagacttccttatggagatttccttctgaattcctgatatgtgcaagataatgttagatggtacaagttaaatgatagtgaaaaacatgaggaggttggttccatttaatattctttcaattctgcttatatgagaagaaagtctcagtttggtgccaagatgtcttaaacacctcctttatactcatctatctccttttttaacaaaaagagaataagcctccagctcagagcttccacaggaagttatatccagctggaactgaatcaagttgttttgttttttttatgtgtttgtttttacagtttccttctatttatgacaaaggtacacagagttttttccatttatggtagtgatataaaatctgcttttgtaatacatttattaaagtttttgcaaagtgattcaactaaggtgatgggctaactagttaagtttgggcaatgccaaaccagatcatcttcaaggtcccttcaatccctgatattctaaaattatttttttccctaaacccaatctctcctcttcctcctctgtcgcctcctccccctccttcctactccctctgcaatgggagaagttaataggcaggaacttcttgccagtttgggacaatgagatccacattctaaaacaaagaacaatagtcttggaatgtaacccatggaaacttgagggtggccacatttttctccattctacccagaagagacagcacttctttaggtcctgtacggaaaccatccagatgcttccatgtgttgcagaggggatgttagctgagatctagaaaatacctctgttctggtaactgttaaggcctcattctctaaatgccaagctctagactctaatactctcatgactataagggattttggagcagtatctcctctgaggattcaaa

SEQ ID NO: 34771 - DNA, 2300 bp, Homo sapien
tactctgctcatatgaaggacgcagactcagggaaatgtctgtcttcctgtctttctaatctgaagcttactacatttccagtcctagctgggctatttcttcaataacatgacttccctgtcattatagctcagacagggtaactttttgttttgttttgttttagctgctatttcactttgatccttcaacctcaaactatctcagacaagtccttccttgatgttttcttttctgttccatttgtcccaagccacatgcaggagttatttatcttgcgtcttccaaaaggggaagcaagaagggagatttttccacttaagcctggggaacaagtgaacaactgtgtgaggggaggaacattccacaagctgcctcaaaagggaagactagactcctctggaagttggggttattgtgaagcaataccaaacccccaggtcctttacatttctgttagttttacttcattcactctgtgcaatagggggtgaggttttgtgtctctttaagcccaagaaaggaccattatgaagtgggctcttcctctgcctgtttctgcttcccaaatgctatagtacaagtgaagacatatgatcccagaggagaccatatgtgtcaagaccagaatgtgcttggggtgtcttaagagcattttaaggaccgaggctgccacttcaaagttcacctagtctacccatttcaattgatagatgggggaaccaaggtctagagagaccaaaagacttgatactactgtggtagaacaagaccccctggcatttaatttcaagctgagtatttttctccatgatgccgggttacctcccaccaccatttggtcagttgagaagtcttggaagaaataagggatgatgagcctgacagggaggttttgggagaagaaagagggaagacatggccactgttgctcctgatggaaggttatttgtgggtagagagagcaggtttgttctttgtggctgcaggggagatggggtagacagatcagaaagtttgagggaggcacatttagatcagtaaaagaaagaactttctaaagtcacttgagaatgaaaagccatttagttagtgcaagaaatgaaatgtctccaccacagagcctctgttaggaatagcattttagttttgaatcctcagaggagatactgctccaaaatcccttatagtcatgagagtattagagtctagagcttggcatttagagaatgaggccttaacagttaccagaacagaggtattttctagatctcagctaacatcccctctgcaacacatggaagcatctggatggtttccgtacaggacctaaagaagtgctgtctcttctgggtagaatggagaaaaatgtggccaccctcaagtttccatgggttacattccaagactattgttctttgttttagaatgtggatctcattgtcccaaactggcaagaagttcctgcctattaacttctcccattgcagagggagtaggaaggagggggaggaggcgacagaggaggaagaggagagattgggtttagggaaaaaaataattttagaatatcagggattgaagggaccttgaagatgatctggtttggcattgcccaaacttaactagttagcccatcaccttagttgaatcactttgcaaaaactttaataaatgtattacaaaagcagattttatatcactaccataaatggaaaaaactctgtgtacctttgtcataaatagaaggaaactgtaaaaacaaacacataaaaaaaacaaaacaacttgattcagttccagctggatataacttcctgtggaagctctgagctggaggcttattctctttttgttaaaaaaggagatagatgagtataaaggaggtgtttaagacatcttggcaccaaactgagactttcttctcatataagcagaattgaaagaatattaaatggaaccaacctcctcatgtttttcactatcatttaacttgtaccatctaacattatcttgcacatatcaggaattcagaaggaaatctccataaggaagtctcaccctcactgaactctcaatctctcctccccatagggttcccagcaccatgagggcctggatcttctttctcctttgcctggccgggagggccttggcagcccctgtaagtacctaaatatcatgtcttcttgttttcattcctaccgctagcaccaggggttctgagcctgccagccctggatgctgaaagggaacagggacttccccatttcaagttagtggtcttttttttttctta

SEQ ID NO: 34772 - DNA, 2300 bp, Homo sapien
tagaataggcacaggaaaatcaggtggaagagtgtctctggcagaggtaagagcaaatgcaaagatactgggcatggtggctcagacttgtaatcccaacacttagagaggccaaggcgggcggatcacttgtggtcaggagttcgagaccagtctggccaacatggtgaaaccctgtctctactaaaaatacaaaaattagcctggtgtggtggtgcatgcctgtaatcccagcttcttgagaggctgaggcagcagaatcacttgaacccaggaggtggaggttgcagtgagttgagattgcgccacagccctccagcctgggcaacaaagtgagagtctgtctcaaaaaaaaaaaaaaaatcctggggtgggagaagctttggggtagttgaaggactggaaggaagttggcatggctggagcagcgtgggcacagaggacagtggtaggaggagagaatggcaagagagacaggggccacagcggatggaagtgtatcatgagggtgttctctgccttcttcctttccatggtattcaaacccaacccatgcttccaggtccacctctttcaggaatccaccaatctgaagccctgggataagccttagagtctgtaccactcatgtaagtgggtgtatgtgtaaggcacaacctttcagcaagatccaaagctccttgaatagtgagttatctcgattgattgttcacagtcacagattgaattccttgtactttttttcccttctcagttctgcacttaactcgtctaaaaaaattaaaaaagaatttaagaaaccacaaagctaagctgggtgcggtggctcacgcctgtaatcctagcactttgggaagccaaggcattcggattgcccaagctcaggagttcgagaccagcctgggcaacatgttgaaaccccatttctactaaaaatacaataaattagctgggtgttgtggcatgtgcgcctgtaatcccagctactctggaggctgaggcgcgataattgcttgaacccgggaggcagaggttgcagtgagccgaaatcataccactgcactccagcctgggcgacagagtgagtgagactctgtctcaaaacaaaacaaaacaaacaaacaaaaaaaccggaaaccacaaaactttttgaggacaaggaccaggtatttattaattctcatacctcccagagtgttaggcacaaaataaacattcaaccaagacctgttgcactgagcagttcatatataacaggagtgacccaagttgaaacgtagaatcagccctctcataccactttttgccaggtgatcataggcaagttacttagcatctatgtttccttattattaaaatggtcataattacaatgcctaagataaggggttgctgtgaagattattaaatcctcagtaaactttggctattgttactcctatgattatcatcaatatcatcaattaccttatctgttcaatactggtggcacaggtccaccagctagatgtctaatcccttatgtgtctattagtggtacaagtggagtttgagtgggatttttttttttaagaccagttccaaatcatcaaggatgataccactagtagcagcttgtcttgtctgtacagtggtaagtcctggccttgcctttgtggcaaatacaacccccttgaattgcttggcccttctcagcattgcctaatattagggaggactcctgtaaagctcactggttagaagatcaagacacttgggcctggttctgcccctgggggccattgggtaattccttgcagtctccaggcctcacttgccctctgaacaagaaagaggctgttctgggtcatccctccaggcctgtccagccctggcactctgtgagtcggtttaggcagcagccccggaacagatgaggcaggcagggttgggacgtttggtcaggacagcccaccgcaaaaagaggaggaaagaaatgaaagacagagacagctttggctatgggagaaggaggaggccgggggaaggaggagacaggaggaggagggaccacggggtggaggggagatagacccagcccagagctctgagtggtttcctgttgcctgtctctaaacccctccacattcccgcggtccttcagactgcccggagagcgcgctctgcctgccgcctgcctgcctgccactgaggtatgtgtgacccccgcccagcctttcccttctatagttgcaccaaccccgacacccccgttcacgccgtcagctcgtgtgcaagggagggaagctctgctgaggatg

SEQ ID NO: 34773 - DNA, 2300 bp, Homo sapien
attttcctgcctcagcctcctaagtagctgggattacaggcacctgccaccatgcctggctaattttttttctatttttagtagagaaacaggttttgccatgttggccagactggtctcaaacttgtgacctcaggtgatctacctgcctcagcctcccaaagtgttgagattataggcatgagccacattgcccagcctaaaaaaactttttaatagaggagagcatcatctcagactgtaatgtggggaggaatgacttgggtgtcttgttaaaatgaggattctgattccggacttctgggaagggacctgagattctgcatttctgacaggctctcaggtgatgctcatattgttgggctgaggaccacattttaaagacaagattttgtaatacttactacaaatccttctttccagaatctgttattgttgctgtctgtgaatagtcaggaaacaagatgaaaaaatcagagatgtttagaagaaaggaaagactgaccattttctttaagacagattttgcagatttggccttaataaaaggagtggtttactagtcacaaaggtcaaacagtctgcactggaaaatcgagctgcttaattcttggtcttcgtttcctctgtagagcacagtgacaatccagactcagcggtgtttagagacttggaaagagtttgagaagccacttagccactttattttcaggtttgtagttttgcctcccgttctctccccagtaggttaaaaatggggagtggcagggcccgctccacatccacagagtcagttgaggcaggtgtctgggagctgcactttccacaaggtccccagattcttcctatgcacactaaagttgaaaaaaattgagttagctaatacccttttggtatagattagggaactggagcccttctggagcagagattttgcctgtggttttctagcaagatatatcactacacccaggattccaactgaggtaatagacttcaaatattttgaagtgctccatgaaaaatgtagccattgatttttgaagggaaacaggagagacaaatggaagaaattaataatccaatagctaaccttttacccaacggaacctagtactaggctctaatttccttaatgtgttagttatctattgctccttagtaattatcccaaaactttgtagtataaaacaacaaatatatttatagtaactcacacagtttctgagagtcaggaatttgggaacagcttggcctagtggctccagctcagaggctctcataaagctgcagtgagatgttggctggagctgcattcatctgaaggcttgactggagctggagaatccacttccaacatgtctcactcacatgcttgttagctcgagggttcaatctctcactttgtggacctctccttgtggttgctggaatttctttgtaatttagtagctgacttcctctagtgcaagtgaccccagaaatggagcaagacagaagtcacagtgtcctttatgacattgtgatagcttcagaagccacataacctcacttcaagccatattctataagacacacagaccaacccgagacatgtggaatgggattactcaagggcataaataccagaggcagagatcattgaggccatcttggatgctggctaaccgtacttaaaatcctgtgttcatcccattcacaaatctagagagggactcttaccctcaattttcagatgtggaaactaaggcacagagaagtaacatattgatgatcatgcaactagtagtgccagagctggtatctgaagccatatttatctgatttcagatggtctcatttccagagattttaaaataaagtattggtataagtaatccttgtgtgaaagcaaagcaaaagatccagaagttcaaaccagccatgtcaattatccattgactcaaaaataagttttaagcacctactctgtccaggcactgttccaagtattaggaatccagtagtgaactgaacaaaacctctgtcttctgggagcttaccttcagacccttgatctgttagatatcctagagactgtagaatgtagagcttacatgaagactaggagccggggatcccttcctgcctggcctccaacccactggggaacccaggcaatcctttctttccctggacccagatgctgcctctgagaatgcggcccttggatgaaagcagaatcacctggggtaatgagtagacataacagattccccagcccagacctgctgaccagaacctgtagtttttgcaagctg

SEQ ID NO: 34774 - DNA, 2300 bp, Homo sapien
agccgggcatggtggtgggcgcctataatcccagctacttgggaggctgaggcaggagagttgcttgaacccaggaggcggacgttgcagtgagccaagatcacgtcactgcactccagcctgggcgacagagcaagactccatctcggggaaaaaaaaaaaaaaagctaagaaagaaaagggttgatatgtactattaaggaataatctttttttttttttttttttaaatacagggtcatattctgtcacccaggctggagtgcagtggtgtacttatggctcaatgcagccttgacctcctgagctcaagtgatgctcccacctcagtctcctgagtagctgggaccacaggcatatgccaccacacccggctaatttttgtattttttgtagagccagggtttcaccatgtttcttagtctggtctcaaactcctgggctcaagtgatcctcccacttaggcctctcaaagcaatgcgattacaggtatgagccactgcatctggcccaggaataatctctaagatattttataaagtgagaaaagcaggatgcaaaactgtgtatactatgccttttgtttaagaaggagaggtcagggtaggaggaagacctacttttcactgtacgctactttgtgttatttgaaaattaaacagtaggtacattgggattccacctgcaaatcctacacttatccaagataacttctagtaacattggctgtggttcatttcatgcttattttaatgtaaatacacggaatgtatgtatatatttatgcaggaactacagtctggcatattttcttctcctctttaataggtctttatttgtgatctttaacagatctttataaagctgtcttctctttaaattgctgtctctaggcttagccatccccccaacccatacccctaattctctaaaacatgccgtgggtggttcgccctgtgtactgttgctttgggaaggatttccttccctcatgtccactctccgccttccctcatggcaatctagctatccctagccccagggcacagttgtacccaggactaccaagatgctaagccttgcccgtacaggacctaatgtgccagtaccctctttccctctcctcctcgcccccttcccttccatctttagggaattcctggcaggttgggtaggggatgaatggttaaggggtattttgtgagcagcggaagacccagtgccagggaggccaacagagggcctagcaattagagaatacttatatatatttttggtgcctaccatgtgccaagcaatgtattaagaagtttgcacacattacatgtattccaacaatactgcaaagtaggtttcttggagggaaccatgtgtcgttgtttgcctgaaacagtcatggtgtttgcctgttgtcctggcaaaattattaatagcatctcctttctctagcaaaaggttcagataaaaaattgtatagtgaccttaactgtccccatcttatacgtgaggatattgaggcttagagaggtaagttcatctgcccagggtcacatggctaataaatgatagggctgagattaaaactctagtcagtatggctctgctagggactgaactctgacatggacatgaattgtgtccccgcaaattcctatgttgataccctaacccccaatgcgactgtatttagagacaaagcctgtaacagggcgataaaggctaaccgaggtccagattattgccttctccccaggccgcctctcttccacaaccgcccccaccccactgcagtcagggcccttcctcctctgtcacaacagctctgctaaccctgcactatcactgcctgcgtccttcgcagcctcctgctgctgctcttccaccgctgcgtcctcgttggctggcgcttaataaaaattgactcggtgaataaatgagtgaaactgtccttttagggatggatggatgatgtcctgttcaaggcggtgcccttctctggcattccctaacacaagcttgacccgaagtaggcgttctgaaaaaggccgacagtcgatggaggccaacgcagcgcccctctcacctcctctctccgtccaggccgggtgaccacgggcccggcccgcagaaaggaggcggcgcggccggcagggatcaggactggagggggcggagcctccctcgcggccgggcccggagtgggaggggcctccgggaccaggcctctagtgcgcactctcggaagcgcagccgaacccgccctccgaatccagagaggcgctgctgacaccgccgccaca

SEQ ID NO: 34775 - DNA, 2300 bp, Homo sapien
ttattagatttttaaattgctgctgggcgcggtggctcacgcctgttaatctcagcactttgcgaggtcgaggcaggtggatcacctgaggtcaggagttcgagaccagcctggccaacatggtgaaaccccgtctctactaaaaatacaaaaaaattagcagatcctggtggcgcgcgcctgtaatcccagctactagggaggctgaggcaggagaatcgcttgaactcaggaaggcggaggttgcagtgagccgagatcacggcattccactccagccagggcgacagaacgacgctccgtctcaaaaaaaaaaaaaaaattgcttggcaaaaagatctgtatcacttaaaactccctccaaaagtgaagggtagccatgtccctcatcgcgagtcacctgggttaaattactaatctgtaaatgttaaatttcgccaatcttcttagtgtttcaattcggagagtcatgttgtgaaatgccaatctcttagtccaccttttaaaaaactttgcaggggttctccaaggccctcagaataaagtccagattcctttgcagagctaacaggatacaggagactccctgctccaggaaacttctaggggcttctctcctggggcctgttccctggttttgggagcgctcgggcgaccgcgagccagagcagcgtctcgctcatctcggacccaggcctggggctccactgacgccgacggagccgggctgctgcgggagtggagccctgggggaccagaaggggctttcacttcgctcctgggcctcccgagttccaggctcgggctagccccgcgcagggaggcgagcgggcccggctccccagaggccgaggccggcgcccgtgctccttcagctcggcctctctcccccgacataggcgctccacatgcttcatttccaaaattctcagcaaaactccgcgggagaccctggtcacatgcctggaacgagaacaaaccggggcgtgtctgtgccggacggctgggaaccaaagctatttccatagaaatagggccggccagccttgagttgtagccccgccagtgcctgaaacgccaggaggaggggacgagttgccttttaaaggcgtagcgacgagaataagcccccacccgcggcaattcgaggctgaacaatagtggtgcagctcgggacgtggtgcgagggcccacactccactggagcacgcgcggaccaccgtgcctcagctgccacaaagggagcctcgccacacgcccgcggccgcctcgcagcgcccgccaagaagcgcctggcggaagggcgcactctcaggccttccaccggcgaccttccggcgggagcctgcgggcggcgcaggaacgaccctccttcctctgccccgcagcagtgctgagtaatggtgagagcagcaaggcccttggccgccgcacgtaagaaaaaagttgtaataaaaagaaaacaacccgggaaactttactagttggttcgccaggtacaaacctatgcggaaaaggcggggtacaggcctcggaggccggacccaaccagtcagggaaagaaagagggcagaagccgcaggctgcacagcctcacaaccgcccagagggcacggcggccctggggctcggtctcttccgagcagagcaacctccgtgtctatcagctccttccggcgttgcgattggccacaggctgtcttggcctctcggacgcccgcctcctagttgctaggggtttacttccccaaagtacacgggccccaccttgtggcgcaaccgctcctgcatggaaaacggatctccgcccaggggaagacgtgttaacgaataagagcagccccacacatttattggctactttgagtatcagtcaaagaactgctcactcgcctttctattgtacttttcggttattggtctctcttagtgccgatctgttactagggaaacgagatcctcacagtctcataggcaggagtcaaagccaatcaagagccacgccttcatccccgagtcagtgcccaattactgttcgaagagccctgaggacgcggtcgggattggtcatcccgtcgcccgacctggccgcaacaagttagggtgagtggcagttatatagaccggcggcggagcacgcgtgtgtgcggacgcagttgcgtgaggggtttgtactatcctcggtgctgtggtgcagagctagttcctctccagctcagccgcgtaggtacgccggggtgtgggcggggcagggaggccagaggactaagccgagccgcagcacttgtgagagggagaag

SEQ ID NO: 34776 - DNA, 2300 bp, Homo sapien
tctcttcccccgtgaatgaaatgctgggatgatctcattgcaggttttttattcagaaagtgttttttggtaatagcttacaataattggacttcttatgggacaggtgcctttcttggcattcaaaggtgttaattttacatgatcacaattttgatacagtaggaattattttgagtataaacatcttgtttgttaacttccccattttattttgaaattttttaattacatgatagaatgaagtagtaagcatatttagaatttttagtcttgtagtttctttttaaaagatgctatactaaaagtttatctgatttagatgggccagaaaatgtgatagtttgtccccggatgtcaaaactatgttgtttaagattattgcctttgaatctaatattgcctcaaataagaatgtgcttgtaactttacaactggaacactcttaattgggcttaataacttaagaaaattaccaggtgctgtggctcacgcctgtaatcccagcactttgggaggctgaggcgggcagatcatgaggtcaggagtttgagaccagcctggataacatagtgaaatcccgtgctaaaaaatacaaaaattagccgggcatgatggcgcttgccagtagtcccagctactatggaggctgaggcaggagaatcgcttgaacctgggaggtggaggttgtggtgagccgagatcgcaccactgcactccagcctgggcaacagagagactctgtctcaaaaacaaaacaagaaaattatggtgggaagtatgttggaaatatatacctttgaggttcttacgtcttgaatattggggataatgatgaattcttcataatgatttcccccttttgtattcatatgattgcaatacatttgtataaaatctcaactggtctgtatgggctctgtttgtttttatgatgtttgttcatgttttaaacgacttgctgaaatgatcttgtctctgagttggtttcagctaaatgattcggtcttttcccctgtgtttgatccttcaggtttggacatatttgactcttttccccccaggttgaattgaccaaagcaatggtgatggagaagcctagtcccctgctggtcgggcgggaatttgtgagacagtattacacactgctgaaccaggccccagacatgctgcataggtaagacatttttctcctgcatcatctaatgctgtcttttagtatgtggtacttatctttgagattctcccactcatcatcttatgctttgtagggttgttgcataatacttatttacatataaatatcccccaattttttatttgagacagagtctcgccctgttgtccagactggagtgcagtggtgcgatctggactgactgcaacgtccacctccccagtttaagtgattcttctgccccagcctcctgagtagctgggaccacaggtgcccacaaccatgcccggctaatttttgtattttttttttttttttttttaagtagagacggggtttcaccatgttggccaggctggtctcaaactcctaacctcaggtgattgatccgccttggcctcccaaagtcctgggattacaggcgtgagccactgcgcctagccccaaaaaataatttttgaaagttaaactaagttatctaaacttgtacattattggaaaataacaattgaaatgtaaaggtatagtcatgcattatttactaagaatgtattaaagattgctggagctgaggtggatgtaaaaaataagaatgtattgaagacaatccatgactgttcctgtaataccatacttttgtgttgatgcgctttaaaaaattagtgtctttagtagaaatgatgcatgcttattgaaaattagaacacagataaattatgaaagtagtaaaaccacagaaacaatttttctatatatatagaaacatgttttaatatactgtcttaactttcttacttgataatctggagtcatctttcagggtaatacttgtatcccattaattttagtggctacacagctttttatagagatgtagtgtactttaatctcctaatgatggatctatagattgcttctattattttctcttacaatgtcgctttatacaaaactgtctatttatgtggacttgttagaataatttcatagaagtttcaaaatgtgtatttgctggaccagaactattttttcccttacaccttgaccagcttgcatattggataccacatgattatcaggtataaaataaaatttatgaatgtattcaatatgaatattttca

SEQ ID NO: 34777 - DNA, 2300 bp, Homo sapien
aatagaatttttttttgataaaggatcacaaaacaattctaaaacctaactgtttttaccattgaaatttaaattgtgataataggttttaaatgtctagaatgcaactgataggcttttcttgaactgttagtttttttgaagtagttttttcatgtttaatttgtatttgtaaaaaaacaaaaagcaaaaaaattcccaaaacccagataacaaccagagcaaaactgttgtgccttctatttatctttgatttcagtcttggcaattgtttaaaaaaaaaatctagatttgttttattaggttcagagtatgtggggaattatagaatccctctttcatcactttgtgtatgtcttttgttaacatatttgttatgccttattctaaaattgagtctcaaactggaatgcctttgaagacagatgcttctatagaggttctttgacctaaatagttcagcatttgtatttttattctggtatctaatcagattcctaatcatagcccgtaagaaggaatgttactttaatattggactttgctcatgtgctcgtgtccgcatttttttttttcttaaaatcatagccatatggtaaattttctattttgttatggttctcttttattgatgggcatgcagtgggtgttacttggaaatggccaatttttattaaaatatttctggaagaaaatttaatctggcaatatagactaatactcgtttcacatatgtgttatttgttgagtgctgtgtgtgagatgggtgaaggttttgtttacacgtgtgaaacaaacttttgtgtgattgtcattactaattgaagggcaaccaggttgtaaaattcagcgtatttattttcttaacagtattcatctttaggactgtcgtttgaggatagcataggaatatttggtttgcattactgagaaactctaggtttgctgtgatggttaagaccacagtgaagttggtattaccagtttggttccagttcctcaaatatttgaaaattggcagcatctcctttacataaacttaatgtaactgaatcacatggcttttttgtagggttaaagtaactttggtaaccacttttggcccagatcactgataataggaagaaatacaacttatacttttgtagcttatattaagcatgtggtgggtggaaagaaaagtttagtctgagtcactttggaaaaaaaaattactttgtggtaacttcaaggtcataaattatggatagcctagaaattatccttcatgagtgaatactaaattatacatttcaaaacagaagttcttcctacttggagacttaagggcattaactagatgcagcaatcctcagcttggtgttatcacatactagaggacatttggaaatgtgtgaaatttggaagggttgttggagagacatgcatctggcatttattgggtggggtctaaggataccaaatgttgtgtaaaaatgaagcaaccccattgagaacactgatagtccctattcctgtgggtgggtggagctgtgggattaggaaaactggaatgaagactcattcttttgaaactcagcctcagataaataacaaactaggaaatggaaatctgtttcaagaattgcagtaacatctactctaaggaattagtaatttcactttttattatttgtaccaaatgtatgtgtgtgttgtgtatgttggtgtaaatgtggagaggtggtagcaatacatactgatgctgcttgtaatttgttgcagggaattactgcacaatctcagaaaatagaaagcttccccagtgctttctgtcatcagagttgggatgattgtgaggttttgaatgatagtattggacctaagaaataggattagcatcatgatcagaactgttgagaatccttgtacaattatgtacattattgcatgtagagtaaacctgagagcttagagatgtatacgtttccactgctggaaaatcattataagttagggcaacattttctataggtggcagcagtaggagctcatcacattgaacattttcagattttaaaatgaaaattttcatccgtaggaatggcccaatgtatagttattagctactgagcttagaactcttgacccatgagattttttttttaaatttttatttttatagaggcaaggtcttgctatgttgtcaggctggtctcaagctcctggcctcatcagttctcctgccttccaagtagccggaactacaggtgtgcaccattgcacctggcctcatgagtattttagttagataagatttg

SEQ ID NO: 34778 - DNA, 2300 bp, Homo sapien
agaattaggcacgatacaaatcataaataaatttgtatacacagtaacctacaagctggttttgccctagcatactcacaaatgtacacaaacacatacgcaaagataatacttacctcaaggtttgactgtgaaaagtaaatgagattatgtgaattcacagtaatttctgacacatagaaaccatgctaataaaggttagctcttgattacatatataaaaatacatatattatacattatatttaaatttgtatccaactcatattaatatacaccttcaaaacaaaatttccttttcagtcactatgcagaatatcatggaaattctagactgtgggagccaataacagaaccggtagtgtggggtatgctattgtagtacagggggaggggaggggaaatcctactggtaagaggctagtaaacaagacttttcagatcctttctgcttgggagaaggcctagccttggagggagctgagctgatgagtattcttgggagatcagccaaaggagtttctaacgttattgggtaaggaggaggggttgtcctctctcagtagccttgggcgagagagtccccagagtcccaatgagttcaaatcagccagaaaatcctttaaagtatttatcctatagtcccacagcttggggaaaatctgattaactccatctcaccagatgggctttacagtgaaatgtatagctggtttctaagattcaaataaggtgggaaaacagaggaagaaataacgaaatgtgagtcataacacatccctgtgtgtacaacttggctctgccatcaatttggagcaagccacagctctgtgaggctcagtttccccagcatataaaaggcgaataaaactgtctcctgtccagttggaagaaggtgcttttattccctctcaaaagggtgccagccacaacacctcccactcaacgctggaaactgctcaaagaatttctctcgtatttccctgctgcggtgaccctggagggggtctttatccaccagacttctttttggatattcctcctttctttctagggccaaatattataacttcagagctcttttaaaaaaaatcagggatctggttcaactcttcccttttaaaaggataaattgagcccagagcacgtcttaacaaggaaccatgtgttttactcacatacaactgcattctttaaaaatcaaggcaaccttttgagagacctagagagattaattccatatcctctctcaccccaccgcttacacggaaagaagcttgggggtaggaaggggattgcgcagatctcgtccagcactctaagcgttaaattcaacccggagtctaacaggctattggccgaataccgggagaagatctggttttcgtagccgcgggccaatgaacacctcgagtgggagggtttgaagatactaaggagttttccccctttttttttccccctcaaccccctcccatcggctatcacccctcccatcccccacgcctccagtttgttaaattaatgcagtaagaaagtctgaagatctgaaggagtcttgaccaagggaagatgagcgagctcagaaaaccgagatgcatctgagacattgggcttcagagccccgcggggtagccagggaccccggtagcccctgaaacttgccctgggctctctgacgcctgcggccccgagcaatgggacaccttttctgcagtgatcacaacttattcggcggggaccgggaaacaggaatagcaaggcgacagcagacccgcacagaggcaggagaacgagattccgagactggattgcgatgcgccagcctggcacactctccgagatttaactgaaggcagcgccgtcaaccgctttcccctcgcccctaaccccctcaggccggcccagagccataaagctctgttctctttacccaagatgctcgcccaatccaacggtccgaggccagcgctctgatctccacagaagatttttttccttgcagggagctggccgtttaaacagaaaaacaggggtttaaaaaaaaaaaaaaaaaaaaggaaatatacccacccccaaacgtgcctccccagcgccgcagggagccaacagacacgctggagtttaacaaacagcaatactcttcgcgctcctgaaaagcaggtctggacgctctccgtggtgctgaaacgcctcgcagccgccgctgtccgtggtatctacgaccccctcgctccaatttcccctggggctctccctccgcgcccctgttccccgcctccctttaacatctggattat

SEQ ID NO: 34779 - DNA, 2300 bp, Homo sapien
tccaaggatcatgggaatagaactagagatttaaaaggaatgttgatgcctctatttaatgttctgccacacaggatctgctccagagtcccaaaagattcatcttctatgtgactcattgtcctgtggagccaacccattttactgatgaaggacataattgttaacggacttttactgaagtgagcattaccttttttcttatgctccatggacatctcatcaaggacccttgaagtgaggttaccattcttagctcccacagcgaagagatctcaggagactggacactgaagaatctcatcttgtataaagacagaccaaggtatgatggttttcctttcaaacctataatccttatgggattcattccattcttttcctgctgccaggatatttaacaagtatttccctgacaaaggaagacattcattgcagagcagatgagaggactccaaggtgacttatttaggccatgcaggggtgaaaggcctatgttaggtcaggccaaaggtgctcactccctgagatgggcaaacagcttggctaagacaccaagagatcacagccttctcattaaggctctgtgcagatggtggtacccacccttcctgcatgtggtgtttgtctgcagaggctgagaacatgctagggcaaaagccagatgcctgggatttcccaggctgtctgtccagtgagtaatagtccgttctcaggggctgctgggtgctgcagaggatgtttctggtgaagagaggctaaagggaggagacccgggtttttgttctttgtcctaatttattctgttatcttggtccagaccttcctctctggcctttagtttcattttccctaagaaggagatttcagtactagctctttcagaccctgaaaaaaagaaacacacactatgtctccatccttcattggctacttacaatgtgcagccatggggtaagcacaggagctgcatgccctccgctggagtgaaaagcatcgtcagtatttgctccctggggcttgccagctccccttctctggcttctgactgttgggttcaattcatggccactctctgccctcctccctgatccctggtggtggcccatgactacagttgtttgataccggctgtgccacctctgggagatgttctggtcttggtgctaagacttataagctgggcctgggtactgtttgacctggggtcctggaatgaccacttagtgggtgcattgcttaagcaggtttcctaacttacagatttattttcttcttttaagatttccccctttttatatctaagggttgttgtgaacctgaacatgagatgaaaaatgaggaggctgtttgtaaagaatcctgaaaatatgagacagtgcagtgggggtgattaggaatgaagatctggctgggacagactgcctgggtttgaatcttgtccctgttgcttctgagcttgtgacgggggacaagtaacctaaccttactgtctgggtaagagggtgctagtactcacctcacaggacttttatgaggattaacatttatctacagtaagtactgagaacagagcttgacatagagctagaactcaataaaaactgttcttgcccttactgttgtgtttttattactgttagtgtgggctgcagcctatgtagagagggaatcttaagtggaggtagagagggatgaagcaggcaagacttcctgaaggaggaaggctttagctggtttttggagtctggctagagggaaattctagagggaagggtgtaaacaaatgccaaaattggaatgttggcagcgttggagagagaaagatgccccagggagagatttagctcagcaatactgagttattgagtgagtacagcttttcttctgcggctcacacgtatgtgtgggatgctgctgtggtctgaatgtgccttcccaaaactcctatgttgaaacttaattttcaatctgatagtattaagaggtgggggcttttgggaagtaagtcatgagggctctgccctcatgcatgggattagcatcctttaaaagaggctgaagggagcctgtttgtcccttccaccacgtggggacacagctagaatgcactgtctttgaagcattgagcaggccctcaccagacaccaaatctgctggttcctggatcttggacttcccagcctcataactgtaagcagtacatttctgttgtttataagttacccagtctatggtaatgcattatagcaggctaaacagactaagacaggggtcttttcgctttactcagttgaagt

SEQ ID NO: 34780 - DNA, 2300 bp, Homo sapien
ttaaagaaagaaatattttccatcttcctcagcgctaagtttatagtctgccactgtgcacccttataacgatccttacatctaaatgagatattctcattaaacttttcctatttcattagaaaaatacgttaaagtttgtaaatagtgattttaacatcaaaacttgcctttaactagagggccctaattctggctctgcaatacctattacatgtctgtaattattattaatgttattgatcaatttttcctacttttccatcttctgtgcacatgctaagacagcacttcctgaccctgctgtagtcgaatgggtacatatgattaaccttggtcaatgagctgtgagaaaaactggcaatgagttacttacttttgggctagagcctataattacctacttaagaccatccagagctctcttttcctctatcacaatgataatcaaaattccagagagtgaccactgcatcagcctaggtttatgagtgagcatagcatgagacagaccctcaatacatttgaagtacaagagaaataaatctgtattgtttaaaaccaccaagatatgtcaatcatttgttacagcagcgtaaactatcttaacttgagagatgacttattcttggacaagtcactttccctctctaatttttaacgtcataatctgatttaacaaataaagggaaaaaattaacatttagtgagcatctcttaagtataagttgcttcgttatatataatttaatttagtcttctcaatgaccataaaaggtattatctcctgcaaaaatattcctaaatccaaagaaatctctcaactccactgctcatagaatccaagccactactatgtcttactagcctcttacctaccttctgttaaaatttctccctcgttaattctccagtgcaaaatcttttaaagacttctccctgccatttgaatcagagctaaactctcttccatggcctataagagtttacatgaacctgtacctgccagccacttcaatctaagcattcatactttgctgaccacttattaaattccagttattctggtcttcctgatatttttaaaacctatccagcttgtttctgcctcaggacctttgcacttgctattacttttgctgagtaatacacttcccttagctctttcatgactgacttcatcattcagacctcagctaaagtgacatctcctgagataagttttctttcaccatccttgataaataattatttatcaattactatctgaaattatattattaatttattcatttgcttgtgtgttttcagaattccctactgcaagaaaagctccactagggcagagaccttgtcttgcttgtacactagtgtttctacaaagcttagaacattccctggcaaatagtgaatcctcaagaagttattgtggaacgcaatcgaattaatgatgcagataaggaaataagcctctaagagtttgggtaactgtgccaactttcctaaatttctatgagtgttcctaattctgaagtccatttgccttttgcttacagcaaagctctgctgagactgaagagtcagttagcagtcagggctaggcactgtgcatgcgccctttcaggcttcggattctatcgttgatgcagttaaaaccaaaaagtcacattaatcatgttatcacattaatccccagagaaccctgaatttccagtggaacaagataacttgagaaatctattgatctcctattttcatcatgctgtacggctgacaagggttagtggagattggtattcttttgcccatggccctgcaactttaatttctatgtctacccagattcccacaactttgcaacctgcattgctcaaagtgcccatccatgaagttcgagtggcttcttttgtgtcagctctgccttcccagctccttcccattcagggagaggtctctgcctcctcccctgcttcctgactcgaagccagcacccctctcctccagtgcagcctaacacactctcattggccctcagcctgtcaaggggaggggcttgtgtctccggggctcttcaaaagggatcggcggtccaggcagcctaacctggagggtgaaacactcactctctcccagccttccttacgaagcctgtgactttcgtgactgctttctcttttttgttttccttttttcttttttttttttttttcctggctcagcttgaaacagagcctcgtaccaggggaggctcaggccttggattttaatgtcagggatggaaaaacttcagaatgcttcct

SEQ ID NO: 34781 - DNA, 2300 bp, Homo sapien
acttttatatgcactgggaaacaaagaaaattgtatgacacactttattgcaatattcactctgttgcagtagtctggaaccaaacccaccatatgtctaaggtgtgactgtataaaaaataaaatgtgatccacaaatatcattgaatggtacaagtatttagaagtcttatggtttagaaatttctaaaaacattagagaagattaaaattattttattaatagtgaacttgcaaattctcttccctcactaagagttattagcccaaatacgaacacatgtgttctgtactcaggcactatacaagttttattactgagggataaagttttacatgtatatcactattaacaggcacttaggtttatttatcactggctacatgtacagacctactaagttgcaaatggcataagatacactgggaagaggacgacaatacgatcattgccctcaagtgtcctgaggtttagttaagactaccagactaaataattagaaaacagtgtaactatataatcaatacttgttttgagttctggcaataaatgctatggtgttttctgagtgtgtagaagattaaggaaggcattcttggcattggaagaccttgaagctggcatgagacttggacaagtaacaagcaaagcataggaaggacacccaagggcaagaaggctttactttcaagtttattcttgcacctctttaaagaaaagtctcattaagaaaacttatgaaaagtgtcaattgttttcccagtttacttcctactctgctttccagaatgcaaagaaacaggattagactaatgtccagttctcatgacttattcagttcaagccaccacaattgcaagttcctttcaaccacaacctcactcaaaatgccaagagaggaacactgaacattcagcttttgtcttaccctcttctgaaattgcttctcttttttttttctacctagccttctcctgcctcacactccaagacgttaggatcaaagggccttctcaagtaacagaagggttgagctgtgcatcacacaaatcaaagggacacacagaacacgataatccttgtgtccctccaactttgtgacattatcacctaggtagatatttgggggcaggcgtggtagaacagaggaagaaataaaatgaaaagaatagcattctttttagtgtagaaggattcttgtcattactaacacttgttgactttttaactgaagcaaaattataactgtatttccagggttaccctctatcatctcccaagccttgtaagtaggcacctctttagggctgctgagagaatggtatgtgagattctcccaaagttatgtaaggtttaggggtagaaggaagaaactacatgtgcggatcagtccaatttccctgaagttaaggaggttttagtggcataggtgaagacaaatttgcctcatagagtgctgcagcctggagacaggtaacctttagcagattacagtcactctcagcttcactgtgcttcacagggatgtgtcagtacccatctcacaggatgtctgcgaagacagcacaggaaacgcattgtgcagggccttagcatatagtacttcatgaaatgttagctgctgctgttactgatcattgtgtgtgtttagcatcttgcaagaaaatgccaacaacatgggacttggaatcacaaaaccctgctttgagtttcagctttggcaataactgcatggaattgggttagcaactatttatttatatgaactcaattttttaaaataaaacctaaaaaatgaagaatacttccttttagctttacctcatagatttgtttagaacctcaaataatgagcacgtttgtgctttgtaaactgtgaagtcctttcgaattgtacttgctttatcctcgaccgcacatctagctgagcctgggcccatacagccttggccgctttcccaagagtgtttcctatgcctccttcctggaagtctgaccatgcccaaggccccaggaacttccccgtgaaatgactgattaaaagtgctcagtgattcgcttgaccgactgcatgcagtattgcatttggaaggtgtagaaatctaatcacattttctgcctcaagggactgagcagctcccaataagattttcctgagtgtgtctctgcagcagttggtgggagtgacacgactggtgagactgagacagcctggggctcagagcaggtaggagtggtcatgtggggagaggagagcacaaccaatggaaagcccaggggaaggtcctcactgtggctt

SEQ ID NO: 34782 - DNA, 2300 bp, Homo sapien
aagaaaaatataagacagctgtctaactagatactagaaggataaacaaaattgagaggcatggtggacatggagcctaagtaataatctacctagaagaaaacactgcatagaggtctgtgggtaaggggtggatgtgtcatgcaacccatggcttcagagtaacttgtgaagggtaaagtcataagagacaagaaaaagtttgagttttttcaaaagcttagcaagagtctttacagcatgttatttagggagctgacaggatgtgtccacttgtttccccaatgagaaaaattggtctgagagacttaattcaagacctaaagaccagtagtcatatccatgactaggtctctggccttgtgactggtagtctaaggcattgcatctttctctgttttttattttatacttttattcacatttttaatcaataaagtctgccagtaactccctcacctgtaatcatcttgtctctggtcattaatccctagtctagtcggacataaagctaaggagtaagactcctaagtccagttttcttaacagtagacatggtagaactatttataccattgataatcctctgttgcatctacggtgctctttcccactgtgccattatatttgctgtcttgtgtcctaaaattagaacactgaatgaataaagcccaaaggtttggctgtgattaagttttactgaagaattagggtaaggtatagcctgggagagtaaagaactcatggattagggcagttattccaactctgtgagttaggggacttcagagatctttcctgttggagtattaggtttatgcaaatggcaagagaggaggtgttgaatgttttgccttaacttctgtaaagctggaattggcaaatagcagcccatgagttaaattcagcttactacttctctttgtaaataaagttttattggaacacagacacgctcagtcatttacatattgtctgtggctgctttgatgctaccctgactcaggtgagtagttgtgacacagaatggcctataaagcttaaaatatttactttctggccctttacataaaaatgtttgccaattcctgctacagagggaaagttattgagagtgaatcttgaacgaggttgtgttctagaatctgaagagtacttatgagaatggggtctgtggagtattcactttggtggatctggagccttacttaccacagggctgaggggctccttggccctataaagctgtttttcagatgggctgtgggagggagctgctttctaattcatcaggtcctaaagggactttcacgtgagagaactaatccaaactcagtgatggtgcaagggtacttcttacctctagggacaggtgaatttccactcctgtgtatcatttactttataacagtctagcaatgagcagcttttacttccagctgtgaggcatctgggttggattcctcctttcctctctgctacggcattcctaatgttcccgctgtgtgttgtgaactggtttggcatctatcttcccctccgcagtacccttgcaggctttgccaggtctatatcgtccaatccatcttcctgctgactcaatagacttgccctctgggtgccttcctacacttggggaaacagcatagtttgggttttagctgagaagactcactgagccatacatttattggaattcattggtttacttattttagtatctgttttcagcatcaatcttacatagacagctatccaaaatgctacttgtgtcactgaaaggtcttacctttcccaaaatgtcttgtctatgccatagttcttgaattctcccattttggattaagaaaccaggagcacttattaaaataataatgcttccctattcagtgttaatttacccagtgatatggtttggctgtgtccctatttaaatctcagcttgaattgtatctcccagaattcacacgtgttttgggagggaatcagggggaagtaattgaatcatgggggctggtctttcccgtgctattctcatgatagtgaataagtctcacgagatttgatgagtttatcagggatttctgcttttgcttcttcctcatttttctcttgctgctgcaatgtaagaagtgcctttcacctcctgccatgattctgaggcctccccagccatgtggaactgtaagtccaattaaacctcttttccttcccagtctcgggtatgtcttcatcagcagcatgaaaaaggactaatacacccagctacaaactatcccttaagctaaatatgactggct

SEQ ID NO: 34783 - DNA, 2300 bp, Homo sapien
cctatggtcagtttcaaatattgattctatccatccatgagcatgggatgtgtttccatttgcttgtgctgtctatgatttctttcagcagtgtttaatagttttccttgtagatgtctttcacctccttggttacgtatatttgtaaattttttttttttcagcttctgtaaaaggggttgagttcttgatttcattctcagcttggttactgttggtgtataaaagagctactgatttgtgtacattgattttgtaaccggaaacattgctgaattcttttatcagttcaaggagctttctggaggcatctttagggttttctaggtaaacaatcatatcatcagcaaacagcaacagtttgacttcctccttatgaattcgaatggcctttattgctttctcttgtctgcttgctctggctaggacttccaataatatgttgaagaggagtagtgagcatgggcatccttgtcttgttccagttctcagaggaaatgctttcatcttttcccattcagtattatgttggctgtgggtttaccatagatggttttgattacattgaggtgtgttctttgtatgccagttttgctgagagttataatcataaagggatgctggattttgtcaaatgctttttctacatcaattgtgatgatcgtgtgattttagttttcaattctgtttatgtggtgtatcacatttattgacttgaatatgttaaaccatccctggtatgaaatccacttcatcatggtggattatcttttttatatgttgttggattcggttagctagtattttattaaggattttagcatctatgttcatcagggatgttggtctgtagttttcttttttgattatgtcctttcctggctttggtactagggtaataccggcttcatagaatgatttagggagggttccctctttatcttgtggaatagtatcaataggattagtaccaattcttctttgaatgtctgggagaattctgctgtgaatctgtctggtcctggactttttttgtgttggtaatttttaaattaccatttcaatgttgctgcttgtcataggtctgttcagagtatcaaattcttcctgatttaagctaggaagtttatatctttccagcaatttatccctctcctctaagttttctagtttatgtgcataaaggtattcatggtagccttgaataatcatttgtatttctgtggtgtcagttgtaatatatcccattttgtttctaattgagcttatctggatttcctctcttcttttcttggttaatcttgctaacaagctatcaatgttatttatcttttaaaaaaaccagctttttgcttcatttctcttttgtattttttgtttgtttgtttcaatttcatttagttctgctccgatcttggttatttcccttcttctgctgggtttgggtttggtttgttcttgtttctctagttccttgaggtgcgaccttagatcgtctgtttgtattctttcaaactttttgatataggcatttagggctatgaactttcctcttagtgccgcctttgctgtattccagagattttgataggttgtgccactattgtcattcagttcaaagaattttttaatttcaattaatttccaggttatttaacttccatgtatttgcatggttttgaaggttccttctggagttgatttccagttttattccactgtggtctgagagaatacttgatataattataattttcttgaatttattgaggttagttttgtggcctatcatattttctatcttggagaaagttccatatgctgttgaatagatgtatattctgtagttgttgggtagaatgttctgtaaatatctgttaagtccatttgttccagggtatagtttaaatccattgtttgttggctttctgtcttgatggcctgtctagtgttgtcagtggagtattgaagtcccccactattattgtgttgctatttatctcatttctaaggtcttttagtaattgttttataaatttgggagctccagtgttaggtgcatatatatttaggattgtggtattttcctgtcggacaaggccttttatcattatataatgtccttctttgtcttttataactgctgttgtcttaaagttttgttttgtctgatctaagaataactacccctgattgcttttggtgtccattgcatgaaatgtcttttttcatccctttaccttaagtttacgtgagtccttatgtgttaggtgtgtctcttgaaggcagtaggtctttgg

SEQ ID NO: 34784 - DNA, 2300 bp, Homo sapien
gacattgaggttttgcttgtaaagggtctaaagagcttcctctaaaaggtgattgcaaggtgtgaagcctttaatgacagcctaattattattattaccaggcacaaagcttagggaacctaaaagatccccaggtactattcaaagtagtaagatacaaaaactgaaaatggagaaattaaaagatggaatcattaaatcagagactcttaatgttggcagagaccttagaagtgatctttcctgattctgttctctcatcttcctatgctgatgcttattcttcctttagaaggttcctacccagtgcttgctgttattagagcctaagagttaagagctggggcctgatggtggcatttactgtgtttaaatgcccaatctctttcattagcagtgaaaacttggggtgagtttttagacctctgtttcttcatctataaaatgggcatgaggctacctacacaggtattgtacaaataaatgatgcaggtgcatttcttagcatggtacctggcacattcaaaatagtgaataaacattagccttaaaaattattttagctaattaattaatatatgtgaaagtgcataggaaatcacaaagcatttgacctccaagttgttcctattttggggcttcattgtacatggtcagatattttttacaaatcccagtccttgtagctgtcactcaagtccacatgatatacagtcctggtgagggaagtgaagagtctgtggataaaatggcctattcatatggcaaagcaaaatggagtccaaagtctattatttctttcttactaaagacaaagttgactttccttttcctggatcatctcctgttggacaggagtcctggccagggcagtaagtcaactggtaacggccaaagcactcaagtttgtaggttgtactgtacatcttagtaggtctgtgtctttatgacttaatcccagaagtcttatctttttcatctgtaaaacagggctcatggccactttacaggtttggagtgaagatagatggataaaaatctgtaaagttccttcaaaaactgtattctgtggcggctagtggctgctgctttgcatttaacactactatcctgaacacagctgatctctctacaggttatttcagcagaagccctggtctaggagagtctatgaagttccagcttacaccagacatgaccagcatccagaaagacctgaaagaagcttgaatcctctcactagaatccctgcaaaatgactcatgtaattgctctgtgtaagtatccttagtctttattgtacacccacacgattctgatgctatagactcctgtggaatgcagggaaagagagaagggggcccattttaaatgcctaggattgaaaagagaccaccgtttcacttgtaaaggtagacagggactgtcaaatacctggtcaaaatacctgccagtcactccagatcctcccttgtttgtctatctgtcattccttccattaggagagagaaagcttttttttttttttcctttaaatttcctaggagggatttctagggtctttccctcaggaattagttgtaggaataattgggccagtggagtgcaggagatatatccagcgcagcccatgcactcctagaaaaagtgacctagatcaagcagctggtggattgaggactattgtggggaccccctgccacctactgacttacagctgaacccacattcccagcagcttcagcctgggggctgggggagcgggcagaccgagctcagaaaggcaggggagggtaaagaggactgtggggttgcccctttcaggaccaagtgccacgtgtcacacacccccacctccacctttctgcacacacagaaaggaggataaggtgaggatgggaggaagggggaacaggtagggaggtcggctgtggaactccaagctagctcggtgggtattagcatagagcttgctgcctgtgtgagtgtgagggggagagcgagagagagcaagggagggagagagaggcaggctgcgaggggagaggagagggagtgggggagccagcgctccagctagcatgaggacgggcttcttttcccgtgctcagttaatctggctgtcagttggtgttaacgctgcagtttaagtgttcggattccaagggaaacagacaaacctcacgaaaggaaggaagcaagcaagcaaggaaggaactgcaggaggaaaagaacaggcagaacagcgagaagaataaagggaaagggggggaaacaccaaatctatgattggacctggg

SEQ ID NO: 34785 - DNA, 2300 bp, Homo sapien
aaattaaaagatctagcaacaccgggcccacattcaactctgtaataactagcttgtgctaaatagccgctgggcccttttagctagggcagttgctctccagctccctacaatcccccacgcaaatccacttcactcaaattatgctacctgattaacctctgtaggcatctgagttggcaacacctgccttaaaagaagcttatgattttgacagatgatgatgccaatgacaggattcaaggatatggaaataacatgagggtacagccaaaggcctgaggtctgacagtatggaacatggacagttacagtagggagtagttaccatggcagagagaagaacaatgggaaggcatgaagctagaaaggtagattaagacaacactatggagttcagaatatatgggcatataatataaacacattacacatttccaaaacacatagagaaaaaatccagatacaactactcactgacatacaaaccaacttagaagtagccattcattcactcgcaaacattttttgagtacctactacgtaccaagtagtaccacagtacctgtggagatagagaactaatgtaagccattcactccaagggcctatctaataggaaagacgagacagtttttgcacaaagttcaattaatgttttgtgtatatgaataaatgtttcctatcttttccttatgctctctccaggttgcaacgcatcattatcatcatcataaatatatacagtatactatatgtagaatatataatatacatattacataaattcatataattccatgaaagactggaaggacatactccaaaatatatttttaaagacagggtctcgctatgttggccaggttggtcttgaaccctaggcctggcctcaagcaatcttcccctgcctcagcctcccaaagtgctaaaattacaggcgtgagccaccatgccctgccaaaacagtccctttactaaaatattaaacactggttatctctattctttcatttgtgccagatatttgagctaagccagaagagaattttttatggtgatggttgtttatattatcattactatcgttattagaatgactgtaccatctctttcctcaactcattcataatctaggagaaaggttaaaaaaaaaaaaggaataaacaccaagtacgtggaactgcactatttagtgtttttgtaagtcttccaggcattgtgtagtaagcgtgtagaaataattgtagtttctcctccagttattttctcagttggaggagaaagattccaataactgtaaataaatacggctgagccatatttttaagaaataaaaacgcatacgcttacacacacacatatatattacgtatatatacactccacccgccccatttaccaaaatgaagagcagtacagcttagtagctaagagcacgggctctggagtttactttcttcctgtcctgcagcgattgtggggaagtcaggtcacctgtctgcctctccgtttcctcatctgtcaaatggagttctgggtccctataaagattcagtgacgcgatatgtgaggggcttggaacagtgaccggcacgtaaccgcccacaggttaacagctgctatcacttggtggggtgatggtttgtatcctatcgttattaatacggctgtctctagatgagcaaacatgcgctctcacttcttcccacattcaagaatggggtcccaaacgagagattcgacgtaaacgtccgctcccaactaagttctcaggcgctgacaacgacaagaattcctcacacaaacgtagcgcttcaatcactaaaccgctttcacagccctcgaccctgccgcgagatgtccgccgcccaccgtcaggtcaccgcctccctaacgacttcggctgcccgggccctgcccctgaacctcgcacccctcctgcctcgttcaggaagctccgcacctatccggccgccaccctcagcacagccacggcagccgactcggcgttcctactgccccggaagtgctccttcagcgcagaggcgtgccggtgtgtccgagaaaacttccgagttaagccgccgctgaggccggaaggagctagacggcggtcgggtaggtgacggcttggttggggtcgctgcgaggggactactaggagcgccgaggcgtgagtcgtagcctgtggcttggggtcgggagtgcaggaggcgaaaatgtttgccattcttttgaaagtctggcctgggtgtgggagttcggtcatcgaacacttactgagagccagatacctg

SEQ ID NO: 34786 - DNA, 2300 bp, Homo sapien
ctgtccttagcacagggccactgcctgtggcaagtgctcaaaattttgagttcagacactcatcgacttggtagtgtgaaaggtgtctgctacaaacttattaactttccagagcttcaggctctggaaactattgatggagagaggtgaagataagaaagacacctatcttgagttttagtaggcagaacactctagagaatcatttgactggttttctcactctgtaattttcagaccatttatatcaaattaatttgtggtgcttgttaaagatgcagatttcttgaccccacagacttattgaattgggatctctaggggatgcctgggcatctgcatttttaatgtgcatataggtttattgatttacaaatcaaactcatatttcttttactggcatgacaatcaccgtaattcagtgtaattctcaaaagtgtggtgcaggaactcctgggtgtccctgacactgtttcaaaacaatttacataatattaggacatatccctttttcactcacattctcacacaatatggcacaattttctaaaagttacatgatgattgatattgtaagagaatgaaggtagaagttacgaaaatctagctgtcttttattcagccagacattaaagagatttgtaacaatgtaaaacaatgccattctcaataatttttcattttggaaaatatcctttacagaaatgctatctatgttaacatataatgagtttattttaaaatgaataacctttgttgaaagttgttttctaaaatagtaaatattgatagctattataaacaaaaaccctttgaagttctcaatacattttaaaagtataaagaaattctaagatcaaaaagtttgagaactgctgctataattatcagcagcatttaaaaaataagtggcttcccaagattccatactttagccccaaattctatgcattttccattacaacagaaaatcagaggaaatgatccattttatatttaagcaggggtttttttgttgttgttttttggaattttaacaagcttccaggtgatattgatgaacctaaatttagagaaccactgtcaaaagcaaaggaaaatatctgaagagttttagaagtgacaattactcttatctgggaattaagatgataattccgagggcattaaatggagttggaaaacatgagttcttaaaggctaagtcccttcacctctctgggattcagtttttcttatctgtacaataagattgattttaatattttactagctctgtcagtctggatttcatgcattttcactgctcgagggcaacagaagagttgcatctttctgatgaggtcccaggagtaatcttagagtcataaatcagatcatgtcattcatctgcttagaaaccttcaatggttttccactggattccaaacaaaaatcaaactctttatccttgctcataagccttacaagatttgggctcaagtccctggcctcatctctctccattctcaccttgctccttttgctctagccagtggcctttgtcttttccttgactttgctaagtttgttcccactatatggcctttgcacgcgctattctctctgcctggaatgctctattccagattttcatacggcttattactctcccacttcgttccatcacattatccagtctaaatttctttacagcacttactaccaccttagataatcccgtttgttgacttgtttataatctgcttttcgcactgcttgagagcagggcccttccgttcgttgactgatgtgtccctggagcccagggcagtgcctggcaggtatctggctctcagtaagtgttcgatgaccgaactcccacacccaggccagactttcaaaagaatggcaaacattttcgcctcctgcactcccgaccccaagccacaggctacgactcacgcctcggcgctcctagtagtcccctcgcagcgaccccaaccaagccgtcacctacccgaccgccgtctagctccttccggcctcagcggcggcttaactcggaagttttctcggacacaccggcacgcctctgcgctgaaggagcacttccggggcagtaggaacgccgagtcggctgccgtggctgtgctgagggtggcggccggataggtgcggagcttcctgaacgaggcaggaggggtgcgaggttcaggggcagggcccgggcagccgaagtcgttagggaggcggtgacctgacggtgggcggcggacatctcgcggcagggtcgagggctgtgaaagcggtttagtgat

SEQ ID NO: 34787 - DNA, 2300 bp, Homo sapien
ggcaggttaagaaatgaggtggcattaaaataaactggagttgtggggggctttttgttttggttttggttttactacagagagagcaagcctccagctcaaagcctttcagcaggcagtagtatctctggaagctaataacacttctttgttttcattatgtttatgtgtacggttacatttgtccacagaactgatgtagagtttcctttttaaataaatgtgaaagtaaaaataaaatgagttgatttaaaagaaaagcagaaatgacgataatttggttcatggatatagtaaaaacaacaacaacaaaaaagacaggagaaggaatgaatgaagtttgggaagtgctgccctggatgaagctataggaactcctaatcaaagttctggagaaagcctggagcattttttcagcacactcatagcctgtcaccgttgagaaccactaatctagaataaagtacaaaattatgtcctccaattgctgtatatcttgcagtgaaaaagagcttggaaacttacatgtcaagcccctagcacagtgcttggctgatggcagtcattcaataaatgttatttccattgtttctacccatcaccccctcttaaaaaagagactgtattccaaactagattctcctactaacttgtagcatgtcgtaagaagcaaatcactgtgcactgaatcaattagattatattacttccaaaatcccctctctgcctaagtctttgtttcctttagtgtcctttttgtgcggttttaggaggaaatggaaataaacacgtttagtgtgtcatgtattgccaaagtctgaaggttttttattttactctgtataccccatccttaaattgtaaagatttagaaaagtatttgtcaccattcaaccatcctttcaagggttaattaatgaaaattaaatgacatttgcaccgtattgtaatttagactttgagatatttaatggcaaaatacagtgattcattgttttttatgttctgtgatcaagcagccttcatataaatataaaggagagtaaatgtcatttccaaaactaattatcttggtgctttataagacataaagctaggcatttcatcccatattttatagaaataaaagttgaattttttctttgagagttggtggcttaaagggggagtcaaattaccaggaaggtgatcataaatacatagacttttggactaggatgttattttgccttttattcaagatattttgctcttcttttaaatgtgtctaacaatctgtccctgtagttttatatttgcatttctactaactagacacttaagatgtcagttcctcccttagctagtttacagagtttgagctagaaatttggtatgcttacaaactattaaatacactgtactttgtctcttcgtattggagaaactattaaaagaaaattctgttgtctaatgttcttgcccatgaaggaggttccatagctttagaagtcaataactctatttatgtgtatgcagtaagtgcagctttctttccagtgttaaaacaacccacctcaggtgtccctgcattatttatatgtaacatatcttcatacttgaattactcaaattttgagctccatggttatgattatgatatgccagttgatttacattataacaacagatggtaatggtgcaggttgaaataaaagatcattaagataaatattttagccttcattggctccctgttgcataaaatttgtcagaatgaaatagaatcatggcatttcagaattggaagagtccttagagattatctcatccagtcccttatttgacagaggagaaaacagaaacccagagagaatgctgcttgccaaggtcgtacagctagttagtggcaaagctaggaccaaaatctaggtctgctatttaccaattcattgctttttctgctgtctctgtgtgagatttttaggtactgttccatctaattactccccaatgtcagcaccaattattctaattaacatctattcattctggaacatacgcactttcaccccattatgaatctcagttggttaaactttgtatctggctttcttttaggttctctactcacatcttttaatcttgaagactagaaaatataactggatctaccacttgtttggaaaatttctctaccaagcaataaattacccgctgtgcttttgttgtagtgtagaagtttttgagttctccaaatctaaacaagattttgtcccattttcccatgaagctacattgttgcttattcactttagtgg

SEQ ID NO: 34788 - DNA, 2300 bp, Homo sapien
tatttttttgagatagagtctcgctctgttgccaggctggagtgcagtggcacgatctcggctcactgcaacctctgcttcctgggttcaagcgattctcctgactcagcctcccaagtagctgggattacaggtgcccgccaccacgcccagctaatttttgtatttttagtagagacagggtttcgccatgttggccaggatggtctcgatctcttgacctcgtgatctgcccgccttggcctcccaaagtgctgggattacatgcatttttaaatctgactctcattcgccaatgggtataagaaaagcatgtacctcacagggtaactgtgagcatttaaagaggtaatgcatctcaagggctgcctgacatagagtaagcactcaataaaaggtaagcattattgtgatggaaatctaaagaaagaaaacagttccctgaggaggagttttagaaggcttcgtggaggaggtggcagtttaactagacacggaaggatgaacaagatttccaccgacctagagaagggggttttatgggtagaaggagctgcgtggtcaacagcacaagaaggaaaacacaaagcctgcaacaggctaagcgaagctcagggcagggcagggcagggcacggcaggagacagaacgtttgatcagccctagcaggtcataggagaggagcatgatggactctagagccgaggtgatggaagccttgaaggttttgctgcagaaatcaagaactgagctgtgatgtcagaaaactgaatccccatcgctcagcctggagctggaagaacttggaggcaagagttgccagaacgctggtcaaggactagtggcagctaggcacgaaggtcagcggctgagctagagaagcagagaatcaagaggacgaatgtgggggtggcagagagtaaggtagccaagggggtgctccgttccaccgcatcagggaggaggcagctaagtgaccagcgtcgagcgccccgaggaggagccgctggctggcatcaccgtcggagtccggctccacggccctccgcatcgcccagaagcccgactcctctgtcaaagccctcgccacagttacagacacattgcctggtctagtgaaattacgtgtttcatgtttcagctcccagacgtcagggctcaggtctgttttcatttcatcccagagcctggcacagtgtttggcacatagtggcgctcgccaacggtttgctgagagctttccgggaagggctcagtgcgcttaggatccaaaagcacgcgtgagaatgcagggcattctaactccaagggggttggacttgcgtgaggaaaggtgctgcagagaggctaccgtcacttacccacccgccggtttgcaggatctacagacgggcggcggccgggcacagctccctacagtttgcagagggcgttcacacctaacgccagggcccccctagaggaagaaaaccagggcccgcccgcggaacagtgagcgtgcagcacggctgtggccccgtttcatggccgggaacaccgagtcgccggggtcaaagtaggtccgcaggtcctgggggccgagcctaggtgggctggaagtgacagccccgggggctccaggctcagaacgcccggcggggccccagcactatttgcatatccccagggaggcagcaaaggttcggctgcagtcccgggcggaggttgccgggcggggcggcagggtacccgggcgagcggacatgcaccccacccagcggtgcccagcccgcaccagttagcgcccaactcgccaactccgggactttcgcaaagctccagagggcgggggagccgccgaggagtgggacggaccatcgcggctcgagaggggggaagcgctccggcccggcatcctgcagcgcccgggcgggccgagacgctccgtgagagggccgagcctgcagcgcagagactcggcggtcgacgcgggggcaggcggcgcggggcgggcggctcggcggggcccgggggcggtggcggcggcgacgaccccctcgtggcggcggcgtggtggcggcgcccagctccccggccggcgagcggcggaagtgccgcggagttggagcggggccggcgccgcagccgcttctgctggctgagctgctgccgccgccgggcggacgggcggacgcgcggagctgggggcggcgcggcggggccggcggggcgcggcggggctgaccggccccgatgaggcggaaggagaagcggctcctgcaggcggtggcgctggtgctggcggccctggtcctcctgcc

SEQ ID NO: 34789 - DNA, 2300 bp, Homo sapien
ccaccactattgattttttaaagttacattatgacaaaaccagcttaccacaaggctctgaatagagctggtgcaataacttaactgatgataagagaaatctggagatgccagaaaatgagaagggggaatgggtgctgctctttttttgtttgtttgttttgttttgttttgttttcagatggagtctcactctgtcacccaagctggaattcagtggtgcaatctttgcttaatgcaacctctacctcccaggttcaaatgattctcctgcctcagcctcccaagtagctgggattacagacctgtgccaccacaccaggctaatttttgtaatttttgtatttttagtggagttggggtttcgctatgttggccaggctggtctcgaactcctggcctcaggtgatctgcccacctcggccttccaaagtgctgggattacaggtatgagccaccatgcccagccggtgctgcttaaattaagaaagaaaacatttgggaagagctgatttgccagacatactagaattattaacactgggctaaccagcaagacaagagtaacgagcagtggagacattaataataataataacctgcatctgtcgaacgctaactatgtgccaggcatcttgcctgcattacctccttaatcatcacatcattcacattgaaccttctcattctaattaatacaaagggcaaaatcttcagactcggaaaggctgaaggcatgtccaagatgacatagctggggatggtagggctggccttggaactccactccatctggctccagggcctgaactctgcattggtctcctgtactgcccttctgaagcttccctccctgagcaaacacttctggtctcctgcttactgtgtttgggtccctcatgttatctgtcctggggtctaatccatgatgtcttatgaagcattacaagctgcagatgacagagacctgtttcttgcctgactggattggagtagtcagagcccttgggctccacgtctcagcttgcaccttcctggaaatctgactttgtcaatgtttactttgcagagtaaataggtgttgctcagtccacaagctccagaaggcaagatgatttttaacccgttgattttattgccatttcttcaagatcctcaccaatgacagattcttaagctactattgcaggggtcgatgtggacattcccacttaccatatgcacctgggaacctagagaaaaatttcctggagtatcacactccttctccagatgggttgtgcagagaaaggaaagctagcactttaacccacccaaatccatgactcaaagccacacttttcaggcactcctggtttagagtaggcagatcttaatttgtttgctgccctaaaaacaaaaataaaatcaaagcatctttcatcatttatggcaattttgatttacttataaagtttgccttatctacagtaatcatctttcctcgtgtttatgaggtgttttgtagtttacaaaaagctttcaaataggcaactctcatttgactctttcaagtgtgctgtgggtatcagaggaggaagctttagctctgagagctggtgggacttggcccaagattgatcagctcacagatggtggacctagctgtccagtgactggtctgcgagggcaggggtctttggagttcctgacggagtgaggggagcatgggttttggaatccatactcctgatttgataacctttctcagtctcagattatcattctgtggaatgagaggtctcatgtccaccccgcagagctgctgtgattacatgagaacaagatgtgcaaagtgtctgaataaatgcttgctcccctcctactctttgtactgagcaaaaactgagctatgctctatatccaaatcaagttttatcttggaggtttaatcatatttttcatcctttttccccactccatatacagtaccccatacatcattagcaacatcgaatttgctctttgcttctaggaaatggagaacaaggaagaccttaccccatgaccgatgctgagagagtggatcaggcataccgagaaaatggatttaacatctacgtcagtgataaaatctccttgaatcgctctctcccagatatccggcacccaaagtgagtgtaacatctctcaaattctgagatctaaggatgtttccctggctgttgttgagaattaattaaggaagcaggtacatggagccctgctgacggagacaccctcctctttcacaggcatttgtgcaaaggttcatggtgttg

SEQ ID NO: 34790 - DNA, 2300 bp, Homo sapien
aattagggcaaattgatttctgctttctacagagtcactgtaccaaagagaagtgggaaagggcgagggaagccatattaatctttgtgcacaagcaagaaaagacctggagcattttttagccttctagcctctggttgtatgtatgtagatcatcttttctctgtattctaatttctcctgcctacaagatgccagacaacataacacgaaacacacttcatctcaatgaagttcctggtgacaaaaatcaaagtgatggaagcagtgtttccctaagtgtaccagcacaaaagtcatttttttcactcattcattcattcattcattgagacaggttcttgctctgtcatccaggctggagtgcagtggctcgatcatggctcactgcagcctcaacccggttcaagcgatccccccacctcagcctcctgaagtgctgggattataggcacagtgcctggcccagaagtgagtttaagtcacacctaaaatattacaggtggttcagagactttgcattaaaagtaacactggataacgtggagggaaagccttctcttttcaattctttttcattcttctgatcacctcaaatgaggagccttggttggttttccacagctccctccttgatgaagagagggcagactttaagctcatagttgtggagaggcaggagtatctggtagaaatctaaaatcttacaacaaattcttatttgttggagatttttaattattagctctttattagaaatgataccaatttttcatctatggtgtttaaagtttccttttaaaataaagttaataaaaagtttaccttgtaaaatttagttgacttttaaaacaactaagtaaattgtagtaaagtagatgaatgtggcaaaaatctagatggtagtatatgattgtcagaaactggggaaacacagctagaagaaggaaaccatcatgtttccacagcaaacccaggaatttactggccgtatgtctaatccttatgccttttctttttcttaccagttacactggctaggaattctagtacaatattgaatagatgttgtgaaagcatacagcttttctcctgatcagaggaggaaagcattccacatttcgtcattaaatatgatgtatgctgtaggtttcttttgcagccatcctagagtcttcataaaggaccccaagcctgattaaaatcaagagacaccaacattgaggctgagacttttaggagaaagagactgtctttgatatttattcaaaacaatttatccagacttggggcagaaatccagcccacattaggataagcaaggagaggaatttgctgtcttgtgtaataagagcatctaggagtctgtctgcttcaggcacgtgagtctagggaactgaaatgtcatcaggacaatgtttctctctctatccatgtcttgactcgtatttttacaggttggcttcagtctcagcatattcacctaccacctctcatcacctcatttcaccaaagatgtcacgagtggctccaaacttagggccaaccagctagcaaaaggaaagggcctcatttttcaataatgctgcagaatattctcaggacccattatttgagccaaataaggtcacatgaccatccctgaaacaatcactgtggccaagggaatggaatgccctgactggtcaggcctatactacatgttggacccagggaatggggtcagccccaccaaagtctgatggactgagaagggaaggggcagtgtcccagataaaaataaaaatattgttaccagaagatgagggaatggttcccagtcaggcataaaccacaaatgttcacacccttggacagaagatctctctctgttccaggtcgtggcaccttcactggacctctttaagccttaatttctccatctgtagtacacaggtgatgagaacactgcccttcttctccctgtctgaaaggtctagtgaggcagtgtacaggaaagctgtgtctagactgtgaagtgcagttcacatgtaagggaggagtcataaggatgactactaagcaactgttctcactcttctgtcctcttctgtctcatagagcacctgaagaagcctcttgaagactacatggcccttttccccagtgtgaggattcttcgaaccaagaaacgggaagggctgataaggacccgaatgctgggggcctcagtggcaactggggatgtcatcacattcttggattcacactgtgaagccaatgtcaactggcttccccccttgcttggtaagggagcccct

SEQ ID NO: 34791 - DNA, 2300 bp, Homo sapien
ggatattctgcaatttcttagttaatggaattaataacaatctaagtcggaagtggcaaatagggccaggaatggtggccgagatgggaggatctcttgagcctaggagtttgagaccagcctggacaacacaacacgaccccatctcattaaaaaaaaaaaaaaaaagaaggaaagaaagagagagagagaaggagtggggagggagagagggagggggaaagggagagagagagacagagagagagacacagcaaataggtttctactccctgccaggccaactctgatccattggtaggggctgccccaggtgggtgttgatatgcattctgaggctgcttccaagcttatcagcaaagagtagtcagtgggggagggatctttttgtgtttcactcaccgccatatcccaagtacctaaagcctggtccaacacagaaaagacactatgagaccaatttttatgagtcataatttttattattgtattaaatcttttctaaaattatatttatataaatatcttataaatattctaaaaatatgtaaaatgtataaaagtctagtagttctgatataacactgtcagccataattctggttatcatgttaaaatactacatataataaaataactaaattcaagaccagcctggccaacattgtgaaaccccatctttactaaaaatacaaaaattagccaggcgtggtggtacatgcctgtaattccagctactcaggaggtggagacaggagaattgcttgaagctgggaggcagaggttgcagtgagccgagatcgtgccactgcactctaatctgggcgacaaagcgagactccatgtcaaaaaaaaaaaaaaatcaaaaacctttatcaaattttaactgggattattctatttttctcacttatttagaattattattctaaattcttctataaaggcatttacaataaattctagtccaacattgcttttcataaaaaagactccaataaatataagtataaaaaataatacaattaaaagtatacaaatatatattccaattttattaaatatcatattttttccagtctacaacagactttattactatgaagtctgtattactgtatagaatctataatatcctcataataatcctattaaaatattgtattaaatacaaaaaaaagacaccatcaaaaaccccctgcatcctactaatgagaactaaactcagtccaaaacatattttccaagaaaaggctaaaaaacacactaggtctgatacaactacaactaaaaattaccaaccttcctaaacaagagcccttctaactacagatggcaatcaacattaattcttaccaacacaaccaaacaatttatgaccaaaaacttcgtgaaacaaagtggcaaatgtaagaggccgtgtttgcccatttccctttgctgggagaatttcacaaagcccctgactccgggacactgtgcagctctctggaaaaatgttttaaaggcaaaacaggatagaacgcatggccccccatgtctctcgcctgagtcactaattccatcaaagataaatgaccctagtcctcgcctttctctactcataaaataacacccgacaagaatagtgactatgtttctgtaatctataaccagatgtactctaacacccaaaccttgatgtaatttttcacatactaaatcttcaccacctatgtataaactaaaatactacgttggaggagtctgagagaacctttctaaaagcctcctcccaggctacaggccttggtctataatcctcaagaagacttctaaataaaactaactttaattctttaaaagcttcgttttttttctttagttgacagcagttaacaaatattggctgaatactccaagtaagtgtgtccctggccagaatcagcctccaagctcctaactggctccttgctctagaagaccctcttcagaacccccaccatggagaacagtgaatggagaaagatttgcacaaaggaatttctaaaccagcccaaaatgatttcattctatgtgtttcaaagacccatctactgatgctcatcaggcaattatggcagaacaaatggcatttttctccacagttatttacaatagacttggtaatgaagccatattggaagtatctcatccgggagggggaaggaggctggcttacatttccatttgatccaattatgtccgtcactctccagaggaaatgagacagtgtaatgaggaggctcctgaggtccggaagggagacttttctccctggg

SEQ ID NO: 34792 - DNA, 2300 bp, Homo sapien
agccctgtgcacatcccctctcgggagggccagagtacatcagggctggggatggagacagcaggaagtagtgggggacaaaggaccttttaggagccaggtggaagagcaagcccttctagagcccctgaattaatcaagatgtgaagcccaatccccacgacctcatcgagcagttccaactgaaaagagcacttttgcacagaatctggtttgcagatgtccccattcctgccccccattccacaaatgagagactatggtagcgagattcataataatgtcctgaatccagctgtgtccccccatcgcctcagcacccctcacccagggtcaggacggtctcatatcaggacgactgcaagagcctcccgggcctactctccctgaggcctgccccatcaggctgttctccaccccactggcagagtcatctttgtaagatgtaagtggattgtgtgtctccctcactgaagaccttctgtgaagactccttgttctgccccgtgagggccctgcgggagccctgcccgcgtctctggcctcccctcccatccctcttcccctttctccctctgctcctgccctggctttctttttgattatgccaagcttggccctgccctggtgcctttgcacttgctcttctcccacccgttcccttgcctttactttcaccttcttggttccacctcaaacatcccttccgaagtgaggctttccctgactggggagcataaagtagcatctctcacatcccatacacccctacaacgaatctatgcaatggccctgctctgccatcgccacctgaaaccatctcccatgttagttacctatgccaggaaaaattacccccagaatccatcttaacacaatacacagttatgatggcagcgcttccctaggccagggatttgggagtggcttggtttgatagctccaccttgggtctcgcataggagaatagtcaggccatgagccagggccgcagtcatctgcaggcttgactgtgaccacgacctctgcttcttggtggctcactgacctggctggcaaattagtgctgtgggcaggaggcctcagctctcaccgcatggacctctccacagcatggctggggtgtcctcaaacatggcagctggctcctccaaagccagcggtcccacagagaaaggtggaagccacggcatctttatgaccgtcatttctgcagtatcctgtgggttacacaggtcagtcctcatgtgactcactgggaggcatctacacaggggcacaaatacgaggaggcagggattgtgaggccacttcggaggctggggcctcggctgactgattcactgctgtgtcctgagtatgcaccagatcttgtgctaaacccttttacacacaatatctcatcttccagtcctgcctcctctatttctttacaggaaactgagtctcagagaagttaagtaccttaatcaaagtcataaagtgggtaagtggctgagccaggattcaaacccaggcctgccaaggagggtctgtgtaggccaaagtcatcaagtgggtaagtggctgagccaggattcaaacccaggcctcccaaggagggtctatgtaggctgggcccctcagtgggtatgagtcagtattggctgtacatgttcacattcccaagttgctatcagaccagtgggcaaactcaggagctctctgtgatgtcaaatactcctccctgggagagggaggcaaagagaaccatcagatcccacactgcggcaagacccagctgcacagcctagcaagccagactcagagaaggcagggcagggaggctgacggaactgctcagggagacccagcgagaggctcatagatccaggaggaaaataaatatgtgacagtaaatctacggaacctgtgtgccaccttgactacttatgctgtggctgatgtcactttgtgatcaccatggtctttcccactgatcccccgatgccaccctagaattctcaacacagcactccatagtggattagagctcagattctgaagtcagctaaaacagggtttaaattttggctccaccacttactctgtgacctgagtcacatttcttagcttctctgagcctccatttcagcatctgtaaaatgttactacctactttataggttttctgatgaggcttaagtgtggttgtgcatgtgaccatcttagcatagtgtgtggcaatggtaagcactcagtgctgtcagctgtttttaccgctgttattatattactgtgttttcccatgtcattaggtc

SEQ ID NO: 34793 - DNA, 2300 bp, Homo sapien
ctgctcatgcacacgctccagtgtcccatcagatttcacttacaaaacagttcaaagataaaattattcagaatttcaagacagtggcagcagagctttaaatcaagccaggccctcctgagcatggggacctgtgaactgcgcatggtgtggcccgtgaggcccatgctggccgaggcagaccagtctttgcaagcagacgagcatgccaccatgggatcctgggtctctgagctgagaggacctacccattcattgatggataggttggagcttggaaaaggggagcataagagttggggctctttcagaagaccaatttaaagtaaaaaaaaatggggggaatatattgtgtttgactcacatatgagcctggggtagctatggcttaagacaacctggatccagggcttcaaatgatgtcagtctcttcttctcctgctgaactcatgttccttttgtgttggcctcatgctgaaggtatcaaaatggcttccagaagcttcaggctgaccaacccctactgcttggccaacccagcagaaagtatatgcctctttcccagtataccagtaaaggtgcaggaatcaagtcttattcttggatcctgcacccatcactggggccatcggggaagacgaaaagcaagggtaggatggacactacggctggccacagggcgcgtgaggagcagtagccccatggaaagtcagggtggtgttaccagaggaaggggagaggcatggtgggctggcaggaacaccagctgtgatttgctcaaattcacacagcagtcacagagcccttgcctggctcagctgcctggctagcctaccccaacatcacctccagtttgcaggagcactgctgtgtggacttccctcatgaggctctttggctctttactagtttgttggcttcctcacttgtgttagttcaagtcctccaagaagcagatgccacagtgggattagacacgcaagagatttatggttaaaacacttgagaggaaaaatgaagacacctggggagactaggagagccatgagaccacaacagtggtcttacatctgtgaaggggtgagggaaggaaggagagccgggataggaagagtccagactgcagtaaagctgtaaggaagctttggccaggttgatgaagagtccccaagccaaatcaccagccagaggagttcaacatctcgcaagagtgggtctgcctcacccattggctgggatccatccatgggtggacacagtggtggattcagaatacaggatctgggtgcaatgagactctctgcaacaggaaattgggtggtgcattttcatagccaccacagccccctatccctcagataaagtaggattgatatctgtaaggttggaactacatgatgtgacgctatgcacctagcacaatggcctgcccacagtaagtgcccaatcggtatttgttggctaagcaagtgagcagcctagggcttcagactcctagcccagtgctcttcccaccacacccgtcttcatggttgaaggggaagaggcaactattgttctttggatctcagcagggggtgagggggcctcctgccacctcttgccattcacctgtcctaagggacagagacagtccatgacatacagcaaaggtttcatgtccttttctaggcgctttcaaggtatggtccctggaccacctgcacctgagtcacctggaatgggggtaaaatctggttcctggacctgtcggttcaatttctccaggagtagggccagggagtcctttaccaactcctcacctccactcccccaccaccaacccaggactctgcatactctacaatactacttacagcagtgctttaaggattacattctgtggactgagtcttccttcattgagaggctcaaggtacttccaacagcccagggcaagctttatcaagacgatttgaaggttaatccagctaatgtctcccacttggtttcccctttcacctggcagggacccggtgggcaccttaaggcacctcagtggtccacttcttccctctttccctttcagatccgaaatgtgggcacagggctgtgtgcagacacaaagcacggggccttgggctccccactaaggctagagggctgcgtccgaggccgtggggaggctgcctggaacaacatgcaggtaagggccgcccctcagggactggcagccaggttctctgaaacatctgcagcctggggtgctgacacggccagctgggagggagaggcatgggtcagtgataaatgacaagagt

SEQ ID NO: 34794 - DNA, 2300 bp, Homo sapien
atagcctagcattgaatacaaatgctgtttagaaaaatatggggaacatggaggtttcatccataccaactgactttggacccaacatcacacagtgcctggtacagatacccaagtgttttctacatatatgtctgaacaccccagataggagatattcttttagggcaagggttatgtttcatcctcctcctatagccaaccctatacttggtatacataatgagttcaacaacaatttacttttgaacagaatatatgaactctgagggaagactcctattaatctgtgccttttttccattaatttttattctattttttctactgtaaaaacaaaaataatgcttattaaagaaaatgcaaaggttaaacaaaaggagaaaaatatcagccatattcctgctacccagaaataatcactgttagtactttggtgcattttttataccaatagttttcttttttctttaaacatagatgtacagacatcgtatcctccatgcaatttcatatcctgaatttttttacttatcataaaaaaagcatttctccaactcctcatcagctctttatttaagaattaatggtgaattattctctatagaaaatgtttacattgatgttgaaactacctcaaatgctaactgcacaatctctttctgaagattttaggtagtttacttaaccacttcccttttggaactctgaggttctattttatttttcctattataaataattccataatgaacatcactgtacttcatattatctctgataggcctatttccgacgatggctgtcccacgtgtgaaattaccagttcagatgctacaaatgcatttatggccactgagcaaaacttaagatcaccagccacctgcttctaaacatggaaactggtagctttcccttttacaacaggacacaaacccgaagctccttctatgccctctagtactaacacttgcttacctatcacctaacacagcctcccctcttccctgcccataaaacgctgcccagccctacataattacacgaccctgggctggtcccatcgcctttcggacctcatcagtccccatgctgcgcagttggagagtggcatgactgaagtgctggaccagagcatatcctacggcccctcctggaggggaggtggtgccctgggcgccgaaaccaagcgcagggtcttggcagggcgcagtcgcttcgccggtagacccggggactcaaagcaatagaactacagcttggagctccagggagagcccaagacaccgcagcccttccccatctagattccgagattggcccctgggccccactcccagccttcacttcatctcccctgaagccctttctcttgcccgcggctcacctagtccaccctccagacctcattcggacttcccattcttcccagtggaggggtcgcccaaacccctcggggtctcctttccccctctccttttctttccgcgccgtccaagccagtcccactctccacactctggaaggtatcggctacccccaatattgcgactgccttgcaagatccccccatcacctcctccgcatgtctttccacgtatctgtatggggttgtccctctgtctttcccgccatgactggctttccgtcctatttcacccacccttcctcccacggatccgcgagtcctctggccctggccctttcattttattagtccgcccctctcctgatagcacctctatcctctttaggtcccctcatatgcccctcctccaagtctgtccctcagcgtccccgtccgcgtctctactgtctgtccccgaatgtgttcctctgttcctggagtctggccctcggtccagccaggcccctgctcaccatccctcccccgggccggagagtctgcagcccggttcccggttctcgctggggtaactctttcctcttccactttctctactttgaacccatcccagcagagtccaggaagtagcctggcgccggagactggcggcggcgacgcccaatgggacgcgccagcggcggcggcagccccgcccagagagcaaatgagaccaatggtcgcgtgaaggcgggacttccgctgtcccgcgaagggcggggggagcgaactgttgtggtgcggagcgttcggcgggcggcggccgggcggcccaggggctgccgcgggactcggggcgcagccgagtggctgcaggggtggagtgggccggacgagccgcggggcccgggtgccgcgggttcgaggccgggccccgcgcgaggaggccgcgcca

SEQ ID NO: 34795 - DNA, 2300 bp, Homo sapien
tttattagagacttaatgaagacttatgtatagggcttggaagtaaattagataatatctttaagaaattaaccagcctcttaggtgctgtgtgtacctgacaccctcacttcctatctctgggcctgtttcaaccctaaaatcagaggggaaacgtgcactccctttcagtttaacaagcagtctctgatttcctccaactgtggagaaattctgattctagaagagaatggatgttaaccacctaagctcttagctagtctacctgaatattaaatatccccttaactcatttccaattcctaatcatgaagcaatcacttaaggcttgtagcaacagatgtcaaactaaaaagttcttaattggttgacaataggcacagcttcagaattgttaactagaagtggtgaagtcacacgggaggagtttcctataataagccacaaagagcagggcaatccgatttaaatttaaatatccacccccttatttcaaaagaaactaccactaagaaaattgatttcttttcttcccccctccagtcacatcgactgcaagagccatttctcaagacctggccttggccttatttctgccacatcctagaaaaacccattcccacagctgcctgcgaagcagctagctcggtgaccctctgctgataccgaggatgcgggagccagggaagtaactgccacctttctctgtctgaaggaataacagggttcctagaaggagagagaagttggaaaagagccgggtatcttcatcactccccgctccgattcttgctccttcaagggccaacaaaactaacccacctctccctgctctaaagtctaaaccaataaaacaagttggaaactgctgtccaatctttccaggcagcaggagtcctgaagcccccgcccccatcctcccggatctgggtagaatcacagtcagagcatgtcagcgctggagcggcctttgaaatgcggagtccaactcagttctgcagagccggggcggcgaggcccacggcggggagtgcccggggagtcccgactggagcccagggcagcggacggagagctgggggcgccggggcccagacgcgagcgggggcggactcacgctcttgtcgatgtccagcttgagtttcttctgcgagatgctcttctggaccctcttgctgaaggaggcgttgcccgcgggccggacgcagcgctcgccgtcctcgatgaggcagcagctctggccgtagcccggggcggcggcagctggggcggcggggggcccttcgcggctgtcctcctccgtgctgaagccgttcatctccccgccccgggccggtccctctgggggagggtccccggtaggccactccgcggccgcgcttgccgcggggcaggtcgctgagacccccgcagccgagggtcccagagtccgtctccagcccgggcgctgccctgccccgcgtccgagaggcccggctccctcggcccccggccctccgcctccggaagcccccttcctcccggctcgaggccccggggtcggctcccgcggctcgcagggccccgccgggggtcacccggaggagccttctgccgggggcccagaaccgtaaccctgcagcgggggtgtccgggagggcgtcccaggaaacagccgctccccaaggactccgggcctgggttgccagggggtttcgaaggcccctgccggctcccgccttctttcggcagcggggcaaactcgctgccgggcagctcccccggggtggcgcggcctcctcgcgcggggcccggcctcgaacccgcggcacccgggccccgcggctcgtccggcccactccacccctgcagccactcggctgcgccccgagtcccgcggcagcccctgggccgcccggccgccgcccgccgaacgctccgcaccacaacagttcgctccccccgcccttcgcgggacagcggaagtcccgccttcacgcgaccattggtctcatttgctctctgggcggggctgccgccgccgctggcgcgtcccattgggcgtcgccgccgccagtctccggcgccaggctacttcctggactctgctgggatgggttcaaagtagagaaagtggaagaggaaagagttaccccagcgagaaccgggaaccgggctgcagactctccggcccgggggagggatggtgagcaggggcctggctggaccgagggccagactccaggaacagaggaacacattcggggacagacagtagagacgcggacggggacgctgagggacagacttggaggaggggc

SEQ ID NO: 34796 - DNA, 2300 bp, Homo sapien
gtttttcctttagaggtttcttgctcgaccgtcactttttcttaaacaactccttcaccagtgtccagatgacacacaggaggtcagaagcctctcctactttaaaataacatcacccatttgccagtgttctccctggtggaagggaaagaatgaggtggggcaagaggagacctgcattctcattacttatggaatgaagtattaggagcattagtaaatgatgcattttccttcaaacctgatatgtctttcaggaggcagttatgcactacttagaagaattttggggttcagatgcctctgttcaatttgttcaattggctgttcatttaacacaatttttttttttttttaaagacagagtcttgctctatctcccaggctggagtgcattgctatgatctcagctcaccacagcctccacctcccgggttcaagtgattcttctccatgtttcccgagtggctgggattacaggtgcctgtcaccacacccggctaatctttgtatttttagtagaggctgggtttcaccatgttggccaggctggtctcggactcctgacttcaggtgatctgcctgccttggcctcccaaagtgctaggattacaggtgtgagccaccatccccagcctaacccaatttttatttgtttttgagacaaggtcttgctctgtctcctaggctggggtgcagtcacagctcactgcagcttcaacctcctgggctcaagtgatcctcccacctcagcctcctgagtagctgggaccacaggtgcatgctacgacacctggctaattttttggtagagatgagttctccactgtgttgcctaggctggtctcgaactcctggcctcaactaatcctcccaccttaacctcccaaagcattgggattataggtgtgagccaccacgcctgccccacaattttttaaagacacatttcttcccactttcaaggcctgagaggtttggtagcagctggccaaccagagcagtcccagtctctcctccatgagtatgactgtgaaatcatgccatgacaggtggttggctgccactgaaatagaactgcaccttggaagagttgtaggttaaaaagccacttttggatcctggaaattaaaccacctacatccctggggaggaagggcaaagggcactctgagttccgcacatggcaggaagttcttcagcatttgtcattcccgccacagcatgcaaacaactccattcgcttctttgtacaatgtagaatttgcggtgtgatttgtgcatggtttaaggaactttggtattttccccccacatagactgtgagtcgacacttcaggaacatacctgtgaatgaaaaagagacccttgcctacttcatctacatggtgaagagtaacaagagtagactggaccagaaatcggagggtggcaagcagcttgagtgaggatgaagcacatcttaaaggaatgaagtgtaatgcttgatgcacaggtgatatctactacatttaagcccataaagactgttaaatattattgtaaataaaaaagtttgaatgatgaatactgtaaatctttttggtcaggaggattatattctcatgattcagcatgtgtatagaaagactttcttttacgataactctggactaaaaaaatcaggatcattaaaagaattaaaaactatgtatttcagcattcaacaaagcattaaatcaattctactggaaatgtgggataagaaatattttggtaatcaccttatccaccaggctgccacgtgtgagctgtagcttggaatagcagcaaggtgcaattggccatggaagtgcatgagcagacccacatctggacttgcatgctgcccgctggcgacatagatatcccgcccgctttgttgcaagctttgtcatttatcagcagatcagtttgacactggtccccctcactcaccctgtgccttgtacacagtaggcactcaatcagtaggtattggctaattgagctgtcactaatagtgccagccttgtaacatccgcttcacacctctcatgactgagacctctgccatttctgttgctcaccacttaactgctagaatgtggaggaaatcctgatgcaccaacaaggaagtttctgatcagataaggatttcaggacagttgcatgtgcaaaactattcgttgaggttccagaaacactgatatagagaccctcacagaagatacggtcccttatgcaccccactatgcttcactctttggggtgcagttagatattatgacttcagccaagct

SEQ ID NO: 34797 - DNA, 2300 bp, Homo sapien
ctgagggcctagtgtgccgctctgagaggcactgttgcagattgtacttggattaggacaaagactgggcgtgtgttgaggattgtgtgttgaggtccttctctccacagcgtaattactctctacctgcgctctttctagaatgcctccaggccagggaggcttgggaccccgcagagccgccgcagcagcgggcccccagcgctccctccccgcgtgcctccggctccgcgctctgccctaccccagcgctgctggcgccaggcgccggggagagcggggggtttccagcccgcctcgggcaggaaaccaggacctccctgcaccacccccccatgcacctccagggcccacagccctgctgagctcccacaggtggaaccagcaggcccaggcttttgtctccgtcactcctgtatgtaaccccccacccttcattcactctcttgtccaggagtggaattccactcatccactccctaccggacctcgagaaaatcgctcttcttctctgggcttcacgttccatatctgttcaaggagagaatgggcctttctccctctgtctttggactagtaactatgataggcacatagtaggcatcaataaataattgttgaatgaatgggtgaatgatttgccttctaaaaagagcactcacattaacttctcctttccccctcccctcgactttgctttgaagagaggcacactccctctaccacaccgagggagggggcgttgagctgagaaaggttgagagaatgagggacccaggtaggtggacatcggccaagaaaggaaccacagcgggaggtaagaccgagagtccccagcttgaagcgtcaccactccgggattcccagattccaacgcgagcctggggaaagcccacagtggagagagtccggctggcagggaatggccctacccccggggtgaaatctcggagggtcgtgcagccgagtcgcgcctctgcgctgatgcgtgagagatgccggacgtcgcgtttgcctgtgcgagcctcgcggatgctgtgcagtcttggtcccctctgcgtgtgtctaacgccgaatgctggtgtctcgaggtgtgagcttcggggccggtgtctttaaagaaccaaagattcttaaggagtgatgatctgggtagagcggcccgacgtagccgcgctcccaggtctcggtgcgagtcctgcggacagaccagaggagacctgctggccagatgccccgggcccaaggcggacgccagactgtctctgcgccagccgggctggccttcggaatggatcaggcacccgggaggccggagtggatctcagaccctcaagccgggaacaaacccgtcgatgcccgtgggcctggagtccgcctcctccttcccgccccacccctacccctgcctccgaaaggcttcttcgctggtcagtagctgcgtgcccgtctgcctgaggctgggtcagaattggcgggctggtaacgaccccgtgcacaagcggctcccagtctctccagaaagggccgatgactaaggggtgggggtgggggcggagggctggaaggtgttagggaagaacgttagcggcctatcctgtcttcagcagcgccctctcatcttctagctctgacgccgagcagagcagttggagctcgggactgggaactgctggaattcctatttagacttctagacagtctagaaacaagaacctttctttccctgggcctcagtttccttgtctgtaaaatcaaaaggcgggctctaggtgtaggccttcttttcgcttggtgattctggattcctttccttggatccgtggggagggggtggcagcaacagtccagggcgttggccgtcctgtgcctcaagtacgtagtccccgtgcccgccccctcaacacccccagcagcccgcccccctaagcccgcagagcagggagctgagtgggaggggcagaggcggggccggttcccagtccctgctggcggactagagtggcgcgggctgagcgtaaaacctgggatagccactcccccttttccttatccccgcccccctgccattggctcccgggagaggttgacatcaaagccgcggtcttatataagccagatccgcaggggagtccgcagaagggttaaacaggtctttgggcttcggcgacctcgcccgcggcagaaaccggtaagaagacagtgggctgcgcgtctcattttcagccttgcccggactctcccaaagccggcgcccagtagtggctccagagcccacaggtggcccccggcagtctctg

SEQ ID NO: 34798 - DNA, 2300 bp, Homo sapien
ttacttgaggaaacttgagcattaactctatatttgtaaaacggaggtaaaagtgctactgtgatgattaaatgagaaatgtgtgtaaagtgtgtcacacataggaagaccttaaccagtgatcattttttagtgccctgtgaggcagggtgggatggtggggagtggtctgcttcaaggtttcaggaaagaattacacatttgtgaactgaaaaacccaactattcggtttctggttctgtgcaattttgctggagactgaaaaaactgactcagactgttctgtttggtacaaggtggggactgccccactcagtttcagcccatgctgacagctgagctgcctcgggcaaggacaaccctaaactattatcagatagagcaggcagaaagctgtcagatcaagtgacaagacatagagaaaaaacatatacatgtttgaatgtcaggagtccaagtgacaaatatatctgagtttgtgcaattatatattttttcttagagcagagaatgcaaaatagagtattagggttgatggcgactttagaggtcatctaatctcagtgtcacttaacaattgtttctttcatcaaatacttttgtatgccctactacatgccagataggtgctgggtggtagagaggacagtgaagatagagctgctccttctaagaatccctaggctttggcagagaaaactagaaaactacagcccaaagaatgtaaatagcttgtaaagatcaaggaaatgtttatttccttcctatgtttctctatattttctgatttttccacaatagacatgtatcatatttaactatatatgtatattaacttggatagaatcccacagctaacaaggaaaataattttctttggtgaatagatcactcttgagtacctactatatctatataaatcacattctcagaggcatggttcctgcatcagaatctgctattgagttttcttgaaaatgcagatctcatgctcactcctcacctacaagggttccctgcatttgaaacatattccccaaagggattgtgacacccactaaagttggagaactagcacctattaggctaatggcaaagaaagcagcaacgatttaaaactggccccagaaatttaaattaatgaacgaagttaatgaaaacaaacacatttatcttttattagaataaagccaactcctaccttttttctctccagtgccacagctaattgcattcattatgtgtttttaacaggtgctataaatcagagtgctcatgagagaggagagcactgagagcctggggagagtggtgagggggagggagcattctccatctcacaaaatgaaatgcaatacaagtggcatatttccgtgaagcaagcagcccagagctcttgtggctgagcacttctcccctcctgcttgatttccaggcccctctcccagccaccccgcttgctgtgggttgcataacagtcttttccgggccctacaaatcacagccctgtcctaattcttgagcaggcgccctttacactgcccagccccacagccctcagcattttgtaacctctcttttttccaggttatcatcatctgtcagatctgaagttaaacaacaaaaaacatgtcagttgaatggctgggagagacacttggctgtttatgagaaatattccattacaatctgacgcaaaatgttaggatgcatctgccagcacccaggctccatagatctcctccaggctcagagagggtctcttcggcaagcaagctgattagtgtgtggttccaaccaatgtttatcctctctggctctgtggcaaacgcccttggaaaaacctggatccattgatgcttggtcgactggtacattcagattcactcaattagaacacccagtttgagacataatgggttttggcgagctccatagactgataggtttttatacacatgcacagaaagatttgatttcctctgcggaatttatggcaggggagaagaggtaattacattaatttctggtctggtttctggggctttcccttctgttctctcttctcctgccactttttttttttaagtagacttttttgggaccttgcttgtatggatgaaaatgaatttaataactgccaacagttggtttgagtttgaggctgggttccactgtgacttcttgttctttgagccgtgctctgggtgagttttaggaagctaatgtggacaatcttgtatcctctggtgtgtgtgggtgagatgttgggggtgtccatgtggctagggagcaatgtt

SEQ ID NO: 34799 - DNA, 2300 bp, Homo sapien
attttttacttaacccctttcgtctttcacttgtatttttctcccacaccaaaagtcctggttctcagcaataccaacaaactcacttgctttattacatactgtatatccaacagtctcagaataataccaaagctactactaacaatgtgagactgaaaacaggcagccctttttaaaaatcagagtaaaaaattctgaaaatgaaagtggaaaggaaccccacaggaagggtctgtgctgaccccatgtgacagtgtggccgtttgcattactgctggaattttgaagactactacatattccgtcagtgtcaggattttgttcttcagtgtggtacttttttttttttttttttaagatggagtctcactctgtcgcctgggttggagtgcagtggtgtgatcttggctcactgcaacctccagctcccgggttcaagcgattctcctgcctcagcctcctgagtagctgggattacaggcatgcgccaccacacctggcttatttttgtatttttagtagagacggggtttcactatgttggtcaggctgttcttgaactcctgacctcgtgatccgcccacctcagcctcccaaagtgttgggattacaggcgtgagccaccgcacccggtagtgtggtacactcttaaaatcatagttcctgctgtctgggagtttacatatgtctacagagtggaagaagcatgagattatagcagtgtaggctaccagaatgattgttgggttggtaacccaagtatgctggtcaccccaaagcttcagtttccttgtcttctacatgaggataaagaaaggaaggaggaatttacaagagggaatcttgggcaagttgaatcatctttctgaattcttgaattaccttccaggaataaataaggaatagataaaattccttatctattaagagggggtacagggattggactatattgtagtgacagcagctttctttctgttctccaaacgtacctgcttcggggaccttatacttggggttggttctctgtgcattgaacactcttgctccagctcttccaatgtctcgttccttgtcatcattcatgtctcagctttaatatcacctccctagggagggcctcctgaccacatcattgaaaatatccatcctccattactttatcatatcaacctatttcatttttgtggaactattacttatctaattggcttgtttatatctagatcccctctctccagaatgtaaactcaataaaagtaaggttcttgactttcttgttcattgatatgtccctaggaactaaaacagagcctgacacataatagctgctgaataataatgccttttgaataatgaatgcctgataaatgactggatgagctatataatctccaaagtctctttcagctttaaacccaagattatatactcattatagtgagtagaggatcactagcatgactataccatgctacagatgtggaaactgaggcagtgagtgacttgccaaaggctttgcaaacaggaaagtggtgtggtccaacagaaccgtatgggaagtcaaaagcaggagactcgggtttggatcctcacaccatccctctctgtcgaccttccttgcaagggctgtgtgaactggacaagccacttcacccctccaaggactcagttgttccactgaaaagagaagatgtactaataactctgccccagggtcactgtgagatcatgtagtctgaaccgcactaagcactttgcagagtgttttgctcttcctttagccccagcttgttttccagggtggagagtggaggtgaggaaggaagcccaggaccagggctgtggaggaggggagactcagcgggttgccaccatttgtttactcacctgagtctctctgcctctagcctagctgtgctccccgctaaggtaaagaggtggggtagccttgctcggccaatgagctgccgtcgctctcttaaaggcacccagcgtctggaaggaaaactagcctggcaacctggagagctcccgggccagagccaggaggcagctgtgcgatctggatgtacctaaaccctccagggccacatagtgaccccaggccctggtcactccatgctttggagggtgcttttgtcaaagaggcctcctttccctcacccagagctggatttccaagaggctcccatacctagctgccctggcagactcccagggaggaaaaacagcgtggccttggcagctgccccgaggaaggagcccacaggtgacagggagaagccattgccatt

SEQ ID NO: 34800 - DNA, 2300 bp, Homo sapien
acccaagattatatactcattatagtgagtagaggatcactagcatgactataccatgctacagatgtggaaactgaggcagtgagtgacttgccaaaggctttgcaaacaggaaagtggtgtggtccaacagaaccgtatgggaagtcaaaagcaggagactcgggtttggatcctcacaccatccctctctgtcgaccttccttgcaagggctgtgtgaactggacaagccacttcacccctccaaggactcagttgttccactgaaaagagaagatgtactaataactctgccccagggtcactgtgagatcatgtagtctgaaccgcactaagcactttgcagagtgttttgctcttcctttagccccagcttgttttccagggtggagagtggaggtgaggaaggaagcccaggaccagggctgtggaggaggggagactcagcgggttgccaccatttgtttactcacctgagtctctctgcctctagcctagctgtgctccccgctaaggtaaagaggtggggtagccttgctcggccaatgagctgccgtcgctctcttaaaggcacccagcgtctggaaggaaaactagcctggcaacctggagagctcccgggccagagccaggaggcagctgtgcgatctggatgtacctaaaccctccagggccacatagtgaccccaggccctggtcactccatgctttggagggtgcttttgtcaaagaggcctcctttccctcacccagagctggatttccaagaggctcccatacctagctgccctggcagactcccagggaggaaaaacagcgtggccttggcagctgccccgaggaaggagcccacaggtgacagggagaagccattgccattccctgtcctggcccccttcagcaaccctggtgagtcctagcactctgcgtttcttgaacctcaggacagcagggtgtggtaggaagatccttctccctaggggcagaaaccttgggtgctggttccagccctgctgtgtgaccctgagcgagtcactccagctctctgaacctcacattccccatctgggaaaatgaggagctcaaattccactctcagctttcctcttctattgttttcccttgtcacaccccttgttctgaaagatttaagtctgtcagctgcacctgttacataataatttgttaattggttttcctcttctatgtgaattgtggccctgtaatagccaatcagtgttttttggttagcagacacaaaccactaaattgatgcaggtttagccaaaagcagtgtagtattttattctgtctgtgagatcttatctagagtcgatatttgattttcatttgaccttttgaaatatgagaaatagagcatttgtgagtaatttccagggaatggggtccccaggtggggaactcctagatctagtttgcatggggtttataaggacaccagcaaaatcctgccttcacgcccaagctgagctttggtctctgcagtgctgcctcacacacagggttcattcttgaaagtgaaagctttggacttaaaaatttcctatgtggagagactgctcccaggagtccccacagtgagtttaccccacctctagctggctgaggctagggaagcctggttgggggagctgaggtctccctcagccctctgttagggtgtggccaggagagtgatgggaacaggtaggtatgaacacagggcctggaggccaggaatatatggtagataccgcttgtgctgaaaatcaggagctaggcctgcagttctggttctgcactgactagctctgtgacctcaggcaaattgtttacctctttgaactcagttttcccagctgcaaaatggggattgtaatctgggcaatgcttgcctaccaggattgttcttatgaccaaacaaagtctgttccatggaagcttagattccacagattttaagataaattcagatttaaaaatacattttgggattgatgaggtaaggtaatgaatgttttgtaaaatgcggcctctgtagtaattattttctccaatcactgtgtgataataattaatgtgataaaagaattactgattatgatggaatcgtggctgcttgtttaaatccttttactttaaaaaaataccatttactgggactttttgaaatgtacaatcatataaacaaaaagaaaggggaaatagctcactgagtcatggtattttctaacgactcgtgggatgggaacccagtcctggaatgtggccccattggaagcagcaggataatacaatg

SEQ ID NO: 34801 - DNA, 2300 bp, Homo sapien
caaagtttagagagggtctagagtgaataatctcttcagggattacttatcaataaatttgtaaaaataaagctgtgcatggtggcacgtgccagtggtcctagctacttcgaaggctgaggtaggaggatggcttgagcccaggagtttgaagctgcagtgagccatgatcacaatgactgcactccagcctgggtgacagacctcatctcttcaaataaataaatagtgcatttcagtggcaatgtgcaataatttaccttctgattaagagtacatgtaatgaacttagtagattcctggtttaattcattgagtaacattaccttccttggtagctcttttgacgtactggcttgtctataaaatttacacagcaccttgactaacattgtctcacttgaccttcacatgagctcagagggtggaagcaagtcaggcattatttacccccatttttccaccaggagaggggtccagggaagtgcggctagctggccaaggcttggaggctgaataacccaagagttggaagtagacatggcattacctggctatccctaccagtacttctcccccatactggttacaacaatcctacagctcagctttgctggctggggcagttccaagaggcttttcattcagtcttctcctagatccagcaggtcgtgtgctctaattcttgttttggagatggccaacattccaggctgttatgttatgtgagcacgtgggatcacagccagtcagaagccaggacttctccaagtgaagtcataagcaccaaagggatcttgctagacacgcagatttctgggtccagtcccagaccgagcctgattcctaatactttggcatctgcgttcaaagaagtcttcccttatcacccaaacaaaagtagcccatctagtctaactgattaccacagtttaactattgtcttcatagatactagacaataatttattacttgtttattgtctctttccccaccttagaataaattccatgaggatagggactttgttagcctagtttataccaaacccgtttcctagaaccctgcaaggcccccacagtacgaggtcagtaagtattgaatcgaatgtacactgaagtttgaaactgctgtcatacactgctccttcattttacaatagagaaactgaggcccacgaagctggaagtcactgctgcagagatggtaagggggcagggccaggataaaatctcagatctcagaagtcccaatccagggacggttcaactccgcccaaagcaattctttagaaaaaaaacgacatccacttgaaagaaaagacatttcctgcccataaatacaaggtttcgcggcggggagaagggcctggcctgggtgagggctttagtaattccgttcccacttcctaggcgccggctgcccgcaagggctaaagactcgctttccaggcccggagttgaacccatctccgggtagtgtcgaggccaggcccagcggcggcgaggcgcggagcacaacccactgaggtgcggacggctcacccaaccaaggtcacccgggcggggaccgaaggggccaggcccgccgggcacaggggagggggcggcgttggcgcgtcctcggggcggatgagggtcctcccttcggcctcctagaagtcaggaatgacactaatggctccttcccctgaatctgacacccagcctaaagagcacgagcaggcccggcaggccgcgtggccgggtcccatgtgctccacctgaggccgctctcacgcgctggccctttaagatacctcccctcctcgcccagccttctctcctatccccgtcagcgcccccaccgacaactcccgaattgcatcaggcacgtgctcgcccccgtccggtctgagcgtccctacccccagcccgggaggtgctctgaggaatcggagacgaggggcggggcgaggggcaggaccgcgtagccgtgcgcgcgccgtcccgccgcctcctgcccgcccgtcgcccagggcccggccagcggcgcgcccccgctgcgccgtcccctcccctcgcccgccgcgtcgtgaggcgcgcgcccgcccgccgcctgccgcggatcgcgtggtctgcttggctcgccgcgcctctcccccgtccgtccatattgctgcagcccccgagccgggaagcccgggccgccccgggggcgggggggagggagggacgggactagaagcctgccgggctcggggtgggggcgtcttgcgaggaacgggcggggggggacgcacgcctaggaggcctggact

SEQ ID NO: 34802 - DNA, 2300 bp, Homo sapien
ctggtattaccagatccccgtctaggtactgagtatataatggaaagcaaggcagctgtggatcatggagcttccagtttattgggagatgttgaatagatggataagtggatgaatcaacctgctgaacttctgtgtgtccactcctaagctaggtgctatgtaggatataaaggtaaatgagagcacagttcctgcctatagagaagtcatcatcagttgtttgtgcatgactgtgatatgagctgtgagtggaggaacctggacttctatgaaacatcctttctcatagtcataaagctgactcccaggatgacgcttgtgacctgctggtgttaccagggtcatagttgaacagtcttatgttgagaggctggagcttccctctcatggtatagctacagaatctgggccaaggatctctggtgattccttttccccttcgtctgtcctattttagaagtcagaggagtccagattttcccacctgacctctctgcctcagcagctgccttcccagcagctgatgtccaaggatcaggatgagcaagaggaactggattttctgtttgacgaggagatggagcagatggatgggcggaagaacaccttcactgcctggtctgatgaggaatctgactatgagattgatgacagggatgtcaacaagatcctcattgtcacccagacaccacattacatgcgccggcacccagggggggaccgcacaggcaaccacacctcgcgtgccaagatgagcgccgaactggccaaggtcattaatgatggcctcttctactatgagcaggacctgtgggctgaaaagtttgaacctgagtattcccagatcaaggtgaggcttggacatagcagtgagtgtggagcctggtgtgcctgtattgtacggagaagaggaagcctgattagctgtgcaattttaggcaggtccttataattcagagtctcaggatttttatatatgggaaggggatgatgactgacatctagcttgggcattaggagtgaggggtgatgtgtaaacactgcaaactcttcaggtgaggcggtggtgattattatcctatctgcggatccatagttaatattctgacagttggctagacacttttgtggggaacagaaaaagggttagattgttatttctagtcttaaatatttaggcatctaaaaatttagaagccttttaagaagcttgtgttgagtatggaaaatggagaaaagataagtcttttgaaaaattgctgctgcctggaaatagtcaaaacatctctgttgtgggattttagagtgggtatgtttggtggtaggttgtcctagggtgagcctttgtaataagtagcagtgtgtttcctggaagtaaggaggaaggagagttgcccagccactgtgtgataaggcagtagcagaaagagagatggggaaacactggagctttcaggggggagtgtgtagtgagttcctgaggagctactgtcagcctgatctcagtcttactacagggagggcagggcaagcactgtcttcttctgggctagcacacttgtgccaaggtaactggggtgaggaatggtgactgggcagctgagagcctggggaccagaattccacgtatgtcgacgtgggagctgccctctccaacttcctgccagtcttgattccttaaacaggctagagcagcctgcttacttacatctttccccactcatctcatgacctctgcagcaagaagtcgagaacttcaaaaaggtcaatatgatcagccgggagcagtttgacacactgacccctgagccccctgtggatcccaaccaggaagttcctcctgggccacctcggttccagcaaggtgagaagcagacacctgagatcctgacatgggtgagaggatctagggcccttggactgggggctatcctggggtggatgccacaggcctttccctgcttcctgactcctctctctgcctctgcagttcctacggatgccctggccaacaagttgtttggtgctcctgagccctccaccatcgcccgctctctaccaaccactgtcccagagtcaccaaactaccgcaacaccaggacccctcgcactccccggacaccacagctcaaagactcaagccagacatcacggttttacccagtggtgaaagaaggacggacactggatgccaaggtgaggcattcctgtcgggctgctcagagtcttgggtctacttcattgcattccagtgctttgcttctctcccttgccttgtctgagctaaggaagtgcta

SEQ ID NO: 34803 - DNA, 2300 bp, Homo sapien
atctggattaccaaaatcactctgcagccctgcccgaggctagtaggctgcaaccctggtccccacccctaacctcctgctccccctcaagccaactatgcagcccacaagaaggccctgcgggcccccccattgcccagcactgtctcatagaaggctctggtggtacctctgggccccaggagcatcagccccttgatcatctggggtttgtcatcaccatattttctccctgctgttcccaccatgcccttctgccatcttctgggagaaggaaaccaaaggatctaaaactggggtttgggggaaggtttcagcctctccccactccccttgccccacaccctttactccccagcccagagagacgctgcttttaccaggaaagactattgaaagatgttttattttatttttctctgacctttccatccttgaaaaaatggggaaaaaagaagaaaaaagacaaaatcgaccataaaagaccaaaaaaaaaaaaaaaatcagaaaacccccacctaatccacagaaagtaatgtctttcccctccccttggaatttttgttttgtttttggaaataatatttttttaaaagttgccttattgtggagcgggaatctgaaatacccaaatgcctgttttcctcggtggagtcaacccgaagagctcccaccttctctggatgtgcctgggcttggactggctagaatctttctctggactgttgcatgtacagtgcctccatcctggaggcaagagagttgggagtggctcgaatcagagccgtgcccaagatatccctgctgttgcatcgtttgaagctgacgtcctgtgtctgtacactgctgccactgttgtgtcctcgctctgcttgctgttgcctcacgccaggccccgtcctgccgtgacacccttcatcctacccttggaaccccaaggccaagttggttcaaactgttggagaacagagttggcctgcatctggaacacacttgtcctcagcttaccatctcctcacaccccagagtggaaaggtgaacacctgcagctgaggcttggaaacgtttcttgtgttgccctgaaaaatctttgagacctcagggaggctctgtctctcttaaaaggtggagaaagatgccattctctccctaaggtctggtggagtctccccatcttgcatacccttctgcaagccatctatctctgctcactctccaattgacccgcctgggaacaagggatgaggaggagttgggggctggggggaatcctgccagttggtgaagccctgtggcaggaaggtatatgtggacatagagtatacctgattctctttcttcagccactgactgcttgggttgggctgtgaatgataatggaatggctggagtctgctgttgtcagaaggcagggagggtgatgaaggactgacccacatggactgggatgtgtgtcggttatgggcatgactgcacgttcactctcagtgggatctgggcaacatggagttcattgtcctgttgcttacttactgcaatgtctttggccctccttttcaactggttcctctgttgggcccaaaggttgggagtaggagacagtatcccaggctgacaagggcttgccctttaccttgggcaccttgttaatttttagcctgtgcccttccccacctttgccctcccagtggttggtatgtgggaagcccatctcagttcctgtgacttcatgtctcaaaccaaggatgagcgtctggtctctgctatgatggtggtatccgaggcctttccctgcccagtctggtgcctgccccacattgtaccggacactggattcctggacccccttctcctttcctttctttccttcaggtcacgcagccctgtactgtatccagcaccacagaaacctcagtgtttttcctctgctggtttggggcacaaggaagccttagggtatggggaaaggctgttattacctagagtttactcccaggccagggggctgccatcttcttcacagacatccctgaaaggaagcccctttggggcagggaggtgaggacttcatctcaacatcggctggtggttggtaggggagctttttcttttctttcctttttttttgtttttgtttttgtttttgtttttggtaacatgttaggagttaatgttgcaaagagtagtttacatcttcactttctgaagacacttgaatttaggaccgatgtatctgtgacaagcatgccagaagtggcaggggccatcagggctaaccacttcacacctaccatcgtccc

SEQ ID NO: 34804 - DNA, 2300 bp, Homo sapien
aaggtgtaatggcctcacctaacatgtcctctcacaacaggctggcgagacctggcctcgcaatgggatggaagtaaacaaagagtgaattctgaaatcagttaatgcatgcagtgcctggaaaggctggaggaagaggcaggcctcaagctggggaccattctgaacctgtcgcgctttggggcagaaatccctccagctcacagagggaacttggagaaatcccttctaaccaaacaagttcatcaggatccaggaagtaatctatggtcacaggactgttgcctggagccccagtgctctgacaaagggaagggtcaaagggttgctgattctgggggaaatattggctgcagtattgaggccaaatggactttggacacttgggaccagctctgtacagtggaccctggtggaaatgcttgggcaggcccccatcttcacagcatcactgtgaaaaccagcaagttggtcaagaagctggataagcagttccttggcttacctgcttctttgctctgggcctactgcagggaggctggaccacttgaggaggcagatgatcttgatctctgcatccaatcatgaacaaggttctctgatgaagaggggctaaatggctgaaatggggtatcactcagaaagtcacagccttctccaagcaccatggaggctacccaagttacctgtaaatacatggggcctggccagagaaatggggagggcagtggtgataatgtgcagaaccaggaagaaggcaggttccgacacagactgaaggctgctgaagtttccaaggacaggggtattactcacctgcctagcagccagggccttattctgcaacgtttccaggcccagagctgggtggcagtcaggagctactggctgtcccccgacatctctcccagaatccaaccagagtgagggcctcctgtaagcaggtcacggtggagcctacttctcacactcttatccatctccctcctcccttcccttgggcaggtggatcctgtgaaactgcgccagtctatccgcacagttcttttcaaccagtgcatgatatctttccccatggtggtcttcctctatcccttcctcaaatggtggagagacccctgccgccgtgagctacccaccttccactggttcctcctggagctggccatcttcacgctgatcgaggaagtcttgttctactattcacaccggtgagcaggccctgcctgaggcacagctggctcctcatcctgtctagggctcactgatcaacaaggaaactgaggccaggtgcagtgactcacgcttgtaatcctggcaatttgggaggctgaggtgggcggatcacttgagcccaggagtttgagactagcctggggaatgtcaggagaccccgtctctacaaaaaaatttaaaaaattagccaggcatggtggtgtgtacttgtagtcccagctacttgggagattgaggtgggaggatcacatgagcccgggaggtcaaggctatagtgagctgtgatcacaccactgcactccagcctgggcgaaagagcaagaccttgtctcaaagaaaaaaaataaaagggaacaggcttctgaattgagtgtaggccagtaaaatactccctggcctcaagtgtcccattaaatagttaacagggagaccactagttgtctcataactgacaacttgggacaactgaggaatgaatgtccaaaagagaaaaggcctctctgattgtgtgggagccagggcagtttcccattcatttccttattcagtcctttctgggcagcatcccattttacagcgaatacaactggcatagagaagcaaagcaacccactcccaaactatgcagtataagggctggggttgaaatttgaaggcaggtcttggtgttgttaactttgctccatggatgtaacccctagttcctatttttggtttctcatggtctggtcggggagggagaaagaggaatcagcaggttattaactattaactatttccccaggctccttcaccacccaacattctacaagaaaatccacaagaaacaccatgagtggacagctcccattggcgtgatctctctctatgcccaccctatagagcatgcagtgagtagagctctatgctccccagagcaaagggcagatggccccaaccaccttcctgaaggtctcctgcagagaacttagaccacaccggccctttttcttcccatttaaaaatagctaccatttattgtcagccttccatatgccaggctatgttaagtgctaacacagttg

SEQ ID NO: 34805 - DNA, 2300 bp, Homo sapien
cctaaatcctttagcctgcatctctcctaaagtaatcacaaaagcattgtctcattttctctataaacctcctccaaattaggtgtcacacctagaaaaaggctctaccaacatttcttttggtaagttcaccaatgatatggtttcattagagcaccagagacatttccacagctgctgactccctcagccttgaaatatttttttcacttggcttccaggacaccctgctctctaggtagcccctcaatattttcttttctttttttttttttttttttagagacagtcttgctctgttgctcaggctggagtacaatggcgcaatcttggctcactgcaacctctgtctcccgggttcaagcgattctcctgcctcagcctccccagtagttgggattacaggcacctgccaccatgcccagctaattttttgtatttttagtagagacggggtttcaccaagatgcccaggctggtcttgaactcctgacctcaggtgatccatccacctcggcctcacaaactgctgggattacaggcatgagccaccgcgcccggctccccatcacatctgattgttcactttttcactgtccctttcctgattccttctcttctccccaacctcttcatgctgaatgtcccatgggctctggccttggtcctcttctctatattcattcccccagttatctcttcagtgccatgactttaaataccatccataggccgacagctcacacatttatctctctagcccagaactctctactgaattccaagctgaaatatccaactccctccttgacatctccacgtggatactaatagaaattgccaattcatgatgtccaaaagagcatttctgatcgtcctgccaaagcctttacttactacccacaacctccccaatctgagtggatggcaattccaatcttccagtttctcaggccaaaaaccttggagtcattcttgactactctctttccttcatactccacatccaatctatccaggaaccctattaactctatttctgaaataaattcagaatccagtcacttcttaccacttctcaccacttccatcactattaccctggtctaattcaccatcttctcttgtctatattactgcttttttttttttttttttgagacggagtctcactctgtcacccaggctggagtgcaatggagcaatctcggctcactgcaacctcccgggttcaagtgattctcctgcctcagcctcctgagtagctgggattacaggcgcacactaccatgcctggctaatttttgtatttttagtagagacagggtttcaccgtattggtcaggctggtctcaaactcctgacctcgtgatctgcctgccttggcctcccaaagtgctgggattacaggcatgagccacagcaccggcctgcctttttttttgatggagtcttgctctgtcaccgaggctagagtgcagtggcatgatctcggtggctcactacaacctccgcctcccggattcaagtgattctcctgcctcagcctcccgagtagctgggactacaagtgcatgccaccacgcctagctaagtttttgtatttttcgtagagacgaggtttcaccatgttagccaggatggtctcaatctcctgacctcataacctgcccaccttggcttcccaaagtgctgggattacaggcgtaagccacagcgactggccctttttttttttttttttttttttaacaagattgggtctcactctctcacgcaggctggtgtgccttaaactcctggactcacatgatccttccaccccaggcttctgaatagctgggactacaggtgcacaccaccacatccagctttttaaaaaaaattagatggggtttcgtgatgttgccaaggctgctctcaaattcctggcctcaagtgatcctcccacctccacctcccaaagtgctgggattacaggtgtgagccaccgtgcccagcctgatatatatgtttttatatttgttgtgtctagtctacctttctcactggaacataaattccatgggggcaggaatctttgttttgctcatgctttattttcaacacccagtacactgagtgctacatagtgggtactcaataaatatcagttaaataaataaatgaatagatagatgtgataccccgcctcttggtcaaggtttccagaaggtgtaatggcctcacctaacatgtcctctcacaacaggctggcgagacctggcctcgcaatgggatggaagtaaacaaagagtgaa

SEQ ID NO: 34806 - DNA, 2300 bp, Homo sapien
agtgtcctggccaggtgtagtggcacatgcttgtaatcccagcattttgggatgctgagacaggcagatcacctgaggtcaggagttcaagaccagccttgccaacatggcgaaaccccatctctactaaaaatccaaaatttagccgggcttggtggcaggcacctgcaatcccagctactccggaggctaaggcaggagaattgcttgaacttgggaggcaagaatcgcttgaacttggaaggtggagattgcagtgagccgagactgcaccactgcactccagcctgggcaacacagtaagactgtctcaattaaaaaaaaaagtaaaaaagtagtgtcctattagatcagctcctccaacatcccctctgacaccctgtacatggccccattagctaattgcagatgagccccaggcacacacagggtagggaccaccacctccagttctttcctatgaaagaatatgagcagaccccgtctgagtttagaaacgggatatgagtgggtcatctgtaattcctgtctgtcgtacaacggaaattggtgatacacctggcagctggtgttttccctctctgaatctggggcattgtttggtcatcgagctcacaatgacttctggtttagaggagaaccttttggaggagaatatacaaggacctctcagtgatttccagtggtctctccttgaccctcagaatggctagtcgtcttgtccagctgggagcctgggctaatcttgctggaaggcagagaggggttattaaaagtcagaaagtggccgggcacagtggcttgtgcctgtaatcccagcactttgggaggatggggcaggtgaattgcttgaggtttagagttctaggccagcctggccaacatggcaaaaccccagctaacttcgctactaaaaatacaaacattaggtgggcatggtggcaggtgcctgtaatcccagctactcaggaagctggggcaggagaatcacttgaaccctggaggcggaggttgcagtgagccaagatggtgcttcactccagcctgggtgacagagcaacactgcctcaaaaaaaaaaaaaaaaaaaaaaaaaaaaaagtcggccgggcgcggtggctcactcctgtaatcccagcacttagggaggctgaggcgggcagatcacaaggtcaggagatggagaccatcctggctaacacagtgaaaccccgtctctattaaaaatacaaaaaaattagccgggtgtggtggcgggctcctgtagtcccagctactccagagtctgaggcaggagaatggcatgaacccgggaggcggagctggcagtgagccaagatcgtgccactgcactccagcctgggcgacagagcgagactctgtctcaaaaaacaaaaaaacaaaaaaagtcagaaaacgtgtacaattcactctttccttctaaaataagaggagggtagggatggaagaaatgggcctggcctatgcacacagtgaagcctgtatgactgggaaaggatttcctcatcatggttttggcagatgctgctatgatgactatctcaaccttgcctgcccattggaattaactggggagcccaggtcccacccccagggactctttatgtaattggattggaggggaccctgggtattgggactttttttaagctcccaggtgatttcaatgtgtagataatgggtatctccatttgccaagaggactggtgatgaaatcctatggctgatagaggctcgcctgtcctctgactgacagaattgcctgctagtttctctggagtcaggctaattcccttccctcccccaacttgagctctaattttcataaacacacccatgtacagcctgagagctcctgataaggaagaggctcccacagaagctggaaaaggccagctggaaaacgcagatgtgccttcctggttggttgagatgctgatcctacagcactcccgctgtgcctcagcagtgagctgggtgtaaaggcaggaggcttgctggggtctgacacttccctgccctcctccaggagggacacatctggggctctatgaggaggacagctttcatcctgggctctggacttctctcatttgtggccttctggaactcagtgacatggtaagtcggctccacccagctagggtgcagtgtggtggtggtcgggggcagagcataggggaaggagctgtccacccactagtcttcacccagaaacctggttttttttccaaggcatcttcagagattttggggtgcttctggctacttttggcaagcc

SEQ ID NO: 34807 - DNA, 2300 bp, Homo sapien
aacctttcctttcatgcatttcatcttctgtttttgttttttttgttttttgagatggaatctcgttctgtcacccaggctggagtacagtggcgcgatttcagctcactgcaacctccacctcctgggttcaagagattctcctgcctcagccccccaagtagctgggattacaggtgcccgccaccacacccagctaattttcgtatttttagtagagatggggtttcaccatgttggccaggctggtctccaactcctgacctcaggtgatctacccacctcggcctcccaaagttatgagattacaggcataagccaacgtgcccagccgcatttcatctttgtttttttttgtttttttgagacagactcttgctctggcgcccaggctggagtgcagtggcatgatcttggctcactgcaacctccgcctcccaggttcaagcgattctcctgtctcagcctccagagcagctgggattacaggcgtgcaccaccacacccggctaatttttatatttttagtagagacggagtttcgccatgttggccaggctggtctcaaactcctgacctcaggtgatctgcccacctcggcctcccaaagtgctgggattacagatgcgagccaccgctcctggccgcatttcatcttcttaaatgaatatcggccactctatcttctatataagcctcagattagtacagatgttgagtcatagcagctcctcaaaaccctcttcaccagaggctttaaactgtgtaattacattacaggtcagtctcctcagccctggaggtcgactgctcagctttttcctagcatacagtctgagagcagaggctgaagtaaggggagttctaatctttgggtcagttgccctctccctgtgtcatttcttatgaaatagaagttatgctattcccaaaatacatacagcactaggcaaagtgttaagaagcctagattttgccagaaaccatgtggagtttggagcaagtcatttctactaactagggcttcctccttagcttataaaatggaaggggtagaccagatgaacatgaggtcttttttctcccccctctaagagtaaattgtctcaacaattttacaagttgtttacaaaacaatacacattcacataaaggtgatgtatttatatctataaaataggaacattcagtaggccgggcatggtggctcacgcctgtaatcccagcacattgggaggccgaggcgggcggatcacaaggtcagaagatcaagaccatcctggctaacatggtgaaaccctgtctctactaaaaatacaaaaaattagccaggcgtggtggcaggcacctgtggtcccagctactcgggaggctgaggcaggagaatggcatgaacccgggagatggagcttgcagtgagccaagatcgcgccactgcactccagcctgggtgacagagcaagactctgtctcaaaaaaaaaaggaacattcatcaatcatgcagaatatccaggaaacaagaatatgaaagaaaatctgggccaggcgcagtggctcatgcctgtaattccagcactttgggaggccaaggtgggtgtatcacctgaggtcaggagttcaagaccagcctggccaacatggtgaaaccccgtctctactaaaaataaaaaaattagccaggcatggtgggggtgggtgcctgtaatcccagctacttaggaggctgaggcaggagaatcgcttgaacccgggaggcagaggctgcagtgagccaaggtcatgccattgcactccagcctgcgcaacatgagcgagactccatctcaaaaaaaaaaaaaaaaagaaagaaagaaagaaaaaagaaaatctgaaagagttgggctgtagacaaataaaattcaagattaaaccgtctgtattccttccagcctcaccttattcccatgtcctttactcagattcttgaagttgtaaacattagctatagcttcactgtgtcatttatctagattggggattctttaataaaaagcctgcatactgagaatcatctgctttcaacaaaaccacataggcagggcagagtggctcatgcctggaatcccagcactttgggagaccaagatcacttaagcccaggagtccaagaccagcttgggcaacatagggagaccccatgtttacaaaaattttttaaaaattcgccggcatggtggcacagacctgtagtcccagttactcaggggactgaggtgggaggatcacctgagcatagaagattgaggctgcagtgagctat

SEQ ID NO: 34808 - DNA, 2300 bp, Homo sapien
aaataatatcatctgagaggagccaaactaaagtgagtcttggaagtctggtagcacaggtttgttcagtgcacaagatagacttggtcagctggaaaatatagacattctgcaatatctggaatattgaaaaaaattagtatctctgaaaggagagatgaggaaaaacatgaacaagttgtacaaaatgtaattaatttgtgagcaagcattgaatgtttactgagcccttgctttgtgcaacgaattaggcaaggaaaatgaggaagacatggtcctttattggccaaataaagtatgacacatctatacaatgggacgggaggcagccattaaacagaacatggcagctcttaagggtactatatggagcagtctccatgttttgttgttgacagttttatttattttagagacagggcctcattatgttgcccaggctggtctctaactcctgggcttaagaaattctcctgccaggccaggcacggtggtggctcatgcctgtaatcccagcactttgggaggctgaggtgggcagattatgaggtcaggagtttaagaccagcctggccaatatggtgaaacctcatctctactaaaaaaaaaaaatacaaaaattagccgggcctggcagcgcacacctgtagtcccagctactcgggaggctgaggcagaagaatcgcttgaacccaggaggcggaggttgcagttagctgtgatcatgccattgcactccagcctgggtgacagagcaagactccatctcaaaaaataaaaaaaagaaatcctcctgcctcagccttccaaagattgctgagattacaggcatgagccactgcacccggcattttttattttgttttgttttttagagacagggtcccactctgtcactcaggttggagtgcagggcacaatcatagctcactgcagcctccaactcctgggctcaagccatcctcccacctcagcctccccagtagctgggataacagacatgtgccagtaagctctactaattttttgtatatgtagtagaaatggggttttgctacattgcccaggctggtcttgaactcctggcctcaagtgatcctcccgtcttggtcttccaaagtgctgagattatacatgtgagccgccgtgcccagccaagtttctgagttttgtttattttagaaaggagtcttcctgtgctgcccaggctggtctcaaatacctgggctcaagtgatcctccaacctcagcctcccaaatagttgggactacaggtgagcaccaccatgcctagccaatctccatgtttgattgttaagtggaaaaagcaaggtgcacaacaaacatactatggtgctgttgctaaaggagaagcacaaggcctacacatgtttctatttacagaggtaagctctggaaggatatacaaaaatctggtcacagaggttgtctcttgggaggaaaaaaaggggactgaggagaaattaaaaaaagacttttcattgtacattcttttgaccctattgtattttatatcatttgcacatttgcttatttaaaaagttttcagaaatttaaaagcagctctttttccaaagtgctcctcacttcatgtcatgggtcctgtatcctaagttcccctatttcaatcacagtgcaaatttaccctccacaggcatgcctttcctgcatctagactcactagaaatagctgatgcatctctcctcccttgcctgccctccacaggaaaagaagcaatgaaaaaaaagaaaatgagatcctctggtctctgtcacctttttatcaacttgtactacctgccattatctgacacccacatcttttcttgaatctgcctcctcctatgggacagcgacattttcttaagttgcagatgatggagaaaattttttaaaagaaaaaaagggggcagggggagggaagcccagagtttggccaaatgcacgtttttcaagttcctgcttgagcttagattccctttccgctttaaggacatgccctctggaaagaagggtgttttgtttccagcccacacagacccaaacttttttcatcacgtgcctggtccgagccagtacgcagctctgtaatgagatcaccatggccagcctcccacccgagcaaaaacaaggttagcctgcagcagagccgcagcagcaacagccaccaaagcgggggctgaaagggaagagaacttagatttgacctgtgcaaggacctcagcagcttggacacagcccactgcagaggtaagtgggaactacgggggaggggtggt

SEQ ID NO: 34809 - DNA, 2300 bp, Homo sapien
ggaggctgaggcaggagaatggcgtgaacccgggaggcggagcttgcagtgagccgagatcgcgccactgcactccaggctgggtgacagagcgagactcagtctcaaaaaaaaaaaaaaaaaaaaaaaaaaaagaaacccatagaactgactgggggatggggcacttgcctgccttctttatcagtgtatccctcaacggaatcactgtttatttttttattttttgagagggagtcttgctgtgtcgcccaggctggagtgcagtggcacgatctaggctcactgtaacctccgcctcctggattcaagcaattctccctgcctcagcctccggagtagctgggattacaggtgccctccaccacgcccagctaatttttgtattatttagtagagacagggttttgccatgttggccaggctggtgttgaactcctgacctcaggtgatccgcctgccttggcctccccaagtgctgggattacaggctcagtgagccaccaatcccggccccaaatcgactgttttagggagagcaaactgagacatgccatttattgaacgctcttttatatcttcctcggtgcggggtgtttttccaattattaactatttaatcttcacaagctcacgacagccattcgtaacctaattttgcagataaggagctagacactcatttgggggggagaagaggaggactggagttcagaaagtgcatttgatgctcttatcctggaggctggagctagttcacctccctggagaacagcttttgggaatcccgtttgaaattgccgctcaaggccagctcggcatccagcctaggaattggaggattttggagaatccccttagggggaaatgtttaaaagtgcaaagtgaatagtagaagcccctctcctcgtcactaggggtacatttgccgttttcttatcaacagcctctcaagtacaagcatctgggacaagaactagaaccgtgcttggggcagcccccacgtcctctcgggaacaggggtggagcgctggcgggagtggctgagggcggcccgccgccgacactgtgtgcaggaagcgggcgctttgtctgctctcccaccgcggagaacacgaggcggaggcgcgccccagctggccacacgctgcccagggccggcgtcggtcaagagccctctcttcaagcaggattaagagggaaccaaggggctggcagaggggcctcagaagctcctgggcgaggcctgagcccgtgggtctcgacactaaaatctggcgagctccctgcgcgtccgcaaagattttggagctctgaagagcccggcgacgcctgcgctggccaggcgccgtgcccacgggaggcgccgtcctctttgtaactcgagcagaccctggcgggccagttgctatggcaatgttcctcgctctgctcggtgaggccgggaggtaggcgggccttggcggacgtcacccacattcggctttggggagccgccccacccccaactaattgtttgccagaaaggaaccgtaggatagatgctttgtgagacatctacggggccatgttagaacagaaagtcgcgacagcctctttctccgtcagcctcttcacaaatcccttcgtgccaacgattttaacggtccttcaaagccaggaggagggggcgtggtaattcgaggggtttgttcgaagggccacgccctttcctcggcctttggatttttccaggccgcgcccacggcgggggggtgggggggggcgctagttctagaccacgccccttccttgttcgctcggaaagaggaccaaaatggaggagtaagaatcatgattaaattgagcgagcgcaactaatcacgcgaagagggccgcaggcgggccgtcttccgcaagcgtgcttccaggcctccactccccacctattcggcggcaccctgttacttctgctcctgcgcgctgcttcccgcgacctcacaggcagagcgaacacgcacggagtcgcaggggcgcgcaaagggggaggagcgggcgtgaccaggcgcgcgcgcgcgtctggagtgactctagagagcaggcgagtcgggcggatcgggtgggtagagtggtgccgtccggttgtttggtgggaggcacgtaagaccgctctgggcacgggggcgctcacctcactggctcgttcggttctaggagcagatccggggtagagggaaaagagctccgggccaggggctgccgtcgccgccgtcggggagtcagcccgccagcccgccagctcgtcagcccgccagccagcg

SEQ ID NO: 34810 - DNA, 2300 bp, Homo sapien
atgcccagctaatttttgtattttttaagtagagatggggtttcaccatgttggccaggctggttttgaacttctgagctcaagtgatccacctgctttggcctccttaccctttcaaatgagtatttttatttatttacttatttattttttgagacagagccttgttctgtcgcccaggctggagtgcggtggtgcgatctcagctcactgcagcctccacctcctggaatcaagtgattctcatgtctcagccacctgagtagctgggattacaggcacgtgccaagactggctaatttttgtgtctttagtagagacagggtttcaccatgttggccaggctgtgatctcggactcctggcctcaagtgatccaccccacttggcctcccaaagtactgattataggcatgagccaccatgcccagcccaaatgagcatttttatattattgctcattacttttatggctagtataaaagtaacatttagttataaattgggttatattgttgattatattccctcattgtctttaattttatctaaacattaacattcagcaatgaataagagacaaaattcgtgttcctaagtctcttctaatttattggcacttgaatgtgtggatcagaggttcatgctaggagtctgagctggatatagaaattttgaatcccttcacaataaagatagttgaagaagctgtggacatgtatgaggtgggttaaagagacaattaacaagagaagagggcccaggcagccttggggaataccagcatatagatatgggagggaaatgattcagggaaagaagctttgaagggatagaaaacaaggagagtgtatatagttttctttaaggcctcatggtccccacattgtccaagctgatgggcacagatcagtttaattaagtatatatttcacaaggttaagcactgtaaacatttagtacttattggccttgggggtttttttgttttgtttttttggcccagttaggaaatgagaattagaatgcatgttcttagtaatccttttactaattatgtagattatttacaagaatagctgttgtataattaaaacgtttttaaactctagggatttttttttctcatgctgtcattgctgatttgtgagatatgtatatagtcaagattggtttgttttgctttctagtacaaattgcctgtacacacagagataagttggaaagcagatggcaaaatcatggctcttggcaatgaagatgggtatgtatttgcttctttaagataaaaaatttgcaatcgcacatatatttgatcacaagctgactaatgccatctgtaatgttagctggggcggcccagttgtatttggtattttgatttattcttgatatcctccgctgatccagtagtgccttgtgtctttgagaactacagaattatttagatattttcagcccattgagagtatttggctacactgtattttggctgtcttgtccctcacaaaatggtcacctcctatgttgaactgcataaatctccatttttttaaagtaagcctagtcagaaatgctttttaggtctgtatcctgaccagtgttaatcatagtaacacagtcataattcagccattgatctgttaattattttagcttctccctatcatcatttgtcattaatgcctgatgaacacaattttatcaagcattgttagaatgctaggagattgttacactgaggtagtgtggaaagttaaaatttctaaaaattaatttttttaagaaaagaattgttaggatattgctagaatttttaaaagctaaatatactttttggagaataactttttatacttgattttttatgagagaatgacctttgcagtgatagaaagggttatccttttccacctcatctttccttgactgacggaatgagggagctactatttgcattgtaacttgtaatttgatcatccatctttcttgttttgatgtgtttcttattccagatcaatagaaatatttcagattcccaacctgaaactgatctgtactatccaacagcatcacaagcttgtgaataccattagctggcatcatgagcatggcagccagccagaattgagctatctgatggcctctggctccaacaatgcagtcatttacgtgcacaacctgaagactgtcataggtaactttggtttctttcatactggggatgatatcgtttgttcagctactttccattctaatctttgttactttttactttatttttgacattataataaaata

SEQ ID NO: 34811 - DNA, 2300 bp, Homo sapien
ttcactaaatctcatttattcctcacagcaatccaacaaggcatggattatcattttccttcttcaaatgaggaaacatatttaggatatgttaaagtctctcaactaacaactggcaaaccagtgatcaatctacgactaggtgcctccaaatttgtgcccctagacgccttcaaatatatgtatttgacccctctgtattagaataacaggtagttcagattgcggtttgctacctatgcaggaatgtcagatacccaatgcaaacaagcaacacacgagtagtgcagaatctgagcattttagcatttttgagttgaaaggaaactttcttccacaccatttaccacatacagcttccttcacacagctggccctcaatcaagcaaatcaagagtcactccatttgcttctccttcatctttgagtacccagaacccagagccagaatttccacccagttgcagaaactgttctttccctttttaattccagattcgtactttcatatttttgtttgttttgtttttttgagacagggtctcactctattgcccaggcttgagtgcagtggctcgatcacagctcacaccagcctgtctcccggactccatattgtaatgcccaaccttgtttttactaaccctgtttttagactctccctttttcctctgatcacctagccttgtttccacttgaattgactcttgcttagctaagagagccagacagactccatcttggctctttcactggcagccccttcctcaagaacttaacttgtgcaagctgactcccagcacatccaagatgcaattaactgataagatactgtggcgagcaatatccgcaattcccaggaattcgtctgattgatagcacccaaagcccccagtctatcaccttgtaataaatagtcttaaagcccctgcacctggaactgtttactttcctgtaaccatttatccttttaactttttgcctactttatttctgtaaaattgttttaactagactcccctcccctttctaaaccaaagtataaaagaaaatctagcctcttcttccggctgagagaactttgagcgttagccatctcttggccaccggctaaacaaatggactcttaattcgtctcaaagtgtggcgttttctctaactcactcaggtacaacaatatttttgttaagtggcctcttgtgcatatctttttttgttttgttttgtttttatttgagatggagtctcgcaatgtcgcccaggctggagtgcagtggcgcaatctctgctcactgcaacttccgcctcccaggttcaagcgattctcctgcctcagcctccctagtatttgttgtctagggattgttgcattttactttttttttttttttgagatggagtctcgctgtgtggccaggctagagtgcagtggcgtgatctccgctcacagcaacttccgcctcccgggttcaagcgattctcctgcctcagcctcccgagcagctgggattacaggcgcctgccaccacacccggcttattttattattttattttatttttgttttttaatagagacgaggtttcactatgctgaccaggccggtcttttaactcctgacctcgtgatcctcccgcctcggcctcccaaagtgctgggattacaggcgtgagccaccgcacccggcctcttgtgcatatctttaaaacacctccacaactagcaaagtgccctggcacatagcgctcaaaaaacgttggacgggatagtggttgaacagctccaaataataaactggtagcctggggcggtggttccactagtctaatcctctaattttgtgcctttctgtgggaagtgagaatgcttaacctcggggctgtgctcaggcagcacctgaccctagccagggttggggcggacctcctaccgcgggctaggtactgagggccagtgcagcacgcgtggtcccgcccttcccagcccggcggtagcgggaacgcaacgcgcggtgctggctgggcctcgacgcgcaccgtagcgactgcccgagaaggcggggctcggagttcaccccgccccgctccctacctaaggcgtgaggctacgagcggtcggctgtggcagcttctcttgtctctgacggcttgtagttatggggcaggagccgcggacgctgccgccctcccccaactggtactgcgcccgctgcagcgatgccgtgcccgggggcctctttggcttcgccgcgcggacctccgtcttccttgtccgcgtgggcccgggcgcaggcgagagtc

SEQ ID NO: 34812 - DNA, 2300 bp, Homo sapien
ggaagttgcagtgagcagagattgcgccactgcactccagcctgggcgacattgcgagactccatctcaaataaaaacaaaacaaaacaaaaaaagatatgcacaagaggccacttaacaaaaatattgttgtacctgagtgagttagagaaaacgccacactttgagacgaattaagagtccatttgtttagccggtggccaagagatggctaacgctcaaagttctctcagccggaagaagaggctagattttcttttatactttggtttagaaaggggaggggagtctagttaaaacaattttacagaaataaagtaggcaaaaagttaaaaggataaatggttacaggaaagtaaacagttccaggtgcaggggctttaagactatttattacaaggtgatagactgggggctttgggtgctatcaatcagacgaattcctgggaattgcggatattgctcgccacagtatcttatcagttaattgcatcttggatgtgctgggagtcagcttgcacaagttaagttcttgaggaaggggctgccagtgaaagagccaagatggagtctgtctggctctcttagctaagcaagagtcaattcaagtggaaacaaggctaggtgatcagaggaaaaagggagagtctaaaaacagggttagtaaaaacaaggttgggcattacaatatggagtccgggagacaggctggtgtgagctgtgatcgagccactgcactcaagcctgggcaatagagtgagaccctgtctcaaaaaaacaaaacaaacaaaaatatgaaagtacgaatctggaattaaaaagggaaagaacagtttctgcaactgggtggaaattctggctctgggttctgggtactcaaagatgaaggagaagcaaatggagtgactcttgatttgcttgattgagggccagctgtgtgaaggaagctgtatgtggtaaatggtgtggaagaaagtttcctttcaactcaaaaatgctaaaatgctcagattctgcactactcgtgtgttgcttgtttgcattgggtatctgacattcctgcataggtagcaaaccgcaatctgaactacctgttattctaatacagaggggtcaaatacatatatttgaaggcgtctaggggcacaaatttggaggcacctagtcgtagattgatcactggtttgccagttgttagttgagagactttaacatatcctaaatatgtttcctcatttgaagaaggaaaatgataatccatgccttgttggattgctgtgaggaataaatgagatttagtgaaatacctgcctgacataaggcagtaaatgccagatgaatataaactcattcttgaaggtcaaccagattagtagggattaggacagcatacatcatatttgaactatttgctctttaaaagagattttaggctaggtttcgtggctcatacctctaatcctagcactttgggaggccgaggagggcagattgcttgagcccaggaattcgagatcagcctgggcaatttggggaaactccttatctataaaaaatacaaaaattagccgggcgtggtgatgtgcgcctgtagtcacagctacttgggaggctgaggtaagagggtggcttgagcccggggtcgaggctgcagtgagactaggtcattgctaccacactccagcctaagcgagagagagaccctgtttcaataaaatgaaataaaatagctttcacactatttcaactgatctttacaacaagcttgtgccctaaggttagtcatttctgataagaaaactgaggaccaccggattaggtggcttgttcacggattctgttcccctactcctttctagtttgtgagttgggactttagtttttctgaatccaggtgaattttcggaagcccacgtgctttcggcctttattaattaattcattcccaagccaggttcgcctgaccacacctcgagcgccggcccagtgcttgcgatcttcgtgacggcacctggggtgtaagtactgcttgtgggagagccccacaggaaatccagagtattgcgcatgcgtgctgtccagaaggcgcttgaactcggcggcttccgtagcgggagggcgaaagatggcggcggcagtactgggacagttgggtaaggatttcttagtggttaagcgacagaagggagtcgagatggaatctgagttgacggcttgtgttgatgttgcaggtgcgttatggatacataacctgaggagccgggggaagctggccttggggtgagtctctcgcttcggag

SEQ ID NO: 34813 - DNA, 2300 bp, Homo sapien
ctgtaatcccagcactttgggaggctgaggtgggcatatcacaaggtcaggagttcaagcccagctggccaatatggtgaagtcacatttctactaaaaatacaaaaattagccgggtgtggtggtgcacacctgtagtcccagctactgggaggctgaggcaggagaatcacttgaacctgggaggcagaggttgcagtgagctgagatcgcaccactgcactacttcagcctgggtgacagagcgagactccgtctcaggagaaaaaaaaaaaaaaaaaaaaaaaaaagaaaatgagccagagagaaattaaatggctttctttatgatagtcacaccttgttaatttgggcttcagtttccttttgcagtatctttgaaaaaaagctatgttaaataaatgaaaagtgtaatgagactgggtcaaaactctttgagctaccatttcttatttttcctctttttcttcactcccccaacaaccgtttctatatgagacgtatttttaatttatggattagtcagcatactgataataataccttaatgtgaatctgaatctcataaagctctagtaagaactttttttttttttttttttttttgagacagggtctagctctgttgcccaggctggagtgcagtagcatgatctcggctcactgcagcctccacctcctggactcaagctattcttgtgcctcagcctcccaagtagctgggattacaggtgtgtgccaccacgcccggctaattttgtatttttagtagagatggggtttctctgtgtggtccgggctggtctccaactcctggcatcaagtgttccacccaccttggcctcccaaagtgttgggattacagatgtgagccaccgcacctggcctaaaacttttttttttttttttgagacagggtctcactctgttgcccaggctagagcacagttgtgcagtcatggctcactatagccttgacctcctgggcttaagagatcttcccacctcagcctcctgagtagctgggaccacaggtatgtgccaccactcccagctaatttttgtatttttagtagagacgagtttttgtcatgttgcccaggctggtctcaaactccggggctcaagcaatcttcctgcctcggcctcccaaagtgctgggattacaggcatgagccacagcgcctggccagaaattttattaggtaacactttttcctcatttgaattattatatgcatttaaaaataaattgatttatttaaaagttattgatttagacattttataatttagacatacatttatttcatttgaataactattttacgtatcctatcctcactttatctaatttgctgtataggtcagttaatggcagagatatataactaggtcttctgacctccacctttgttactttatttgcttgatacgtactgagactttgtctcgtttatctttagaaagtgcccttagacatttcacctgcccaaagtaaatgctgaggttttttttcagttttggaagaggatgattaacttttgcctttcttgtaaacacttcttcctttttgccatcctctggtcaggattaccattgtttatatgtgtaaaatttgagggtaatcatacaaaattaaggtttaaaattatcccaccacaagaatgcacaaattaaagggtctcttcttttttatttttatttttttgagacggagtctcgctctgtcgcccaggctggagtgcagtggcgcaatctcagctcactacaagctccacctcccgggttcatggcattctcccgcctcagcctcccgggtagctgggaccacaggcgccggccaccatgcccggctaattttttttttttgtatttttagtagagacggggtttcaccattcacaggatggtctcgatctcctgaccttgtgatccggccgcctcggcctcccaaagtgctgggattacaggctgagccactgctcccggccaagggtctcttctatatgaaagatttcattgagtggattaatttttgcagattattattatcagtcatgatagttctttcctctccctgtctccccaagaaactttattgctgaaaatgtaattaggctattgctatagtttcaggctgtctgcttctattgcaactgaaatctgccacatattaaaagatggccacttgagaaaactgctctttctaaggcatttgaaaatttccagcaggagtcagaatgttagaaagttttgagacctccttgctatagttttccataacacatgttttctaa

SEQ ID NO: 34814 - DNA, 2300 bp, Homo sapien
ggtcttgccatgttgcccaggttggtctcaagctcctggcctcaagtgatccacccacttcagcctccaaaagtgctgggattacaggcatgagctactgtatccagccctttttttcttttttttttttttttttttttagatgagatctcactatgttgaccagggtgccagactggtctagaactcctggcctcaagcaatcctcttgcctcagactctgaaactgtgaggcttacaggtttgaaccactgtgcctgactaggaagaccattttagtagggccaaataaactggtgcctcatgtgaggtctcagtaagtagatgatagaagcagttggcaagaaatgatgaccgtgcctaaggaaatgaagggatctagcaaaaccagtctgtatatgggagagatttgtgagtaaaagaaaaaaacaaaaatggcttaaagtagatatgggttaataactggagtgatttaaattttagttgaaaagaggcttaagttagctgaaatggataagaatgatgtcaggtgacaaaaaatgaattttcatgttggtttgatgagtggtgaatatgggagaagcaggtcagggaaaataggattcagagtgcagatagaggaagcaacttcagctttaagtagtggcccttccctgaaatagcaagaaatgtgaacagtaattattatagagactattatttagaatttgctaaaatcaatagaaaagtggctgggaattctaggctagtggtctcagtgaattaaagaaagattaggattatctcttgtcatgaggctaaaaactcagcttgaaaatctcagggttggaggaggcttcagatgtcaataattaggttatgtgactatattatgatggattattccatcatatactttcaagggatcagccatttaatagacatgaatttcatctccctttcttgtcttttctttatttactagaagcaaccctacttgaaggcaggagccctgcttgttgtttctgggcactattcggtgcccacaacctagccaattgcctgatatttagcaaaggttcaaagatattgttgtatgaattaatgaatatacttcaactcagtcatttgatgttaactttctttttatgctaactctactctctcctcacaattgtataaatgattttttttctttgcaacttgtaaaatgattttcatctttttcagtcattataatgaccctgtgagttaggaacattgttattatacccattttatagatgtggatactgactccctcacccaaggttatagcacagtgtagttgtttagagcctgggcgttgccatcagataaaccattctgaaccccaggtctgtcacgtacatggcacattattaagctgtcttcctttggcagatttttttttttttttaaatttcacctagcctcggtgttctcatctgtacaaaagagatatgaaactgtcctgcgggccgggcatggtggctcatgcctgtaatcccagaactttgagaggccaaggtgggcggatcacgaggtcaagagatcgagaccagcctgaccaacatggtgaaaccctgtctctactaaaaatacaaaaattagctggatgtggcggtgcatgcctgtagtcccagtgactcaggaggctgaggcaggagaatcgcttgaacccgggaggcagaggttcaagctgagatcaagatcgcactactgcactcctgggcaaggcagagcgagactccgtctcaacaacaacaacaacaacaacaacaacaaaaagggaaccgtcttgcatgatgagtgaaaagattaagtaacatagtggctataaactacataacacaaagctgagcatgaaatatgaactcaggcagtgtgatatactggtgagagcacagactctggagccagagggcctggatttgaacccctaattgctgcagtgtgatcttggacaagtcactaatttttctgtgtctcaatttcctcaactgtaaaatatgagtaataatgaagattaaatgagttaatacttgtaaaatgcttagaacatgcctggtacatattaagtactatgtgtgtttgttcataggtgatatctattgaagctgggagggtcacagtatcagtgagtggtcccccaatttcttcttgagcatcgatgaattagcaggtaactctccaaattttacttacattatttactgttgccttatcttttatcatatgcttttaagggatctgctagttaataaacatggcttgcgtttccttttatttcttttttttct

SEQ ID NO: 34815 - DNA, 2300 bp, Homo sapien
catatcagcattgtttgattagggctgagtatcagcttgagttttttttaaattgattaccagaacattcaagattaacttcttcaactatttaaaacttctttttttttttccctgaaaagaagcagggcataaaacgtgaataataaacaataagcggttcattagcaatttgctaccactggctctcaaagactgtggaaccccacgtagaagtctgattctttagaatttgcagcagctattttctctgaaagatttcttcctcaacttgtgggattttattttgctattattgttaatttaggacgttgccatttccaaacatgaacattgtaattgttaatagtcttctatttatagaatgataattttgagctcttaaggtataaagcccagttctctggaatgacactttgttcagcctcatgtaactgactgcagatttgatctcactgtttttcttttctgtgagttaatctcaaggaaagacttcagtgttatatttagggaataaatggaaagtagcggtatagctggcttaatgttccaataaggcttcaggacagttctccaagtttaaggtgacaggcccctattacataaagttaaagcagcagaaaactagccactcaaatactttattctagaactcacactagatgggagagtacaatttggcttttaggttagagaaaaggtttgcattttgctccattaaaaaaaaaagtaaactgaaatgtatttataggcagtcataaacactttacacagattatctcactgaatccttaacaattctaccagtagattctattatggttcccatttcacagatgaggaaacagatcgagagaggttaagcaagctgaccagggtttatagtcagtaagatgcagagctaagattagacccaggctatctgattagaaggctagatgatatcaccttcccaaattatgctgcagtagagaaagcagatagaaaaagagagcaccaatcccatttctagcttcagctctggtattaactgtctttaaaaccctggacaagtcatctcatttgtctgggcctctacttccctctgtaaaatgaagggtggaaacaatttggattggatgatctctggggtgtctccaactccaaagatctgattctgtaattgcatcttgaccttagatgtgcacacacacctccccacaccgcctcccaccccactgcttcccaaggcgaaaatctaatcctgctcaaagtgcccagtgtaatttgatgctaaactcacgaccccaccgaatcctattacttacaacatcccctcaagaacatacaacacttaaaatctggcaagccagttctttagaataagttgccaatggggtgtgatttttggaagtaaaatgttaataccaaaaacagaaaaaagaaacagttcaaaacaaatgctcctctctctttaaatcacctcttttctacaatgttaccttgacaactttgctctggctctttagatatgggggtttttcagtgtgggagaagaggggtgtcctcctgttttgaggtttcctcttgttgcatggaaagggaaaatgtcaaaggtagagcatcaaatccagcagaatgtacacagggcatcttgagggagtgtcatccagaaataatcacaggtgcacagaattaggacgcattctgattcaaagtacattcttttctcttttctattttccataaccataacacacattccaacagcctataaaatgttacatttttggaccagcactgttgcagaacagagagcaacaaaagtgcctgaaaaataattgcattatttttagttgctgcagcaaaaaatgtacatatcaggttgaggggacagctccgaagaactgtaccagtgtggaaatgctaaaaatattgctccccctcaagcaattgaaattttgagcaaagatttaggaagcggcaggtagggagatcaaattagaatttacatctctcagctgtaataagcttgttatcaggactggcaagagctcagggggctgacaggggtcagctggggactcaagtgtaaggagcaagtgaaaaaggagcagtgttgagcagaagaaagagaggacttatctccagcatctagcactacagagcagaggctgtgtggagaatggctgaaaaatcagaattggttgtagaagcagttttctttctggttgtgagtatgagcccggcagacaccatgagcgctgttgcaggggagtcggcctgtgcttgacacatgtgtttcccattgatagctggag

SEQ ID NO: 34816 - DNA, 2300 bp, Homo sapien
gagatgcaaagaaaagggcctccacggagatggtaacaccagtcacatggatggataatcctatagaagtatatgttaatgatagtgtatgggtacctggccccatagatgatcgctgccctgccaaacctgaggaagaagggatgatgataaatatttccattgggtatcgttatcctcctatttgcctagggagagcaccaggatgtttaatgcctgcagtccaaaattggttggtagaagtacctactgtcagtcccatcagtagattcacttatcacatggtaagcgggatgtcactcaggccacgggtaaattatttacaagacttttcttatcaaagatcattaaaatttagacctaaagggaaaccttgccccaaggaaattcccaaagaatcaaaaaatacagaagttttagtttgggaagaatgtgtggccaatagtgcggtgatattataaaacaatgaatttggaactattatagattgggcacctcgaggtcaattctaccacaattgctcaggacaaactcagtcgtgtccaagtgcacaagtgagtccagctgttgatagcgacttaacagaaagtttagacaaacataagcataaaaaattgcagtctttctacccttgggaatggggagaaaaaggaatctctaccccaagaccaaaaatagtaagtcctgtttctggtcctgaacatccagaattatggaggcttactgtggcctcacaccacattagaatttggtctggaaatcaaactttagaaacaagagattgtaagccattttatactgtcgacctaaattccagtctaacagttcctttacaaagttgcgtaaagcccccttatatgctagttgtaggaaatatagttattaaaccagactcccagactataacctgtgaaaattgtagattgcttacttgcattgattcaacttttaattggcaacaccgtattctgctggtgagagcaagagagggcgtgtggatccctgtgtccatggaccgaccgtgggaggcctcaccatccgtccatattttgactgaagtattaaaaggtgttttaaatagatccaaaagattcatttttactttaattgcagtgattatgggattaattgcagtcacagctacggctgctgtagcaggagttgcattgcactcttctgttcagtcagtaaactttgttaatgattggcaaaagaattctacaagattgtggaattcacaatctagtattgatcaaaaattggcaaatcaaattaatgatcttagacaaactgtcatttggatgggagacagactcatgagcttagaacatcgtttccagttacaatgtgactggaatacgtcagatttttgtattacaccccaaatttataatgagtctgagcatcactgggacatggttagacgccatctacagggaagagaagataatctcactttagacatttccaaattaaaagaacaaattttcgaagcatcaaaagcccatttaaatttggtgccaggaactgaggcaattgcaggagttgctgatggcctcgcaaatcttaaccctgtcacttgggttaagaccattggaagtactacgattataaatctcatattaatccttgtgtgcctgttttgtctgttgttagtctgcaggtgtacccaacagctccgaagagacagcgaccatcgagaacgggccatgatgatgatggcggttttgtcgaaaagaaaagggggaaatgtggggaaaagcaagagagatcaaattgttactgtgtctgtgtagaaagaagtagacataggagactccattttgttatgtgctaagaaaaattcttctgccttgagattctgttaatctatgaccttaccccaaaccccgtgctctctgaaacgtgtgctgtgtcaactcagggttgaatggattaagggcggtgcaggatgtgctttgttaaacagatgcttgaaggcagcatgctccttaagagtcatcaccactccctaatctcaagtacccagggacacaaaaactgcggaaggccgcagggacctctgcctaggaaagccaggtattgtccaaggtttctccccatgtgatagtctgaaatatggcctcgtgggaagggaaagacctgaccgtcccccagcccgacacctgtaaagggtctgtgctgaggaggattagtaaaagaggaaggaatgcctcttgcagttgagacaagaggaaggcatctgtctcctgcctgtccctgggcaatggaatgtctcggtataaaacccgattgtatgc

SEQ ID NO: 34817 - DNA, 2300 bp, Homo sapien
tgcttaatagtccaactatttgtcagacttttgtaggtcgagctcttcaaccagtgagagaaaagttttcagactgttatattattcattatattgatgatattttatgtgctgcagaaacgaaagataaattaattgactgttatacatttctgcaagcagaggttgccaatgctggactggcaatagcatctgataagatccaaacctctactccttttcattatttagggatgcagatagaaaatagaaaaattaagccacaaaaaatagaaataagaaaagacacattaaaaacactaaatgattttcaaaaattactaggagatattaattggattcggccaactctaggcattcctacttatgccatgtcaaatttgttctctatcttaagaggagactcagacttaaatagtcaaagaatattaaccccagaggcaacaaaagaaattaaattagtggaagaaaaaattcagtcagcgcaaataaatagaatagatcccttagccccactccaactttttatttttgccactgcacattctccaacaggcatcattattcaaaatactgatcttgtggagtggtcattccttcctcacagtacagttaagacttttacattgtacttggatcaaatagctacattaatcggtcagacaagattacgaataacaaaattatgtggaaatgacccagacaaaatagttgtccctttaaccaaggaacaagttagacaagcctttatcaattctggtgcatggcagattggtcttgctaattttgtgggacttattgataatcattacccaaaaacaaagatcttccagttcttaaaattgactacttggattctacctaaaattaccagacgtgaacctttagaaaatgctctaacagtatttactgatggttccagcaatggaaaagcagcttacacagggccgaaagaacgagtaatcaaaactccatatcaatcggctcaaagagcagagttggttgcagtcattacagtgttacaagattttgaccaacctatcaatattatatcagattctgcatatgtagtacaggctacaagggatgttgagacagctctaattaaatatagcatggatgatcagttaaaccagctattcaatttattacaacaaactgtaagaaaaagaaatttcccattttatattactcatattcgagcacacactaatttaccagggcctttgactaaagcaaatgaacaagctgacttactggtatcatctgcactcataaaagcacaagaacttcatgctttgactcatgtaaatgcagcaggattaaaaaacaaatttgatgtcacatggaaacaggcaaaagatattgtacaacattgcacccagtgtcaagtcttacacctgcccactcaagaggcaggagttaatcccagaggtctgtgtcctaatgcattatggcaaatggatgtcacgcatgtaccttcatttggaagattatcatatgttcatgtaacagttgatacttattcacatttcatatgggcaacttgccaaacaggagaaagtacttcccatgttaaaaaacatttattgtcttgttttgctgtaatgggagttccagaaaaaatcaaaactgacaatggaccaggatattgtagtaaagctttccaaaaattcttaagtcagtggaaaatttcacatacaacaggaattccttataattcccaaggacaggccatagttgaaagaactaatagaacactcaaaactcaattagttaaacaaaaagaagggggagacagtaaggagtgtaccactcctcagatgcaacttaatctagcactctatactttaaattttttaaacatttatagaaatcagactactacttctgcagaacaacatcttactggtaaaaagaacagcccacatgaaggaaaactaatttggtggaaagataataaaaataagacatgggaaatagggaaggtgataacgtgggggagaggttttgcttgtgtttcaccaggagaaaatcagcttcctgtttggttacccactagacatttgaagttctacaatgaacccatcggagatgcaaagaaaagggcctccacggagatggtaacaccagtcacatggatggataatcctatagaagtatatgttaatgatagtgtatgggtacctggccccatagatgatcgctgccctgccaaacctgaggaagaagggatgatgataaatatttccattgggtatcgttatcctcctatttgcctagggagagcaccaggatgt

SEQ ID NO: 34818 - DNA, 2300 bp, Homo sapien
cagaaagtcagtatggatatccaggaatgcccccagcaccacagggcagggcgccataccatcagccgcccactaggagacttaatcctatggcaccacctagtagacagggtagtgaattacatgaaattattgataaatcaagaaaggaaggagatactgaggcatggcaattcccagtaacgttagaaccgatgccacctggagaaggagcccaagagggagagcctcccacagttgaggccagatacaagtctttttcgataaaaatgctaaaagatatgaaagagggagtaaaacagtatggacccaactccccttatatgaggacattattagattccattgcttatggacatagactcattccttatgattgggagattctggcaaaatcgtctctctcaccctctcaatttttacaatttaagacttggtggattgatggggtacaagaacaggtccgaagaaatagggctgccaatcctccagttaacatagatgcagatcaactattaggaataggtcaaaattggagtactattagtcaacaagcattaatgcaaaatgaggccattgagcaagttagagctatctgccttagagcctgggaaaaaatccaagacccaggaagtacctgcccctcatttaatacagtaagacaaggttcaaaagagccctaccctgattttgtggcaaggctccaagatgttgctcaaaagtcaattgccgatgaaaaagccggtaaggtcatagtggagttgatggcatatgaaaacgccaatcctgagtgtcaatcagccattaagccattaaaaggaaaggttcctgcaggatcagatgtaatctcagaatatgtaaaagcctgtgatggaatcggaggagctatgcataaagctatgcttatggctcaagcaataacaggagttgttttaggaggacaagttagaacatttggaggaaaatgttataattgtggtcaaattggtcacttaaaaaagaattgcccagtcttaaacaaacagaatataactattcaagcaactacaacaggtagagagccacctgacttatgtccaagatgtaaaaaaggaaaacattgggctagtcaatgtcgttctaaatttgataaaaatgggcaaccattgtcgggaaacgagcaaaggggccagcctcaggccccacaacaaactggggcattcccaattcagccatttgttcctcagggttttcagggacaacaacccctactgtcccaagtgtttcagggaataagccagttaccacaatacaacaattgtccctcaccacaagcggcagtgcagcagtagatttatgtactatacaagcagtctctctgcttccaggggagcccccacaaaaaatccctacaggggtatatggcccactgcctgaggggactgtaggactaatcttgggaagatcaagtctaaatctaaaaggagttcaaattcatactagtgtggttgattcagactataaaggcgaaattcaattggttattagctcttcaattccttggagtgccagtccaagagacaggattgctcaattattactcctgccatatattaagggtggaaatagtgaaataaaaagaataggagggcttgtaagcactgatccaacaggaaaggctgcatattgggcaagtcaggtctcagagaacagacctgtgtgtaaggccattattcaaggaaaacagtttgaagggttggtagacactggagcagatgtctctatcattgctttaaatcagtggccaaaaaattggcctaaacaaaaggctgttacaggacttgtcggcataggcacagcctcagaagtgtatcaaagtatggagattttacattgcttagggccagataatcaagaaagtactgttcagccaatgattacttcaattcctcttaatctgtggggtcgagatttattacaacaatggggtgcggaaatcaccatgcccgctccattatatagccccacgagtcaaaaaatcatgaccaagatgggatatataccaggaaagggactagggaaaaatgaagatggcattaaagttccagttgaggctaaaataaatcaagaaagagaaggaatagggtatcctttttaggggcggtcactgtagagcctcctaaacccataccactaacttggaaaacagaaaaaccggtgtgggtaaatcagtggccgctaccaaaacaaaaactggaggctttacatttattagcaaatgaacagttagaaaagggtcacattgagccttcgttctcacc

SEQ ID NO: 34819 - DNA, 2300 bp, Homo sapien
ctaatggaagagctataatgtatagagaagatgaatatacaacacataggtttaatttgttcaaaatataatttctgtcacatttgtaaaagagttttagataaatatatcaagggagaagatggaaatggctcaaatattgaagcatcactgttattttgctccatttttttgccttctacactctaagagaactccagaacgaaaaggcatcctggagaaatactggggataagggagaaaaatgaaatatgtagttaaattcaaactatagtacgatactaatagggaaaaggggaaggaagaatgttgggatacaagaggaaaggaaagaaaaggagaaaagctacataaatatttgggttaactagtcttgaaagagagacaactgcatgtcagtttgaggaattcaaacaggatgaccttaaaatcaagaggatcatatcatgccttagtctgtggctcttggaccctcctgttttctgggcaggtactacacaacatgcagtgaggacagttgtgatgaagtcacttgggttttgggcaaaatgaaaaaatagaggcaacataatgacacgttaatatgttcacatagttcaatggatctgatttatggaactgtgtgttattctaaggttacgtgaactctgttagttgaaatatcctttcctatgtgcatgttgttaatagtaaatgtaagcacagtagttattttgttcttaattgaaagagaatttttggttaccatgatttgatacaaactttgtactggttgatgacattttaagctctcagaattcctgtctgagttcttgagccctgatgaaagacagctgtttgccttttcctccaaaaaactaatatttgttgaggttatgttcagaactcgtcctgtgttctaggcattaggactaggagagcttaagagacttgcccaaattcacaaagcggataggcatttaggccaaattcaaacccagggcaggatgccttcagagtacagactactgaccaacatggatgctgttcacaattctactttgtaaggcccttgaataactatgctgttatttggtccgctatagttttctacttctcctgtaatcacttcagtatttgtgcttatgaccaaataattattaatcctataaatgcaaaacaaagctaaaaactttaagtacatggattgctggggtgtgtggggaaagggagagaagtagagaggaagacaattacagaacatgtttgcaaactgttcaaaagggagaaaatttacggatttcttccacaatggtatcagtcatactgccccacataccaagtacctacagctaagaagctcaatatacactcctccttgtgtctgtctgtctctctgtctctttgtatgtgtctttctcactttcaatatatatgtttatacagaatgaggatcctttatctgaaataagggaccagaagtgttttgaattatggatttttccagattttgaaatacctgcattacaggttgagcaccccaaatctgaaaatctgaaatttgaaatgctccaatgagtatttcctttgagctttatgtcagtcctcaaaaagttttcaattttagagcattttggattttggatttttggatttgggacacccaacctgcatggttttttaattttaatttttatttattattagtttttgagacaaagtcactctgtcacccaggctggggtgcagtggcatgatctcaactcactgctgtggggaaaagcaagagagatcaaattgttactgtgtctgtgtagaaagaagtagacataggagactccattttgttatgtgctaagaaaaattcttctgccttgagattctgttaatctatgaccttacccccaaccccgtgctctctgaaacgtgtgctgtgtcaactcagggttgaatggattaagggcggtgcaggatgtgctttgttaaacagatgcttgaaggcagcatgctccttaagagtcatcaccactccctaatctcaagtacccagggacacaaaaactgcggaaggccgcagggacctctgcctaggaaagccaggtattgtccaaggtttctccccatgtgatagtctgaaatatggcctcgtgggaagggaaagacctgaccgtcccccagcccgacacctgtaaagggtctgtgctgaggaggattagtaaaagaggaaggaatgcctcttgcagttgagacaagaggaaggcatctgtctcctgcctgtccctgggcaatggaatgtctcggtataaaacccgattgtatgc

SEQ ID NO: 34820 - DNA, 2300 bp, Homo sapien
ttttttattaataacattggaattgaatccatgtaattctagcatctaacagctcaccttcagaaatgtcaaccaaataagatcaaagagaattgccaagctttaaaagaggtatgtccatgtaagacaaacaaagagtgaaaaagaaataaggggtgagctgttgaaatagaacacaaagccagccccgagataggtcctcattgatggctaacaaactgagctgggtggcccctctgtaggccaaaacatctctctgatgcagagccagggaggggtttctaggcactggagaggtctctgatttcacagcgggtagaataaaagagtaaacctcagtgtgttctgcagtgtggtctctctctctgttttctgccctataaacaagtcaataaataaaggtacaaacgccctttggtaagatctaccatctgtaactgggggctgttgaaccctgtgatactcagcagtatattagagaggaaaagaagtggaacctggaatcagatgtcattgccctaccattcactagctctcattattagctatgcagccttgggcaagatatggacccctcagagctttcatttcctcctctttcaataagtctgcccaagtttacttagctcatagactcatattaaagctccaatgagataatgtatgtgaaagtgctttgtgcactttcagatgcttacattgtactcacaataataatcatcgataataatgattattagaatctcttttccaaaaactgtacccatccaggtggtacaggactggggtttcatttcctttttttttttttttttttccagacggagtctcgctctcttacccaggctggagggcaagggcgccatctcggctcactgcaacctctgcctcccatgttcaagcgattctcctacctcaacctcctgagtagctgggattacaggcacccgccatcatgcctggctaatttttttttctttttttttttgtacttttgtagagacggggtttcaccatgtgggccaggctggttttgaacttttgacctcaggtgatctgcccacctcggcctcccaaactgctgggattacaggcgtgagccactcttcccattgtattcactctccagcactcatcttgccacattttccaaagtccatagagcccagaggataggagtttgggctttgaagttaaatgatcctggctccaagatttgctctgtcccttcctactatgcaacttgagcaagttgcctgacctctccaggccacaagtttcccactgtgagatgagggcagtaatgggaactactgacgagcattttctgagaattaactaagaacatgagaagtacttcacattgtacttggcatgcagtaagtgctcagtatatggtagccatttattattattgttgttgttatcaataattctgagtgttttaggtcaaatgcagatcttcccacctccctcaatcaagattagttaatttatttatttctgtttttgagatggggtctcgttctgcagctcaggctggagtgcagtggtgtgatcatggctcactgcagcctttatctcttgggctcaagcgatcctcctgccgcagcctcctgagtagctgggactacagtcatgcaccaccatgcccagctaatttttttttattttgtagagatggtgtctccctatgttgcccaggctggtcttgaactcctgcgttcaagagatctggccgcctcggcctcccaaagcgctggattacaagcatgagctaccgtgcctggtctcattgaagatttattgatcagctaatgtgggcaaagcccagtgctagacattgccctccagaggagagtccagtgatgaaggattaggaatgaggtcttatctgtgctttactgagaccctcagctattggcacatgagaacagaagcctaaggaggtgactctaggctctcacagggttgatgagattttgttgctagggtgtctcaaggttgatgagattttgttgctagtggaaggttgaggccaaggttcagaaccaaggtgcctcttgaacaatggtgttctagaatccctggtttccttctatctacctaatctgcgtgaaatgtgacagtatctcaccatttctttctctttctgaaccacattgggtgccaacagaacttgctctctgttctctttcaaaattaccaacatggaccccacccaattcttcccttggaactaaggaacgcctgactgatgtatgtaatgctctgttgatttattcatttcagtgtatata

SEQ ID NO: 34821 - DNA, 2300 bp, Homo sapien
gtgattctcctgcctcagcctcccaagtagctaggattacaggcatgcaccaccacacccagctaatttttgtatttttagtagcgaccagttttgccatgttgctgggacttgtcttgaactcctgacctcaaatgatctgcccgtcttggcctcccaaagtgctgggattacaggcgtgagccgccacgcccggctgatacaggtttttaccatgttgcccaggctattctggaactcctggactcaagtgatccacccactttggcctcttaaaatgctgggattacagatgtgagccaccacactcggccttccctctgaattttgaaggcattcgtgcattattttctagctttgttgtttggaacaacaatgccattctatttccaaatccattcagtgcaatatgttgttctttctctctggagtcttttcgtatcttttctttatgtctgatgttctcatattacatgataatgtcttgctttttggggatatttttattcattgagtttagcatttgattgacccgctcaatactgagagtcatctcctttagttacgagagtctttcctttattatttctttagtaatttcctctcctctattttcttttttaatgttctgaaacaatcctagtcctttgactttgtagatggttataatttctaacaaattttcttaactttatttttcaaaacttccataaaattcgggacatttttataatgtctatgttctttttcatgaatgtaaaatctttctttctgagaaaatattagctttttaaaaagtttttgaagttctctttagctctccctgttatttttgtctcttttttatgttaaatgctttcctcaaatgtctgatgatccctggttatctgttcatatctgaaagggacactaaagactcattaacagttctgcatgcatggctgaggctcatgcactgatgaacttattgaaggagggttgagtggttttgttggggaacactcaaaactataaatatctgaaaatgttttattgggaccacttagtttatccagagattaaatcctccagtttcctgggatagaatggggaaaggatcccttggttctgtgggcattcagtgggaagattcactctgaatcccgttattttcatccctgctcatgttagtctggcttctctgggtctagaacctcacctgatatttagatttttcactgataccttcagtagaagcaatgttgaatgtttgaggtttgctggctgtttacaatcaattaaggatttttaaaaatctagaacatttgtgaattcttatattttcttcctggtactaagtaggagctagccacaggtaggcctcatcatatggatacattacccaaacggtcacaggtcaaaggacaatgtagtgattaaccataagctttggaatcaggaagttctgggcttcagtgtcttcctaaaacttaaaaaaaaatttaatttttttattaaacttttttttaaataaaaaattgagatggggtttcgccatgttgatcaggctggtctcaaactcctggcctcaagcgatcctcccatctcggcctccctaagtgctaggattacaggtgtgagccactgtgcctgtcctcacttttctttctccattattagggcaaggaggccaggggacagggtgagggagaacctagaatgggaatggaggcaactttcagtctaactatgctttggccccatgaggaatctacatgtaaacacttgccagtatggagagtcaattgcactttgtgacaggctgtacagcagttgggacaactgtggcacatgcacaggttatacaggcatatttgcaccagcacatgcatggatgcttgtgcacatataggaaacccactatacacatggacaaagaagcacaagtatgtccacgccatccctccacacacacactagtcaccaggagaaaagggctcagcacatttcatcatgcatcgcccattgggggaagccatgtaggacaggagaaagggaagattatgaggcaaaaagagaaatgaaactaaagagtcccaccctgtcagcattaactgggatataagaggttgggctttggatagatagacagactcctgggtccggtcaaccgtcaaaatgtccaaagaacctctcattctctggctgatgattgagttttggtggctttacctgagtaagtgttctgaaaccttctatgtagaagtttccagaggacttgctattgtgtgatggatttccatgcactggtttgggcctca

SEQ ID NO: 34822 - DNA, 2300 bp, Homo sapien
agttatgagagggttataagtgggggaatgatgtagtctgattatatatttacctttacctcacttatcctgatttcattagttgcttacttacccatgtccctgcccgattgcacaagtctggatttttgacgtccctagtatattgagtcatgtcccatcagctcaatatgttagtaataactggttgaattgaattagcttttttttttcaatctttttttccttaagaaacagggtcttgctctgtcaccccggctggtgtgcagtggcacaatcatagcctccaactgctgggctcaagcaaccctcctgcctcagcctcctgagtagctgggactacggtcaggtacacaaggcctgactatattttttgttcgttttttttgcagagagggagtcttgctatgttgcccaggttggtctcaaactccttacctcaggtgatccacttgccttggcctcccaaagtgttgggattacaggcgtgagccactgtgcctggcaagaaatgaatttttatttttatttttgagatggagttttgttcttgttgtccaggctagagtgcaatggcttgatctcggctcactgcaacctccaccttccaggttcaagcaattcttctacctcagcctcctaagtagctgggattacaggcgcccgccaccacccccagctaatttttgtatttttagtagagtcggggtttcaccgtgttagccaggctggtcttgaactcccgacctcaggtgactggcctactcggcctcccaaagtgctggggttacaggcacgagccaccatgcccggtcaagaaatgaatttttaaacgctgccatacaaaacactatgctgagatcatccacttccccatgaaccctgtcatgagctgcaagatacagaccaccactgcctccttggaagttactgaattcttagaccagaagaggagttaatgaagtactaggcaagcttactcatgtttgtatggtttaatgattaacagcagaagtcaacagcccgatttaacgcatgtgggtgcttgacacagagcctgctatatagtattctccaaaaacctcagctagtgctattactgcatatgatgtaggtttagttttccaagttcttccgtggccctttttgcttattatatcaatccttggtgggagatagaggaagcatttttagtgctattttacaactgaggaaatagaggtttgaagagaactcaggaactctcagggttacccagcattgtgagtgacagagcctggatctgaacgtaagtctgctccagacttctgtttcctgaagcattctcttgaagtcccttggtaaggaggtgtagtctgaagcatgttgtacaggagcatgaaaggttaggcacagtgattcacattcactctcaatttctcttgctaatggcaaacttggcaatatgactgttaaggctagggataagtcgttgtggccactgagtaggaaaagctccacgtccaccagaggcccagtttactctgaaaagcaagtgcatctctgccactggaaggctggcatttgctctcgtgctgccattgagccacgctggttctctgcttccagtttccttttcttttctttttttttgttttgttttttgagacggagtcttgctctgtcgcccaggctggagtgcagtggcgcgatctcggctcaccgcaagctccgcctcccgcgggttcacgccattctcctgcctcagcctcccgagtagctgggactacaggcgccagtgaccacgcccggctaattttttgtatttttagtagagacggggtttcacccttttagccaggatggtctcgatctcctgacttcgtgatctgcccgccttggcctcccaaagtgctaggattacaggtttgagccaccgcgcccggccctgtttcctttttgtttgttcccctgataccctgtatcaggaccaggagtcagtttggcggttatgtgtggggaagaagctgggaagtcaggggctgtttctgtggacagctttccctgtcctttggaaggcacagagctctcagctgcagggaactaacagagctctgaagccgttatatgtggtcttctctcatttccagcagagcaggctcatatgaatcaaccaactgggtgaaaagataagttgcaatctgagatttaagacttgatcagataccatctggtggagggtaccaaccagcctgtctgctcattttccttcaggctgatcccataatgcatcctcaagtggtcatcttaagcctcatcct

SEQ ID NO: 34823 - DNA, 2300 bp, Homo sapien
caggcatggtggcgcgtgtctgtagtcccagctactcaggagactgtggcaagagaatcacttaaacccaggagatggaggttgcactgagctgagattgtgacactgcactccagcctgggtgacagagtcaggctctgtcttggaaaaaaaaaaaattaaaaatgccttggttgccttagccacatttcaagtgctcaatagtcatatgtggctagtggctgctgtagtgcacgacactcacacagaataactctgtaaccaatattctactggagacagaatcgatcctatggaattcaaattcaaatcctatggaattgtacagttatgtaacatctcagagcactggctccacatccctgtcttggctctctgtggctcatcagttccagaataactccgttaccagaataactccattactaaaattctaccgggcagcactctataggagggaatagagacagacaccacatatattgcacacacagataaaatggattaaggaaaacaagataataatagtgagagggactggttggctactttagattgaaggacctgtgaaaaatgtccagggaggtcatatttaagccgggataaaaatgaaaaggaaaaaagtgaaaatggtggggctggggagctagatggagaacacagccacggaaaaggccttagggttgaggcaagttggaaagaaagctctagtagctggggctgagtcagcaggggagagagtggtagaagaaatctatggggtaggtcagggccagaccaccagggcttcagtaatttgagtaaagatttaggaattattattattattattattattatttttctgagagagttatgagagggttataagtgggggaatgatgtagtctgattatatatttacctttacctcacttatcctgatttcattagttgcttacttacccatgtccctgcccgattgcacaagtctggatttttgacgtccctagtatattgagtcatgtcccatcagctcaatatgttagtaataactggttgaattgaattagcttttttttttcaatctttttttccttaagaaacagggtcttgctctgtcaccccggctggtgtgcagtggcacaatcatagcctccaactgctgggctcaagcaaccctcctgcctcagcctcctgagtagctgggactacggtcaggtacacaaggcctgactatattttttgttcgttttttttgcagagagggagtcttgctatgttgcccaggttggtctcaaactccttacctcaggtgatccacttgccttggcctcccaaagtgttgggattacaggcgtgagccactgtgcctggcaagaaatgaatttttatttttatttttgagatggagttttgttcttgttgtccaggctagagtgcaatggcttgatctcggctcactgcaacctccaccttccaggttcaagcaattcttctacctcagcctcctaagtagctgggattacaggcgcccgccaccacccccagctaatttttgtatttttagtagagtcggggtttcaccgtgttagccaggctggtcttgaactcccgacctcaggtgactggcctactcggcctcccaaagtgctggggttacaggcacgagccaccatgcccggtcaagaaatgaatttttaaacgctgccatacaaaacactatgctgagatcatccacttccccatgaaccctgtcatgagctgcaagatacagaccaccactgcctccttggaagttactgaattcttagaccagaagaggagttaatgaagtactaggcaagcttactcatgtttgtatggtttaatgattaacagcagaagtcaacagcccgatttaacgcatgtgggtgcttgacacagagcctgctatatagtattctccaaaaacctcagctagtgctattactgcatatgatgtaggtttagttttccaagttcttccgtggccctttttgcttattatatcaatccttggtgggagatagaggaagcatttttagtgctattttacaactgaggaaatagaggtttgaagagaactcaggaactctcagggttacccagcattgtgagtgacagagcctggatctgaacgtaagtctgctccagacttctgtttcctgaagcattctcttgaagtcccttggtaaggaggtgtagtctgaagcatgttgtacaggagcatgaaaggttaggcacagtgattcacattcactctcaatttctcttgctaatggcaaacttggcaatatgac

SEQ ID NO: 34824 - DNA, 2300 bp, Homo sapien
attattggacatccagatactggctaaatggggatttccgcaaaggagatgtgtccctgaccatagagaatgtgactctagcagacagtgggatctactgctgccggatccaaatcccaggcataatgaatgatgaaaaatttaacctgaagttggtcatcaaaccaggtgagtggacatttgcatgccatctttatgaataagatttatctgtggatcatattaaaggtactgattgttctcatctctgacttccctaattatagccctggaggagggccactaagacctaaagtttaacaggccccattggtgatgctcagtgatatttaacaccttctctctgttttaaaactcatgggtgtgcctgggcgtggtggctcacacctctaatcccagcactttgggaggctgaggccggtggatcatgaggtcaggaattcgagaccagcctggccaacatagtaaaaccttgtctccactaaaaatacaaaaaattagccaggcatggttacgggagcctgtaattctagctacttggggggctgaagcaggagaatcacttgaacctgggagtcggaggttgtggtaagccaagatctcgccattgtactccagcctggctgacaagggtgaaactctgtctcaaaaaaaaaaaaagaaaagaaaagaaaagccaaaactcatgggtggaatgtatagatgggatgaaaggcctagatcagtggttagagaccctgactctcattagaatcacatagagagtttttaaacaactatagatgccaggtacagtggctcatgcctataatcccaatactttgagaggctgaagcaggaggatcacttgaggtcaggagtttgagaccagcctggctgatatactgtggctacccctatctcttaaaaagcagaagaaaaaaccccactaccaaaaaccagagaaatcagcatctctggaggtagatgctaagcattagctttttacagagtctacctcaggtgattttaccccaggtgcagccagcatggtgaactgctgggttatgcatgtatgctgggaggtgaacagacttaagatttctataacatgtactttgtgcccagatagagctgagtttacatctaactctgcctcttactagctatataatcctgagcaagttattgaaacgctgtgagctcctcttctataaaatatgacaataataccgatcatgtgggccattagaaggattttatgtgataatattttattaaaagcctttataggttgggcatcccaaatctgaaaatctaaaacctaaaatgcaccaaaatctgaaatgctctaaaatccaaaactttttggacactgacatgacattcaaaggaaaagctcattggaacataagtataggcagatactaaaaaataaaaaaataaaaacatggctgggcgtggtggctcatgcctataatcccagcactttgggaggctgaggtgggtggatcacctgaggtcgggagttcgagaccagtctgaccaacatggagaaaccctgtctctactaaaaatacaaaattagccaggtgtggttgcacatgcctgtagtcccagctactcaggagtctgaggcaggagaattgcttgaacccaggaggcggaggttgcagtgagccgagattatgccattgcactccagcctgggcaacaagagcaaaactccgtttcaaaaaaaaaaaaaaaattcaaaatctaaaacatttctgatctcaagcatttcagataaggagtcttcaacctgtaattatggccatttgtgtggctgttagttccgctattaataatcagaatgtaacaatgatgactgcatcttacctttgtcaaacatttgaagtgtgtgatacactctcaacgtaggtatccaggcaggtttggaagctgagggtgtatttctctttcttaattgtctttcgcatttttttcttgctgcccctttgattccctgaaataagctttctgctctcagataattttcatccttatgttgtttctgacattagccaaggtcacccctgcaccgactcggcagagagacttcactgcagcctttccaaggatgcttaccaccaggggacatggcccaggtaactatgcatggggcagaggagggaatctttagctggctctgaattcagaggattttgaatgtgggaaaaaaagatgagaaaacagtgtgagagtggaggcatggatatctccgtgcacctgaaatagtgtttgaaaagagggaagtggtggagacacacctgtgctgg

SEQ ID NO: 34825 - DNA, 2300 bp, Homo sapien
gtctcagtagcaattctagaaatgagcagaaaacaaagtggtaaaaacaaaacatcgctgggcacggtggctcatgcctgtaatcccagcattttgagaggccgaggcaggtagatcacctgaggtcagaagttcgagaccagcctgaccaatatggtgaaaccctgtctctactaaaaatacaaaaattagccgggcatggtggtgtgcgctcttagtcccagctacttgggaggctgagacaggagaattgcttgaacacaggaggcggagtttgcagtgagccgagatcgcgccactgcactccagcctgggcgacagagcaagactctgtctcaaaacaaaaacaaaaacaaaacaaaacaaaacacagaaactgagggctgatgcttttaagagccttgaccaagttcatgctgctaataaaaataaccccagaccccatatttaatctattctaccttatgcttgaatatggtcatttgctggttattagttatgtgggaagacaaacattaaattaataaaacataatttatagtggaaaaaatctgtcacttagggggcttatgctctcattctaaatcaccaatcatgtgcctttcggcaaatcaattttctgaagtctcagattccttgtctataaaatgagaaattggccgggcgcggtggctatgcctgtaaacccagcactttgggaggccgaggcgggtggatcgcctgaggtcgggagttcaagaacagcctgaccaacatggagaaaccccgtctctactaaaaatacaaaattatccggggtggtggcacatgcctgtaatcccagctactcaggaggctgaggcaggagaatcacttgaacccgggaggcagaggttgcagtgagccgagatcatgccattgcactccagcctggacaaaaagagcgaaactccatctcaaaaaaataaataaataaataaaaataaaataaaataaaatgagaaattgattatgatctcttgagtaactgccactctgcaatgctatgggaagtacacacattgaacaagttgcatatttatattaaatgccatttgtttatattgaacaaatttggtatttatacccaatgcatttaatggcataaatgtgaatgacaaagaaactcaggaaggcaagacatagaggaaggccactggcttttcagaaaccactcagcctgtgagctcacttcccttttataaaaaaaagcttttgcttttaaggtgtccagataaaggtcacactcccagagctgaggctacgtgagtctaagctgttacctcagttatgggagtgtggctggaactcaacactttctgatcattcatggccaaagcctcttggggtaggggagagggggcaccttgtatgcatgagatgaaacaggataccaagatccccttaattctactcagagtagaggaaaggaactgttgccaaaaggaacatgttttttctaaattgaagagttggaagtttgaaggtcaaagtcagaatattagaacagagagccatgcatgtattatctaatacaattttctcattttataaattatataaatgaggaaactgagactcagcaaggttataggatacaacctaatctgtgttagaagaaggatgagagtgaggcttatgctgggagttgctatggtctgtaaatgtgaggataaggaacatgccattcactgttgtgttccacttcctagtccagtgcctggtgcaaagtaggggcttcataaactttggtcacaggcctgatgaagggactgatttgagtgaatgaatccatggatgatgcatctgtactttgtgttccccgctagtcagatggactcggacatgctccatttcaggtgtatctcatctgagacattattagagggttctctttatgtgccatgactgagtagcgttttcttccactgaagtattgcttcctctttgttgatatcacaggacagacatcagaacacttacaggatgtgtgtagtgtggcatgacagagaactttggtttcctttaatgtgactgtagacctggcagtgttactataagaatcactggcaatcagacacccgggtgtgctgagctagcactcagtgggggcggctactgctcatgtgattgtggagtagacagttggaagaagtacccagtccatttggagagttaaaactgtgcctaacagaggtgtcctctgacttttcttctgcaagctccatgttttcacatcttccctttgactgtgtcctgctgctgctgctgctactacttac

SEQ ID NO: 34826 - DNA, 2300 bp, Homo sapien
aagctgctttttgtacacgtgcatcatcttataaatgaataccgaccccaccaagcaagagagaccttgagagtcatgatggaggtccagaaacgtcaacggcttgaaacagctgagagatttcaaaagcacctggaacgagtaattgaaatgattcagaattgcttggcttctttgcctgatgatttgcctcattcagaagcaggaatgagagtaaaaactgaaccaatggatgctgatgatagcaacaattgtactggacagaatgaacatcaaagagaaaattcaggtcataggagagatcagattatagagaaagatgctgccttgtgtgtcctaattgatgagatgaatgaaagaccatgaaagatgtttctttttctttttttccttttgataatagcatcatatattagttcattttcttttggacagtcttaagagaagtttcactaaaaatgtaaacagctttaatcttgactccaaatttttcaattatgagatgtcataggcagtaatttcgctgtataacaagcatagacaaatgagtgtccctgcactaagaagaatcactttaaaaagcaaagtgttagctgctgttgtatgggacattcctatgttttagagttgcagtaaaactttgatgataacctcaataatagcaaagttttcgtctttgaaaaggggatttagcatttgctttaagaatgatagataaatggatattaagctctctacatgtaaaactatgaaatctttagacttattccattaaaaattttgcttaagctccaaaaagtagcataacatgttgatagagaggagcccagtagagttataaaatagaaacttcattttttcctcatgactgcttctgtaaacccactagctcagtcttttctccctatcctgaatggactcttgcagggaagtcccataaattgttgtttttttttccagtcactcaggtaataagtcctttggtcactttaagttacagacattaattttagtaattaagatgtctgtgtcattagctatacattttctttaaagctaagctcagacttgtttaagtccacaatgggaaaggggtttgatggcagagactgctaggtgtctaccaaagattcttgctctttgaagatatgttgtcaagatgtggcaatccagccagggacatttccctactcccagcatctctgtgagaacatatgactaagtcgtaggcggtgaaatgtgggcataggaatccaggcttgccccataaacatttcttgcatgatcctccattctcttctcccagctgctggttggacggtcgtatccaggataagtttggaagccaccgaagatggcaaagattgtcagtctggttctttgaatgaccgtgaggactaagtcttcctttcagtaactccactctgcccctagctaattggactttatatgagcactttcttctcttcttcccccgactgtccatctgctcttccaccaaggtgttagtggagagttgaccttgtgtctgaggatctctgcctgccgttttcttaatgtaggcccgtggttcttaaagtgtgtggtcctggaccagcagcattggtatcacttggggacttactagaaataaaagttttagtataatccgtaggttcagaaaaataaaaaataaatgagggttctctggctccatcccagaccttttgaaccagaaacttctgggtgtaggtcccagcaagctgtattttaagaagcctatgtgattatgatacatgctcaagattaagaaacattgaggctgggtgcagtggcccactcctgtaatcccagcacttcgggaggctgaggctggtggatcacctgaagtcaggagttcgagaccagcctgaccaacatggggaaatcccatctctactaaaatacaaaattagctgggcttggtggcgcatgcctgtaatcccagctactcgggaggctgaggcagggagaatcacttgaatctgggaggcagaggttgtggtgagctgagattgcaccattgcactccagcctaggcaacaagagcgaaactccatctcaaaaacaaaaaagaaccattgagaggcaatgcctttccccagatgtctacttttttatttcttccttagcccctggtttctagcatagggatttgctcacttaaactttcattggtcctagagctagcaaagttcacattaaaatgattataaggggcctggcgcagtggctcatgcctgtaatcctagcactttgggaggctgaggtgggtggattgc

SEQ ID NO: 34827 - DNA, 2300 bp, Homo sapien
gcaataaaatacataaatatactatgtaagatgatttcagatgatgagaggttctatgaaaaaaagataatacatagtaagggtttcaggggcatctcccaagagaaagattagggatgcgctattttgcatagagtagtgtaaccccagaagaactctttgaagtcacatttgaccagaaacctgaatgaattgaggaaatgaagccgggcgcggtggctcacgcctataatcccagcactttgggaggccgaggcgggcggatcacgaggtcaggagattcagaccatcctggctaacacggtgaaaccccgtctctactaaaaatacaaaaaaattagctgggcgtgatggcgtgtgcctctagtcccagctgctggggaggctgaggcaggagaatggcgtgaacctgggaggtggagcttgcagtgagccgagattgggccactgcactccagcctgggtgacagagcaagacttcgtctcaaaaaaaaaaaaaaaaaaaaaaaaaaaaaaaaggaaagaaggaaatgagacgtgtcaatatctgtgcaaagagttccaggcaaatgcattggccccaaggccgggatgtacttggcaattttgtagggcctgtgatataggccaggggaaggatgtcagattttattctaaaagtcatagaaagccttggaggattttgaatagaggagtgataagaccggtcttatattttaagaaggtgtggtaaatagactaagggaggacaaaaaatcaaagaagtccaggtgagagataatggtggcatggcataggaccatagcagtgggaacggtggtcagtcatatttggaactttatttacttatttttaaatagatctaatgcaaaaggctggtatggtagtttcggtggggtatgtgagaaaggagaaaaaggtgattccttcgattgaacatttgcaattgagtaaagtgcaactggggaaagatgtctgtcaccactggatatgagggtctgaagtgcagaggaaacggtgttccagggcctgcatgtaatcatccagctgatatctgactgagaagtggttggagaactgagtcctggggcaatccattaatcaaatgtgccaaatgctgctgacagatggagtaaaatgaggactgggaacgaccattggaagtcactggtgcaggatacattggggtcagcggtgaggagaaaagctggattgggttatgctcaacgtagatggatttcttcaggaaataaattgatacgtgcgagggatttaaaatgggggagtccggaagtggtggttcacgcctacaatcccagcactttgggtggccgaggcgggcggatcacttcatatcaagagctcgagatgagcctcgccaacacggtgaaaccctgtctctaccaaaaatacaaaaaaaagaaaaaaaaataggtgaaaccccaactattcgggaggctgaggcacgagaatcgcttgaatcccggagactgaagttgcagcgagccgaaatcgcgccactgcagtccagcctgggcgaaagagaaagactccgtctcaaagaaaaaaacaacaaaaaaaccctgcatgtctatattttcgaatttgtatgtaagacgtcttaattgtatgcgttaaattaaaaaaggacaaaaggaatggaactaccagcagcgactaagtcagtaaaagagtggtaatggggaagggggtggaatatacgcaggcgcaatagcaagcgtttcttttggaggttattttcgtgtcataaatttctaaattcacgttaagtcttacaagagcatgttaaacattaaaacataagattgtttctggtcaataaggggtctataaaaaataaagcaataaggtgtcttgttcaattttatgccttaattcaaaaagaaacgaagaaacggaaccctcagctacgacttttaaaagtcagtaacgggtggatgggaggagtcaaacatacgtaggcgcaacagcgagggatcggtctgaggcggagctagaatttcgttaaaggacagctcttacagccaatcaaggacagagtcggtggcttcttcccggaggagaccggaagttggtttcggctgcagaggggaaggcggctaccagtgtaaagccagagctgaggtaagtgggcggcaacggtttggggccgccgcctgtgtgcgtttttttcttccggaccccgcagcttcctctgtgctgggctgggaactggggaggcatggctgagttcggcctccaaaggcggtctttcgtctttctctcccgagtctctccga

SEQ ID NO: 34828 - DNA, 2300 bp, Homo sapien
taggcttgttgtaaggatcaaaatttttatttatttatttttttagagacaggtctcagcctcttgagtacatgccaccatgtatagctaatattttttattttttgtagagctgaaggtcttgtgatgttttacccagattgatctctccctcgtggtctcaagtgatcctcctgccttggcctctgaaagtgctgagattacagatgtgagccaacgcacccagccagaattaaaatgtttagaagaatgtatggtggcaacagcatgcctggcttatagcaggttctcaatcatacaattatagttctgtcattattaattattcatcagaaatgaacatatgagaagaatatatggctacatctatatatagctccaacttcttactttttaacataattgtgttgacttttagttatgattcccttataacagaatatatgccactttgttttttcttttttttccccaaaaagtcattcaatatctttagaaaaaatatttcagcttttcagagataggaaactttatctttgcatttccactttctagctggtcccaaacaaaatacttgctcattaaacttttttgaataaataaatggaagaatgaatctcaatgggcacaagcaagtttatatttactgcgaagctgcaatgtgccaggcactgcagttggcactgggggatacaaaaataacattttgtggttgaagtttatttcaagacctccacatggtaatgattgagtttggcggaatgtatgtttatttcagaagtatttctctagctgggggagggggaatttggattcttcaccttgagcaaagtaaaacaaaacaaaacaaaaactccagaaagatgtctttgccaccatttctcagaagagctttaaaaagaaacggaacgtcagtggtttatcaagcaggcatcaagactgaagcagcagacatatcagtgtgggaaatcctacggtgattcaagacctccaagaattcctgtggttcccagtaaatccccacacacatcactaactaccaatgacactagctctgatgcagaatgagattatcagtgagccatgcagcttgaggaagagaaaaagctctgacctagaatccagctttggactctgacctcaagtaagacaatcctgagccttggttttctcactttaaaatgatgttttaaaaaataaacctgcttccggccgggtggggtagctcacacctgtaatcccagcactttgagaggctgaggagggtggatcacctgaggtcgggagttcgagactagcctggctaacatggtgaaaaacccttgactctactaaaaatacaaaaattggctgggtgtggtggtgggcacctgtaatcccagctacttgggagggtgaggcaggaggatcacttaaacctggatggcagaggttgcagtgagcagagattgcaccactgcactccagcctgggtgacaagagtgaaactccattaaaaaaaaaaaattaactgcttcaaatgagagactaggtgagaaaatcctccatatcctgaaaatcagcacacagatggaaccctggttctgtagttctgatggggagcaggagtcccttcagaccattcattcaacacctatccctgagtgcctgctggcactgtgctacctacacactggagacacagagatcagcatctagacagcacccctgcccttagcaagcacaccatacacacccaggattttacccccaggaagtaattcagcccaagcaaaaaaatttttgcaagaagatgatccttgaaggggtaactgtaacaacagcaaaactggaaacaacccagatatttataaaagcagaatggttcataaattatgtgtcccagcattttgattgaaaagaacacccagcctacccacacctacaccccaggcagggtcagcctctcccctgtggaggcattgatttgttttgtgggggaggctggtgacactgaccagaggggatagctacatggaggctaggacaaaggggtgtgagatgcgcacaggtcacaaaggactgcaggggataaatgtggtggtgccaggagatttaggcagaagtcctgtagggagatgggcagttaccttctctccgtctctctctcggggactctatttgtggctggtggagctgtcttaaacgaagagaaccatgagcaatgaatcttgtttaccttattacacagcccacagctactcttcaatgagtgcgttcaaaacctccatgggggacctgcaacgacaattgtacaacag

SEQ ID NO: 34829 - DNA, 2300 bp, Homo sapien
tcttcagcatcctccaaaagtgatcaaaaggttgggatgcttttttcaattctcttttgaactcattgttttaacatttttgctgttcttcaattcatggcaattattattccttttgatactcaaattgttccatctttggcaagtgggaactccttgaatttggctcctatgaagtgaactttttaaaaccaaaacaaacaaagggactatttgtttttgtttatgttttccttaaagtgagaaaaaaatattgagcctcctaagtttgcatttaaaagttggcaaagatgagtctcagttagtgggtttgatggctctatgagaaagagaataaaattacttacgatgacactccatgtagactgagcaaacgaaagactcctaagtattgcaacagctactgatgatattttgttttcccggatgagaacactttgtgaagtctataactcttttcatctgaaccaagcaggtgtaaaatgtactttcctcagaggagtttgtagtctagtttgagaagatagcactgtattatctaggtttgctggtagtgacagaaacctcaaaataactgagacttagaaaatagatattaaaaaatgtaatccagggctggcatggaagatccatggtcaccagggtcccaggctctttctatcttatactccattgtcctcaacattcaatttccacctcatgatactagatagctgcttcagctccaactgttacctcaatattctagtcacaaggcaggaggaaaagggaaagaaaaggggatgacagatcccactaaggaaatttcctagaagttgtgcacacgacttctgctacattcagttgaccagaagacagtcatacaactacacctagctacaagggaggctaaaatttgtagtctttattcttgctggccagatgcccagataactgtcagggattctgttactctagtaagaaggagagagtagctatttgggaatagtagcaatccctacctcaagcccatactcagaaaaaaaaaatactatcttgtttgggcagtgtatttccacacatatgtcttaagaatctcagaatgggggaggtaatttaaaatataccagtaccgtaccctcctgggtgtcttgattatgctggggcatccagtatatgaaataaaattaggctgttgtctggtaatttacatttaaaaataaacattggagaatttcactcctatacagcaataattattatttcatttattatttatccctacccactacatgcaatatctgcttacactaaaatctcttgattattaacatagtagaggtaactgtcacacattatacttcaactatgtactaactctaaggtgacatgtatgactagcacctaccattcataagatgtatgggattcagtcctccaaaggaccctcacaaggaagctaaggatcagagaagtcatggcttgctcaaagagaaacagcatagtaagtgacagagctgggaatccaacacaagtttgtctgttttcaaagcccacatatactttgtttattatgccattctgaaggattcacttatttttcactcttccacaaaacgtcaggacagaaaggcagtcatctatatgtagcattgagaaatttctatgggctttaatttaaatcttaaaaactaataaacttcagcaacatatttcttcactttaatgtgtgagggttttgtgctcattacctcttttaattgtccaacccaatttggtgatgatccattcaacaaatttttcttgaacatctgttttatgtgtcaggtactgtgatggttgctgagtatatcatggtaagcaaaaccacacattgtccttactccttgtgctacatgatttaactgctggatggattaaaccaggaactataaagattaaactgtaatccttaccacaattttgagtttacagtttttcaaatatcatttcaagccattagcaaaggctgtatgtattttttacatatgcctcctcgttttgtgaattttgaaaggatgtggtttcggcctttgacatcagaggagaagctcagctatgttggctgaacgttgatagaaagataacgttgaaggcaagttgcccttgagcagctctctgaagatcaactgcctccacattgcattctttgccccaaaactctttcctttggttgtgctaagaggtgatgcccaaggtgcaccacctttcaagaactggatcatgaacaactttatcctcctggaagaacagctcatcaagaaatcccaacaaaagagaag

SEQ ID NO: 34830 - DNA, 2300 bp, Homo sapien
cctctggatttccaacacagtggcttcaaaagaccatactgctctcctttatacacaaatagaactcagaggtcggagttatttttgcctaagatctaaccaaatatatatgtaatagtcttttctgtttttaggcaacttgttcctgaaggtgaaaagacagggaaggaacaacagggagaaatacgtcttccaaaaaactataccatctgcaataatatgccccttagaatgaaaatctgatttattgggattctcattgttaagtatttgtaatcactgaacttgaaatcccaaggatcacggtggaaaatgaaacattttttaaaaaggaaacctcagttctgtttttaaacccatcctccacaaacacccccacagcttttcacactgaaccagggaagaaatgtatgtgtgtgtatatatatatatatataagtcatttttttccgaaatagcaatttgaattggaattagcgatttaagatcaaaccacaaggaattatggattctgagcacgtgggaaataaggtgagatcagtaaaggaaagcaaaggcttccacaagtcctttgctggagcttgaataacggggctcctccacaaattgcccttattaggaacagctgagtgattaagtataaatttgtgggccttaggaaaccactccttatatctacatacactccacaatgtctcaaatgttttcaaattatttaccctgtaaggtataaagggcaactgttattccctgtgttgcagatacggtgacctctgtggagcagagtggtgaagtgacctgctcaggtgtctcaaggttagaatttggtgcagcctgacttcagcctggtctgaaggcctaccaggctggatttcaatgagaattgtttctttctctttttcttttctctctttctttctcttctttctttccttctcttctttctctctctttctttttctttcttcctttctctctctctctctccccccgtctctctctttcattcttttttttttttttttgagacagagtctcactctgtcacccagtctggagtgcggcggcaggatcatagctcactgtagcctcaatctcccaggctcaagcaatcctcccacctcagcctcctgagtagctgggacaaaaggtggatgccaccacacccatctatttttttttttttttaatttttagtagagatgaagtttcgttgagttgcccaggatggtctccaattcctgagctcaagcaatcctctctcctcggcctcccaaagttttggtattacaggtgtgagccaccgctgggcagataattgcttctttaaagagcccgacacggcagataagccttgaagagaaaggtacctgtcctctcagtgcttcctgccacctatttgtccgttaggcaattcttccagaatgaagttgaggcaggcccctgtaaaagaggtggcagcttcagggactcttctccagggaactggaagggagcggaagaacttattcttaagcgaaggagccctatcagcgaccaagctcaattggtggaaggccccttcccctagccccagttgcatcttctgtcacttcaccctgctccttctcctcagagcactttgggctgtaactggacgtttgctaggttaatttacacctgtttctcctggcaggtgataaaactccaagggggcaggaccctgtcttttgtacaccagtgcacacccaagtcctggcacggtacttggaacaggataggtaatcaataaagactgggttgataaaagagcacttggaaatcatgtggggccaataagatccgaacgcggccgaagctctcgtcctcgggttgctgcaggtgtggttcccggtgatggaggccgtggaagaagccttccctccctttcccgcccccagggcaggaagcctgggggctgagcggtcctccgaaaccgagaggcaggtcctgggtgcgccggcggtacagcggagagcgtggagagaccctcgccgcagccatttcctgccctttgtgtgacagccgctgcggcgaaggggcgggcgctgggtgggggcggagccgcggcgggcggagcagcggggccggggcggggccgagcgcggcgcagcggagcggggcagagcatcctgcgccccggcgcggggccctgcggtagcctcaggcccctcccctggacccgccgcagagccaggtaagcggccctcgcaggcctcgggccgggcacggggactaggatgccgccggggacggggatgaggccgtgaggatgcgcgaag

SEQ ID NO: 34831 - DNA, 2300 bp, Homo sapien
tagttcctgggtgcctgtgccctcagcatgggcagggagacggaggcaggcctgctggcaggaggggcaaatcaggagactgtcggttcctgtgttcccatttcctgcctcctgtctgtgtcccagttagggcagtgggtctcaccttactcttggatacaggctgtgccagcaacctgggtccctgagatcttagagggcaaaaatcaggtccatatctttgggcaggcctgtgaaggccttgatggttgctttctccaccattagaccctctctctgtggccctcctggtggcctcccacctccacttccatacagtgccctgcccttcccccagtctccagtgtcagaaatggttttcaagaaaggagccaatgattgtgtttatcttgaagagctaaatacaaaagaagttcccatttgatgcagagcaggtgctttacaagtcatttgaccggaaaagaaacagaggatggaggcattttaatgggaaacaaagctttaatgggaaacactgtagaaatatttgctatcactaatggtagaatttcaaacagtgggctggaagtggaggtggggagctgggtagttcttttgggaacgggtccctgaaatgacaatatctagcagctgtcagctctgtatttggcaagggcagctttggccctgcaggcaggaatgctgtaagagtgtgtatgcatgcatgtgcatgcgtgcatgtttgtttgactggtcaggtgttactgtcaccagaaggcattttttgagcacccagtgtccactttcgggatgagaaacttgtgtacacagggttcctcgttggcattggctgccctttgccaaggcaattattagacctcaagaagatagtgttgttgcttacaaagtcagtgcctctagctagttgtgcgcactgagcctctggctgggggcattagctctctgctcactaagcttctttattatatttcctggccagttctgaccggttctgtaggcacccaaggctgccttgttcagtccctgctggaaaatgaaaaaggaaaaacttgctttaggcattaggccaagagtcggatgtacaacccagtggggttggagagttttactcaaatcagatgctggcccagagaaggaagtagacatgaattcaaaaaccggtaaaaggccctggtagaacactacatgacccctctgataaatcatgccctctctgatgttcagtggcctctgctgctgtcatcaaccagaaagctgaatgagatgatgaatcggctacaagctaattaacgggaaaagcgctcctggaaaacagtacgggtcccagtccctacgtttaaagattggactacactctcaacgcagcttctttggaccactgttggccccaggggtccaccaaaagcgtcacaaaatggccttttgtagcctccatgtggccaccgtaacaatgagtctatttctttactggcaagtattaattattcacttgtaattgacaaagccagacatcagtcacctcactggagtctttatgaaaggcttttggtcctgtcattctgaggagcaaagccatgcctagggtccaggggatggcccctgcatcagtagtgagatggtgggagaaggggggcaggctgctgccttcttggcagtgaatggaggcaggggaggaactagaatatctttggatgctcttactacccaaggggtgcatgaaagtgccgagcagaatgcttagcacatagtaagtactagcatatttatgtatttattgttataatgtattaattacataatcattaagaatttggcttatgtatgtaatcaacccttggctattaccagcccctctccctccagagctttcctgaattttgcttttttgagggaagttggtctctgtgaccagtaaacccagccccaagtttaccggccgaaggaagggaaagttaagagtgatagggcatgaagtgaaaggcttcaggtgggaagtgctcttaagtagcacaagagaggtgggtggaacctgagtaggtagggagaagtgggagggaacaagccaagcagaagcccagggccattctcacatttcaacacgtagagttaaggaagggcctcttcctctgtgagaattcagcattttgcaaccatccaaaaatgttgagggcatgctttgcttccagggcagacagagcagcacagtgagcatgggacacaggatccctgacttgctgtgtgcccttaaaccagccactacctctctgacgttcaaaattgagcaatggaaggcagcctgc

SEQ ID NO: 34832 - DNA, 2300 bp, Homo sapien
ttgaaatagtcaagtacttcgcatagtgtctgacacagagtaagggctaaagaaatgtttcactattattataattggaattaatgaagagaattactagggctttggaggttgaagatcattatgcccagtaaaatcattactccctcctgtaaaatggacctagtagtagtgtaagaaggaagacagtcttttttttttcttttctttcaatggatcagtgaagtggttttgctgtagaactgaatgccacacttagaattgtgggggagagaagaggaagaagcttaggtgtggagaggacctgaaaccaccataggagaccagccttctgcagagggcagatgaggaagttacctctgggctcagtgagccctcactggatgcagcatttgctgttgtcatggtacgtgatgggaaggtgtgtttgagaactcagtgaaatgtgaatctagttagctgcacagcagccagtgaaggctcagccccagtctgccctcccagccttgggcctaaggcaggtattagtctcggggcagcaggaccttaggtatattctgcagttgttttagtccttggcagcccgtggaccaaattcttgtgttgatggtccttttcccccctaatgttagacactgtatttcctaacaagcaaagcaaactcactgacattcacagcagaaatcccagccccaggatctcacaactccctgggatcgaaggtggttaggaagggattctcagacaagcacagtggcccttctctttgtgtccctcttaatcgtgtgtttagggttggctttattattattaataatatttttctgaaactcagcttttagtgtttttgttcacctctactgttaacgttttattttgctttgctttttgctttatgtctgcctttgtaactctcaatccctctgttctcatttctctgggctgatttttgttctcttaaggtttttgagtgtaacattaacttcatttagttccacttttctttcagctaaatgtgttgaagacatgtattagtgctttccatctttcatttctaaagatcttatcatttctatttgaattcctctttagttatgaatgaccttgaagtatgttttataaattttcaaaggtatgggattttattgctacaatttgcattattgatttctaatttccttgaattatatttaataataagtgaatgtgacttgtaggccatcatttttgaagaaacttgggggaacctgatttatagcctaaatcatgattagtttttaagcagtgtttcacatatgtttggggggaaaaatgagtattctgtttgctgggtgctgagttcttaaaataggaattagctctagttgggtaactgtgctgttcagattctcttcagcttctaatcctgccaaacatactatcaaagcagctgcgctgtgccagggtctaagacacagaaatatccatttagggctgatttgtttgatgtggctcacaaaacatacccaggtcaaggaagacagtggctcctccatctttgcaaagaaggttgatttgcaggaattgagttattttaatcccagtttaattagcctaaaaacccgggctctggttttcagttgattatcttggctgtcacgatcctggataattgtattgcatggtaatttaagagtggaactcataaatatccttatgaagaacaaaaggtggagaaactaaccatgacctatgttctcacatcccacttgaggtccctcgcttgtggtcacgtgactgtgtgggcatcacataatttctctgagccttgatttttcatcagttatatggatagggtaccaccttccatgttgatcacagagggtggtggtgaggctcaaccaagtgcacacaaaataccttgttagccataaagagatcctgagatgtaaaagatacacatcgagagcaccttgggaagaagtggtgagtggaagtggcctcaatgcattttaactctctttattctcccaaaggatgctggtcatggtgcggttaagaggaattttagaggcccctgaaattctccactgaccttctcttccttcccttcagtgcagaatacagaaactgcagccatgaccacgcacgtcaccctggaagatgccctgtccaacgtggacctgcttgaagagcttcccctccccgaccagcagccatgcatcgagcctccaccttcctccatcatgtaccaggtaatggaaatggtagatagcaccagggggcccaggaattctggggatcccctaagagagtttgcc

SEQ ID NO: 34833 - DNA, 2300 bp, Homo sapien
taatattccacaatgatacagaatatgtgtgtatgcacaaacatactgtgtgtatatatgtacatacacatatatacatatacagccagtcctcattattggcggattctgtatttgtgaattcccttactggctaaaatttatttgtaaccccaaaatcaacactcatggtgatttctcagtcatctgcagacatacacccactcccagctgaagtcggacaaagtgactctgccttcttgtttcagctctcatacagtaaacaagtgtcttttttgaagtctacttagtgccatgttttctatatttttgtgctttttactctaattgttcaatttaaaatggcccccaagcttagggctaatgcgctatatagcgttcctctgtgcaagaaagctgtaacatgccttatggaaaaaaaatacgtgttctagataagctttgttcaggtgtgagttatagttctgttggtcatgcgttaatgaatcaacaacagagatcacatcaagtgtctttaaacagaagcacatataaaacaaggttatatatggatcagttgatgaaaatgttgtgaccagaggctcacagggctgtaactctgatttctccttggagcaatgattcagtatttgctacttcagagttcatggccactttacagaactactgtgaataatgagactcaacatgtatagagcatataattttaaaaaatatctttggccagactcattcttagaccacaccaaaatgagagtaggaattaagagttctggctgggtgcagcggctgatgcctgtaatcccagcacttggggaggctgaggcaggagaattgcttgagtccaggagtacaagaccagcctgggcaacataatgagatctatttttaaaaaagaaataaaatattaaaaaaaatttttaaaagagctctagcactcaaaataagttattcctgtaacttcagttcaacggattggtacatatatttagaaagctaaagttctgggcttgaccttggtccctgtgggccacaagtctaatgaccacaagtcatggtctaatggccacgaggccttgcatttgtcagacagtccccatttcaggtacgttgctctgtgatcaaaggcatctcctgagttggggtttggaaagtacagtcaccatggctgttagccacatggtggaagcagtgagcatacgtgggtcagtgcgcagtcacccacgagtgctatgtaataaaggaatctgagtcaggggattagtgtttatcaaacagcatattcatttattaggagggtacgtatgggatgagtatcagaaggatatatatatatccaaataccagtcttagttggttctgggatggtaggattttatgtgattttctctcctttcgcttatttgggtttttttcctgaggtttgtgcgctgatcatgtctccattaaaaaaaaaaagtttttaaaaaaggaaaaattaaatgaaatgtaattattgggattagtggagatttttatggcctttatctgcccttaagtatattactgatttttttttacaatgatcatttattactgtttagttttaaaacatttaggtagcgttatgagtacgagtgttctgttttcttgccatccaggttggagatggtttgcatcacttatcatgtacaggcagaactaaccatcaccaggcccttattatctgccatatcttttaatcctctcaatgaacctttcaggatagatactgttatcaccctcatttcacagatgaggaaattgaagcaaagagatgttgaataacttacaaagggcagcagcaccaccagaattcaccccagtctgcctggctccaaaacccctgctgttggccactttaccctcctgcctccctcccttctactctccagtgttccgtgggtccatgttctttcctggctgctccttaccccttctggccctgggcccacgggcctgtgccccagcagcctgcatgctcacctcactgttgctgtagcgagcgagctcggagatgaagcggatgtggtcatcccggatctgaaccatctgctcgcagatattgtactgggggctgatgctgctctgggtgcacgtccacctgggtagaaaattatggggtcggagagggtcccagcctcaggcgcctgggtggaacaggcattagctgctcctggtgctcagcccacgtggccaactcccctgggtgacaccaaatggtatcccagccgcctcagcaagaaagcctgctaagtccaacactgtgggagcttcaggcc

SEQ ID NO: 34834 - DNA, 2300 bp, Homo sapien
gagtatcttaattccacagtggaaaatttctcttggttaaaaatgtcatccaagaatattaaaaataaattccaattttctgtggaaaaaggcttgagttctaccttgttcctcctcagaccccttaactctggtatttttactccccgcaaaataaccttttcaaagggcatctgcaaacagctgcgtggcctttctgtggggaggatgcttttatgctccgtggggactcaccattagcacttgacctggctgtgctcgcatgggaagagacatgctgcatgcattgctgcagatttaagacaggcgcctgggaagactgaatgccatgggcaagctgcagagcaactttctgatcaaggaacactggcttgttcccgagttcccaagactccaagcctcccggagacctttggccaagggtagggtcacaactcaccaaggcggctcttttttttttttttttccaagggaaaaagtctttctataatacccaggctggtctggaactcttaagctcaagtgatcctcccacctcagcctcccaagtggctgggactacaggtgcacaccactgcagctgtgcctggctttcttcctaaccttttatcattaatgtgaatcagaaagagaccttcatgggttaacttggatactttggccaagaaccaagaagagaaaagctgacttttaaaaacatataatgtgtataaatttattcaggtctacatctatctgagctactttccaccctctattccagacacaccctgtgatctcaatagaatggtggcaatgggttcttacaaggttgaaaggaacaggaagggatggaacctcaaagccagacggccctttatgagaaaaggggaggcaagcagtctggattcttgaaaggaaaggaacgctggggatgattcaatccaggagtagcaaacagtttccatttctggcgtcaactccaactgattgattgggaagcagtttcttgggacgcttgtgttcagaggaactctggggctgtttctgcacccagctggaagcagtgctgcattagattcctagggttgctatcacaaattaccataaatgtggcagcttaacatgacagaaatttattctctcacagttctggagaccagaagcctgaaatcaaggctctcgcagaaccatgccctctccaaggctctaggggagaatgtttccttgccttcccagctgctgatggctcccggtgttccttggctgatggcagcatccttccactctctgcctctgttttcccttggcttcttccccttgagtctctctgtcttttctcttacaaagacattagtcattggatttagggctcacccttaaatccaggaagatttcatcttgagatccttaactagttatatctacgaaggctctatttctaaatcaggtcacatcctaaggttctggatggatatgtattttgggggggcattattcaacccagtgagagtgccatgatggtttagcaagcttgacaggggttcagggctgtgcagggatagggctcaggtcttctgccttctgatctgccatcctgatgtagcccaagcccacagctttacagatgatggtggaactgagactcagacaataaaaataaaagggtcttgaccagtaccatataactatgtaatggcacatgagtcaagaataaagaaagatgaagataaagaggtggggtaggcagttgggatggggaagtgtaggggtgggaggggatgaagatgaatattactgctttggttgtggaataactgagaaaagcatctttgcatttaaaaccattggccaaagaggatctagatgggacaagaaaataataatcagccaactggggagaaaatgtaggagtgttagaagaattagtactgcactggggaccagttttcaggggatcatctgccctttttcagccaaaggaatgagagctcctctcactgggcaaaagcctttccaggctggtccctgaaagcatcgtgcgtacagatgcctgctggttgccatggtgaatgatgctgatctgaagaaatgaataatgtgagcattaggggcggcagtgggattactcagtgttgagagaaacaacacggaaagcccagagcagaggagggagaaggccccattctctcagctttaatctactgcacctcggagggcagagctctaaccagacacgctgcaagcatcaggtaagacatatagatggctcttcttggaaatggaaatggcttcttttcacactctgcttggagaagggc

SEQ ID NO: 34835 - DNA, 2300 bp, Homo sapien
cagcccactcatctgtactcttcttttgtcagctccaaggaaccattctccagtatgtgaaaacactgatagaggtgatgcccaagatatgccgcttgccccgacatgagtatggctccccaggttggtgatagcaaaacaatccagacccctcccatggtggggagggaggctctgaccatccaccttagagcgtttgcttctctaacatgccagtgagctggcagagtactggctatccatcctaccccgccactagctagatagccttttaatccctctgagcaatgttatcatcttgtcagtgtagggagatgatgcttgcgggacctgcctcatgggactgctgggaagttggaagaggacagcaaatgtaagcatgtttaaataatgcagagccaggttattagaaaaggtatttatgagctcagcacctccaggagctcttcctccatctgcatatttggggagactgaggctccaggcagtggtgccaagttgacacatctaagataagtcaggaaatggacatctttgctgtttgaccgctgggcagagaaataatcatttccttccttaatagtgaactgaaaacagggcctggagaagagggaaaaatggggactgtgaattggcatctgatgtttctttccaaaaccaagatgtctagtgctggatctgtgtgattcacaataggaaaaagataaggctaaaatttctggtgttcagtcccagctgccctacttactacctgtgtgactatgggcatgccccttaccctctctgagcctcatctgaaaccagggtaatagtgcctagttagtgatattgtattaaatgagatattacagataaagtgctcagcacaatatctgacacctactaataaatattaattcctgtcatgattaggaagtcaggcaactttggagggactgggaagggtccaatggtgcctcatttgtgtgcctgtgtttgtgtgtgtgtgcatgtgtgtgcgtgtgtgtgttctgaaaaagacatgagccagctactcgaactttgtccagtactgagccctgaaagaaatctcactctgggcctgcaggtaagagggatgcgtggtttggctttttgctatcccagagtcaggtctggggctgccactcagtcattgtttcccatagaccctactgagcagtgtcaacttcccactgaccaccccgattcacctcccagggatcctggagttcttccaccaccagctgaaggacatcattgagtacgcagagctcaaaacagacgtgttccagagcctgagggaagtgggcaatgccatcctcttctgcctcctcatagagcaagctctggtaagtccagagcccaaaggaagtggggtgtctccaggttggaggggatgccaaccccaagcagatattgaggctcctgcagcattgatttgtgctttgagtacaagctcacatgctcttttcagttcatttccagacagacatggattctagtcctggctcccccattcacgattagtgcagttgtctaggtctcagtttgccattccctcatgttatggaaccaaactggggtccacctgcctggcacagtaaaaacaaacatccacgctgaggtttactgcaggagaaaggagggtgtttattttcagagtaccaagcaaggagaactgagcagttctctcttaacaccccacctctccaatggcttgcaaacaagggtttttaaaggcaggggtaaatttcaggaaagcagaagtttcaggcaaagttataagtcattgtatggaggttacacattggtttagcccaaaggggcaggctatcgtcttgaagtgggtgggggcttatagtcataggtagatttcagagagtttctgctttgcaattgggtaaggaagagaagctttgttttaaaatttagggtcagcagaaaagaatgttagctccagcttgtgggtatggcttcttccaggcctcctaagaataagtttagaacaaagaactggaactgcggtcagagttcggcctgcagttccctcttatctgaggtctgcatgcatgccagcacatctgtttggtgtgggtccaggtttctgaaaaagaactctggttcatatgtgaagatgttatctttaatttctgtagggaatcaaacatcccatgattctagcttccttggctgttgttttaagttagttactattaccttcttgcttatcagcttgcttatttacttctcagggctagctaggtgcctggaatttcccttgaagaaactcaagattttat

SEQ ID NO: 34836 - DNA, 2300 bp, Homo sapien
tggagatggaactgttgaaaagaacaaaaacaatcggcaaagctcagctgggcatctgtctgtactgtaatacgctaaccttaaggatctttggactccaaggcacatctggttttcatccagactcctgcactagctgtaatgctgggaaaatcagctccctcttgggcctcagttttcctatctacaaaatttgaggttgcactagatgagcagtttccaacagggggaggttttaccctcctaaggaatatcagacaatatctagagacattattggttgccacaatgaagggtactactggaatatagtccagaaatgctgttcaacatcctataaagtccagggcaaccccctaaaagattatctggctccaaatgtcagtggtgctgaggttgagaaaccaaccctggatggtctctgggggcctttccagatctgactggcattcggatctgtgagtttgggtctagactctcctcacctctggtgagggcagtaatgctctcaaatgactgaccggagtgtttctgtggtccactctaataaggagagaagaagtaacagagatgaaggcaaagaacactccaggcaagaggccttgcagtaaaaggcagactaaagggctctgtccttcccgggggactcaggcctgccttccctcacacgtacaaataggtccctctcctggtgtatgctggcataacaaacaatggccgaaagtctagaaaaccaagcaaaatttaaacaaaaacttagtgactgctattttccctaatgaccactttctgatttcccagggaaggaaatactagaggaaacactagacattaatagaatttcctttaaaaacctgatacatataaaaatacttaacaaatgctgatttgtttcagataagatccaacaaatatattaagaggctgcgatgaccagaccatttatggatacaagataaatgacagacatagcactaccactacagattgcaggaagaaggtcttttcaagaagtggtgccagaacaatctggaaataaaagatttatacttcccattaaacacaaacatcaattctaggtgaataatatggacttaaaggtctgtttagcgttgaaagactaacctctaaaactttcagaggatagcccatcttcacgcgttagagtaggaaaggttttctaaacaaatcacaaaaccgtaagggaaaaaaataactacactaagcctcaagaacttctattcaccaaaagacaagccagagtaatagatctgcaatacatgtatccatagtatataatggccacaaatccataagaaagatgacttaaaaaggcaagaatgttgaccagcacttcacaaaagatggtgtccaaatggctagtagcatgtggaaggagaatcagcatcattagggaaatcaaaatcataatgaaacatgacagcccccccagaatggctatgattaaagagggacaaattgtttatgaggctgcaaagaaatgataactctcatacactgctgaatgggagtataaattggtacaatttgaaaactgctttgaagctaacctaataggtatttccctaataaaaacaggagcatctatacaccaaaacacatgtacaagaatattcatgacatcattattcataatagtaccaaactataaacaacccaaatgtccacccacagtaaaacggatgattcagttagtctgttcatgcaatgagaatactagagtaactgattcggtaataaaaaatggatcatctacaacatggatgaatctcaaatgtaatgttgaatgacagaggtcagaaaggaaagggaaaacatactagataactctacatgaagttcaaggacaagcaacactatctctggaaatagaactcggaactacgattccttgcggaacactgaagagggcatgaaagaaccatctatggtactataaatgttctgcgtctagacctgggctacatggacatgtgccttcatcaagctgtacacttaagatttatgcatttgactgtaatacattaattgaaaccaccagaacaccctataaaaaccaaaaaccagaaaaatgatgcacaggtacctgggtttctgtactaatattgcaccctgaattttgagaaatatttataagcacctactaacttcatgaggaaaatacctttgtccaagtgatcaactgttaaatttatatccctctacctatcaatgatatattaatctgttttttaaaaaaaggcagaaaaagacaaaaaatggaaaagtaaaatgggcaa

SEQ ID NO: 34837 - DNA, 2300 bp, Homo sapien
gatagaagctttgtactgcacatgggaagatgctgatagtatatactaaatgataaaaatagattacagaagagtaggtataatctgttcttattttaaaatatatgctgaaatggtatgtgcagagaagaactgggcagttcaaactctggaaaaggctatagcagtgatgactcctgggtggtggagttatacattttttcctcctttaaaaaatttatctgcattttctaattttttgaaagcgaacataaagctagccaataaaaagaaaagaggctagagtggcaatcattaaaacatatctaagctagtaattttccagaggacagtctttgcctaggggttgaattaagtatttggtgcattcccagaagaaaatgacaaatttcaagtcaaataccacatgtacagtaactagattattaatgatgatggtcattggaaatcaagaacagcagatttgtagtttgaatgccactgcccttttctagttcaccatggctgtcgatcgatcctgctgcacctgaattggtgtcagaatcctctccaaaagccactgctgcctctcaatagtggttgatgtatgaggtgaccccagggccatcactagcacacatgttgccttcaggaaatcataaaatggtatccttcctcaggacatttcacctctttttaaatatattaatttttaaagaataacgtctgctagaaagtgattataaacaatctctgattctgcagtgtgcttggcattccctaggatgtgatgcccttgggtactacacttgctacataaactatacccagcagccttgggtaataaactccccccatacccccaaaataagcacaaaccctgacaagatggtatcattgtctcccagcaaaagcagcaatgatctgagacccctggaaactgcccgttgttccagcattgcaggtgctggcatttgtcttgctttggtatctgggcagcagctttcctcctgaaatgcccacttccacctggtcagatgcacagtcctgtacggcaaggcaatgtagcaaagcccaggacactaactggatagggctcaccagtcagctgttcctttttcaaggcagcatggggaaaggaggactgtgggtctctattccaattaaattgcgaacttaattcatctttatttcctgtctgtaaatttgctgattgcacattccagtcacttgtaataaacatagttagttcctggggtctttgctgatgcatcaactgcgttgcaagaccagcctctccatcccagcaccattatggttctgaaggagactcattctagggggcagagtctgctgcctaatgacgagtaagggaaactcatgctggggacatttactacccagaagattctaagtggccacttggagttttaaaatcagcattcccaacttgagacttgttaaaggcacccaggaatcctcatgcctttgtcctatctagtgctataagacttatgaagtagaacacagtgaggttgatattaaagaagatgattgcctggtaggcccaatggccactcagagatgagaccaggcctttggcagcaaggcaatcctgagaggccatagctctggtttatcacccatttcttcatttaataagaagtattgctctattatactctgcctgtgtccaaaggaagacaccatgcctatcaaagaactggtgtcattaagtctggagactcttacacagaatgaggccaaggggaagggcagggtgagttgcatgaggctctctcagcctgatttcaggttgatttccatggtctccactggaaaccatgtatctttggattcagaaatcttgggttcaagtcttgcctctatactggatagctatgagactctgttatattctctaagcctagcttatccaacccatggcccaggacggctttgaatgcagcccgacccaaattcataaattttcttaaaacgttgatttttttttgcgattttttttttttttagctcatcagctgttgttagtgtattttatttttatctgtggcccacgacaatttttcttccagtatggcccagggaagccaaaagatggtacactccttctctaagccttagtttccacgcctgaaaagtgctgggactgaggagctacctcacagagttcttagtgttaagtgaggtaatgaatgcgaagtctccagcgcttaagaagcaggtcctcggttaccaagagccccctttcctcctcttgccatcagcaaagagacttgaatcggccttttctctaagcc

SEQ ID NO: 34838 - DNA, 2300 bp, Homo sapien
cagtaaagcagaatcacatgaaagtctgggtgcaagagtatatctggttatagatgatagaggcatagtcactaaccttgtcaaacattatcctatgtgtaggaataggcaaggtctagggtcatttatcttttaagaaatatagtgtctcaggcaaaagttgtgggggccttgtgctgtatcctgctttgttttcaaagcatttttccagagaggtgcacatcattacagaatcaagggcttgtgaaattatgcagcaagtaaaatgagcaaacgtggcttgttacatttgctgtgtctcacatttccctttctcttttaacctctcccttccccaacccgatcccgaccccttggagaaggggctgttgcatttgacaaagaaattgatccttatgtagagtaagcaacttgtttaaagtcatccagcaaattagaggaagccccatgctgggagaacccatccttagaggcccagctagaggtccgcaagtagacagtggagggtcgtaggtaggaggacaggcttggggtcagagcagctcggtttacacctggcaccctcgttcactagctgtgcaaccttgggagcaagtgtctcagagtatttaaaggacagttttttctattcctatacaagatgttaacattaagggaagctggtgacaggtatatgggaactctctatactattttcgtaactcttctataagtctaaaattatctcatgataaaatttttaaaaataacagtttcctcttatctgtagcatggaaagagtaaggatatctgtctcctaggaggcttcgatgagacagtgcctggaaaggggttagcacagtgtctggcccatgctgacgactccatacataacaattcttaaaagctgcctcctccaggaagccggtgagcaccactggcagaaccaatcactgctttctcagtagccccacaccctcactgcccaggagcagtttatttcagtgtaaaatgccaggcggcttaatgtgaccactgacagcacgagtttgatcctggcttttctgcttctcagctgagatccccagcaagttacttgagcactttgtgcctcagtttccttttggtaaataataaaagtctgtacattataaggcggtcatgaagattaaatgaactggaatttttcagcacttagaactctgcctggcctatagcaaactctacatacctatttttatgctccaggtcagtggttttctaacttgctttttactgttacccatagtaacaaatatgctttccatcacaacgtgtgtatgtgtgtgtgtgtataaataattttaaagtggtaatttcaaaaacattggtctctaagagatgatcacattttgtttcccccattaaaatataaggtacttgggggacagggaatagtctgactcattttggtctccaatcacttcatttccttctttcatttaatttaccaagctcctattatctattcattagacataaatatatattgagcattaactcactatgtacctgttacctaccagcacagatcagacctgggttgaatcaatgaacgggtaaggcaaggaaaggaggtcgcagggcagaaggcagggaggaagggcaggagggtgaaatggaaggaagggaggaaaggtggaggggaggaaggagagggggagggtaggagggcgagaaggaaggaaaagaaggaacccaggttcccaattggcagcagtacccacttccaacccctatgttgccacttccacctcggcaggaaagttgccccttctccagccatctaggtcccctgtactctttccctggggatggagctgggtgccggtgcaggcatcggaggagcggtgccggggaacccgcctcctcacctcttgcccctagcacggggcggtgactccagagctgggagcctggcagcgtcctcaccccaggaaggcatgcgcccctctgcgggcggccccagccctgggccccctgcccccggaattgcccaagatgccgggtgactcctccccggggactctcccactctgggacgcgtcactctccccacccctgggtccggaccccggcggcttctcgcgcgcgagccacgcgggggacaagtcgcggccacctgctccggagctggggagcccgggcgccgtccgcccgcgcgtcggttcgtgtgccccgggccccatggagctgcgggtcagcaacaccagctgcgagaacggtgcgtacggcagggctggggaccaggcgggctccgcgcttcgcgccctcccctcctt

SEQ ID NO: 34839 - DNA, 2300 bp, Homo sapien
tggtctcgatctcctgacctcgtgatccacccgcctcggcctcccaaagtgctgggattacaggtgtgagccaccgcgctggacatgagggatttttaaaaccagagtctctgaagagaattagggagtttcttcaaaggacttgtcttctagcatctgaactcaggcagcacaaagcattgggttcttccaggctctttggaaggcatcacgttgggaccttgtgttccttcaccccacaccattagggcctgtttatgattcttagagaatggtgtttcaatgtctccaagaaacagtgcagctttcttagagctctggtgtcaattttttaaaattatttctcagctgtgacatggaaaggatgatgttggctgggtgcggtggctcacgactgtaattccagcactttgtgaggctgaggtgggcagttcacctgaggtcaggagttcgagaccagcctggccaacatggtgaaaccccgtctctgctaaaaatacaaaaattagctgggcgtggtggtgcacgcctgtggtcccagctactagggaggctgaggcgggaaaatcacttgaactcgagaggcaaaggttgcagtgagccaagattgtgccactgcactccagccttcagcctgggcaacggagcaagactccgtctcaaaaccacaacaacaaaaaaagaatgaggcaggatacagcttcacagtcatgcctggatccctataagctcatggttaagctcacccctttctctctcaatctaaaaagcgtatctgaagacaaatgattgagagttatattgattactactctctttcatttttaaattattcacaaatatggatagtttaacaattattagtaacaaattccttggagcataccttcccactgaaggaaaagctccagtttcttggagggtttaacctttaattggtttagagaattgggagcaggataactctccttttgtagacccagatggctgtactatttgtccttttcaccaatggtgggacccaggaccttccatactcctgtgataaagagcatgcgtttatgagttggctggttgagtttggaatgccctctgcatccttagaacagcaatgagatcactggcccaaaatgaaataaaacttatgatcttggcctttttttggcctggtcctctgtcacaagagaatattcacctgatatcagcttcaggaaaagtttaggttggctggtgttttcttcagtgctaagtctcaggagacctcttgtaacacactcacaaccctttacttatcgcagccccctcatgcaatgggcagaaattgctactcctgattctcaaatgctttctgcatgccgactaagaaaaatagaatgttatggggtggttaatatctcatcactaaggatgaaagaattcttttttttttttttatactttaagttctaggatacatgtgcacaacgtgcaggtttgttacatatgtatacatgtgccatgttggtgtgctgcacccattaactcgtcatttacattaggtatatctcctaatgctatccctccccgcctcttgctaccctacaacaggccccggtgtgttatgttccccttcctgtgtccaagtgttctcattgttcagttcccacctatgagtgagaacatccggtgtttggttttctgtccttgcaatagtttgctgagaatgatggtttccagcttcatccatgtccctactaaggacacgaactcaagggatgaaaaaattctaaattaatgtattggtaaatgttctaaggggccagaatgtatgtgtgtgagacaatgggggtctgaacccaggtggagtcagccccacgggtagcaggagtgacagcacgagtgacacctgcctgactgctagatgctcaaactccccactaattccagccttgtcctctgccaggcacccctttcccaaagtgttcaatggatgcaacaggagggagctggacaggtatctgcagtcaggtggtggaatgtgtctctccaacatgccagacaccaggatgttgtatggaggccggaggtgtgggaacgggtatctggaagatggggaagagtgtgactgtggagaagaagaggtgaggggtcacaatggtgctagtgggaggggaagaatttgcattggtttcaaaactcaaggtcaaagagaacacaattgaaaatttcttagtcacaggtgtttcctacatataactgtccaataccccatgaaaaatcagatatgaagaagccttccagttggagtgtttgtgccgcct

SEQ ID NO: 34840 - DNA, 2300 bp, Homo sapien
ctgtctcccacctttacaagtacagagaccttatatgtcctatttaccacaatatcaccgacacctagagtgcctagttcctaggaagtgccaagagcctgaaatccagcaagtcttctaatgacccagtgcaggggcagctcacagaaagtgcatgtgtggcttagctggggtatagaggtctgggattccaatggttttgcatcttgtattggcaggaggaagtgaggaaggcagccccaagctgcagcatgaacttatcatacctcagtggaagacttcagaaagccccgtgagagaaaaggtaagactcaaaagacctcatttacactggcaggagttgacaactgaggtttgggctacctactcaactttcttagaatcccagtcatcaccattagttctgtttctggcccactctgtcctctgggtgcccattttggagatcacagatgggactttccttccttgtatgacaaacttctagaacacttcccaatgctattagttgaggaaatgaaaattcacattaatgctgacacaagctaagtgcagatgtgttggtgtcacagaaatcacttagtcttgattggaattcattaaatattgtcattgttatttttgctctgcataatacatacttcattttcttgaaggaataatgtacttggagagaaaaaagataataatataaactataaactattttaataagacgcagcgtagagacctagtactggggaatgtatcttaaaatccagtaggctcccctggccagaacaccaggaaaacacataggctttatcaaagagattgggaagaaaacaaaaaacactgtcctgttcttgcagagaggacctgagcatttaggatattctttgtggttctggtttttgttttttgtttttttgtttttgtttttttgtttgtttgtttgttttgacagagtctcactctgtcgcacaggctggagtgcagtgacatgatctcggctcactgtgagctccgcctggcaggttcaagcgattctcatgccttagcttccggagtagctgagattacatgtgtgtgctgcgaagccaggctaatttttgtatttttagtagagatgggttttcaccatgttgtccagggtggtctcgaactcctgacctcaagtgatccgcccacgtagtcctctcaaagtgttgggattacaggcgtcagccactgtggcccactgtggttttggtttttccagcaagtgagacgtgaaagagcaagaaaggaagatgcggttgttgtgtgccagtaaccagctatgtgacctgccacttgcgaagtggtagattttcttcatttataaaatagtgcttagagagaataaggagaaaagaaagctggggagaggggttttttctaagatctctttgggttaaaatgatttgtgatttattgggcaacatataggagcaagattatagcaggaaagagatgtgtcaggaaagacttcagacattgtggctgttgaatctggaaagataaatggaaaggagcaatgtccaggatccttgaaactctggccaggataatacagacatgtccaaaaaggctccaacttggatttaccaagggaacctaacagtgtaaattttaggacagaccaagtgcgatggctcaagcctgtaatcccagcactttgggaggctgaggcaggaggatcatttgaggccaggaatttaagaccagcctggggcaccatactgagatcctatctctacaaaaaaaaaaaaaaaaaaaaaagaaaattagctagacctaggggtgtgtgtctgtagtcccagctactctgaaggctgaggtgggacgatcgcctgagcccaggagtttgaggttatagtaagatatagtcgcatcagcatcactgtcctccagtctgagtgacaatgcaagaccttgtctcaaaaaaaaaaaaaaaaaaaaaatcaggacaaataaaagcaagtaacattttgtcctaaaggcagtaaacgcatggaattcatttcatcaaaaagtaggagaggctgaaaatagcttcaggaaaagtctcgacaaattaatggatggtcatcctagagcagattacttttaacaattaagatcttgggtattgcaacctattcataccccctgaggaatggacctgctactttttatagaggcttctttgttctctccagatgtggatgccgggcatcctcaggaagggcctgagaacaaagcagaggaccagatcctgtctttgttcccaaccattgtctgcccagcatatgggtcat

SEQ ID NO: 34841 - DNA, 2300 bp, Homo sapien
gtgccaccacgcctggctaattttttttgtatttttagtagagacagggtttcgccacattggtcagactggtctcgaattcctgacctcaggtgatctgcccgccttggcctcccaaagtgctgggattacaggcctaagccacaatgccaggccaccatcctattcttaaataagatagctacaaagagaaacagctacataccttcctcacaattttcacacaaggaaattccttgtggacaaaggacagacagaatttaaagccatccctctgaggctcaccggaaacaaatgcatatctgattgcttcttctgccctattgtttatgtaaaaatgtagattcactgagctagactaaattgtgtattcagtggaaggttgatcaaggactcaaaagaatgtaacctcttctgtttcttatctacttataacctggaagcaccaccctttctgcagcttggagttgtcttgccttaccggaccggaagcaatgtacatcctacacatattgattgatgtctcatgtctccccaaaatatataaaaggaggctacacccccaccaccctgggcacatgttgggacctcctgaggctgtgtcatgagcacgttcttaagcttggcaaaattaaccttctaaattgactgagacctatctcagatatttcgggttcacagaaagatacgaattttacagcagctggagactaacggagtcccaaacgacattaatggccagaaccacttatttgatttccctcatgggtgcccatgagtagggtttgatagacctacctacccatcatcttcaggagtgcctcgccctctccaacacttagcacttctctagtcaacctgggtttgactaaagaggctcagaaaaaggaacagatggacgaggtttgaggctgggattctacaacgaggctttgctaaaacttgctgagggatcttaggcaagtcatttctctctcattatcagtttctccacctggaaaataaggtgtgttgcatcaggctctggagttatacggatgtgggtttgaatctaggcactgacattagctgtgtaatcttgggcaagtggtttagcctctcaggtttgatttcctcatttctaaaacagggatagtactagtacctaccccatgggattactgggctaatgaaaagagataatgtatgcagagtccctggctcataaaagttattttctccgattaattaaataagtgaatatgtgtaaagtgctgaagacagcgtttgacacttagcgttttatcagtcttagctatcatgattttcttattctagtacatagaaagtcctcaataagtaacagtagttattattatttttggtcacatgtccctgtgtttccctccaaaaccctaaccatccccaattctggttttctccccgcatgcagcccaagggttttcacgtcccagtgcgattgtctgggctgtttcctccgcctgatgttccatttctcctcctcccgatctcagatggcttctcctctgggattcctctggtcttcatcactccctcctcccaggcagaaggaatggctcctggatttgtgtcctgcttaaaaaaaaaaaaaaaaaaaaaaaaaaaaaaaaaaaaagaagtccatatagcacttagttctttgtgcctggcggttgggttaactctttctgagcctgtctccgagagtggcggcccccgggggacggcgctgggtgaatcacctctgagtgtcacccaaggcgtctggcacagtgcgggacagtaaacgggccgctgtgcggagaggggtccagtttaactcctagaagcccgagtccccgaccctctacaggccgcgtccaccacaaatccctcctcctggggggctcggattctcccttccccgcggtctccctcacctgagccagccccgctcccccgagtctcgccagctcctccccggcccctccctccagccccctccgggctggagcctcccctcctccatcccctggcggaggcccgcggggctggaggcggagcgtctcggcagagggctgggagccgggtggggaggcgcggggcgagccggggggttccagacgcgcctccaccgccgggcagtgggcaggtatggctgagggcgtgtgagcgccgagcgctaagggccgccgccaccatgccagggggcgcaggcgccgcccggctctgcttgctggcgtttgccctgcagcccctccggccgcgggcggcgcgggagcctggatggacaagtaagtggccaggcgcggggggatgga

SEQ ID NO: 34842 - DNA, 2300 bp, Homo sapien
atcagcttttgctcatgcatacagttgcctctcccatttaaaccctagtacagtggttctcaaagtgtggtatggggactgacacttacagagtcagctaggttaaaactattttcataataatcctaatgtaatatttgctcttttcacttcattctcttgtgagcataaggtggggaaaatataattttttcctatgaaaatgtgttaccacagaatggttttattgttgacgttttaaatgagttgctatctttaaaatttgtttttatttacaacatggtaaatattgatagatgaaatccacatgaacaaaagcttttttgggatcttcaatagtttttttttttttttttgagacagggtcttgctctgttgcccaggctggagtgcagtggcacgatctcggctcctgcaacctctgcctcccaggttcaagcgattctcctgcctcagcctcccgagtagctggaattacaggcatgtgccaccatgcccaactaattttttatttttagtagagacgaggttccaccatgttggccaggctggtctcgaactcctgacctcaagtgatccgcctgcctcagcctcccaaagtgctgggattacaggagtgagccaccacgcccagcccaggatcttcaatagtttttatgggtataatgagttcttgagataaaagtttgaaaaccattgcccttgtctatctgccaggtataagaactcctactgaccacatttgttaccagaggattggacaataaattggagtggtctttgagtgataacttgtcttgattgcaaaaatcatctacgtcaagataaactatagtttttggccagaatgtcatttagaaatgcagcaaatgttaatacaggatttctttttgtttttcttggtgatgtttaatggaaataaacacaatcctactaaaaggagaaacataaacatggaaaggatttggaacagtgtctagcataagagtaagcccttaacacaggtagtgattattactattttattattaccctatcacagtcgctattcatttatttattcaacaagtatttattgagtactatatgccaggctcaatggtctgcattgtggattcagtgatgggcaaaacacaaactgttctgccttcaaggactttatagtctaaagtgggagaggcagtggaatcatcacatgaaaattctaattacaaattgtggtaagcaaaccaagtgatagaggtataagtagaccaagattttatctgattttcagagtcagtaaaagcttctctgaagaagtcccagttgagctgcaatatgaaaaatgtgcaggaggaattaaggagacacaaaggaaagagtagcatgctgagcatgtttaaacaccctgcagtagaaagagaatgatgatggggccaatgtggctgaaacccaaagactcaataactatttaatggcaaaaaccacaattacttttgcaccaatctaatagtagcagtagtaggaggttagatcccaagccactgggggatttttaaggctttgctaagaattttagactttcattacattatcagtggggagccatggaaagtttaggaaaagtgtgacaaccttagatttgcgttttcgaaagatcactggcagctggagtgtagtggggcaagggtgacaagcagggagactatttacagggttacggcagtatcccagtgaaagatgctgggagcctggaacaggataatggcaggtagagacacaaaacagtggatgaatttgggatgtatagtattttggaagtagggccacagggcctggtgattaattgaaactttagcacaataatcacacaaagtcgaagatcctccccagcaacattagctaataggttattgataagttgcaaaatcttccccattctcccttggcaaagattcaaaagccctggtggtactcagggccgacagattactcaggccgcacagagcgcgtgcacaaggccgtcgctccccttgtgacgcaagacttcattccctggatgtcagcggcctggaagcgcaacgtttcctgggcaacgccattgtcgcagctccgggtgggggagggatgactaaagacaacggctgtaagagaactccacaagagagtcagaacgaaaatgtgcaacaagtgcggcggctcctaccatggcaggtgattcgaggactcagcacgaggcgagagtagggaccaggaagagccggaaaacccgcctgtgattggccgtccacgggtatcggtcgttgtgattgggtgag

SEQ ID NO: 34843 - DNA, 2300 bp, Homo sapien
tgtattagatgggagaagaaagcaggttactagaaactgaactttttgtgatgtattgttttttaagtataagtatgttgtcatatatatattatatatgaatgaagcctgaacaaaatgcaccaaaatgttaacggtgattgtccctagccaatcatgctgctagtcttatttttcttattttattttatttttatttctttgagatgggatctcactctgtcgcccatgttggagtgcagtggcgcaatctccgctcaatgcaacctcagcctcccaggctcaagcaatcctcccacctcaggctcccgagtaactgggaccacaggccagccaccatgcccggctaattttttgcatttttggtagagacagggtttcgccatgttgacctgactggtctcgaactcctgagctcaggcgatccaccctcctcagcctcccaaagtggtgggattacaggcatgagccactgcacctggccttatttatccataagtgtatgctacttttataattaggacaaaaaagacaactgtggaagggtgaaacattttgaaggactagaatttttttctaactgatgccgggtgcagtggctcacacctgtaatcccagcactttgggaggcagaggcaggcagatcacctgaggtcaggagttccagaccagactggccaacatggtgaaaccccgcctctactaataatacaaaaattagccgagcatggtggtgcacgcctgtaatcccagctactcaggaggctgaggcaggagaattgcaattcattttcagccaatttggaacccggagtgtcgtgtatgtttttagatttacaaactaatatgaacaatccaatttcccagtctcccatttacatttttctgacctatgcacagcctaggtatgaggtgatggaaaaggctggtttagagatcaagatgctcaaacacaaaagtcccccaaatcctggtttttttttgttgttgttgtttaaaaaaaatccctaaaacatttaaggacacataaaactcttcacccactcagtgggtgcaccaaatttaccaatactagaaggggaagagggtggcaacgactggaaatattccctttcaagtaataaaggtcattttgaaccaaattgctttccacctcaagttctccatggacaggggcctgaaggatgcagtgaggggggtttgtggaatggaaaggagcgcgggtaattggggtttgtgaggatccgggccaggcagagggaactggggttttttccaggaccaccggggaaaagagaggctgagaaggggcgtatgagacggattcgaacttgggaggacctgggcctcgccaggttctaagagtcagggctcatccccctagggcactgcggccacatgttgtcatgcctgggggactgacgggccaggaccgattctgagaaaatgtcagtggagatgtcattctgagaaaatgtcagtggagatggggattccaggttctcccgcgattccggggcgagggagttcgggctccggggaatccgaagagctagactgggaaggtgctggtgcccggggctacgagaaatcgactatcctggggtgtgaaaaagggccggggtccggctaaggggagcgcgagtcccaaagagttagggttccctcgcgggtccgagggtctgacgaacgctctgggcatgcgggccacacctgaacagcaccggctgctgcgcggacctcggccgcggaaagcagatctgcggctgaccccctacgccgatttctgggcggcggccgagtctatcgcgctggtagttcgaacccgaggtggcgctggaactggtggtcgcctgggcggcggtcccgccgatcgtggaggatccctggtcacaggtgaccgagggcctagtcggctgtgtcattgcggcttccctgttggagaaagagttggaaactggtggctggttgccagcccacctaggtgggcgcgcgctgacgcggagtgagtccctgggcggagccctgaaccgagcgcggcgcgttgcctgggagacacatattggctgcggggaaggggacgggggctgttggacatgcgtgcagagtccggcggccacggacgcggtaatattgtccctcggcatccgccgtggtgagacccggcgcgttgctgtgaagacggacgggtctggaagaagtggggtgcggtgagctgagcagaccttttccgcttcgacgtggggactgcagtgaccccggcctgctggcggggcgggtaacgggttgagccagggtgg

SEQ ID NO: 34844 - DNA, 2300 bp, Homo sapien
tgaaaattttgttcaaagcaaaattttacccttgcattaatttattaatgttaaccccaattcatttacatgaaaccttatagattattccatttaatcctaaccaatttgaccatgaggtgaaaactttacaaaccttttataacccttttactaaagggcagattagcatcttaagacctccttgctatgctgttattttaatgcttaatttatgtaaagaccatatagatgctatgggagaagacagtgtagtacttctactatgcatttcactgcaaagcaacccaaagccaattggcttattttatattcagcccatccctgataggagtctcatctcccagtgtgggatgtggatggggaaaccctgtttctacaaaaaaaaatacaaatattaggtgggcatggtggcacgcacctgtagtcccagctactaggaagggaggtgggaggttcacctgaacccaagaggtctaggctgcagtgagctgagatcatgccattgtactccagcctaggtgacagtgagactctgtctcgaaaacatacacataaaaaaaataaaaatcatgaattcatattgataagtaattttgaaaaattcacctaatgaaagtagggctcctagaggaggcaagatttggttgtctcctggtcagcttggagagaggagtttgtggaagtaaaaggtgaggaatgataacctacagaaaactgacttcacagcaacagaaacaaagaaaagatgcaggatgtcataatttatgtcttggtcctgccacatatgtgaccttatgtaaattatttttttctctttgagtctcagatttcccctttgtaaaggtgaaatcccagttcctcttttgcatccctctgatgttactctgagcatcaaaggagtgatgactaccatttgtggtactattatgaggatatacacacatactgatatagatccctgtatggatacacaaaaaactggtaacagtaactgcctaaagtatgttgttaggagtcagtgagagactttttgctacatataaaaggatttatattgtttgaatatttttctttttctttagagacagattcttgctctgtcaccaaggctggagtgcagtggctaatgatgggtcactgcagtctcgaactcctggcctcaagtatcttcccacctcatcctcccatagctaggactacgggcatgggctactaagcctggataattttttttcttttttgtaggaacaggggtcttgctacgttgccaaggctggtatgaatctcctgaactcaagcaatcctcctgcctctgcctcccaaagtgctgggattacaggcgtcagccaccgtgcctggcctgaatatctttcttgaggatggaaaaaaaaaaaaagtaagtaagtaggtaatgaatttgaaagagctttgtaaatcacaaagtatgacacaaatattaggattttatttttactattatccaccagcaacaagatatcaaacactggttctgtgattatttaatggtgaaaaagttgaataaatcaatttagtatacccatatgttggaatattgagtccatttttcttttaaaaatcacactttggaataattgatgatactggcaaatgctcaagctgagtggaaaaatatataaacattgtataggcgaataattccaatcttgtgcattccctgtgtaaacctacatacacaaaaagaaaaaagactgaaaggaaccatccacaatgctttgatgggaaagacggagaaacaaagtgttaattttcttaactatagttttggtgtattccagattttctacaagttaataaatgccactaagaaaaggggaaacatcacagctacaccttcaaacaccagaaaaagaatttttttttttttttttttttttaggttggggtatgattttgatctgggcactaacggggacactgattgcttttgccagtaagtcaagaccagcagataaaaaataatttttaaaaacctcgtgagactgatttgccgcaggacgggaggaggaagaagcaagcgtggaaggtgctaacggaggaacctaaacctccatcctctttgcctgggaggttaagaactacagggagaggcgagagagactatgactgccctacggctagagtagccgcgaagagaacacttccggggcggggctatctggccctttcctttccgcgtgtagaatgtggggcgcctgtaaagttaaggttcacgattccttggccaccatttccatcactctgagacggtacctgag

SEQ ID NO: 34845 - DNA, 2300 bp, Homo sapien
tccctgtgtaaacctacatacacaaaaagaaaaaagactgaaaggaaccatccacaatgctttgatgggaaagacggagaaacaaagtgttaattttcttaactatagttttggtgtattccagattttctacaagttaataaatgccactaagaaaaggggaaacatcacagctacaccttcaaacaccagaaaaagaatttttttttttttttttttttttaggttggggtatgattttgatctgggcactaacggggacactgattgcttttgccagtaagtcaagaccagcagataaaaaataatttttaaaaacctcgtgagactgatttgccgcaggacgggaggaggaagaagcaagcgtggaaggtgctaacggaggaacctaaacctccatcctctttgcctgggaggttaagaactacagggagaggcgagagagactatgactgccctacggctagagtagccgcgaagagaacacttccggggcggggctatctggccctttcctttccgcgtgtagaatgtggggcgcctgtaaagttaaggttcacgattccttggccaccatttccatcactctgagacggtacctgagattgggggcgaccatggcaaaaagcaagttcgagtacgtgagggacttcgaggctgacgacacctgcctggcacactgctgggtggtagtgcggctggacggccggaatttccatcggtgagcgagctcgactcggggcgtcgcgatgcgccagcgcttccggggaatccagcttcttcccttgcaagtcctcccgcccgctccagtcacggttaccagggtaacgcggtagccaatgagtgcgcagcatggagcattgccccgccctgcgtgttggctaggacagtgcctgaacgctggctgttagcgtaattgaatgggcgatgtgctcccgtgatgaggatctggcttggagtgcccgtgttaagtgaacagagacttgttagcaaggacctgttgttaaaagtcactctcatgcacaatatttaagctcttaagccaattgcctagctattctgttagatatctttgaatgctgactgttcagaagtctgtgtaagccttgcttgtgggcaatacttaacgtctgtgcttcattatcagtaacaggccacatggactagattcaacagagagtcagaaaaaaagagaaggctgggcgcgggaggcaggaggatcacttaaggccaggagttggagaccaagtttttgtttttgttttgttttttctgtggttgttgtttgtgaaactccgccactacaaaaaaaaaaaaaaaaaaaaaaaaaaaaagagagagagagagagaaagaaggaagagagaaagaaagaaaaagaaaaaatttaatttgcccggcgcagtggtgcacacatgtagttccagctactgggaaggctgaggtggaaggatcgcttgagcctgggaggtcaaggctgcagtgagcggtgattggacactgcactccagcttgggtgacagagcaagaccctgtctcagaaaaagagggagggggagaaagaaatataacagaaagatgggaatttaatctttgaagagggctgcattgttaatgattattataactaacatttattgagcacttactaggagctaggtatgattacttttatcttctccctaatcttcaggacaacccaatgaggtaaatattcttttattcccatttcacagaaaggagagttgaggcttagcatttctgtctggctttctcaatttcagggcaggaaaaaaactaagttcttaagaaaatggatcaggttgtggctagttgagcatttgagttcacagtgctattacattatcttcctccaaacagcctctgttatctagcaacagagcgtgttgttaatgacaggcttccatccatgctttcttccctttttcccctgtgaaggtttgctgagaagcacaactttgcaaaacccaatgacagccgtgctctccagctgatgaccaaatgtgcgcagactgtgatggaagaactagaggatattgtgatcgcgtatggacagagtgatgagtacagctttgtgttcaagcggaaaaccaattggtttaaaagaagagccaggtaattccatgacctaactcctttcttcagaatatttcctcccagcatctggttttctgtttatcttaatcgcagacttacaggctacagatgatgtctgcagtatttgtaactgcagagtacatgtatatttcctgtttagattgttgtacttccatctgatagc

SEQ ID NO: 34846 - DNA, 2300 bp, Homo sapien
ctttgaagagggctgcattgttaatgattattataactaacatttattgagcacttactaggagctaggtatgattacttttatcttctccctaatcttcaggacaacccaatgaggtaaatattcttttattcccatttcacagaaaggagagttgaggcttagcatttctgtctggctttctcaatttcagggcaggaaaaaaactaagttcttaagaaaatggatcaggttgtggctagttgagcatttgagttcacagtgctattacattatcttcctccaaacagcctctgttatctagcaacagagcgtgttgttaatgacaggcttccatccatgctttcttccctttttcccctgtgaaggtttgctgagaagcacaactttgcaaaacccaatgacagccgtgctctccagctgatgaccaaatgtgcgcagactgtgatggaagaactagaggatattgtgatcgcgtatggacagagtgatgagtacagctttgtgttcaagcggaaaaccaattggtttaaaagaagagccaggtaattccatgacctaactcctttcttcagaatatttcctcccagcatctggttttctgtttatcttaatcgcagacttacaggctacagatgatgtctgcagtatttgtaactgcagagtacatgtatatttcctgtttagattgttgtacttccatctgatagccgagcattctgtgtgcctcttttatctgattctttccccacatgccccataagattggtttctagactgacctggcattgaacattaagattagaaacagagactataagaatgtaatattaacaattcataggttggctttagccagtgatagtctctacgtgcattgcattacactgttcctcaagacagatctcattataaaatacacaaatctgatatttgatttggcagtattttgaaacgctgtatgggaaacaaatcatataatgaattggttttttctttctttctttttttaatagaggtggggtctctctgtgttgcccaggctggtctcaaactcctggcctcaagcagttctcctgtcttggcctctcgaagtgctaggattacagacatgagccaccacgcccagcctgaattggcattttttttacaacaatggtttctctcctttcatgactgtaaacacaaacagatcaggcgtggtggctcacgcctgtaatcccaacactttgagagggtaagggagaggattacttgagcccagaggtttgagaccagcctgggcaagatggtgagacctcatctctacaaaaaatttaaaaattagccgggctcagtggcatgtgcctatagtcacagctactaaggaggttgaggcaggaggatccattgagccaaggaatttgaggcagcagtgagctatgattgtgccaatccaccccagcctgagggacagagagattccatcttttaaaaaataaaataaaatttaaaaataccccttgaatcataaattcgtatcacatcctgtagggaaaggtttagtatcagtaggttacttaatagaactggaaggagaggcaggctgcatttaaaatacataactggccaggtgtgatgactcacgcctgtaatcccagcactttgggaggctgaggcaggcagatgacttgaggtcagaagtttgagactagcctggccaacatggtgaaaccccatctctactgaaaatacaaaaattagctgggcgtagtggcctgcacctgtaatcccagctactcgggagtctgaggcaggagaatcacttgaacccaggaggcagaagttgcagtgagccaagatggtgccattgcactccagcccaggcaacagagcaagactctgtcctaaaaaaagaaaaaaaaatacagaaccaaggtattaaaatagtgtttcttagccaaatgcattttatctcctggctttctgggcagtttgtgtactctctgtggtacccacaggtcttatcatggtgttgaactaattccgtgtatttttctttttcttactccacccaatgtgcgttacattttcaagtaagttcatgactcacgtggcctcccagtttgcctccagctatgtgttttattggcgggattactttgaggaccagccccttctgtatcccccaggctttgacggaagagtcgtggtgtatcccagcaaccagactttaaaggactacctcagctggcgacaagcagattgtgagtggcaccaaataaacacatgtagttaaaccaccaattccatgtcttaca

SEQ ID NO: 34847 - DNA, 2300 bp, Homo sapien
catcatgccatttaattctcaccataaacctatgaggtagaaactactattttctacattttacctataaagaactgaggcagaaaggataaaattacacagaagcatgatgtgagtagttattatgacatttatgaaagtaacaaactcagcacgaactcttcctatacacagaggtcataaacccaagaaactacaggtgcccagcagggaaaatggcaatgagggaagaggcgtggtgggactgacaaaaattcagtgctggccaggtgtggtggctcactggctcacgcctgtaatcccagcactctgggaggcccaggcaggcagatcacttcaggtcaggagttcaagaccagcctggccaacggggtgaaaccctgtctctactaaaaatacaaaaattagctgggtgtggtggcatgcacctgtaatcccagctacttgggaggctgaggcacgagaatcgcttgagcacaggaggtggaggttgcaatcagctgagatcacaccactgtactgcagcctgggcaacagagtgaaactgtgtctcaaaaaaaaaaaaaaaagtcagtgctgaagacggcagtcatacacagtcatacacggcttcaggcaagtgttagcacgtgggaatgcagagccagtgccgtcaattccattttccactaagaacacaaaggctcagggagaagcagtaattcatccaggattacagaccaagcaggcagcagagctgctcctattatgatttttatatcctttcaaaacaaagctgtacagggatcttaaaagaaagaaatgtaaatttaacaaaaaaaaagttatgggagagcctacagcgaactgtccccagttaagtattaatgtagtaagatctttatacctgtaatctcccttgggcttgtactggtgttagtccagattgttgtataagtgcccagaaaactgtattataaagattattgatgtgacctgtgaggagaacaaaatagtaatgtttatatacataaaatctttattgaatattcattcttcaaggaatactagagccctgaccctctcctctttcatagtaaagagatctcagagacattcagtgacttgaccgaagtcctacacacggaacatggagggaaggagcagtagggaaaaaacttcatccctaacaacagttttatttggtcatttcagttacacattatacaaatctgttaacttgtgtgttaatcctaggaatactttagaagttatttgatttatattatttcaatctcttttccagttcttctggaaaattcaaactagaacaagcaagtaaaagcctcacaaacatcatcacagtcacataaggcaagggtcacaattcaaatacccactgaggccagcatgaacataaatgtgtaaagcagtgggtgaccccagaggaacaacagggaatggcagagactatggcacactggcatttgtgtgtgtgtgtgtgtgtaaaggtagctgccactgaacaggctttgtctagtactaagtaagaatgcagatccagtattgccacatctgatttttttaaaaaatagagataaggcggctgggcgtggtggctcacgcctataatcccagcactttgggaggccaaggcgggtggatcacctgaggtcaggagttcaagaccagcctgaccaacatggagaaaccccatttctactaaaaaatacagaatcagccgggcgtggtggcacatgcctgtaatcccagctactcgggaggctgaggcagaagaatcccatgaacccaggaggtggaggttgcagtgagccaagatgacaccactgcattccagcctgggcaacaagagcgaaactctgtcttaaaaaaaaaaaaaaatagagataaggagtttttacgtaaaatttaatttttcaaatacttttaactaattgaaaaaatatttaaatactgcattctgtacaacgtatatgttgaaacaaagtatatgtgagccaatcctgtatcagatcaacacctgtaagacatggaattggtggtttaactacatgtgtttatttggtgccactcacaatctgcttgtcgccagctgaggtagtcctttaaagtctggttgctgggatacaccacgactcttccgtcaaagcctgggggatacagaaggggctggtcctcaaagtaatcccgccaataaaacacatagctggaggcaaactgggaggccacgtgagtcatgaacttacttgaaaatgtaacgcacattgggtggagtaagaaaaagaaaaatacacggaatt

SEQ ID NO: 34848 - DNA, 2300 bp, Homo sapien
tgaagctcaacaatcttttttttttttttttttttttttgagatggagtctcgctctgtcagctcactgcaacctctgcctctcaggttcaagtgattctcctgccttagcctcctgagtagctgggactacagacacgcaccaccatgcctggcttaatttttgtatttttagtagagacgggggttttcactacattggccaggctggtctcgaactgctgacctcgtgatccgcccgcttcagcctcccaaagtgctgggattacaggtgtgagccatcacgcccagccagcaatctgatttttagccccaaaggcttctgatatgtgtggttgtcaatatacagcagcttcggcagcaaggccctcggtatactgtgataggctgggtgggaaggaagtaagataatgtagctgttgattggcaattttaacttaatggtaagttgacagcattttatatcaaaatacaagtaggcattagagtacaaattttcaagaaaaccacccagagaaacgtgctttctgtgggtcttaaatgacactataaaggctatcactcagttttgccatatgatgtggggatgagcgctcatttgttgaattgccagcaattctgcagctttgagttttttattcaggcagggggttttgaacaaagtgataagctgggttcaaaacctgtgccataaagaaacctgtactgctaccaattagaagccactgtttgatggtttttgttttttttttttttttgagatggagtctccctctgtcaccccagctggagtgcagtggcgcgatctcagctcactgcaacctccgcccctccaggtttaagcaattctctgcctcagcctccagcgtagctgggattacaggcgcgtgccaccacgcccggctaattttttgtatttttagtagagacggggtttcaccatcttggccaggctggtcttgaactcctgacctcgtgatccacccgcctcggcctcccaaagtgctgggattacaggcgtgagccaccgcgcccggcctgcttgatggttttgtcttcgctgtagtatgcattcatcccaaggtatatttcagagttgtatattaattttcatcttgctctctaaggtactctccagtattctcttggacttcctaagtcttaaggaaactgaaatgtacacaaagcaactagtacagagaatactagttgatggcagtttgagaatgtggtgacgggcaagtgatgtgtggcctgtaggtgagtggaaacattttggctctgctggatgagaaggttatatctgggccttccgcgaagagtagactgtcattttaaaatcaaccaaaaaatattttgccgaactgagactataaagtagcaagtggtatgatcaggtcttgggaattttccatagtttcctccaagagctggatcttcgtttcttccaattggttagcaatgcttagaaagacagtgatataatgaattttctttgatactaagcacaaatttgtttatgcacagggtataggaaatggaggacagacacccagtattggctgacatgcatctattatgagctctgtaggcagtatctctccatcctgaggtcagttctataaggtaggtgctatttatatcatatttcagacgagaaacacgctaaatactttgagcccagataggctattcttcccaccctatcagtagtactcagcatggaagcaaactgagacattcattgccttcctccagacgcttcctgccagctcaagctaggatgcgatcccgagctcattcccggggaacccagagtattaacaaacaccctaagtgataatgatacagacggggaaactgcgctggagcaggtcaagcagcagtcgacagcgttaacctgtcagctatgggaggaggcggtgcgaggcgcgggctggtcggagccgcgtaccacgccccccggcccgggtggaacgaggacaggtgctgccctcccgcggccgcttcggcgcagtgcaaccccgcgccgcggctgcgcagtgccgccctctggcggcttcgttccttcttcccatcggcctcggcttgcgggcctttcaaacatggaggagcgggagcggggggcgaggtcggctggcgccgggagccccgcgcgcccgcccagcccgcggctggatgtcagctctgacagcttcgacccgctgctggccctgtacgcgccccgcctgcctcccattccctaccccaatgccccctgcttcaacaacgtggcggagtacgagagcttcctcaggaccg

SEQ ID NO: 34849 - DNA, 2300 bp, Homo sapien
tttagaatataaatttagatagaagttttctgggaaaatgcttaagtatagaaaatgaatgtggaatttggtatgaatatcatacatacagatatggatagtcttaggagagaaacattttctaaataaagagatttttaatttttgagacagttttcaaagttgaagatcacatttcttaaagtaccagtaaaagcataatatgtggcactttaaaagattagagagaaaaaacattttcagagaaagacaacttctatttgtaaaatagttacatacatctttccattttttgctcccaatattcttaagctactcatgttgaaatcaaaatccctgtaatatagatggagaggaatactatttgctatagataagttatgaacatcatataatttctgttttggtgatagaagataggtaattatctgaaatactaaatacagggtatgtcagaaataaaatttcttaccagtttgaagttgtgatctacagcttttatcctcaacatgtattttctttgtagcctagactgaataagatttgaaaatccctaactccaccaggggcggtggctgacacctgtaatcccagcactttgggaggctgaggcaggtagatcacttgaggtcgggagttcgagaccagcctggccaacatggtaaaaccccgtctctactaaaaataaaaaaattagttgggcgtggtggcagacacctgtaatcccagctacttgggaggcagaaggtggagaatcacttaaacctggcaggcggaggttgcagtgagctgagagtgcaccattgcactctagtctgggtgacgagtggaactccgtctcaaaaacaaagaaaaacagaaaagaaaatccctaactcctaacttgtttgctataataagttatatattgatgtttattcactgcttaaatgaagcaaattaaaataatctttaatttttaaatcccttaatgttatattaattgattaactatcattctgttacccaacagtatacttgaccaatgtttttaacataaaggactactttacagaaaacaaacttacgaatattaagcagcagctgtttgaagtattcatttacttgataggttttattaatatgtgtgcttgtttaaatggtttaaacatgtataactcattgaacttttgtgttccttgtcacattttatcatgatgtatgtacctttaaggaagagaaaaccagatcactgtgatactctcttttagatgaagtaaaaattagactaagctgtagtgtagatagaattgaagcaccttcactttggttggcattagtcaactggtgagtgaggagatatatatatatatatatatgtatgtatgagcatgtgcatctgtggtgaagaaatgaggaattagttatgcctgctgctagttgactacagtaaatatgcattaaaaagaaataccaagtacacacatatcagaaactgatttgttccttttattactgttggccatatattaagaaggggagatggttctagtttaattaacccagttgagtgtagcagatggggcagaatgtctttcagcgataagacaattcagaaatggcaccagatgttggaagctgtccctggtggtgtttgagtgcagcccagatgttccagtcccacctggctagtttctaagcactgcggcctaagcagctgtgatgtaacctatataatgttcacataacactaaaagcaccatcattgaactgctgtagacttctaaggttgtgactgttaagaggtgaaatctttaaggacagacaaaaataaggacgactatttaaagtttcagatattggtctgtttcactaaagttgagaaaaaaaggaatattacaacttgaaataatgttataattgaaattataggtaaaagtaaatattcttacccatgtagtatttacaaataaaattttatgtcagaatgtaatgttacgcacacagagattgatttgcagacttataatttgggtcttacccttttaaaaacacctatctagaagtagcaaaaaagctatttttttcccatgcattaaaaatacaaaatacaagtatttactcttttatggagtaaacactacgggggaaaacccgtccaccaaaactattgtattgatatttctccctctctctgcttaaaataattgttttgttttgttttgttgtttgttgctttttgagacagcgtctcactgtgttgcccaatctggagcgcagcaatcttggctcactgcaacctctgcctcctgggctcgagc

SEQ ID NO: 34850 - DNA, 2300 bp, Homo sapien
ctaggcaatcatattaattatggatcatctggcatgtattaccaagagacattaataataagaaatctctttgaggggagaaacctgtccaattgctgaatgattgggtactttctatgaaagtagaaatgacacttttggtttgtttggggaaggttgtgaatcagaatgtagtgcctctgtccccatctagacaatactggttaccaaccacaagtagattcactaaagaaaacattggaagtatttgaaagttttaagaaatgacaaacgagggagtaagaagagatatataggggcaagttatctcatgtaatgtagaaacgttgcctataaagggaggcgtgtttgcctcacagtcattactgatcagtatcaaaagaagcactgcctcttgtaccatcttcgtttgtttttatttaccatagagatgaaatccacctgctaggtacctggccaaaccctagtcttttcaacagaaatctgccaaatagggagatttgcctcaaaagactaaattattgtttttgtcactttccccgactactgtttccccagtttgtgtctttgcaagagaaatagctaaaagctgggaaaaacagttttctaatgtatgcagcagattgtaggtgactctgaaaataaaaccaggcctgcttagttgcaataacaaataccatgtcagcttttgccaaatatctgtataatttttttaataatagagacttttatcacatatcttaaaggattttaaataacagtttgtagtatagcctgaatatatgacactctgcaataaatattttatatttgtagtacaagctttttctttttctttttctttttttggaagaccgagtttcgctcttgttgcccaggctagagtgcaatggcgcgatcttggctcaccgcaacctctgcttcccaggttcaagtgattctcctgcctcagcctcccgagtagctgagattacaggcatgcaccaccatgcccggctaatttttttgtatttttagtagagacgggctttctccatgttggtcaggctagtctcgaactcccgacctcaagtgatccacctgcttcggcctcccaaagtgttgggattacaggcttgagccaccgcgcccggcagtacaagctttttcttttttgttttcatttaccctcctcccctcaaaaaaaatgtctagaaggttgaagttcttagaaagttacccaactcatttggatctgttcttaaaggtgttttggaatcacagtatatagtattttagttttcaaagttcaaatcaacatgcctaggatcttagggtttccccattgcctaataattgagttctaatttagcatgtatatatctaacatataggacataggtatttaggtatcagggtgcttagctttgtggagaagataaaaatagtattacaggtataggcctcagtttagttggggaactaaatatgaaacatatcaatatatcaaataacatagaattatactaacttgtgtgatatacaaacaataagttttgctaaggttcatagaaatttagagctgtttaggatcttgacctctaatccagtggatctcaagccttggaattatctagggagctttcttgtaagactttaacaggccaaggtcttggcctttttatacctgggcaattatgactcagtgtattgtatgggactggtacatatgctagggtatttttttttttttttttttttaatgaactgatacttagcattaagattcaagtgggatctggcagttaatattttccagagtgaaatgcagtcagaaaagtgaggtaggaaaaaaagtgtcaatgttaagagacttttacactgctgggaatggaggtacttaaaagtgcttgctgcctctccataaggattcaaggtcagtactctttttccagaaaaccctacccttattaagctaattacaggtatttatgtctaaattgagaattagagatggatagagctgatttttagaaaaacaaacttttcgaagctcctgagttatgtgtgtgttttcagacttcagtgcctagcagcaagtcatctggtgaccttgttgatctgtttgatggcaccagccagtcaacaggtaagcttctacattggccttttcttttggtttgagagtcattttttaaaatgccaaataaaagatagattgaaaaataagattacttatttgcattgggttcattttttatatgaaattagtgagtcttgagcattatttggaatcattgtgttatttttgcttatctttt

SEQ ID NO: 34851 - DNA, 2300 bp, Homo sapien
ctacatataggacagctaatttaaatacctctgttgtttatgccttgtattatttttgctaaatcataaatggcttctactttaatattgcaaagcatattgcagaaataccctttcaaaagacatgttgaggaataaagtctttggaaagacatatcgcgaattccatctgccaattcttaatattttgttcagcttgttttgtgtattctcaagattttaaagtaactgctaatgtaaaacattactaaaacataaaaagatttatttcataaatgcaaattgaagcagacaatttattcttaagagactgaacaatatcaagaaaaagaatcctctaaaatatgtgataccaaattcatggtgtttgacaatggacaaacagtatatacaaggaaagcacattggagaaagggctttctggttattcaacccctcaaattggcaagaaattatttggcttaccagggctcttttgcctgaaaattaaatacaggtaaaggaacgtaatatattcctatgtttgagccaatttatagctacttattacttgtggatagatttagctaacgaattattaaatgtgagtgattttgttaatgtgcaacagtgcacatgaatggtttgtacttcatttaagaagagtctagttagccaattttagaatatttcatttcttttttttttttttttttgagacggggtcttgctctgtcactcaggctggagtgtaatggtgccatctctgcttcagcctcctaggtttaagcgatcctcccaagtagcttaagcgatcctcccaagtagctgggacgacagacacatgtcacaacacccagctaatttttgtattttggtagaaatggagttttgccgcatttcccaggctggtctcgaactcctgagctcaagcaatctacccaccgtggcctcccaaaatgctggaattgcaggtgtgagccactgtgcctggcctagaatatttgttttgacatgaattttatttagcttctcaattcttaggacagtatttaagttctagataactttaatataaataatcttttataattttgcacacactcatcattatgtggtaaacgtacatgcgtgctttttcaacaactattgaatgaaatgtttcattcaagaattctcattcaaatagcttatatttttatagtagaaaaaaggcatgcattgaaaattcaattttcgggttttttgtttgtttgtttgtttgccatttgttttcatgcatttttagtaaatcattaaagaacagtgcaaggccaggtgccgtggctcacaactgtaatcccaacactttgggaggccgagaagggaagatctcttgagcccagtagtccaagactagcctgggcaacacagaccttgtctctacaaaaaaattaaaaaattagccggacatggtgatgcatgcctatagtcccagctacatgggaggctgaaatgggaggatcacttgaacccaggagttgaaagctgcagtgagctgtgattgtgccactgcactctagcctgggcaacagagtgaaactttgtctctaaaaaaattttttttaatattaaaaaaaagaacaatgctaataggcatactgagcctttttctattaatttttctcatactaatttttcatttatcactttttaaagtgacttaggttatacggttgaaactacatgtcttaatttgtagttaaacccccatggttaaataatttttttttttttttttttttttttttgagacagggtctcacttgtacccaggctggagcgcagtggcatgcacgatcttgactcactgcagccttgacctcctgggctcaatccatcctcccaccttagtcccccaagtaagagggactacaggtgcttaccaccatgcccggctaattttttgtagagatagggtttcatcatgctccccaggctgggctcaaactcttgagctcaggcaatccgcccgcctcaagcctcccaaagtgctaggattataggcgtgagccactgtgcccagccagtaatatccttagtttgatgtatttggcttataagttcggtactgaatggggctttgaaggatggcctgtttctcactaagcatgtaaaatgtttagccctgtcatctgctgtccactcagcagcgagagggattctttaaaaatactaagtcaaatgggttcagaattctccagtggcttctcatctcattgcttaattgcctgtacagatctggctctttgttgccccgcctgtgatctcttctcccacca

SEQ ID NO: 34852 - DNA, 2300 bp, Homo sapien
aacttcttatttgaaagccctattcctctacccatctctgctcatctttacctgcctctccccacccacctctccaactcacttcatatcagcccaagtactcctaccattacaaagctctgagataactttggatttctgcttgttgtaattttctgcctgtcaattccttcaaccttgcttctttctcttggggcctcaatccgaaagccttactgaaacttttttcaaagctgctttcggtaattaagtgaatgcaacttggagagggtttcctgtagtctcagctacttgagagactgaggtgggaggattgcttgagcccaggagtttcagatcagctggggcaacagagtgagacctccagctcaaaaaaaaaaaaaaagaaaaagaaaaagaaaatagaaaagaggtggtttcacttgagggaccagggtccgaggttgtttatttgggattattgttacctagcttcatgactagcaaccatcaatttcacttctttgtgaattggagtctttatttgatcctttcgagggatccttccatttcaacctcctaagtagctggcctcacaagagtgtgccccaacgcctggctttttttttttttttttttttttttttaaagactgggctggcagggggatctcactttgctgcccaggctggtctcaaactcctgggctcaagtgatcctcctgccttggcctcccagcctcccaaaatgctgggataacaggcgtgagccactgtgcctggcctgtaatgaactattgtagaacctaagattggccttttaagacgtcttttcaggcttttgcatttctgacaaacggatgaccccacccagaccagccactcctctgctggccctccatcaagaagccgattcagcaaaggagaaccatttttcatactcctctgattgcatccctaaccaatcagcagcacccatgccctaaccctctgctcaccaaactatctttgaaaaactctagcttccaaatgttcaggaagattgatttgagtaataactctgtctctcaagtggcatggccagcctcatgtcaaactcttcactgcaatgacttggtcgcagtgaattgactttatctgtaaagtgggcagaaagaacccgctaagcaattacactatatgcaattatcttaaatgtttccttgattattatatgtttcttccaattacgtttgaattccaagagagctgggtctttaactatattccccacttctggaacatacaagatgctcaataaatatttgtagaatgaaaagaactgtaaaatttcagcagatggatcaaatgaaacttaaggttgcttgtagctttaacatgagcattgataaaaatgagtaagtagagaaggaagtgatgacaaccattgcaacaaagcaatggaagcaatgtgcatatttatccttaaaaaacacaaacctgtcatatgtatgtgtatgtgtgcgtgtatatataatgttggctttttagtttcccgtggagtgtgaactgagtttctgaggtttatagtaaagcatttaacaaggatttcaggtagttgtctaaatataaaacattgtatcatagaattagagcggaaaaggatttagaatacaagttcttcaattttacaggggtggaaactaaggcctagagatctaagtgtacttgggcattgggaaataaatacagcgatgtgtctgtcgatgaggaatgcgtatgccaatcatacttctgtataatcattactaataacatagtaatactgccttacatttgaaaagtgtttgagtgtgactagaccctgcaccagtggttctgaaacttgagcgtgatcagaatcacctagaggatttgtaaaagcacagatcgctgggccccacctccaaaatttctggctcggtaggtctggggccggggactgggaaagcttaagagaaaccatcccaactcctctcagctctcccaactcaacctctcagctctcccaactcaaccggccgagctcggcactcagggaaaactacaagtcccggcgtgccccgcgcgcagcggcggaaagtcggacacttccgctccacgcagcgcctgtgctgccgcgtctcgacgtgtcaccggcggcgccgctgctgtggcaaaggaaggagctgactgggggagttcgaggcggcgggcggcggtgaccccggcctggaactgccccggtacggaagtgttccggggtccgtggggagcaggagagggaggcggcggaccgtcccgcgcggggcacgatgttgaaca

SEQ ID NO: 34853 - DNA, 2300 bp, Homo sapien
aaattacaactgtgtgaattcacagtgacgtgaaagttctcaccctgctttataacttaaagccagctgagtttgtgtccctccctccccattagacagtagacatccagtgagcaatgagcctcttgctttttatcctcccagttcatttcattctttctcctcccttattgatggagtgacccctatgtgcccggcaccctgtaagaataggaaatgcacactatgccccccggtactcttgcttatgctacctgaggattcgaaggcaggctttaccttcatagctcctacaaggtgatcatgccttttccttctcttagcagagttctaagaatgcccaggaccataaatcaataagttgtccgtggcaaacaatctaccagagcttggggatagctgggcagtatttctctagggaacgaaggctggctaaatagccaaagtttattgaagtgctccatacattgcttaagactagaattcacagtcaactgcctggggtggctttcactccatccttccttccaagaaccacagagatgtagtaaatgagccacaggaatagggatttcttccaggctggagatattacaacccttctctcaatataagagttggcttgaaaaggcagcattcactattgaggggataactctgaagagggcttgtggttataatggttttatgattattttggatctttgtaaagactcctgtgtttgggtactgattccacactggagagatcacacaaacattccttaacattagtctgtggctttgttagacagaattgaaagagctctgtgtccattccagtccccagtcatacccaaaatcatctgtcattcacatgactgtggattttttttcaaaattagactgttagtcttctgggttttttttgttttgtttttgttttttttaattacatatacaaaaacagtctccaggaagtctgtgctatgtgttgaaaacaaaggatacttaagtgaggttgttgtcttccaaaagcctatagataagaaggtaatatttgctagtttaagtgcaaacatatgtacacatacatatatatatataaaaacaaacaaataaacaagttggaaaaatatctgccccttttatctatcattaatcaatggatcaggaaatactgtctgagaagctatcctttgggggaagtctacactatatgttgaaaataaagatgtttaagtcaggtcactgtcttccaaaaacgtatagatgaagagaattttcattgaaatacacacatacatacatacatacgtaaaaataaatattgcatgttctcactcatatgtgagagctgaaaaaattgatctcatggagttggagagtaaaatgatggttaccagagactgggaagagcagtgggtgtggcagggattgaggaggagtaaagacccagttaatgggtataaaaatacagtcagggagaaagaataagatctagtgttcagtggcacaaaagggcaactatagttaataatttatggtacatttcaaaataactagaagagtggaattggaatgtttttaacaatatttatgctatatttcaaaataactagaagagtggaattgaaatattcctatcacaaaaatatgataaatgtttgaggtgatggataccccaattaccctgatttgatcattatacattgtatacttgtatcgaaatatcacatgcaccccataaatatgtacaactattatgtattcataacaattaaaattttaaaaaaatttaacagaatttagcaaaaaaccccacacagacatacataaaaaaacaaattaccaggttggaaaaaaaataccaaagatgaaaaaagatatgcattgagcaaatattttcgaagtatttgtttactaggcatgttctagtgccaacagagagcttttattttagggagatagacaaataataaacaagtaaatatttaatttcaggtaatagaaagttctatagagaaaaaataaagtaggataaaaatgaattatgagagaagtgtgatatttacatagagtgtggtcaggaaagtcccctctgaaaaggtgatatgtgatattaggccatgtgaaaatgtgtgtgggaagtagtcatatgtccagatcatgcaggaccctgaagataacagaaagggctcttcattctgttattttcagtaagatggaagagaatttgggggttaaaggtgaggactggcatggcctaaagtgtgttttaataggatcactgtgacttctgtgctaaaagcagactgcaa

SEQ ID NO: 34854 - DNA, 2300 bp, Homo sapien
tcaagcttaactttgcttttcttttcacattctagtggaaatgaatctgaagaaaattagggaaaaatgaagagagagatttcttttagttagaaccaaaaatattagcaccacactcactttgtagagtactccctattattagaaccaagcatgcaggctaaatatggaggtccacctaagtaaaaagagggagatatttttccttcaactggaatgagtagccaagcatctatctaggatgagaatgaatgagcaaatgggggaaatcacacaatactgaaatagcaaataattgctattaaagaaatagatactgccagtaatgaaaattggtgcagagggggcctctgaggacagtagagtcctttcataagagtttttgacaaacagtgcattgcctcagtatgtgggtttcctacatcaccctcttatattatgtctctaccatccaagagagataaacaaaagaagtttaatactacatgcttctagtagctgaagattgattggaaatccctcgaaaatgacctgtctgataaggtcatggttactggaataagcaattaagtgcaaaataaacacatcttagggattcataccacgactgaatgacatcaattgtagtaatctagtaaatgacctaggaattgtattcagcaataaacatatgagtgctttatcatgcctatggcagactattgagtgatgtattttatctcgcagtaccaatgatgctcaccttttgactcaattaagtgtgtatgtgaacagggataaattggtgatttaacacccttctggggttccccaagctacggcctttatagcagtgccttggcaaagtatggccagagggactggaatgtgatcatgtcaaaagataacgacaacctgccttcactcaaaggattgtatctgcttttctcttgacaggaagtaatactcaaaagggctgcggatctggtagaagcactgtatgggatgccacacaacaaccaggtgagcgctgtgggtgtctagcctgtgtggactgccacatgcaattaaagatctcagattcctcatcgtaatgagaaagcacaaacaatataaaagccatgtgcatgagttaagagtataagtaattcagatataacatgttgcaagatgattcaatcctcttttgtaaaccttttattgccctttccactgaatcattttctgtatgagaaaaggtactccatttaaaactaatctttagtgggaacatacttcctaattgaagaggagagttactggtgctttattttatttctctcaggttttcaagcaaatttaggaagagaaagagggtttaattttttctccaaaaagtatagcaaggcctgaatagtattgtctgcttctgtttcatagaactccatgtataagattcacatagcttaggaaactgagtctgacaaaccattcactcctttttcatgtagcctgagtcaatgtctgggggacacagtcccattaatactcagtaatgcaggtagtcatctacagccttcccttaacatcaataggggaggtgaattgcagcctctcttcctctccccctgggtaacctcagacttcctacatgttattgggaaggatggaaaaccccatggtgctgtcctgtatggactgtagggtagtatgaaggtatagttaagataatggactttcaaagtcagacaaatgggcttatgaatctcagctctgttcttaaataggtgagtgtacttcggtgaggtttttgactttctgagcctcagtttccccatttcggatacaggcatgatgatggtgagactaatataacaggtttgtcatgagggtcacagaagttaatgcagctgaccattgaaaaccctgagcacggtacctggcaccgaaaaaatggtattattgggaatatgactgggggcagctgaaggggatattcctttgacttttcaggaaatcattctgaagagagcggccgacattgccgaggccctgtacagtgttccccgcaaccacaaccaactcccggcccttgctaacacctcggtccacgcagggatgatgggcgtgaattcgttcagtggacaactggccgtgaatgtctccgaggcatcacaagccaccaatcagggtcagaagcttgcttttctcttccctccccaaccttaagcaccccatctcctcatttattggtcatgaacaatttttacattaaaaaattattttcatcccaaaagggagattcttagtttatgtgtataagatattattgtacaatattg

SEQ ID NO: 34855 - DNA, 2300 bp, Homo sapien
gaaagaagagaaagaaaatggagagaggaagggaggaaggaaaagagtgagggagaaattaagggaaggtgggggaaagaaatgagagaaggaaatgaaagaaagaagaaagaaaagaaggcaggaagagagacaggaaagaacgaagaacgaaagaaatggaaggagggaagaggggaagaaaggaagaggaaggagaagagaagaaaataaaggggggagaaaggaaagaaggaagaaagaaaaaagaaaggcaggaagaggaaagagaaagaaaaaggaaaaagaaaaggaggaaagaaaaaaagaaagaaaaagaaaaaagaaagaaaaaggaaggaaggaagagaaagaaagaaagaaaaaagaaaagagggaaaggaagagcgaagggaaagaagaaaagagagccggccggaaaagaaagagcaatcacataaaaacataaaacacagatctccaacatgctgtgttgagacgcctcttctgggttaaaacaaaatgaaaacagtcacagacgaggcaggggaaagtgctggcaaagcgtgggctcctcgcagacagctccaggtcctccggccgcaggcgacgaaggcagagcggctggagagcgcggagccccggcggagagcggagcgcagcggctgcggactcaccccgccgcccggccccgcggcagcagctgccgctgccgctgccgcctccgcctcccggctctcccgctcgcggctcacctcggccgcggtccccgcgcagtacccacctctgcgccgccgtgttggcgtccagcaccccggcgccctgcatccacgtccgcaccgcgttcatgccgctgcccagcggctcttccttcatgctgcttccactccgttggatgctttcctgaatcccaaacatgaaaacaaccttttcttgtggaaaatctcctcccccttgaaaaaaattaaaaaaaaaaaaaaaggaaagaaaagaaagaaaagaaaagaaacaaaaacgccaaccagagatttttttttttctcagacgatgaactcgcacttagaagatcaaggcgggctggaaagcaaatttttaaaaaatgtaaacctctgctcaaaactgagcgataacccgaaaaaaagaagaaagggaaaatccaacgaaaagaccaaaataataaaattagagatgtatgcttggctgttgggggttgtttggttggttgatttttggtttgggtgctttttttttttttttgcttttttttttttttttttgtaatgatcacaggccggtggaggacaggaggggctggagtttccttttgtagaggtacccttcacttgaagaagcaggaagaaaaaaaaaaaaaaaaaaaaaaaaaaaaaaaaaaaaccctgatggcaatttaagaaacaatagactcaactcgcgctgccggctttgctacttcaagtgtcattttccacaaccaggcaagttttttcctctctctctctttttttttcctccttctctcccaaccaaagatgtttctttcctttgcgtgtagatgaggaggacgctggttgccgtagacagatacaccagagagggtggggggaaggggagagagggagagaggaaagggggggagggaaagagagatagagaggagagggagaaagagagaggggtggaccctgctggatggagattctgttttctccttgctaaaatagaagtgatttgcaggctttccctatggaatccagtttgactttccccagagctaaacacaggcacactaaccccaaagggaggaggcggggcccgcgcatcgaggccccgccccttcatttgcataacgtcatctttccgcccaccgcagccaatcgcggcccgggagccggctcgctggcggcgccaggccacgctctctcattaacatcccgctcccggtggcgcaggggagccggccaaagttcctcgcaaagtggcgagcgaaggagcgctgagcactgacgtctgggctggggaggagcgggtccgagcgaggacggagaggggacagagggaaagggaggcgggtgtcttcctcaggaatttgagctggggatctgcatcctggccattgcagtcctttagcatcctcgccgcgccctgagcgcgctggaggctcgcaggctgcgccctcccagggctgatgccgcgtcctgctccgccgttctgggacgtcggggacaaaagtggaggagacgggagagcccgggcagaaaaagcaggacgcgcgtcccaggtgcccacctcttcgctttgaggcgggggcggtgggatggaat

SEQ ID NO: 34856 - DNA, 2300 bp, Homo sapien
cttgcctgtctctattcaacatgggcatgtgtacttttccatcactgaccccatgagcttcctaaatcaaaggaccaaggaaggccagcagaaaggggacctggatttctggcagataatttccccgaaggagtccttagcagatttggctgcagtcagggagttcctttgagggcaatgaaacagaagttcaccatgtgcttattagaggttacaacctgctaaaaaatgatggggtacattacccagaaacttctagctatttcctttgccagccacaaagatacatgctgaaaagcctgaggagggagacaatttcgtccttttttctttccctttttccttccatctctcccatttccattcgttccttctccttctctcctttctctctccctccttccttcccattttctcttccccttcttccttttttgtcctttctccccaccttccttctcttctccccccacccttttcatatggcagagacagagttaggaaggatttgttcaagccctcctttttaacaggaagaataaaggaggatgagaaaaaccctacaccaaataaccagctaatcaaggacggttaacattgctgttgctttggtagttactctaaaaacaaacgaaccaactacttggggtggggaatgaggggttggcatttaatttgagaaaatttaaaaacgcatcctgacacagccccagtgagagcattcattccaccattcacatatctcgaggactgcccgagagaggtgagcgtgtgagtgagaacagtgcccaaccctggcagcctctaggctagcggccgagagagaagcgtttcagaggccggggtgggagtagagcctggtaccccacttcctggggacccacagcgcctcatttgccggggcccagcgtccattcatccctcccagcgtggaggccgtgcccctccgagagttaccagccccgacctcgcgcacccatattccatcccaccgcccccgcctcaaagcgaagaggtgggcacctgggacgcgcgtcctgctttttctgcccgggctctcccgtctcctccacttttgtccccgacgtcccagaacggcggagcaggacgcggcatcagccctgggagggcgcagcctgcgagcctccagcgcgctcagggcgcggcgaggatgctaaaggactgcaatggccaggatgcagatccccagctcaaattcctgaggaagacacccgcctccctttccctctgtcccctctccgtcctcgctcggacccgctcctccccagcccagacgtcagtgctcagcgctccttcgctcgccactttgcgaggaactttggccggctcccctgcgccaccgggagcgggatgttaatgagagagcgtggcctggcgccgccagcgagccggctcccgggccgcgattggctgcggtgggcggaaagatgacgttatgcaaatgaaggggcggggcctcgatgcgcgggccccgcctcctccctttggggttagtgtgcctgtgtttagctctggggaaagtcaaactggattccatagggaaagcctgcaaatcacttctattttagcaaggagaaaacagaatctccatccagcagggtccacccctctctctttctccctctcctctctatctctctttccctccccccctttcctctctccctctctccccttccccccaccctctctggtgtatctgtctacggcaaccagcgtcctcctcatctacacgcaaaggaaagaaacatctttggttgggagagaaggaggaaaaaaaaagagagagagaggaaaaaacttgcctggttgtggaaaatgacacttgaagtagcaaagccggcagcgcgagttgagtctattgtttcttaaattgccatcagggttttttttttttttttttttttttttttttttttttcttcctgcttcttcaagtgaagggtacctctacaaaaggaaactccagcccctcctgtcctccaccggcctgtgatcattacaaaaaaaaaaaaaaaaaagcaaaaaaaaaaaaaaagcacccaaaccaaaaatcaaccaaccaaacaacccccaacagccaagcatacatctctaattttattattttggtcttttcgttggattttccctttcttctttttttcgggttatcgctcagttttgagcagaggtttacattttttaaaaatttgctttccagcccgccttgatcttctaagtgcgagttcatcgtctgagaaaaaaaaaaatctctggttggcgtttttgtttctttt

SEQ ID NO: 34857 - DNA, 2300 bp, Homo sapien
gtctggctggcagtgtcctggatagatcagggctggaggagggaggaaaaccaggtagtagatcttacaatacagttgctctcagtcatgtctcccacttaccctgaccacaacagatgtgaggatgagtatacctgctcattggagagtcattcctattagtcacactgcactctctgtagcagagattctcatcacaagtggaaacagtgggaagagggtgtcataagatttgaaaaagaccacaaattattctaatactccctccctgtcttaaccaggaaaaattattgaaattgttaaggtttaaggctacaaaagcctgaaataatttgaaattgctaggagtagcaattgaaagcaaactattgaggaacaaaagaaaatcagctgtactttgcaattgactgagtgtggtggctttgacatgccaagcctgtgtgacttggtctgaactctagtacagtgactggcatggagaagggtgttcagtgggaatttgtgaaatttgatcatggcaccagagatgttagctgctgatgtgagtggttgtgctactaggtggcaggcacttaaaaagaataattttgtctttctccaggagcttgtggaaacacttccgtgctgtaagcctttgtttatttttattggtattccctgcttatatggcttatatgatttgccagtttttccacatggatttttggcttcttatcattatttccagcagcattcttacctctcttcaggtaagcctatgattaattaactctatataataaccaattttgttatttttcctcccagaggaggaattaaattttttcaagatgaatgattataagtggactattcaggtgataacttctctctctctttactagaacacattacatttatttgagcacaggagttagatggcaggttatgaaaatattacataaaccggccgggcgcggtggctcacgcctgtaatcccagcactttgggaggccgaggcgggtggatcatgaggtcaggagatcgagaccatcctggctaacaaggtgaaaccccgtctctactaaaaatacaaaaaattagccgggcgcggtggcgggcgcctgtagtcccagctactcgggaggctgaggcaggagaatggcgtaaacccgggaagcggagcttgcagtgagccgagattgcgccactgcagtccgcagtccggcctgggcgacagagcgagactccgtctcaaaaaaaaaaaaaaaaaaaagaaaatattacataaacctattgatgtcactgtattttttatgaaggtaattaagcctttcagtttctctttttcaaaatggtatgatacagaggtgtcatataaatcttaaattgacaagtaactaaaatattaaaagtttttagagcttgtgttagagcttatttggagtgtgttttttaaattccactcaaaaataccaatagttccacgatgtatataaatatatatgtatatgatgtgtgtgtattgcacacatacagacatgatacatgtttcacagacatgcacacacaaaatattgccctagaaatgataagcttattgtaacttaaaggaagatctttgctacctaggtaaaggaaaacataacacagtgaagagttattcattatttttttgcagaagtaaaacttctttgcgagttgtagaacaggaatgactatggtatgaggaaaattaagatggagttgatgaggtttggtgacctaaggaataagggaaaaagatgaatcaaaaaattgattactcatcagaatcattttaggaaagtcacgtctgacggtgtggctttttgttttctatgcctggattactaagatcacccacattttagtcatcagtgtcttctctttagagttgattttttatttattaaaacttttttttcccctggatactcttctgtatatttgaaatattgcaccctaaaaacatcaggaatgtgttattgtttaaagcctatgaaaaaagtatcttagtgatcatatttcaagatacgtacatttttttttttttttcaggttctgggaacactttttatttatgtcttatttatggttgaggaattcagaaaagagccagtggaaaacatggatgatgtcatctactatgtgaatggcacttaccgcctgctggagtttcttgtggccctctgtgtggtggcctatggcgtctcagagaccatctttggagaatggacagtgatgggctcaatgatcatcttcattcattcctactataacgtgtggcttcgggcccagct

SEQ ID NO: 34858 - DNA, 2300 bp, Homo sapien
tgctttttccttctgattatagtcctactgtgactatagtttcttccctttgtgtgcctaatttaaacagaaaagttaaatagttctgggttataatatgatagatttcatttagatatagtacttgaattgactttgccaacataacatgctttttgtaaaagtttcttccctacttttttcagcctttgctctaagataaattactcccagatacaaacaatacacatttgggaaataaatgtttctgtttggtttaattgatagtttgtaatatataaaatagattttaacctgacattggtataaaaagagagtgttaaaatgtcactgtcttccacctcttgactgtgtccttaaggtacaggaagctctcagatagaacaaactgataacagctaagtgaagtattctcttgtggccccaggggcagatctttgagaatactttctctaagcttttggccttagcctgattctatcttcgtcttacacagtgattaacttgggcagttttcccaggagtagatcttccagaaaagggattatttctacagtcagtgaagagtggcttcatggggaagcagggcaggaagggttatagttgtattcagggtaataatgacaaatttaagatacatattttttctttgaattcagtcttatgagggttatctttgtttgtaataaataatgaatattcagtaaatacttattgaatattaaatatttattgaataacctcagccttcattttttaatgtcatgtttagttggttgccataagattcatacatcaactagatgtagttgttggaaatataggttataaaatgcgtgaccaggaaagaatcagataagcaagaaatggaaacagacaggtttttttagtggtctgtttcttgaatggaaaggaagaaaaatattctctgcctcgtaatgatgagtttacctgataataattttgcagctagttgggcagtttcctttttcttttaatcttttgtcactggggaaaatagaagttaatagactgggttgtagaaaaagcctttgctttactgatgaaagaattttaaatttagaataatctgcaagtcaatttattttaacttaatacttaaagatgtttataccttattgaaacattctggtatcacattgagagattccagcaagaccagctgactgctagatactggttttgtaagctgtccagcagaattcctgctgtgtcaccagggtctggtccctgacatagtaactctagaaacttggttacacctatgctcttagattgaatcagattctgtgattgatttttcctaatcagtttcataagaagagtgttttataaactggaaaactaatttagtgagttgcagattattaagccttttttttttttaagatatatccttttcctagtgttacttacacttggcaaaccaaatggaaaaacatagcttgataaaaacacagtaggaggaaggggaattgatgtgtatgggagaaaaagacttgctaactatctttgctctgcaaaatttttttccagtgattaagtactcttcttccattgaactgtttctcatttgtgacatttctgaataaaccctgaaagtttttacttttgcattttttttcctagtgcctcaagcagtgttgtatcaattcatgctagtcctgattattttgattagacatgagtgtttaccaagtctcctcaaactaccttttaaggttattttgtactgaatatgaccttattttgaccttatccctgaactattagggcagtttactgtgctattagataagtgtgtgtcaagtgttaataataatgcaaaattagtaagttttaaaaaacatgctatttattaactatataggctaactttaaaggaatttagctgaaacagtcttgcaatcaaagaaaagctatttaatattttacttctgatttgactcaagtgtttaaagtgtttattgatggtgatgcaagaagttttcctatcttacgtttttatttaggtagtggaggtatatggccttctcgccttgggaatgtccctgtggaatcaactggtagtccctgttcttttcatggttttctggctcgtcttatttgctcttcagatttactcctatttcagtactcgagatcagcctgcatcacgtgagaggcttcttttcctttttctgacaaggtaattaataagagcctatgatactatatataaccttagaaagagaaaactttgatctaggaatagtaagttttgcagattacttttatcg

SEQ ID NO: 34859 - DNA, 2300 bp, Homo sapien
ttctcgcatcattgctactgcgaatgcaccgggacaggatcagcccttcaaattctcccacgtggtccctgcaggtgagtgtgggtgtgagcgcttgcggcccgtggtgtttgggagtgagagagcacgtgtgtcagaatggcgcctgtcacagtgcgcgtccaggtgtctctgcagtacgcctctccatagccacccgagccgggctgtatgggcttggctaggcttatgtctcccgcccacgcaccggaggcggtgcggaaagcactccgcgggcgcgattgtgagtgagcgcgggcgcgcgcgggaggggcgcgccgcgctggctgggccgcgcgcaggcgcagagtgcggaagtcgggccgcggccgccgcagagcgccgggggcgggaggagcaaacgcaggaggccatggccgccgacgccggcgccggctgctaaggggctcggcccgcgagcgcctgctgccgcggacgatggtgaccgtacgggccgggccgctgccgctgccgctgcctccgcctccccagaagcaacatccgaggctcggcgcagaagagccgccgctgtgagccgtgccgtaccggcccccgccgccgcccgaggagaacgggagggcgggcgagagagccggggagttgcggagcccgcccgccggcagcgccgctccccagggagggagtccgcagcctgaggtgaccacgccgcccgcccggccccttcccatccccgcgccccccggccgcttcccacggcctccctcccctcccccatcgcgtcgcaggctccttcctcttctccctgttcgcccctttccttttatctcgcttcacctccctcttctccctagcattggaggagtccacatcccctcttcagccgcagcacccctccctcccatcctctagctcttcccgcggtggtcgcctccctccgaccctgctctcccctcctgggccccgcgcaaagccccctctgttccagctcccgggcctcggctgcctccccgccctcccatcccttcctcttcccagggcctggagcgctcccttacattcctgagatgcccttcctcggggctgtccccctttgcctccccagcatcccatttctaggcctttttcaagacccttccagagcggcccctttccagctccctttctcgtttccatttccaactttgcctcttttgcctctttgttcactttgcttccaagctcccctccctctttcccttcgtcttaccctgctttgatctacgcagccccaaactcaagctccccgctttcaggtggtgcgaggttgtttgggggtgcggaagggcctgccagtccatttttcgaggggggcccattgctctgcatcccgtccgtcagtcccttttatagtaagagggctcctcatcccttcctttttgtccccgtggtttcctctgtcttgccatcccttctgtcttctccctccaatactgctttccccacccaaggaccctcagacccgtgaaccccctttctggaatgagttccctttctgttcggggatgctgaacttcgcccgcgtttttcttcgcgagccttttggtacgtggcgtggcgcgacagagtcagcacccttggcgagataggaggggagctctcgagcctctttcctggaagagtttttgctgaacgtaatctcttagccccgcggcggcggcggcccggttgctgctgctactgctgctgcgctgcctgcttgccgcgagctgggttggggttactgtagttcaaacgcatctgagatctgcaggcgttgtgggaggaggtgcggggagagaggaaggggcctgtgcagtgagcaggcatcaaagattagtggatggccttgcgtcgcagtctgcagtaaagaggaaactagtctgaaagggaaggagaggactgtgtgtctttttattttttaaaatacggagtgtgcagttttactgaatcttgaatcatgcccaaaagaatgagctgtcggtgctgcagtcgtgacccaggctgagcggccgatggcagaggtagcagttttatttcctctctctgttccttaagttgaaagatggcctttgtattcagagtagactccctgtctttgcggtttgggagatgatgagaaaccacagaattgctagtagtttatgtggagatcaggtacatacaaagttagctagcaaggagtgggagtggggaggaccagctatatttaaaacatgtgccattgcttatgtaagaaatgcgttctctttcctggtatctcagttctgggcttttacttagaa

SEQ ID NO: 34860 - DNA, 2300 bp, Homo sapien
tttttcctgcttttacaagtccagaatacttccagtgagggttacagggctttgaagccattttctccactttaaaaaaaggaaaggtaagagctgaagtaggcctctcctccatttaaaacacaaatccagttagagaccagcctgaccaacatgaagaaaccccatctctactaaaaatacaaaattagccaggtgtggtggtgcatgcctgtaatcccagctacttgggaggctgaggcaggagaattgctcgaacccaggaggcggaggttgcgatgagccaagatcacgccactgcactccagcctgggcaacaagagtggactccgtctcaaaaaacaaacaaacaaacaaacaaaaaccacgcaaatccagcaaccatacttccttttagaatcacattttcaggattctgccatttatccaagaataataaataaataaagttagaatttagtgttacgttcattttgacttctttgtaatctgtttctggccttaggttttcttgactcagtcagatgtaaagttgttaaaacagggaggggatcaagataaggccttgctatcttggtccatttcctattccagtcattattcatgtgacctctgtaatttttttacttaccaggctagattaagagactcatgaactgcatcactgggatgtgacaggatttatgactatggtgaagtagtctgaggcacctggatgaaaggtggttatagtgagttatgtacacaattcccacacattttaaacacttgattcctacagagctatcaaactaatggaaggcaagttactcagagtttggttgactgatacctccagggattgcattttctaaatacagagcttgctttcacaatttcagcaggatacaagagtgttcagaattgggggtttaccattcaaagggcagaggccagagacttgaatttacaaggagggtcctcaacacagacatcgagattacagtacattaatttctcttgcacatgaagaagttgaggcttcacaatttcagcatgacccagtatagttgcaacatcttacccatcactgggtgtgtatcttctgtgtacactggccctttcaacatctaaggccaggctaggtgctcatagcaactggctccccaggaactaacgaaagagaaagcaagaaacagtggaggggttttggtgatggtggaaggcaggggagatagaagtgggggttgcagaaggtcgtggtgaggcagagtggcagacaaatggggaatgagaagtcttgccaagcccagaagactatcgttgtgtaaacacacaatatgcttcaggctatgtattctgggcaacagttcctgccctaaaaggtgtggacatttaaattagggtaggattgcgcattctgtgatagagactggcacagagacaaagtggaactcctctacgttggggaggggaaaacatacattagcctgttttgaaccttagaccaagacaagacaaacacacaaacaccatttaatttcatactgcaataaaattctttgtaccaaaccatgggatcaaaattgttacagatactcagtgaacagttccaatgcattcattcatccagtcacttactccacaggggtttgagtgcctgcacttggtgctgggcacggctgagccatcccagacgccaaggagtttacagtctagtccagtcagtgacgaggttaaaacgaattctcgcatcattgctactgcgaatgcaccgggacaggatcagcccttcaaattctcccacgtggtccctgcaggtgagtgtgggtgtgagcgcttgcggcccgtggtgtttgggagtgagagagcacgtgtgtcagaatggcgcctgtcacagtgcgcgtccaggtgtctctgcagtacgcctctccatagccacccgagccgggctgtatgggcttggctaggcttatgtctcccgcccacgcaccggaggcggtgcggaaagcactccgcgggcgcgattgtgagtgagcgcgggcgcgcgcgggaggggcgcgccgcgctggctgggccgcgcgcaggcgcagagtgcggaagtcgggccgcggccgccgcagagcgccgggggcgggaggagcaaacgcaggaggccatggccgccgacgccggcgccggctgctaaggggctcggcccgcgagcgcctgctgccgcggacgatggtgaccgtacgggccgggccgctgccgctgccgctgcctccgcctccccagaagcaacatccgaggctcggcgcagaagagccgccgctgtgagc

SEQ ID NO: 34861 - DNA, 2300 bp, Homo sapien
aaggcaaaggagtaggtattagaagagagagacaaacttctagagggaactaaatttttgaagaggattgtcttccaactgggaagagagggaaagctttttgaggggagtagatctgagctgggcaagagaacacacttgctagagaaagaaaatggccagagagagaaaaggggagaaaaaagtctgggggagatggagataaaagcagagtagtgggggatttctggcctaggtgcaggaatgtccttttatcttccaaagtaaatgtggtcacagtaatattaacagtttgtcatctgatgttgtgaaattgtttccatatattatttagactctcagacctgacaatctatggaggaattcccaggcatctttagctgctacagagatgcatgaatgaaggacaagtatattatcctccacacattagaagagaggctccagggagcaacaggaggcaaaagttcttcttttctttttttttttttttttttttgagatagtcttgctctatcacccaggatggagtgcagtggcatgatcttggctcactacaacctccacctcccaggctcaagtgattctcatgcctcagcctcccgagtagctagggttaaaggcacatgccaccacacctagctaattttttttatttttagtaaagactgggtttcaccatgttggccaggctggtcttgaactcctgacctctagtcatctgcctgtcttggcctcccaaagtgctgggattacaggtgtgagccacactgtgcccggccaacatttatcatttgtgttgagactatcccaacctttctcctctattttgaaatacaaaataaattattgattactatagtcaccctactgtgctgtggaacgctacaacttattccttctgtctaaccatattttcgctccttttaacttctcttcatctccttctccctccttatccttcccagcctctggtaaccacaattttactctctatctccatggagtcaacttttttttagctcccacatatgagcaccaaacttcaatgtaagacccaaaactatgcagctattccaagaaaacgatttgagaaaatgcttgaaaatgttggtctgggcaatgattttttttttttttttaattaagactttctgaagaaaagggcatacttttcactgaaaaagtttgagttttttaaatgagcagatactcatgcattactagtgcagccaaaaattatcaaaagtagggaagaatgcaaaatagcgtgtgcctcttaactaaagaactgttaagatacaaaacttggctctttgctgcctttcccgcactgccaagagggaaacatgaattagttacattgccgtggtgctcactgggagttcgctgtatggaccagatgggtactgctccgaatttccattcaagtctgacattcttttgtcagcgtttgtgtaaccggttttccttgcattcagaggaaagacagcatggaagtatggatgggaaggttgagacgattggatactgtatggtaacctcgatcgcagctctcctatgagacttgcttcttggattctgagtcacttaagcttgccccttctctttcctgaccctcttccgtttccccttagattggagattctcctcagattctaagtctctgaaattattagtgttggcagcccctgggcccatggaggggtctcaagtcttcagttctcaaagatcaccttttaagcttcattcggaacatgacacagccacacgagtcctagccctgaatctcacgaagacctcagtacacctggaaaaggcagcacacccagttacgacactactagagacgtcacacgcctcagcacccatccgctcccagcccagaacgagcgcacgcgcagaacgagagagcggccacccagggatcggcgctatctgcacagcggttacagtctcggaaaggcctggcttcttcgtggctttgtggagatcccttacagcggccatttgattagcacccgaagagattcaaaggaagcagttgttccgtccccaacatatttccgtttcaaaccacccacttccggtttttcagccggttccggtcccgcccttcacttccggtcgctttcggtctctcagcggccggtttctgcgtccgctgccgcaggttccaccgcgctccaggtgaggggttgcggggcaccctggcgcgctgcccttggagacgctgttggggctcggggacagtggctttgcggcccgcgcggcgtggcttgcactgcggcgggctgggg

SEQ ID NO: 34862 - DNA, 2300 bp, Homo sapien
acagtgctctgtggtttcaaatgtaggtgatactaaaatgggagttgcttcttagaaccatggccggggttcccttgaccctgaagtgcagttcacctgagattgtcaaatgcatctgaggcatgcagaggaagtgctgggcacacagctagtgggaatacctcagcgtaagtggccaggagatgccaggaatctccactatttcccttccagtgtgccagcctctgggttttacaggcgcatgtaattgcagtacctctgtgcacatttccctactgcctagaatgactttcttgactatccatgatatataaaacacagataccgaattgttcccttacctcttcctctaggttcaagttaatatgttattggttgccttctataatatgttatctcattgcctttcccaacaagcctttgagataagtattaggtccattttatagacaaagagactgaggctcagcgagtaacttggccaacaagttgctcccactgctcaacagcaaatgagcggtgggaccaaaattcaagcctgtgtctgtttaacttcaagcctgtgaatgtactaaccggtgccctgtgccagctagtactttgctacagtcataacctagactgaagtgatagccatgcccctaaaactccatgctgtggtgacagcactgagcagtgtccaagaaggcttgacttctaggcctgtctctgccactcacaaactttataagggaataaagtacatagcaaggtccgcctagagttagtagcagttctgacaaagctgtaatttgtcaatattccgtcacccaacccaggaatgctcatttttaaggtatttgactgaaacagttgagcattgcccttcatatagtttaaaacagtggtttcagaaccactttcctccagaccatgggtgctctgcaaggtgaatggagttgtttcagaatgtttcaataatcatccctacctcattcgtaagtggcatgtaatttttgcaatcggaagattttcataaaccctggatactaacctagactggtttctatatcagatggtggcttatttaacataaaattatgcattttactatttcatggtggatatatcaatatgttgtggtcttttcccaatgaacactttgattttcaggggttctggaccctgaacatgggttaaaccagtggttctcaaggtgtggtcttagcgccagcagcatctgcttcccctggaaactttctagaaatgcatattctcaggccctcatgcctgctgaatcagacactctgggggtgggactcagccgtctgttgtagcagtgcttccaggttatcctgacagtcactcaaattttagaaccactaggttctctatatgggagagagtagtctttgaacttggaaaacaagagaagctaaacccctacagcaagggctggtgaccaggtcgttgccagaacctgaaagttcgcctctgtattaccgttcctgtccctaacccaagtccttcagttctgggtgctccagcacacactgctttgtgctgcagtgatacaaatgtatggctcatctccccagctggcggggaggcatttaacacactgacttaataaatatttattgagtaaaagtatttgctcctaggaagcgggatccaggtaagccctttttttctctctcaactgcttctagcccagtgctctttatgtagtaagcactaaataaacaactgctagatgttgatccagaaagtcacattccttctctaagctttaagtttctcatcttaaaaataagaggattgtatcagatggcttgccttaggtctctttcagctccagagccccaaataccctatggttctctatttagagatgttcttccccacagactgccatagaactcctgtaatttacttagtatttgcttgacagtatggagaagaaaggggagaatcaagattttatttaaaaaaaaagtagctagaatgtgtatatggttcacaaaggtaacaagaattattgacattctttcttctcttttttcttcctcttccttctcttttcctccttctcttccccctgcttctctcccttcttatagatgtgtcaccagcagttggtcatctcttggttttccctggtttttctggcatctcccctcgtggccatatgggaactgaagaaagatggtaaccagcctctcattattctctgtggaggccccacttctaagccaggactcttgggcagccactggtgggaaatcaaactgaaatgggcaaccatgcactgggtcctc

SEQ ID NO: 34863 - DNA, 2300 bp, Homo sapien
atggtgcctagatgaagtcaggacccactatttgctcccctccttccacagcatttactacaatggcaacaatacagtctcttctttactgtttgtcttctctgccacactgagtgaactctcttatgccatggatcatgtctatcttgttttgcactttacccccagagtccagcacagagggattccatgacttattagtagcatgaaggaatgtacggaaatcatacaatttcagattccagtaaactaaactctaagaggttacccacattccatctagtatcttgcaattccttgtttgaaaaagtgggtcatcacctggggtttagtaatccctttgttaaaatgacattgttgttgcacacaattttacctgggcaagtaaaaaaacctttttttcccccttctcacagatttaaaaactctttaggaagcaataatagcttttcattttttaactggggccaaagttagttaatccacaagaatggggatcccagctgtcattttggttgatatcacaactgacgaccaagaccatcacaaatatgggagcaagtctgatttgtaacattattataattatgaatccaattactttaaggaatgcacgaaaggctttttaaaaatttcaatagtaaggcaggcaccactcactttagctctatacaatcctttaactgatgggcattaacatttaggaatatacttttatacatcaatacacaccacttcaaaataagataaaacaaacatttccacaaactatgcatacacacagatcttgctatacagttattattaggtggcttttaaaatggacactgtacatcggtccctagagtactaagttttcactaatgttccagcagatgactcaccagggatgcttccaggaatccaccaactccctcctgccagctgctggggtagcacactaacggtttctacacctggacagctgcaggcccacagggaggggagggaggtaggggcttgggaagtgcttaccttgctctgggcaggacggagagtccaatggccctgaaacagatgttgtttcttctgctgctgttgctggtactggaacttatatactctactcctttctgatggaaacttaaactagaaactgacttgttgcaacattgaaaacaactctcaaaaccttctgggggaatttcaagaagttccttttttgtttgtctctctctgtgtgtgtatcaataacgaggagggaacatagacatcaaaatcccaggtaatgaactaagaggaaatgacttttgggtggggaataaggaaggagatggagatgctaatttctctgggtttacatcatggccaaggtgcttggagacagcactaggcagattccctgggttccacagatcgaggaagaaggaaggccaaggggcggtcagacgggaggctgagttcatgtcgggatggaacaactgtatgcccaagggcttaaaaacaaaatcctggttcttcccaagtcagagaggatgagatgaagggcaaagggtttagtacatctggggcgccttcctccacattagtcctttaatttcagaaacatactatttaccacccatcttggctccatgcacctctccccacattccccgagtgggaacacacgcgtgcacacacacacccatgcacatttcatacagacacagacctggggagatgataaaactgcgtgtaccactaataagactcaaatatgtgcacatcctgtgctcataggtactcgctcataggggcggatgggagcagaaagtgaaataccctcagggaggcatacagacaaccacactcaaggcacccccccttgggcacccagactacatcctcatttcatttgcacacaaatctatggccctaggggctccgtgcagatgcacaggaatagcggaataaagatatctctcgtggtggaatttcaagttgctaagaggtatgcaaaggtgtacaccggtgtggacccccccatcccccgcccagtctgcacgtgaacaggaacatgtacctgcacgtataccaggtacacgcagacagatgcgggccatccccagagccgccgacagaggtcgctgcgagacggtacccgcgccccacagtccacccgctcctcggagtccccccgcgccccggagtccacccgcgccccggagtccacccgcgcaggtccacttctccatccctgctctcgacctccgcccctgcggtgggggaagttcctggggcggtggctgggaccaggccgggttttaggcgggcgcaga

SEQ ID NO: 34864 - DNA, 2300 bp, Homo sapien
ctctaactccagagcccatgctcttaaaaccctattacttgtccctggtggaggtgaacactgggggccctttcatataggactagccctcgggctgcaatctgagcggaaaagggaggatgagggcatacttcgaagcttcttttgcataactggcgctggatttttactgagactttacgttacagttttttttttttaattttcaaggtgcttttacgaacacatgaataaaatatttgtgtcattttgaaccttacttgtcttattttatgcatgtatttatttatgggggggcacaaggactcatctgtggtggtgcagccactgtaaataaattagtgaaactacttcacgtcaatttctgttcagtacactttagtgatggatcggaggaaattaatacatgtttacaaaaagcccctcccccagttgttacatatgcctcagagataccagttgtgaaaagtgcaggtgcacttacacacatacgcacacacaccccacaaatggtatcatacgaaaaaacatacctgcaatctgctttgtccacttaattgtatatcttggatacagaacttgtttcactggaaggctaaaaggcaaagtctggggaggcctagaggacacaggggatgggaggaggcgctctgagctggatgtaaggtctccacccacggccagagcacaaggtcggataaccagtgggcctgccggcttggctgcctgggccctcccctgccgagacaaacggctggagggaggaagtgtgcggctgggaagctccgctgctctggcccgggtttcccatttcccccttcccgcgctgagacggcgaggaaagttagcccggaaatctgcgcccgcctaaaacccggcctggtcccagccaccgccccaggaacttcccccaccgcaggggcggaggtcgagagcagggatggagaagtggacctgcgcgggtggactccggggcgcgggtggactccggggcgcggggggactccgaggagcgggtggactgtggggcgcgggtaccgtctcgcagcgacctctgtcggcggctctggggatggcccgcatctgtctgcgtgtacctggtatacgtgcaggtacatgttcctgttcacgtgcagactgggcgggggatgggggggtccacaccggtgtacacctttgcatacctcttagcaacttgaaattccaccacgagagatatctttattccgctattcctgtgcatctgcacggagcccctagggccatagatttgtgtgcaaatgaaatgaggatgtagtctgggtgcccaagggggggtgccttgagtgtggttgtctgtatgcctccctgagggtatttcactttctgctcccatccgcccctatgagcgagtacctatgagcacaggatgtgcacatatttgagtcttattagtggtacacgcagttttatcatctccccaggtctgtgtctgtatgaaatgtgcatgggtgtgtgtgtgcacgcgtgtgttcccactcggggaatgtggggagaggtgcatggagccaagatgggtggtaaatagtatgtttctgaaattaaaggactaatgtggaggaaggcgccccagatgtactaaaccctttgcccttcatctcatcctctctgacttgggaagaaccaggattttgtttttaagcccttgggcatacagttgttccatcccgacatgaactcagcctcccgtctgaccgccccttggccttccttcttcctcgatctgtggaacccagggaatctgcctagtgctgtctccaagcaccttggccatgatgtaaacccagagaaattagcatctccatctccttccttattccccacccaaaagtcatttcctcttagttcattacctgggattttgatgtctatgttccctcctcgttattgatacacacacagagagagacaaacaaaaaaggaacttcttgaaattcccccagaaggttttgagagttgttttcaatgttgcaacaagtcagtttctagtttaagtttccatcagaaaggagtagagtatataagttccagtaccagcaacagcagcagaagaaacaacatctgtttcagggccattggactctccgtcctgcccagagcaaggtaagcacttcccaagcccctacctccctcccctccctgtgggcctgcagctgtccaggtgtagaaaccgttagtgtgctaccccagcagctggcaggagggagttggtggattcctggaagcatccctggtgagtcatctgctggaacattagtgaa

SEQ ID NO: 34865 - DNA, 2300 bp, Homo sapien
tccatccaaacaatcccagataaccttattttaagatcagtagattagcaaccttaattccatctgcaacctaaattcctctttgccatgtaaggtaatatattaacaagtccgggggtggggggtgcaggggcgggtgcatttttctatcctaccacaaattctgcaggactttcttctctacatctgattttatcacatggtcctgtatgattcagtcattcattctatagtgaacatctgttgttttgtggtccggcatctatttaccccatttctaattataatatcccaaacttatccctgggagtcactacatcccgcactctcaggtaacatgtaaggttaccgtacacgtactccgtggagaaaaatcccacctcaagtccagctttggtcacagtgactctttcagtgatgggcatgtgacccagtgagaatcacatattggtggaactggtgggagagaggcatatgttctttgcctttgtaggtgaattggaaagatgagactctggaagtgccaagaacaccatgggaagcctggaaatgaaacccacactggaaaaggcagatctgacagaatattaatgccatcatttgagtcccctaaatcaaatcacgactgaaatcagaccaacctctgggcttttcagttatgagatttataaatctcttttttaattaaaccaggttatatctgtcacttacaacagaaagagttctaagtgaaacacattcctttattcactcccttattcaacaggttcaccctgcctgcctacatttgtatcaggcactgtgaataggagatacagtcatgaaacagacagacatagtctctgccctcatggaagttagacataaagtgggaagactgacaaaagactgacacacttcaatataatattgctattatgatggcaattatgaaagcattcgcatagacagtttacctaaaatctggggtcagggaagcaattaagctgacgtaataaggtgaatacgagttcaccaggctaaggtaggagagaggtggtgataaattgtgtttcagacaaaggaaagagtatacgaagaggctagaaggcaagagatctctacttttttttccaactctctagttgcctctacaaccagaacataaactcctcagagctgtgttttgaattctttctacattgggaacaatacctagtatagaggacttgctcaagaaaaaagtctgttgaccaacgactatctgtactaatatctaaggctagtttaagccctcattttccttttcttcagtggcaggttgagactttgcctatctagatatagggtaatataatgataacaacagtgaaaacaggaacagtatcaatcaatgctaaacatctcttgagcccttaccatatatcaggcactattctaagcagtatatatatatatatatatatatatatatatatatatatgcagtttatttatatatatatatgcagtttatttatatatataagcagtttatatatatataagcagtttatatatatataagcagtttatatatatataagcagtttatatatatataagcagtatatatatacaagcagtatacatatatataaatatatatatatatatatataaaacacacacatatatatatttagaaataaggtcttgccttgttgcccaggctgatcttgaactcctggcctcaagcaattctcctatctaggcctcccaaagtgctggggttacaagcatgagccactgtgctcagccctacatgcattatttaatcctcactaccctttgaggtagttgtcattattattattattactattgccattttacacatgaaaatactaaagccaaaaaagataagcaatttgcggagtatggtggatacttctgattgactaactgatagtcattctccctgtcttctccttgctagaagaacctcagttttgttcagaggatcgtgtgttgcaggggagtggagtcctaccctaggcccagggggacgtcataattggcttaagtcaatggtaatcccattcgcattggtcatgattatgcatatgagacacaattgtacacaagaagaaatgaaaagaagtctgctaggaatccttgcagactaaaaggagatacatgagagagactttctttctgtctctggacattgtcatctgtctggagtacctagaactgcagcagtcttcatagaatcatgagagtaaggtaggagaatagggtctagagacagggagcttaagagcaactcatggctctct

SEQ ID NO: 34866 - DNA, 2300 bp, Homo sapien
tgccatgttactagatcttgtaatgacgttccgttgttctcatgataaatataaactttttgacagatcttaagaatccttcatggtcatgtccctataaagccttccatccttactttttcctacttcccctcttccatgcaatatggtagcttaattgcttataccagttcctccagaaaaaaatgtcctgaatgcactcattaatgttgcataatgtctaagtgttgctaaaaagtaaaagtatctggcttcaaaaataaaaataaaaatttttagaaagcaaaaatatagagaacaaacatcaaggcaaggaggtaggggttgccagcacccctctcactccccatcctgtactcttctctgatttttctcccagcttctcccttgctgattctctagttctatgatagcactatctgaaggttccagagggcttttcacatgcttgggaataggtaaacaaccaaggaaaaagtatctctaatgccttctaaagcaaaattccggactaagcttgtgaagccagaagcatctaccagcccacatcctgtcctgtggggagactgtctgccagctgggtcacggtcccagatggtgacttgtgagaagcgagttgatagcaaccacagcttggtctccacatcctaaggcactacttattggcctgccttctaagaatgaagaaacaggccccaataatgcagaaggcacagtcgctaagggaggactccaagtgctttacatgtatcatggcatttaattccaacaatgactctatgaggtaggaactactgtgggttccgttttacagagggggaaaccaaggcacaaaaagattatgtactcttcccaagattactgtggaaacaaagtgagattcttagtgcgttacattaataagatacaaagaaccaaagagggttttttttttttcattttaaactggtttgcacaaagctattagcagcagattaatagctttattaatagtccctttatttatagtaaccctaataggttaatatattacccttcccaagggactcattcatccaatacatactgattgaaaatctactattgcaccctagatagggatgcagagagaaggttctagactctccatgcctcagaaggcctccccctcctaccacgtggccctggactaacgacaccacttggctttgtctttaagctaagatataccttccagagagcacctagtgcagtaggaagggcctgccttgatggggccctctattctttgcaggactgtgctgcagctctctgcctagtcttttgtctgcctcttgagtcgatgataaattatcaggcccttgttccactcaacaccacctttgctgtctttgcctgccctgcatcaagccttttcttccccaccttccctttcttctctcattctaattcctggactccacagccaagtccacagtctgtcactttgacaggatcgtaagtggtcaagtcccaggaaagtccctggatggtcctgctttcctttcccttttcatggggcaatccttttctttgactttttaggggcatttcaggggcatccagaaagatcgagtgatgtagtgatgtaccgagtgtagcatgatggtacatatagggagatactgggattcaggccagctcgtgcttgtcagcttggaaggggactcccctttggcagttgggggcattttctccatttgtgaactgagaaggctggtcaagatgttccctgaccattctcaccatcaagttcaaatgatcttcttagatgctcagacagaccaaaggggagtagggtgctctgggcaaaaccagagtttctcacaagagggtgagcaccccgctctatggtacaattccaggggtggaaagacctcccacctttcaccctgaagctcctcccttctctgataccagaaactgtctcgtgatatcattttgggaaataaaatcaattttattttatcattttgggaaataaaatcaatttataatgcaatatcattacagaaccttagctttaaggatccttagctcatgaggacaatgcaccttgagtttgcataataaaatgttcaccggccgggcgcggtggctcacgcctgtaatcccagcactttgggaggccgaggcgggtggatcatgaggtcaggagatcgagaccatcctggctaacaaggtgaaaccccgtctctactaaaaatacaaaaaattagccgggcgcggtggcgggcgcctgtagtcccagctactggggaggctgaggcaggagaatggcg

SEQ ID NO: 34867 - DNA, 2300 bp, Homo sapien
atcagtgattgggtatgtgctgtcagggaagggtactctcctgggcaaggtggctctctgcagctgaggctgccaagctcatgctgacagctggagtgtctgctgatggcacttgcagcagcggactcagtgggttctttcctgaaggaggctggagccctgcaactctgtgcccttcaaaaagcccagatcttgggtataaacccaaaggattataaatcattctgctgtaaagacacatgcatacttatgtttattgcagcactatttacaataccaaggacttggaacaaacctaaatgcctatcaatgatagactggataaagaaaatgtggcacatatacactatggaatactatgcagccataaaaaagaatgaattcatgtcctttgcagggacatggatgaagctagaaaccatcattctccacaaactaacacaggaacagaaaaccaaacaccgcatattctcactcataggtgggagttgaacaatgagaacacatggacatagggaggggaacatcacacactggggcctgtttgggggtggggggcaaggggagggagagcattaggacaaatatctaatgcatgtggggcttaaaacctagatgatgggttgataggtgcagcaaaccaccacggcacatgtatacctatgtaacaaacctgaacgttttgcacatgtatcccagaattttttttataaaagcccagatcttgaatccaaggaaggttttattgcagatttcagagccatgaaactgcctctcaggaccttggtctatctcttgaccaagcagtcagacaaagcaagtgaaatttctatgatggtagtgagagccaggcaagactggcaagacctcaggcttatgattcagacagacctggattcaaagtccacactcatactcaccagttgcatgactctaggcaatcacatcaccttctctgagctccatgtccctttctgtaaaatggggataataatagtttgctggtccagggcccacttgtcttcccatagtgtctttcccttcccacctctgttctgtatcacagggatcttatctctgcaagctgtagctcccaggctcctgcatcagctggcttctagctgagtttggccaatgatattttggggacaagaagaagcagctagttagggcatttctccctccctgcttcaggtggtgtccccagcagcagctgcatctctgcaagcaagagcactcattaacatagacacactcaaaaggccacatgtgcaatttctaacaatgttgacgagccagtgccttaattattttattattttaaaataaggttattttatttgattaatcatgagagtattttaatcttataagattattttagttgattaatcgtcactcatgtagaggatatgatacaagttgggcattttgattaggacatgaaaaagcaatgttggagtttatcaagtttatcaaagcttattgtcctgcaggatccctcatgagtacataaagtagtagggaagggctccagggtgtcagagaggaacagtaaggcagaggaggagaccctgcagagagatgtttaaatagcatgtaagtaaaagttgccaccatcacaactctaaagagaactataacctcaaagtcattcaaaattggcattcaaagactgtcaaaacagggcttcaatctacttttaaaattctctttcttagactttgtattgggttgaatagcagatctccaaaagatacgtctaagtcctaaccccaccccaccaccccagtacctgtgaatgtgactttaatggaaatggggcttttgaagatgttaagaatcttgagatgagatgattctagatttagggtgggccctaagctcaaggagtgttgtccttataaaataaaagagagggagagttgagacataaggacacaggggaggagctgcaagccaaggaattagaatcactagaagctggaagaggcaaaggatggaatctcttgtagagcctccacaggaagtgtggccctgctgaccccttgatttttagacttctgctctccaaaaggaaccatgagagaataaacttctgttgcattaagtcatcgagtttgtggtgctttgttatgggagccttagagaccaatatagaccccaacttccagttataatgggccactgagctgtttcctgaatagcccagctgtttgctgacctcgggtttttaaccatgttgcattggacacattattatatttatatttaatgcaagcacagttaactatttagtt

SEQ ID NO: 34868 - DNA, 2300 bp, Homo sapien
actttgctgggagtaaattaaaaccttcgatacgtgtatgataaccacctgcctcccttctcaaaaaataaaaataaaaagaggttaagagcttacctctaggttgagaagcttagatgtaagtcatcctgagtgacttctgttttccccacccgtgaatatcaagttataacaagtatcaagagcagaaggtgagaaacccaagatgcaggcttgtgaactggagtaaaagaaggtatcaggctttacttttcaatctccagctgccactgcccattgctctgccatatatttgctagcctatgacctcaggaatcaactgactctctctgaaccactgtttctcatctctcaatgaacaatggttatgcttctctcaaagaattgtaaagtctcaaagaaactgagtaaatgcatggctatcagtaagcgctcaattcatgggagtccctgcccagcaccagtggctcaggccccaaaattaactactcaaaaggcagctccatctataacagtggttccatcccctaccttgccccgggggaaaagtatgacacagtagctgagtacccaactttgggagagaccccacagttgagttcagttcccagcagctctcctccatgcctttgtgaacttgggcgaacagctaaacttccccataatttggtgtctcatccatgaaatagaaatggtgaagagtgtattctttctctcatgagagtcatgagaaaatgcaaaaagaactcagcacactgtctaggacaaaataaatgttggataaatgtgaactaacataaagttctttggctttttctttctttctttcttggcccatactttctcttctaagtaccattcacccacctttgggagtgcgtccctgtgactgaatgtccaacatggatatcagacagaaaggaaaaaactcaacaaataaccaagatcctctacgtcccttccccaggtctctgacctccctcacccccactcccagatagccagctagcttcctccctcaattcccttcatgtttcctcaaatatcacttcagtgacatcccaagcacccacttaacatttcaaatccaccccacaaacaccccactgcatttccccctccttactttattttcagcctaacacctgtcatcacattacacacctcatcatttgcttatttagtatactgtctgtcttctgtcgggagaagctacgctcctatagggcaggagtccgtctattttgttcagttgctatgttcacagcgcccagagccagggcagagagtggagactccgtaagaatcggctgaataaatgagtgaatgcctgagcgaatgaaaggatgaagagaagccagattttactggggccaaagagtttgcacggggcgaggggagccagatgaaggatgagggctggcctcagatccgactcaagtccctcccacctgcccaatcctagaattctctttccctcttttaggtgctggacaagttgcatatcccgttaaatccggggcccactccgggagccccctattaaaggtaagcagcccccaacccacctttgacacggaagagtgactagcggggaaaataaccccagcgggccgcctaggggtgggtgacccgcgatctccacgcccaggtcccgccctcgcggcccctgcccccgccccgccccccgcagagggcgcgccctgggagcggcgggggacgcggctggcttcccggcttgcggggtggcggcgtcggggctgcgggcgccttggctggacccgcattgccccctagtgccgcgcggagtcagggcgccgggctcccccgcctgatgtcaccgccgtgcagtcagcccagaagcggctcattgaaagcagaccctcttcggcgctcgctgggcggaggacgcgccgcggtccgcagacccgagcgagctgggcaccgccgggcgcccccggccctgccgccccctcctccccgccgctcccccgcgagcccggccaggcgcgcctgacgtggaccattaaacttggagctgccgcctcgtcccctctcctcctcctcctccctctgacaggcgagcgagcgactcggtgcaggcaggagacgtgctgccgggctgggctgcccgggggagatgactcctcgccaggagggcgcctctgggaagaagaccacgggggaagcaaagtttcagggcagctgaggagccttcgccgcagcccttccgagcccaatcatccccctggctatggagggcggactctaagatgaatcccgacctggacaccggccac

SEQ ID NO: 34869 - DNA, 2300 bp, Homo sapien
tacaggcagagggaattgcactggcaaaggcttggggcatgatagagccaggtgtgttcagggaagggagactgctcctgtgtggctggaggagcaacagcaggggccacgtgtgattgcctgccttactggctattaattctcttatcaccccaacgaggtaagtaaaatgtcatctctgtcttacaggcagaaaaaatgagagctgagagaacttaagtaacttgcctgaggttgcacagctagtgagggacagggctgagattctgatctgtttgagcacaaagccctatcttgggagatggggtaggttagattccaattgtgaagagtcttttctgtcacactcagaagttcagaagtcaccctggggtaattcagcagggtaccagcttgagcagatctgtgctctaggaagatctttgcaaagacaatttgtaagcaggtcagcaatttaccttgggctgaactatcctcagtgcattgtgtgcgcgcgcgcgcgcacacacacacacacacacacacacacacacacacacacacacactctctctctctctctctctctctctccttcaaagaaaggagcctctgagaatccagcactctttgtttccctcttccttctcaaatgaaaaccagtagctctgagttctatgtttattccagatcacagtggaagaagactggaggggctggggacactgccccttgctgagggaccttggactaatcgcttctcacatggcttcagttttcttatctgtaaaatgaaattcttggcatttccacctttacatgccctttccatctttaaaattgtctgattcctaagagtggtgggacctattaagggatttcactctggccacatactgtgacttttggaaagctaagatagtttcggactggctgcccccaaatttagatagagtctcttagcatttcctgcataaggccagagactggattttctaggcatcgctgaggacttaagagtcttctttggttttcaggctaggccaatggccgcaaataacctaattaggacctcgcaagcagcttgcccagtgaaagctaatttaattagggtcttattagttgttataactacttttcaatgaagctttattacattcaactatgcaaatcctaagcaattgtattaaatgctggcaaatgacccattagtctttgatttcacttctttttttgcattgttcacatctatcctgagattcagatgcctgtagttcatttttcctctttgaagccaggtgcagccttgaaggcatattttctgttctagtctcattacccattctctgggattccccatccacttacgctaatgatttgatattggagtgatatgtggggtggagaaaggctaggaaatctctccccagtggtcttccatattccctaacgtttccatcattaatcactccatggttggaagactttgaggataagggcccctggttgaaatgcagatgtcattttggaggcaaatgcagaaaaccattattatgaattaacacctgaggattagctcatcatattagctaattggtcaatacaagatacttcaacagaatggattctggatggagttttgatagttgctggtgtgtagaggaggatgaaagaaaaccaagagttaattcgtttctgctgtgcaacagtcactgggctagatatgttcacatatattatctcatttaattcttttaacaaccttgatatgaatgtattattatcactgataataagaagagaagagtcagcttcaaaatcacacagctagtaagaggaaaagcctaggagagcactgaggtgtgggaagctttggcctccagtggggcagtgtcatgacctggggggttaacaacttcagaggattgcctgaggccaggcaaaccccaggaccagtgactatgggtcactaaagacaaacttgacagggctcacaacttggcctgagcagtgctgatctcttttgttctgtttcttttcatcctcaatgggcagtgtgatgtcatagtatgatgtcatcattaagagactaggatctgggccaggcatggtggctcacccctgtaatcccagcattttgggaggccgacgtgggaggatcacgaggtcaggagttcgagactagcttggccaacacggtgagaccccgtctctactaaaatgcaaaaaattagccgggcacgtggtgcgcgcctgtagtcccaggtactcgggaggctgaggcaggagaattgcttgaaactggcaggcagaagttgcag

SEQ ID NO: 34870 - DNA, 2300 bp, Homo sapien
ttaggctttctgtccccagctactggcacaagacctgccatataatatttttgttgctaatattcattaaacactgtgttccttgtcttctagatatttttttctcccgcgccctgtgctccttgtcttctaggtattttttctcccaacaagcttgtgaggtaggtaccattgttaccgatcccagtttttatacatgaggtaaatttatacattaaaaagttggctgggccctgtggctcacatccataatccctgcatgttaggaggctgaggcaggaggattgtttgagcccaggagtttgaaactagcctgggaaatgtgagaacttgtctcttaaaaaaaaaaaaagtaaaataaaaaccttagaagcataagtaactggccccaaaatcacactgctactcagtggcagagactgaattagaactcagtaatcaaataagccacctaaagcatttttcacagcatgcggtgcttaataagcgtatagtctatgaatattagcaatgggaattattgtttagagttgtacagctagtaaaggaagctgagaccgtaactcaagttttatgggtttagttacttatttatttagctccaaagtttacagtctttccattacaccagaattgaattaacagggccacttaaagaggcttaaccatttgcttttttttttttttttttttttaaatatagacagtctccctctgttgttcaggccaaagtgcagtgtcgtgatcacagctcactgcagcctctgactcctaggttcaagcatcctcccacctcagcctcctgagcagctgagactacagatatgcgccactgtgcccagctaatttatacacacacacacatatgtatatgtatatatagatagagatgggttttgccatgttggtcaggctggtcccgaactcctggccccaagagatcctcccatgtccaccttccaaagtgctgggattacaggcatgagccaccacactcagcctccatttacactttttaaattctgggggtattttttaaaattcagaaatactaaaaccaaaataggatatatttttgatgttttcttttagcatataaagctttcaacttacaaaaaatacaactgtatgcataatctcatttagatggaaattcaaaaaacaagtttcatactcttcctgaaaaagtctcttccagctatctatctctgcaataggttctgtgaattacagaaaacgaattctctgctgtcattgctggttacctgtctggctaccttgaggatgggtactatatttcaattctgtgatcccagcacaatgcccagggtctaataaacattcagtgaacatttctcgaatgaatgcatagggcaaccactcttggtctcagggttcccttacggtcttaaatattattgaggttggtctgagtgcagtggtgtttacaactaactgatcacaaccagttacagatctttttgtttcttctccactcccactgtttgacttggctagcccttgaaaaataaaaatggaccgggcgcggtggctcacgcctataatcccagcactttggtaggccgaggagggaggatcgcttgagcccaggagttcaagaacagcctgagcaacatagtgaaactccgtctctactaaaaatacaaaaaaattagctgggcgtggtggcgcgcacctgtggtcccagctactcgtaaggctgaggcaagagaatcgcttgatcccaggaggttgaggctgaagtgagtagaggctgtgattgcgccactgcactccagcctgggcgacagactgagactctgtctcaaaaataaataaataaataaataaataaataaataaataaataaataaataaatagtgaaacgaacaccacagggacagacttccttttgtccttttttctcttcgtgcagagtaacgcggagtcttgccgtaacccaagatggcaaccatctctcaaatgtcacgccgtacaatgacgtcacacagcgactatgcctttcctccctgagagtttcgctacatttcccaggatgctttgccaatagcgacgctattagtcgtcatcgacggaagtgcacctgactgagcggaagtaggagctctcagaggctaagaaggtggagaccggagaagctgtgaggttgtgagtaaccccgtgggtctaagcgtgttggctgtgaggaacaaagctagggaataatctgctgggaagcgcgaggcatcacttccctaactgtaggagctcaaactcctgtgttcttccagtagacct

SEQ ID NO: 34871 - DNA, 2300 bp, Homo sapien
cactcttggtctcagggttcccttacggtcttaaatattattgaggttggtctgagtgcagtggtgtttacaactaactgatcacaaccagttacagatctttttgtttcttctccactcccactgtttgacttggctagcccttgaaaaataaaaatggaccgggcgcggtggctcacgcctataatcccagcactttggtaggccgaggagggaggatcgcttgagcccaggagttcaagaacagcctgagcaacatagtgaaactccgtctctactaaaaatacaaaaaaattagctgggcgtggtggcgcgcacctgtggtcccagctactcgtaaggctgaggcaagagaatcgcttgatcccaggaggttgaggctgaagtgagtagaggctgtgattgcgccactgcactccagcctgggcgacagactgagactctgtctcaaaaataaataaataaataaataaataaataaataaataaataaataaataaatagtgaaacgaacaccacagggacagacttccttttgtccttttttctcttcgtgcagagtaacgcggagtcttgccgtaacccaagatggcaaccatctctcaaatgtcacgccgtacaatgacgtcacacagcgactatgcctttcctccctgagagtttcgctacatttcccaggatgctttgccaatagcgacgctattagtcgtcatcgacggaagtgcacctgactgagcggaagtaggagctctcagaggctaagaaggtggagaccggagaagctgtgaggttgtgagtaaccccgtgggtctaagcgtgttggctgtgaggaacaaagctagggaataatctgctgggaagcgcgaggcatcacttccctaactgtaggagctcaaactcctgtgttcttccagtagacctgggagcgaagagaagcaagacattgctgtggaggcgaagtctccgtattaagatcttgctggttttttaagttttcttggcacatactagggcaaattcagactcttgtcgtgatacaagggtcgttggcgtgattttgctgcgactagagcaatttacgttcttgcaaatctgtcgcaaatttttgcaaatgtctgggctgctgatgctctgactcagcttctacagcagtggttcgcaattggctgcatatcagaatcacctgggatgaaaacataaataaataaataaataaacctgatgcccttgcttgacgcgacactaataaatcagaatttggtcagggtctgagcagtggtattttctaaagtatctctagtgttctcttgggcagctagggttcagagtcacgctttctaatgcctgactctggcccccacggtaatcctgattagggtcacctgcgccagggttccccttccagtgtaagctgagtgggctctaccacacgcatttgggttaaagtgatcacaattttggcacggattttattttgaagtctactagaaacgtattcttgggcttcctgtggtggtgctaaaaagacggaccgtagtttcttactcgtgccttggttattcattctgaatggagattagggctgcttcctttttcttggcactgttttagtttctgcctaatttttgctatccaaacagaacacgaacggtggaacgtggaagagttacattaaaaacggcttcttttgttgcttttaagaagttctgggccaggcgcggtggcaggcgcctgtaatcccagctactcgggaggctgaggcaggagaatcgcttgaacccggacggcagaggttgcagtgagccgagatcgcgccactgcactccagcctgggcgacagactgagattaagtctcaaaaaaaaaaaaaaaaaaaaaagaatctggtaccagatttgaccagaaaaggggtctcagttaaaatgacgatttgacattattattacttatgataagctgtatttttaaataatgaattccagtgaaaggaaattacggtgtgttttttggctgtaatgcagaggtttgtttaggtttgaaacagaacttttaaaaatacaagcaccattatatagcagttttgttttgttttcccccagctttagcgtcacctccctcactgggcagcatgggggagaagtcagagaactgtggggttccagaggatctgttaaatggtttgaaggttacagatactcaggaagccgagtgtgctggccctccagttcctgatcccaaaaatcagcattcccagagtaagctgctcagggatgatgaggcccatctccaggaggaccagg

SEQ ID NO: 34872 - DNA, 2300 bp, Homo sapien
tctgcttactgcaagtatctagcctgaaggagataactctttgatgaatgaatgattgagtgaaagtcatgtacttggaaggacccaggttagataggatctgctgctagctagctgtatgacccttaagatcttattatctttttatttttatttttttgatacggagtttcactcttgttgcccagagtggagtgcagtgggcacatctcggctcactgcaacctccgcctcctgagttcaagcaattctcttgcctcaggtttccaagtagctgggattacaggcatgcgccaccatgctcagctaattttgtatttttagtagagatggggtttcaccatgttggtcaggttgttctcaaactcctgacctcaggtggtccgcctgcctcggcctcccaaagtgctgggattacaggcttgagccaccgcgcttggcccgcttaggatgtttaacatggctaaggcttggcttcctcatctgtaaaaaagggagaagatttaagtcacaggattttaagtgagagttttgggaaaatctctggtacaaaatgaacactaagtacatttgtttctttctgtatttttaaatgatattctgaaacttccctgattgggatcttctactggcctttccccacgagccacttggtttgaaataggcagagcatatggtgatatttgtttattgctattttcagtcttttccatgtaaaactgaaattctgactatgcaatttaccagccgagtaaccttgggcaccctctttgtgcctcaaaattttaaggattgagatgatatgctatagtgtttgtattagtgcctggtacatggtactcaaaagacactagctgtaattattcttcaggactttattttttttactttcattgctagcagtttttctaccctctctcctgcaggcattctcccagaaaaaaggctgactctgtggtgccatttgagagaaataggttcagtagattcttccagagatgacaaacgaaaagacttgatgtggaagtaagagaagtaggggcgtcaggacactgaagtgagagatcttttgttctcgtggcattggagaagccaggaaagaaaaaggctttagcagggaccaggtgcgtccactttgcaagtggatttggagagaacaagcagtgttcacatatcagtccagcaatgtctcaagactccttcctggaacagtcatcagtttaatccagtgaggatggtgtctctcttctttcatgagcattttcctatttctgaaatattaataaataggtgctttgttcctaggaagtggagagaagtcaaggaaaatactcatcatactcctagaagtcaaggaaaatactcctcgtactcctcatggccgctggagcccgctgctatgaggttatggagaacgtcttgaacattccattccccagcacctagtgcagtgactagcatagtaggcactcaaaaagtgtctgtaggattgtatttcaaactttagttgtctttcccaaagaagcctgtcgtgcccacacgcggccgcaagaagtccgcgcctagaaataacatttattctaaggatctctgcgcagagattcttgggaagcggttcccctcccgcattcccttgttactcctcccctcggccgcctttgaaagaagtggcacgccacatgattccatcctttctcccacctccaaagacctggctgataatgggcaggagcgtaggccaaccataaaactttatttcctcttccagccaatagcaagaggcgatgagtatatggctcctcttttgtgacttcccccgccccctttgattccgccccctattcctccactcagattccacacttgacaacacatctggccaatgagaagttcctactctgcgtgggaaggatggactgactagatgatagacgtccatccctggccaatggaatatcaaaagtgcgggaggggtgtagaatgcaaccaatggcgaggtgccagaaacgagcatcagggaaagggcgggacgaaagtgttcgcgggagggaggggaaggcccagggaaccaagcagcgctgtcgccgccgccgctgcagccggagttggaggagggagaagctaggaagaaaatggcggccgtggctgcagaggcggcagcgactgcagcgtcccccggggaggggggcgccggcgaggccgagccggagatggagcccatccccggcagtgaggccggcactgaccccctcccggtcacggccactgaagcgtctgtgccggatggcgagactgacggg

SEQ ID NO: 34873 - DNA, 2300 bp, Homo sapien
tttttttcgcctttgaaggtggaaacactctaatcacagcttgccttggtgctgtgtctagcatccatgacccaggtgctgccgtgcatgtccaagccaccctggacttgacctcctcactcctcagtggtgttctggtctgtaagtccctctcctaactatttcctgaactttcttcagtcctgggtgctcatagccaagcagccctcagagctgtgggtatgcactttgtggctgtttagacgtgggtaggaaaaaataatgttgccatcgatgtaaccagtatgtgtggctctgtgtagaaatgcatactgcccgtgtgcatttatgtctgttgtactatacatagatttgcatgcatgtatgaaacatgatgtatatgtgtccttctatctgtgtacctaggaggatgtatacttttctctgtgtatattaagtttgaatcactgtggatacatgtagaatattatgtgggtttttttgcttttttgttttttttgagacagagtcttgctctgtcgcccaggctggagtggagtggcatgatctcagctcactccagcctctgcctcccgggttcaagcgattctcttgccccagcctcccaagtagctggaattacaggcacgcatcatgccccgctaattttttgtatctttagtagagatggggtttccccatgttggccaggttggtctcaaactcctgacctcatgatctgccctcctcggcttcccaaagttgggattacaggcatgagccaccacgcccagcctgcttttattatacatacatgtaaacagcgtgcacatgtgctcagctgtgactttctatatatggctctagttgtttatatacagatatatggatatgtatatgtgagataatgtgtttatggaaggagggtatcggtttgctgccttaggctacaaggaaagaaaaagaaaagaaagaaaagaaaagaaaaaagaaaagagaccttgaacaataaatcaagttaatatctctcatgactagaattccagagatgggaagggaggactctcaagttgactgattgtgtggatcagtaacggcattagaggccctgggtcatttccacttctccactctgcttaattctgcatcctcaaggtcacgaaatggctgcagcatttccataccccacactctcacattacagaatccaatgacaggtaaatgagtcttcacttctgagatgactttcttaagaataaggaaaatttcacagaagccccaagccaacttctttccaaatgtcattggctagaacgtggtcacatagcccaaaggtaaaccaatctccatcagagggactaagaccaccagggttggcttagactaatgaaggtccctctcctggagcagggttggagtcagcctttcagaaaacaaggttgctaggagaaatgggcatctgacagagttcatcaggaagggggaagccagcagcacctgtgataaaggagtgtgcacacttgtgcaggcatgtctgtttataagtgtacacgactttgaacatgtatgaacatgcaaatatgtaatgtgtgggggtatttcagttgcttttttttttttttttttttttgagatgaagtcttgctctgtcacccaggctaaagtgcagtggtgcgatctcggctcactgcaacctctgcttcctgctgagagagcaaatcctggccaagatgacaatctaatcattaatggtatcttgtctttgactgggaggccttgggtcccatgccagatggaagactcggcccttatcataactctgccaaaaccacaatactggcagtgggagacgagactaccacatatattttttataattctctgagaaactttcagttttgggcttctctatctgaggcaccactggtccccaaaaagccaatggaaaaccttagctgttacgccccctttctttccaacccccagaccatccctagctatggagctggagacctcgggacagtatttctcagaaagcaggaagcctgagctcaaggctgctagcagggtgaggcttcctaccttggataggccctgagcacttggcttctttccctctccacagcagtgtgtttcccagtaaagaaaataggatgcggccgtgcgcagtgacttacacctgtaatcccagcactttgggaggccgaggcgggtggatcacctgaggtaaggagttcgagaccagcctgcccaatatggcgaaaccccgtctctactaaaaatacaaaaaattagtcgggcttggtggcgggcgcctgtaa

SEQ ID NO: 34874 - DNA, 2300 bp, Homo sapien
cagggactgtcccttccttcttgcttcctggtgctatgtgctatctggaggcctggtggtggagctttttcatcctttctatgagttactccatacgtttccaaaaattttattttttggtttgtcaccaagagtccgtgtctgctacttagatctgtaagagctttggctgatgcctgagccgaccaacaagtatgtaaaggcccaggtatagacactgcacagttataggccctgccctgcacaggccaaacagaaacataaggcaggcttcctgccttccagctgcttatatctcagatagaaaaacaacaacaacaatttcatcctgtgccttcctatgcaagttctttttttttttttttttttttgagatgcagtctccctcttatcgcccaggctgtagtgcaatggtgtgatctcagctcactgtaacctccgcctcctgggttcaagctattctcctgcctcagcttcctgagtagctgggattacaggcgcctgccaccacacaactggctaatttctttttcttttttgagatggagtctctctctgttgcccaggctggagtgcagtgtcacaatctcggctcactgcaacctctggctcctgggttcaagcgattctcctgcctcagcctcccaagtagctgggactacaggcacccgccaccatgcccagctaattttttgtatttttactagagacagggttttaccatgttagccaggttggtctccatctcctgacctcatgacctgcccatctcagcctcccaaagtgctgggatttcaggcatgagcttctgcgtctggccctacaactggctaatttttatttttattttttggagacggagtctcactctgtcaaccaggttagactgcagtggcacgatctccgctcactgcaagctccgcctcccaggttcacgccattctcctgcctcagcctcctgagtagatgggactacaggcacccaccaccacgcctggctaatttttttgtatttttagtagagacagggtttcaccgtgttagccaggctggtctcgatctcctgaccttgtgagccgcctgcctcagcctcccaaagtgttgggattacaggtgtgagccaccgtgcccggccacaactggctaattttaaaaatatttttggtagagacagggtttcagcatgttggccaggctggttttgaactgctgacctcaagtgatctgcccgcctcggcctcccaaagtgctaggattacaggtgtgagccactacgtccagccctcctatgcaagttctaagtggaaaagagccaggatgggatggattgggaggaggaaagatttcatagaaggcacatgagctgggtagaatctttggggagaggtaactgtcacggacactctttgggcacctatccagcccacagtcccttcttcaagaactgtccacccagagcagttggccctcacggtcgagatggttggtaccacatgacgcttttggtgggatcaagcatctgtacccttttctatgtttagagaactttccactacatggggcccaacgaaaggtgggcccaccttctagtacaaagctgaaaaggccagtactcatgtcccgtttgtcccatcgcccgatggcaatgagggtgcatggacatgaggtgggctcagcctctgcagctcatgatacaaataagcagggacaagagaatccattctggtggtggtggccatattctatgcccagggaaatggtggctgcagggtccgcatgcagtgctacccttgataggggtgcaaattgcccagtccagcctttggcagcagaatccttacaaaatcatttctgtgatgtgattgtggctgtggttctagctgtttgtcctgtcctgtctctgtctgttttccaagcctgaaaagtctgtgatccagtcgatatccttttgataaatttcttttttgctcaaatcagtttccattgcttgcaattaagagcgctgctatgaggagctctgcctccctgcacagagctgattggaccagagatgcccacttgactcaggataggccaatcagattatttctcttctgactcaggttctgagagctgtgttgtctgcgtgcacatgggtgagccggaaaggagacctgcagagaatgaaacagacacataaaggaaaggtatggggtagaagaagggagggaagggttcctgacgtttttcagattctggttctagttcctcatgaacctagactttgtgtcctatccctgggctccttgagatccttctgc

SEQ ID NO: 34875 - DNA, 2300 bp, Homo sapien
tttgagaccagcctggccaacacagtgaaaccttgtctctactaaaaattagctaagtgtggtggcaagcacctgtagtcccagctactagggaggctgaggcaggagaatcgcttaaacctgggagcggaggttgccgtgagccaagattgtaccactgcactttggcctcggcaacggagggagacttcacttcaaaaaaaaaaaaaaaaaaggcatggtggcatgtacttgtagtcccagctgtttgggaggctgatttgggaggatcactggagcctgggaggttaaggctgcagtgagctgagatcacacacggcactccagcctgggcgacaaagagagaccctgtctcaggaaaaaagaaaaggaaagaaaaagcctagaaggagaggtaccaaactactatcacaggccacctctgacaggactctcacttgctctgaattatttgaaatttttatatatataacttaaaaaaatccatgacgtgtgtgtgtgtgtgtgtgtgtgtgtgtgtgtctgtctgtctgtctgtctgcctgttagactaaagtaagagtcctggctggagttagaaattccaagattggagattaaagcctggtaaaatgtggcagagttggtttttcatcagttcagagaccgcttagtcccaggtctgggagtcagcaactgtattgaattcagctttagatggaaatgaaggagattcatggagagcaagcctgggaaaaggaaatagacgtgcagaggtttcctgaattaataataataattggccgggtgtggtggctcacgtctgtaatcccagcactttgggaggctgaggcaggcggatcacttgaggttgggagtttgagaccagcctaagcaacgtggagaaaccccgtctctactaaaaatacaaaattagctgggtgtggtggtgcatgcctgtaatcccagctactctggaggctgaggcaggagaattgcttgaacccgggaggcggaggttgcagtgagccgagatcacacctttgcactccagcctgggaaacaagagtgaaactccatctcaaaaataaataaatacataataatcacgagagcctttgcagagtgttttatactttgcactgtcaattttgcccaatgcagaggacattctcacaagatgggtaggccggagtgatcacggaggagatagagtccctgcatgtgaagtggtactgagagacacagcaggaaatggaagtcaagattctgaacccctaaccccttccagctctgaagcttgaacaaaataaaactcatccagcatccagcccagtgcctggtgcacaggcatcttcaaggcacctggcaccttctcctccaggtgcgctgcctaggcccatgggtggctgctttactctggttgcattatctgcacccttaggagcatctgttctccttcaagtttgctttgctccagctaaactcattgtttcctttcatcatggccctttccatcttcgtcacactgttccctcgtcctagaatatcgtctccctttgttctcagcctcctccaaccttcctgcttctctacacatccaagtcctattggtcctccaagacgggtgccaaatgccacctcctccccaaacatgcactagccctgcgctggacaccattgctccttccccatgctccaggtcagccatctgcttttctcctggggcacatcacatcctgcttacacaagaactctctgcaggtgtgtgcttgtctctggactaaaccaaaggctcttttgggaaaggtgtgtgtctcgttcatctgtgtttcttcagtgctggccctgcatgcagcaagtgctcaagtgctttggctgcagagttagagggtgcaagagtgatgagagatggtgagagcatgggttgagggcagggcatgcgggaacggagggagagatgggcagagaggtgatgactcctcaaacccgttgccatcctgaccctgctggcaatggggtgacagcacttccccagggtgaataacctcggggctctgtccctccaggtcctgcccacatcataaaacagcaagtgcttcctcttcaggacaggagggagaagaagtggggtgacttaggggctgagcctcagcaactgggagagtttataagctgggatagcagacccctcagcaccacccattctcctcatccctctgctctctggcctccagcctcccagcagcatggctttcaccggcaagttcgagatggagagtgagaagaattatgatgagttcatgaagctccttggtgag

SEQ ID NO: 34876 - DNA, 2300 bp, Homo sapien
cttgcttcagtgctttgcatacattatctcatttgaacctcacagcaaccccacaccaaaatcacctccattaatcatattttacaaaagaggaaaatgatgctgtaacttacccaaggttgcgcttatttttttttttcctttttgtggagaacggggtctcgctatattgcccaggtaggtctcgaactcctgggctcaagctatcctcccacctctacctccctgagagctgggattacaggcgtgagccaccacacccagctgtaacttacccaaggttattgctaggattttattttattttttatttttattttttgagacggaggcttgctctgtcacccaggctggagtgtagtggcacgatcttggctcactgcaagctccgcctcccaggttcaagcgattctcctgcctcagcctcccgagtagctgggattacaggcgcccgccaccacgcctggctaattttttgtatttttagtagagttggggtttcaccgtgtcagccaggatggtctcgatctcctgacctcgtgatctgcccctctcggcctcccaaagtgctgggattacaggcgtgaaccactgcacccggccaattttttaaatttttttagagatggggtctcgccatgttgctcaggctcgtctcaaactcctgggattacaagtgagagctaccatgccctgctcattgctaggatttgaaccttgggagtctgactgaatgatcgtttgtatcaccctgttagcaccctgactgatactttattttttaaatttgttgttgttgtttagctgccctatgaactgatctttaaaaggcaaaagtggaagtaattgaaaatcatgaaaaaaaatttttttttttttgagatgaagtcttgccctgtcgcccaggctggagtgcaatggctcgatctcagctcactgcaacctccacctcccgggttcaagcgattctcctgcctcagcctcccaagtagctgggattacaggcgcccaccaccacgcgtggctaattttttgtatctttagtagagatgggggtttcaccatgttggccaggctggtctcgaactcctgacctcgtgatccacctgccttggcctcccaaagtgctgggattacagatgtgagccactgcgcccagcaaaaatcatgaacaatttaagacaacagagtaataaactgaaaatccagtgtcattcaggaaaactgcagaaatttcaactgtttgcacatatttagcaccagcttttcctcgtggccagatatcttagttggacattaagattcctcagtcaacctaagtgccaattttagttataaatatcaaagtcttacaaccactcattcagtagattttcactgagtgcctactatgggccaggcattgttacaattaataagtagctttaagtcataccccaaaacggaagcctttgaaatagtgtgtcattctcttataataaccaaagaaaggacaaatgttttgcagttctatttgtagaacatcagcaagctccttgctgctccctgggagccgtggacagtattttgaaaacactgttctaggctgctatcagaaatctcagactggtctgagcgtggtggctcacacctgtaatcccagcactttgggaggctgaggcaggaggattgcttgagctcaggagttcgataccagcctgaattacatgctgaaaccctatctctcaaaaaaatacgaaaattagccagatgtgtttgtacatgcctgtagtcccagctactcaaaaggctgaggtagtaggatctcttgggcctgggaagttgaggctgcagtgagctgtgatctcaccactgcactccagcctgggcaacagagcgagaccctgtctcaacaaaaaataaatcccagaccaagagccaaggttaagattcaaaaatggaacttcacagtttctaattttccatcctatttgtagggcagcgatgaaaagccttgaaagcgattcatttgtccatccattctcagggtgggcctgggattccaaggggaggatttggatgctgactccctccgtggctttctttcagatcacatattctacaaattccagccttctgtggtcgctgcggcctgtgttggggcctccaggatttgcctgcagctttctccctactggaccagagacctgcagaggatctcaagctattccctggagcacctcagcacgtgtattgaaatcctgctggtgtaagtttctcccctgaatcctgtgtttctgaaatagtgaggttcctcttgc

SEQ ID NO: 34877 - DNA, 2300 bp, Homo sapien
gagctgccaaagccaatagagccagtcggccagagcctcaaccctgggatttccagccatgcaggaggctcttcctctctgggcagctttgacctcgcgttggcctgcctgagttgttcttgtgtgcaagacaagaaagtgtgtacttcggacacagcaccattgcaggctgagtgactgggctccggaaagggatggaatgtgtgcttgctgtaaactgcatggtgcggggctggtagtgcctctgcccttcactgtcttgtacatttccaatcactagactcctctgcatcaaagaccagagctctgtgtcaggtcgtcgttacccaccgagtgggctgctgcaaggcttgccgagaagggagcaaccctggcttgctgagacgtggttgattcattctgcagtgacgtcttttgagccgtcctcaggaatgtgttgtatctactgtggagcagcctgtggtggttacttccttatctcccctaagcagcatgagagatgggaactgggtcagaggcacttgcagctgggagcaggtgcgtgcatgtgttgtttgcccttcccttcgtgagcactgatgtgtgctttgaggtcagctgggccgccccaatgcctcttttggcatttacttagtggcagctccacaccccatgaggctggccttggggtcatgggtgaacagaccgaggccaggcccttgaaggcctcaccacctgatgtgggagtcgtacagtacagggggctggtgtggagggcgtcttctgagaggcagggactccaggtgaaggacaggtcagggttggctgagtgaggaggggatggggaagggtgctccaggcccagggggctgtgtcaatgaaggcttataggcaagaactgccaaggacagggtccacggccacctgtggggtggttttcccagagtgaggaacattgaggctggagaggcccacagtctgcagagcctcacgcagtggaagctgtcatgcccccccaccagcccctgagtcttgaccctcagggcacaaggacctcccattgttccctgagagcatccacaactgatgactgccggggttgctatgtaaatgcctctgctctttaacccgtgggtaggataacctgaggcctgtcttaggctgtttctcagaattcctcagtaggattaagctcgggttgtccacagtggtgactcgcttgtgtccttttgggctttcttccctttcctgttctcgtcccccacctaccgatctttcctgggcttaccttccaagacctggaaaccagagggaacccacactaagaccccgtttacacagtttgaactcaatagccaggatagcgggaagccattgaagagcttttctacacgtggagggacagggccaggtttgcgtggccatgctgactctagccaggaggttggattggttagggccagatggagagtagggagggcaccttattccccagcccctggctgctgctgctgaccgctatcggctgctttgtgttccagaggcttgtctgagcatttggtttgcattttcccattgactctaacaaaagccttatgaagtataggttccatcttacagatgaggaaactgagtcacagagaggttgagacacctagccatgatcccccagtgggaagtgatggcttgtggattcaagcctaggtttgacagatctggaatgtgtgctcctattcctccgcagtctggcctgtctgctttctgtcttctttgccagcaatgtccaggcactgtaaggtgggccgttagcttcctgggttcaggtaaatgtcttccagtaacccctgcttcccctgctccccgacaggtaagttcgaggatcgggaagaccacgtccccaagttggagcaaataaacagcacgaggatcctgagcagccagaacttcaccctcaccaagaaggagctgctgagcacagagctgctgctcctggaggccttcagctggaacctctgcctgcccacgcctgcccacttcctggactactacctcttggcctccgtcagccagaaggaccaccactgccacacctggcccaccacctgcccccgcaagaccaaagagtgcctcaaggagtatgcccattacttcctagaggtcaccctgcaaggtgacagctgggacccgatggcaggacctcccaccccttccccaccacccaggggtcggggtcaggcggctctaaaaggcatgtccatccagatcaggccttctcactggggcctgtgcacccagatcactcttaactttgcaggcagtaa

SEQ ID NO: 34878 - DNA, 2300 bp, Homo sapien
aaatattttctcaaatttgtcgtttgcctttttggcaatgataattgatgtatctagatcctgcatatttattcaaatttgtctactcaccttgcctttggtttcttcccatgtcttagtatctaggccttcccctccgtataattcgtgtatgttttcttcttatcctcttgtgatttgcttgtttgtagttctctgagttcttatatttattttggtgatatttaaacaagtccttagttttacttttttcccccaacctaatttattaaataatttagccgtttatacttgtcccaacaaagtgaaatgccacatttatcatacagtgaatttttaaatatattaaattttcctagactttcagttattccactgatgcttaatccatccattcttgtgtgaacactacactgttttaactatagtgttgcaatatgctttaagatttgataatacaggtctgtccccccagtttttttgttcgtttgtttgttgagacggagtttcactcttgttgcccaagctggagtgcagtggcacgatctcggctcactgcaacctccgcctcccagatgcaagtgactctcctgcctcagcctaccaagtagctgggattacaggcgtgcaccaccacactcggctaattttttgtatttttagtagaaacagggtttcaccatgttagccagtttggtctcaaactcctgacctcaggtgatctgcctgcccttggcctcccaaagtgttgggattacaggcgtgagccaccgcgccccgccatccccccatttttaaaatataaatttcttagcttttctcgcagatattctcccatttgaaggttagaaaacatgttaagtgccccctcctccaatctacccacaaccattaaaattttattaaatagagtaatttgggttaagttggtgtttgtgcctctattccttcaagccttctttattatgtttcaacctttgtaatgtcttcattaagagcctgcacatttattcagtttatttttaggtatcttacacttttaaaatggttcgtttgttttacattaaaactgctcttcaaggtccaattgaagcttatcaaagctgatttaatttttttttcccaggtgtgtctttatgtgcaggaaagcagtcagaaactaaaggctcttcagtcacagttgtttactgagtgttcacttaatacctggtgtagtgattatccctttacacgcattatctcctttaattttcagcaggttggtttaacttttatttccattttacacacgaggctctgagtttgaggaacttgacaaaaatcacccagttggtaagtggatttgattccaaatttgtgaatctccaaaactatcacaaaaatcaatcagccaagaaggatagcccaatgctatgccatcagatgggctgactcaaaaggatgactttccaaaagcaagcaattgaattaaaaagacaatgttttccatccaccggacccggcaaaaaaagactggttttcctccaatgtgaggcatagttcatattctgcaggagcacaataataccagtgacttaggctcctttagaattagggactcgtgggtgaacaagggtggtttttctgcagctttcactggaattgtccgtttggaaatctacctccccatggcagggcgggtttcaaagaagaggagaacaaacaaaaaacaaaaacaggaaaaaaaaaaaaagagagagagaaagaaaaacaggtggaaccgacgtaaggatggctagagcagtgcgcgcggaaggcagaactttctgggggcgtcctgtccgcacgtttcacgcgtggtgcgcgcaggtggcgccgcggtccctttgctccctgcgcaagccggaggggtgcccagaaggctaccactagcctcagcgaaggtgagagagaagctttccgccgaagcgagggaggagggcgggcaggaagcggagccagagctggcaaagaaaggctccaattcccagccccccgccccgcggggcgcgggggcgccggcagcgcatgcgcgaggcccggcccccaattcccccagcgagggagggaggcccccggcggccgggagcctgcgagccgcggcgggacccgagcgcacgcaggggcgcggcgacggcgggggctagtcgggctgcggaggcggccgtcgggagtgcggagcgcctcggacgagggtccaaccgccggcaggcaccagagggcacggctggctcggcactgggaggggcccggcgctcgcagccccccacgcccagagagga

SEQ ID NO: 34879 - DNA, 2300 bp, Homo sapien
aatttggctattgtctctcctgatttctgggaaggtcagataaacaacttagttttggctgggtgacacggaacttcagcatgactgatcccattttggtttattcagttgggcctaacgcaggagttcagtctaaaccaatggcctcctacacattttatttaacagcacttactgaggacctttatatgccaggctctgttctgggccctggagataaagcagtgaacaagacagagaaggattcctgccttcgtggaacttacattctaatacagagactggcaataaaccaagtaaacataaaataaaatggggttagatggtcaaagtgctacggagagaaaataaagtaggggagaaaatgggggtgctggttaagggtggattacagctttatgggggtggttagggaagctgttactgcaaaggcaacatttgagtacagtccttttagaaagtgagatgagaatatatgagggtaggggtggaaggtagcagggagcatttcaggcagtggaaatatctgaacctgaagcaagagtaagcctggtgggttgaaggaatagccaagaggccaccatggctagagtccttggtcagagagatcatggatggcatttatggaccattgacctgacggtggtccctggagttttgctgttgtctttttttttttttttttttaagatggagtcttgctctgtcgcccaggctggagtgcagtgatcttggctccccgcaacctccacctcccgtgttcaagtaattctcctgcctcagcctcctgagtagctgggattacaggcacctgccaccatgtccagataatttttgtcctttttgtagagaaggggttttgccatgttgcccaggctggtctcaaactccagacctcaagtgatccacccacctcagcctcccaaagtgctgggattacagggcatgagccaccttgcccagccccctggagtgtcttgtacaataaaacactcacatgtaaacaggaaataaatgtgaactcaagatccccctgcagagatgctgattgtgtgggtcagaatctgaccttgtcctgaagtaggtttcatagtgagtaacaagaaaaggggggcagggtaggaaacagctcaagagaaatgcatatctctgaacaaactataaataagaaataatcccccagagtaggatggggatgcttttcctgggctttttctgctcaggttcggtgaggtgatggtggagatcttagcaacacacaggagtaggaagtggaacatcctcactcaggctgcagcccttctcacttgccctcatcggccctagggtccagacactccgaaatgctttacagacaaccccacactttaacaaattgaatcctcacagcaacctcatgagccaggtcctgtcttctttgttacattttaaatcaacaccatgtaaaagaaatgctttcaattttaaaatttgtctgttaaaagacccttcaaatggattaatttattaattaagacacattctcaatagcagaaatgccaaaaaatcaataataggattgaggaaattgcaaatgggcatccatttcatagataatgaaattgaggctcctgcagttggaattaaaccatcaggggcttgaacctgaaactgttccagccccaactccctcattttaataactggcaactccatccacccaggtgctcggctcaaaaatgtagaaataattccctccaccacagcgttgtcacagagggtttgtcttagtcctaaattagcgggaccttgaattggcagatggcacctcctactataactcccatctgttgatttcttgatccatggcccagctcgtgaattttgctgatgtgttttaatctttcgaatatatgtgattttgacattctccttattaacatctctatttgtatgaacataaaaataaaatgtttttctcagccaaatctttgaatcatattgaagcttgaggaaaatgggccgtggccttgagtacctggaacacgctgataaagttgatccatttggttgtgtgtttccaattagtcaaccacagcttgcaacttggcagatatgagtaacagatgaaaaaacactttctgtgtcagcactaatggataactgaaagcaagtcgacaaagatttggaaaatgaggcatacgtctaaaagaaaaccacaatattatgaggctgaaatggtactgaaatattacaaacacttggaggagtaagtaaatcttaatgtatttaaattgaagaacgtgtttggatgtgttttg

SEQ ID NO: 34880 - DNA, 2300 bp, Homo sapien
gcactccagcctaggcaacagagcaagactccatcttaaacaaacaaacaaacaaatgttcgtagactgaattcaagcagagagtaaagacagagagaggctagggagaggaagttctaagccccattctagcttgacacagttcctgcagctcgtggaactgccaccggacaagtattttggattgcatgctacatgaagccatcaccactgcaaggaaccataggacagggacccaggaactctgctaggcttcaggaaacctaggttccaggtatccttcaaaagttggaaaaacatgtgcccccattcattcaatcagtagtgtttattaaatgtttcacactaccaggtatagcagcactgcctttcttaacttttcattaaccttttttttttaaccaatgagagcatgccagtgatttcaacctctgtcatgatggagccacatggataacacacagatattaccactctactctaggagaggggctttcctgagccctttagattctgaatggcctccaggcattctaagcagtttcctcacctttccaattgctgacacatctgacccaagaggcggtggatggaagtttcctttccagccatctgtgtatcaacaccctaaactccactccacatgttatcattccttcattttttgagctcacacttcccctacattcagacaagtctcagtcatctctcagggttcacctgaaacatcagtttcccaggccttcccctgactgcccagtttatactttaagcttttcttttctataacactcatttcacttgtaaccacttgtgtcatccccagctggaggactctaagtttcatgagggtaggcatcaagcctatttgtttccctctatgtccccagcaccttgcttggggactgacacacaatggatgcttattaaatatttgttgaatgaatgtttgttaagcctacaaactttctttctcaaatagtatttatgtgatattagtaataattccctacatagttcaatggcttaccaaacatctttatgagttagtgtcccaactttggggtaaaggcagtgcaggtaatattattctcccattttttttagaaaataaaacaccatctgtgagattatctgacttgattaaggtggtggatacaacattagaattcaaatgcatatctgtattaaaattctgactgtaaattttgtgtcacttaccagctgttaaccagatgctctggctgtgcagagtgaaatatgggtagctagtggaagagagcagtggaaggaacagggagaagcaaaagccaggccttggaggatttcctttcctccagtgcctgcttgattcccaaataggattgctttgcctatcctgggagctgagaccctccataagtctctcaatgacttgaggctgggccagagtgagtgagaccagtgaatcctcaccttctggggagaagagaaatgagagctggtacacaggggaactcacccacactagtgtgtatgtgcacactcacatccggacaaaatccacaccaaggcatgcatagaaatcaacacatagaatgagccactgcacagtcatacacacatttaaacatacaccccacatacagatgtcaaaccaacacacagaatgagcccctgcacagtcacacacacatttaaacatgcaccccacatacagatgtctagccactatcgtgtacatccaaccactgatgtgccctccagttttacaccaagctgccatcttggacatgtgcatgcatgtgtacatacaccgaacagccctgatgaaaatttggataaacgcacgtacgcacacacacaactaaacacatccctatgatttatcatcacactcaagtacatgcacacctttgcaaacgcgtgggaaacaatcactctgatcactctggcgcacaaaacctccaaatacgctaacaagctctacaaacgcagagatgcatcgacacacccgagttgtcatcagcactgcaagttttttccaaacagctgctaaaaagagaatgctgcgctgcgggccagcccacgtgaccgggaggaaggctctcccgcccatgacgggatgggaaaactatgcctggggccgacgctctgcccggctgctgccgctgaggaaagccgggacgcggagccccgccgagagcttctttgctccggacgcccctggacgtggcgggcagccgcgagggtgagtgtcccgcaccgcggtcgggcgggggcggcaagtgcgcgcggggaggaggaggaggaggactcgc

SEQ ID NO: 34881 - DNA, 2300 bp, Homo sapien
gcagctgttactttgtttgtaaaatttgcaaaaaaacaaaacctgaagttggtttattgaaagaattataaggatagcttctagggatattagtaatagattgccatgatcctgaagcctcttctcagaacactgtgaagataatactgacagtagaatcagtgaaaacagcctaacaaaacctctgacatcagtatatcaacttttaacagcccactcactggcttttctaaactaccaaaaaccacctgtaggatactgcattaagtcagcatctcagaaacagtggtgtgagtaactgagtcaaattgtcaagtactttggatatacatagtgtcgagctttagattggtatgaaattaaacagcaatgcaaatagatttaattcctatttactttaagaatgaaaaacaatgttcattttcctacctaaacagggtggttcaacataaaggctgatgttgtgtccgttttgtattttatcttttgttaaagatacataaatgacaatacttaactgtgagtggtttgtagcattatttctaatatttggcagaaaagttgtttatgggacagggaggggaacctggattagcttctgtgagtttaagaaaatttcagcatcttgtcacctaacctttctggacctctttccctcttctatgaggcctggtttacttagatttaggaagaattctgtaatatccagaatcatgtcttctgttttattttggaaaagtaatgcctagccagcctggccaacatagcagagccctgtctctatgaaaaatacgaaaattagctgggcatggtggcacacgcctataatcccagctactcaggaggctgaggcatgagaattgcttgaacccggttcaagaagttacagtgagctgagattgcgccactgctctccagcctgggcaacagaatgagaccctgtctcaaaaaaaaaaaaaaaaaaaaaagaaaaaaacataatgcctaggacattactcagattgagctttgattttattatctcaataatagctgccttttgagtgcgagaattatgtactgtaattgtcataatgttatctccttcctcaaaagaatttcatggggtaatggatgatatgtaagttttacaaaaagcacatggaattaactccaagtaacctgcacaaatcctaaccgttggagtcaggacatgaagctagctgtgggattctgaagcctacccctttctctagtattgaaggccctaatttcttgaccaacaaggctggtctttagcagtttcttccatccacaaaaaacttcagcagcccgtcaatatttaccaggctcacccttaacacctgaaaatgatgtatctggcccacattcgttgacgccccaccactcctcacacacactagtcttatggaatgcttctaacaagattgtacaaaaatgagtaaactcattaagtttataagaattctggaaagacccccaaacaggaaagggctatattccggtttctttcaacaacgtttcctagtttctacttgggatttttctctaaaacctctctaatatgggtttatttctttgaaatcatgttgttgaaagaatttaaaataaaaatatttcagatatatgatgatgacatggaaattcatccctatgctcccacttacggaaagtgggatcagcttgcataggcaacagtacacaagctatggaagctcatcctccactgctgaaatgtctaatctgaaattacaatgagcttccttctctttttctctcatttattccacatggaacatggcaattatcaggcgttttatctccaagctcaaagcccgacacaatataaaagtttaagtgctctgcatgttaaaaagaactatgtggagtttacagccccttccattcctgaaattgtacagttcatcctctctggcagacacaataaacaaacgatttcttgttccacgtacacaatcttaaaaaaaaaattgggaagggctagcgcgcatgctcaatactcaagccagccagcccatcccacagccctttgctactgcgcctgcgtgtgggagacgcctctcccagtttgcgggcgggaagcaccctggagaacccggatggaacccgggcctggctgaggcggaggttgttgcggatgcttctctctccaggcgcaccgcagattcctgcccgggggttggacccgaggaaccgccgtctctactggttccgacggccagaggctgggccctaggctgagcggagagtgggactggagcctgaaacgggcgcctaaa

SEQ ID NO: 34882 - DNA, 2300 bp, Homo sapien
ataattgacatgatactaggataaccttctagaagtgtatttcagtgagtttgtatttctaaaatttttatgacatatcacttagccatcattcagaaaagccatgcagatttatgcttccatctatatagtatatatacatacacgtgtttctgcatctcctcactaatgctataatgtattctctttttttttaagtatttttaatctttgaagcctttatgaagggacatgatgaaataccacgttagtgtaggcattctgtggagttagaaagtattctgaccaattgctagcgaagaaaagtgtatccttgtgacaaggagtttggcctctccttaaattacaatactgtgtcacttgtagatttttttcattgcccaaacttcactttggctgtgaagacatgaacccagtaatattttctttttggacttactaggaaactagtaacgtttaatgaatacagtatgtctgaagactaacacatttagaaattaatatttattgggtactttggacatcttaatctttctgttaccattttgtggttataatcttaattaaaattctcttgaaatttgctggctttatagacagtgtaataaaattatttacaatggcactcttgtattcagaatttttgcgctcattataactgagaagtgtgagagtttgttcagttagaattaagttttattatcttaatacttatttataagttacatattatatattatataataaatatttattatatataatataaatataatatataataaaatatattttattatataaatatattatttataataagataataatactttattatcttaataataaagttaattggattaagtggaatgagattatgaatgatttttcttctttcatgatgcagaattctccaaaacaccagtggggagaagaggaaccaaattctcagatggtaatacatatttgctgtctctgagtatatgttaaatttttaaatttctgatggctaataataaataacactaataatagcttttaaagaacacaagtaaataagggtttggttaaagggaaaggggaaaaaaaagaactacatgctgctttcttttcttcttacttttccttcctctccctcttttaggaaaaagatcataatagtgaagatgaggatgaagataaatatgcagatgatattgacatgcctggacagaattttgactccaagagacgaattactgtccggaatctcaggattcgagaagatattgcaaaagtaagtcttgtcagcttaacatacatatttgaaaaatacttgtcttcccagcataaattttatcgactctgggtagcatatggataatatagtcagagtcattctaagataaggtttcattctgttttttctcttcacctgaaccccagaaatgtatacacacatttatttaattgatcatgttcaactcctccaactagtctgctgaaatctttttgctgtgagtaaacattaattctttaaatatttttttcttctagtatttgaggaatttagatccaaattctgcctactatgatccaaaaactagagcaatgagagagaatccttatgccaatgcaggaaagaatccagatgagtaagtatcaagttaaatgtacagattttaagatgagagaaagttaattgttttctgacctgaccatagatggtgttcattttaattcagattcagttttacgaattaattttccttaaatcaatctctgaaacattttctttatttgtatttacagagtgagttatgctggagataactttgttaggtacacaggagataccatttcaatggctcagacacagtgtaagtgtttcctctatgtcaagccattttatatcagctcataagacgtttgggattgtttaaagcttgttttcaagaagcatacagtaatgcagctgccaactcactaagatgttttgaattactctagtgtttgcatgggaagcctatgacaagggatctgaagtgcatctacaggcagatcctacaaagctagagctgttgtataagtccttcaaagtcaaaaaagaagatttcaaagaacagcagaaagaaagcatcctggaaaaggtaattttgaccaaaatgctaaagaagaacttctgttaaagagaagttactagttaataagcgttagttttacatttggaaaataatgcaaagagagccctcttaatccatgaagaatagtccttttcttcctttctcttagtcagatggtaattttgtatgagcttt

SEQ ID NO: 34883 - DNA, 2300 bp, Homo sapien
aataatatattaaccaaagttgcctggaagggcttggccagggagcaagagaatatcagagagataataaagatataaaaaaggaattccaatttcccagatatgaaaagaaattttgcttgaaaaagttgacgaccttttcctgtttctatagtaaaatggaatacattgaacaactacaagatgaagatataaattaaaacataaggctgacctgtgtcattcaaactccgcttcccacagttcaccatatatgcattttaagctgcagatcagctgagagagaggagttgattccatattactctttcacgaaaggcttgacactatacctgacatagacatggttctcaatatatgccagttcatcatctctttttccctggcatttcaggaccaatattgattgaatgattcattcattcacaaatatttattgaatacctattaaatgctggacattatactaggttataagaaaagagcctaacttaaggtgaagaaaagaggaaagacagaaaaatatgcatacctttattgtcccttcactgttctttttcctttatccccatcctttatttcctcctgtatctcctaaattttacatcatcatattatattatcagcactcaaagtgttaatttttaagactaaatctgcacaacacctatagcttccaagtggggattctctatctacagaggttttgaggtgcaaggtttgtcttaggatgtcttctttttttcaccaacagaaagcattgtttctcctaaggtcatgcagcagctgtaaaccataaccaccctctctgaataaccactgttttcttactaatgatgccctcagaccagctttgctattcctattactggaaatactcaattgctaaaccaccctcactcataacagcacttagtccctaatcagtttctcccaatccttctttacaaacagcaacccatccagaaccaatcccggctttcctagaccttcctcagaaccctccagagggacctcaagtcttagaaaagattcaactgtcttgtcctgcgctttctgattcctcttcgagatgcgctctcctggtggttttggctaattaggccttaacactcctaagcaaatttcaggaatatttttaagtggaaaaaaacaaagcctgagtgattcatagactctattcactttcacgctagtctctgacactgtttcttcatctactgccctgtaaaagcaaaattaatatttatgttcctaaactccaggtattgcaaattcttaatacgaaaaaaatagattctattatgttgggctattttattgaggcaggaatggtagctacttttacttttacattcaaaaaggatacacgttatgggggggagggggagaacaaccagaatagaaagcacaaagaaaaaaaaaaatcacaagaaattctaccacgaaaattagtttattttccagtgttttatttcacatgtatacttttaaagaagggatgggatagcatagatactgtttctccaaaatggaaattgtcgtatttttttctaatgataacatgccttatgttctcacagcacctggtattcttttcatagcaacttttcacagctgctaaatctgaatagttgtttcggtgtctttcgcactctgatgtaaatctgagggaagacactgttcaccaaatccccagcatgttacacagcctggctactaattagtgccaagtttaactgctttttttttttttttaagctgatacgtcaccaacttccccattcatttcatagtcccctggtgaggcttaagctcttgtctgttctggtcttttttttttttttttaacttcctaaaattctccgattctaaaagaaagctcctaaatagaagccaaaaagtagccgcccaacttgaaactccccacaagccgggtaaatagcgcgatacgcagcagctagagttctcgcgtttcccacggcgcaggagcactggagggcccccctccgcccccggccccgccaggaaattagtgcgcatgtgccggtcatccggaagttaccgcagtggccgccggaattaggcgaaaagccggaagtaaacattacgagattggcttggattctgtcggatggacttggggctagctgcggcggggctgggtaagaaaatattgttagaacttgcgggcgacggggagttggggaacctgagaaaatgagtcgaaggctcctaattattggatatatcttcacgggggtgatgagccctcaggtgttgagggagcgaggacgggg

SEQ ID NO: 34884 - DNA, 2300 bp, Homo sapien
ctaattttcgtggtagaatttcttgtgatttttttttttctttgtgctttctattctggttgttctccccctcccccccataacgtgtatcctttttgaatgtaaaagtaaaagtagctaccattcctgcctcaataaaatagcccaacataatagaatctatttttttcgtattaagaatttgcaatacctggagtttaggaacataaatattaattttgcttttacagggcagtagatgaagaaacagtgtcagagactagcgtgaaagtgaatagagtctatgaatcactcaggctttgtttttttccacttaaaaatattcctgaaatttgcttaggagtgttaaggcctaattagccaaaaccaccaggagagcgcatctcgaagaggaatcagaaagcgcaggacaagacagttgaatcttttctaagacttgaggtccctctggagggttctgaggaaggtctaggaaagccgggattggttctggatgggttgctgtttgtaaagaaggattgggagaaactgattagggactaagtgctgttatgagtgagggtggtttagcaattgagtatttccagtaataggaatagcaaagctggtctgagggcatcattagtaagaaaacagtggttattcagagagggtggttatggtttacagctgctgcatgaccttaggagaaacaatgctttctgttggtgaaaaaaagaagacatcctaagacaaaccttgcacctcaaaacctctgtagatagagaatccccacttggaagctataggtgttgtgcagatttagtcttaaaaattaacactttgagtgctgataatataatatgatgatgtaaaatttaggagatacaggaggaaataaaggatggggataaaggaaaaagaacagtgaagggacaataaaggtatgcatatttttctgtctttcctcttttcttcaccttaagttaggctcttttcttataacctagtataatgtccagcatttaataggtattcaataaatatttgtgaatgaatgaatcattcaatcaatattggtcctgaaatgccagggaaaaagagatgatgaactggcatatattgagaaccatgtctatgtcaggtatagtgtcaagcctttcgtgaaagagtaatatggaatcaactcctctctctcagctgatctgcagcttaaaatgcatatatggtgaactgtgggaagcggagtttgaatgacacaggtcagccttatgttttaatttatatcttcatcttgtagttgttcaatgtattccattttactatagaaacaggaaaaggtcgtcaactttttcaagcaaaatttcttttcatatctgggaaattggaattccttttttatatctttattatctctctgatattctcttgctccctggccaagcccttccaggcaactttggttaatatattattgagatgttagaggtttaaaataaatcactatcaaaggatagaattttaagggaagactaaattatgtattcattagaatcataattttgttcctaagacagattcgtgatggtataatagaaacagtgtcttagcctgaagtattgaggatagtcctaagattagggaacgatcagttcgttcttaatcataagcataagagaatgactcaaacgctgctgtttgatctacctgtacttacatttcttcttaattttaaattcttctctgctagtattctttagacccaacattggttgtttcccctatttcttcaatatttctatttattttccatcctttttacagggtcatctaaataaaaatatcttaaagcaataaaccattgttattgagtcagtacctcagtccatgcagcttaataatatggagagcaaaaaaaaaaagcctctcgatttattttttaatattacacgatcctagttttttcttcccagaaaacgtgccacaaagtttgcaagaaagagcttttggggcggagccctggctgcttaggtcctttccattggttctacttggtgaccacgcccacggccccgcctcctgggcggaagagccaattgggccgcgagttgtggtttaaaccaggagtgcgccgcgtccgttcaccgcggcctcagatgaatgcggctgttaagacctgcgtgagtgaatgggagggtcgcgggtggttagttgagccggctccggcggggaaggaggcgggctgcggctgcggctggggctgaagctggggctggggttgggggactgcccggggcttagatggctccgagcccgtttga

SEQ ID NO: 34885 - DNA, 2300 bp, Homo sapien
attgataatattaattcaagatggattaaagacttaaatgttagacctaaaaccataaaaaccctagaagaaaacctagacaatgctattcaggacaaaggcatgggcaaagacttcatgactaaaacaccaaaggcaatggcaacaaaagccaaaattaacaaataggatctaattaaattaaagagctcctgaacagcaaaagaaactaccatcagagtgaacaggcaacctacagaatgggagaaaatttttgcaatctacccatctgacaaagggctaatatccagaatctacaaagaacttaaagaaatttacaggaaaaaaatcaaacaaccccatcaaaaagtgggcaaaggatatgaacagacacttctcacaagaagacatttatgcagccaacaaacacatgaaaaaatgctcatcatcactggccatcagagaaatataaatcaaaaccacaatgagataccatcttaaaccagctagaatggagatcattaaaaagtcaggaaacaacaggtgctagagaggatgtggagaatttggaatgcttttacactatcggtgggcgtgtaaactagttcaaccattgtggaagacagtgcggcgattcctcaaggatctagaactagaaataccatttgacccagacatcccattactgggtatatacccaaaggattataaatcatgcgactataaagacatatgcatatatatgtttattgcggcactattcacaatagcagagacctggaaccaacccaaatgtccatcaatgatagactggattaagaaaatgtggcacatatacaccatggaatactatgcagccataaaaacagatgagttcacatcctttgtagcgacatggatgaagctggaaaccatcattctcagcaaactatcacaaggacagaaaaccaaacatcacatgttctcactcataggtgggaagtgaacaatgaaaacacttggacacagggtgggggaacatcagacaccggggcctgtcgtggggtggggggatggaggagggatagcattaggagaaatacctaatgtaaatgacgagttaatgggtgtagccaaccaacatggcacacgtatacatatgtaacaaacctgcacgttgtgcacatgtaccctagaacttaaagtataataaaaataaatgaattgataatgctgttttctgccatgattttattaaaaagtgatgttcagagaagttgatatcaagaataaatttgaatcaaaatatgactacttttgatataatcaaaagtaatggaagaaaaaattgaaaaaggaaatactttctcactatatttcaaggcaaacaccagaaaaaaattaataagtttatttccatcaataagacttttataaccgtagtccgttcaaaccaatgtgatcaatgcttcatgccacagttcttagcacccttcatggaatacaacaattgataaacacaggtacaatgtatttttttcagttaggaagccacagttcaagtagtaatgatcctgactccactactaagtttggatgatcttgggtgagttattaaagatctcatttcagtctcctcatctctaagatcaggaatacacaccctatctaccacgcaggaatgttctgaggaacaaaggggaacttaaatgacctgtgagaaatagaaagcaccataccagcatgacgtattgtcattatctaccattatattagtattatttattatcttatgccatccttgtgtctatctccatcttgctgagctactttcactcccattcacaagcagtgtcttctattttggctgttaatttggttccaaattaatattcctttgatattatgtcaaatattgcagagaaatataaaaattggagaatagcttgtaaataatctctatggtagtagagttttatgactatcttactaaagaataaactgaaattgttaacatgcatttccaaggttgcttacaaatactgtattattatgcttctttataggagacctgtgaatccatcctcaattgtgcattggaagagctaaagcaatttcgtgaactacagaagccagaccgcaagctctttggattccgcttaccttccaagacaccatccatcacctcagaagctgtggttccagaagctggattggtcatcgatgggaagacattgaatgccatcttccagggaaagctagagaagaagtttctggaattgacccagtattgtcggtccgtcctgtgctgccgctccacgccactccagaagagtatgata

SEQ ID NO: 34886 - DNA, 2300 bp, Homo sapien
caacacaaatggtgggaagacactgagagtgaagaactgtcagcatctggtaatggatggacatgtggcactgagaggcaggaaggactcaaataagaattggcaatggccagacctgtgggagaggaaaacatgctggatgcaagactgcaatgaagctgcatcatcctttccccaggcatgtgaagattcttctggagtgggcttccttcccagaaaagactctcattctggcctttctcttccaggaaaaagatgtaactccagataaaaacctactgaccaaggttcgagatgctgccctgtggttggagaccttgtcagacagcagacctgccaaggcttccctctccaccacctcctccattgctgatttcttccttgccttaaccatctgcaactctgtcatggtgtccacaaccaccgagcccaggcagagggtaaggaccagcgatggctgggggaggagggtaaaggaggtagaggagtagaaggcagggtaggggcgaggggagaagttctgatcagggagacatgaaatttgggtcctagcaacagtgtcatttcatcacagtgaaacctagaataggtctcttaccctccctgggtctgtttcctcatttttaaataaaatggaaaaagatacatatgagctttctgtgtagctttcaaactttgtctatgtgtctgcaggtagacattaagagttagtgattactgagcacttggctttatgccaggctccatacccagcactttacctgtattatcatttaatcctctcaacccagcaactctatgaggcaggaccttagatttaacaagcgaagaaatagtagctcagaaaactcaaggtaatgaaggacatatggctcataaatggcagaaccatctatgcaattccataatggtttctagtaatattgtgctatattgctctctgtttttatatacgggttaaaaataatactgtgtgtaatgttcttcccatggaaaaaaatgcagctgaatggtcatgtatgtgaagttatactctgaaatctactgaaggtggatttgccttcaatcttccacagactcttagccaatcacccctgtgagctgtgagtcactgagagaataattaggtggtacaacttgcaactatgaaaccaagacaagaagtttcacccaggcactaaaccacaacctcccttcattatgcccagattccaaaccaccctgaaaatcacttcagcactgaaaagtcagcatgttatcagaagtcttcaggaagtttttggaggcagaaagctttatcttaaaaattaattcatttttaagaggggaagaagtaccatttggggaaagacagtaggcacctcccaattttcaagttaatgtgggagcttcagctggctgggagcttcagctggcaggtagctcaagagcccagcctctggagtcgaggagacctgggtttgagttccaactctactccctacacactgggtgatcatggccaatttatgtagactttttgtacctcaatgtcctcagccataagttgggttgatgatagcatcccacagaattattgggaggatgaaatgagataccgcactcaaagataaagcagaagcatttatagtgagagttcaggaaatgtgaacccttactatgagtttctgattctcatctccttttccttcctttctccacgctcacagtgggatgatcaaaagatagtggaaaatgaccattgtcaatgcttagaatttcagggctggaggaaaatatctggcttcacttattgcaaaagtaccttcatattccgcataagacaacttggtattatttccaacattgagagtaatattccactttccttctttggccacaaggtcaccatcaaaccctcaagcaaggctctggggacgtccctggagaagattcagcagctcttccagaagttgaagctattgagcctcagccagtcattctcatccactgcaccctctgacacagacctcggggagagcttaggggccaacgtggccaccacagactcggatgagagagatgatgcatctgtgtgcagtggaggtgactccactgatgacggtggctacaggagcagcatgtgggaccagggcgacatcctggagtctgggtcaggcacttccttggaggaggcattggaggccccagccacagacctggccaggcctgagttctgttacgaggctgagagccctgatgaggccgccctggtgcacgctgcccatgcctacagcttcacactagtgtcccggacacct

SEQ ID NO: 34887 - DNA, 2300 bp, Homo sapien
tttcattcaacaaatatttgtcaggttctatgctgtctcaggccataagctgggagctagagatacataaaaaaaatggagaggcagagagatactgtccttattgaatatattgtctagtaaaagagacagacattagttttttaattatataaattgatataaagttgtaactacaatagatacttctaaggagaggtatatggtgctattatagtgaataataaggaaatcttggcctagttaagaaagtcagggaattgaagtacaacatgaaagagagactgcattacctgagtgaaaagggatggacagaagtcagcagaatgttcctgcagacagacctgtacatgcaaaggcactgtggcaagagagagcaagatgcacgtggaaaacttgaaaacatcagcaactcttttgagataatgtatgagatcattttaaattaaaagttaaaatatgtgcttatatatcaccctcaatattgtaattattattataagtgaccatttactgagcaactgctatgctccagagccctctgctgtatatcatgcaaatattataaatcatgtaatatttatgggacccctttaaagtccataatactatccccattttgtgcaagaggaaataagctcaaaaaaatcacacaacgagtaaataacaggaacagaatttaaatctagatggttttccattcctgagaataatcatctccagtctcatccataagcatgacaaaacaaactttggggacttagggggaaagggtgagaaggggagaggaataaaagactacaaattgggtgcagagtatactgctcgggtgatggatgcaccaaaatctcacaaatcaccactaaagaacttactcatgtaaccaaacaccacctgttccccaataatctatggaaataataaatacatctagatgggtttggcttcaaatccattaccataatgtttgaggtgatactgaaagagaaggtttaattgatcaaggccaaacagtagggaagaaatgggggagaaagtacatttttcttctccatagtgtttattcacacttcgcttgcccctccagatgggctaacctctatttcctgttcctggtgattttgaactggatgccctccatggaagtcttccacagagaaatcaccatgttaccattggccattgtcctgttcgtcatcatgatcaaggatggcatggaggacttcaagagacaccgctttgataaagcaataaactgctccaacattcgaatttatgaaaggtaagaaaaaccatccctgtgttctctcttgcaaatgggttaggcaaactcatcagcatagcctcaggatgagtctcttttcttcgattttattttcctaaattatttaattcactgattctcaagggggggtgatttcgacccctagtgggcatttagtaatgtctgaagacatttttggttgtcatactgggagtagggggtactactgacatctagtgggtaaaatccgggggttctgctaaatagcctacgatacacaggacaccaccggggaacaattattaaccagtcaaaatgtcaatagtgctgaggctgagaaaacttgtttaagttgtataagcactcatattattaagcacacagatgcagtattattaaaggtgagttgaaagcttaagaattaaactctaggatggctggattatcttgggagactaagttcaggagaaactctttggaggatgtcaggcagtgtctcccaaaccaagaaaatgtctgccattttaaagcctcagttgcttgggttgaaaattcttgcttttagaaccaggtaggttttaggacccagagttggtacacctgttcttggctgcccagggtggaaaaggaagacacctgtaggtgacgtctacattccaacaggtggagtctcaaacaagtagaaggaagtggcctggtggatacacacctgttctctgcaggctctttccttgtcatgtttctcccctggggtttgcagcctggcttttcatttttagtatccttctgaaagaagagagaaaaattttcagcaaagaaggcaagtaaaagatgaaaattaaattatgagaattaaaaagacaacattgagcagagatgaaaaaggaagggaggaaaaggtggaaaagaaaagaagacaagaagcgagtagtggtctctaacttgctctttgaaggatggtctcacaaagagaaccccaacagacatcatcgtgggaatcaaatcaagaccagcaagtacaccgtgttgtccttcg

SEQ ID NO: 34888 - DNA, 2300 bp, Homo sapien
cattaggagaaatgccaaatgtaggtgacgggttgatgggtgcagcaaaccaccatggcacgtgtatacctatgtaacctgcatgttctgcatgtgtatcccagaactttaaagtataataaaaaataaaaattaccactaataacacttgcacagcttgtagaagatagtcttaagattatgaaatccatcctggttgtgtggtactggtgtcggggatgggagcaaaagcctctgtctaccattgcttctttaattgactagtttgggcagcaagaatacaaaagctagacatgacacactgtgtaaaaatcaggaatgaaaagcatgatgtggtcaataagaaatgcaaatacatacaaaaatgctaaattgccttagtgtagaaagattgcctgctggaaataggaactataagtaaaactctgtgagtgtgatttttaaaatatgatttattacaaaattccagcagccaaacaaaagaaagatagtccctctaataaaaactgaacatagcatttcttatctattatttgtttattagggttctaattagccagacagtgtcacttaatttcaacacattttataaataatttgccatatgtctgttagtatttacgatttccaggcagtttggaaaatgaacatatttgaggactctctattcattggttagcatgaaaacccaagggatgctacagacacatttgttcctaaattgcatgtgcctctctctttaccaggaaagtgataatgggaaagagctggtcttaggagaaagaccagtgatggaaaatatactagtcttaggagaaagacaatgtggtttgaggtcccatgttcaccaccaaattcctgtttggctttgagcaattgtattcacttctctgagcttcagcattctcctccatggcacaagggggcttcactaaataacctccagttacccactagtgcaatattctgcaatttaaccgtatctgtgattctagaccacactcgtccctagaagccagagcactctgagtgaagggaagtaaaggaacagggacttaagcattcttctctttagcagatggagaattttgaaatgccaactcgctcttttaaaaattctagactgtctaaagcataggcaaatttcatgttcttaaaaattcctagcttgtgtcttacacacacagcgatgcagattttagatggtgtgggtgtttcttctcttgtaaaatgtttcctatgtccatgtttcttcttggtattctgataagatctgtaggtacatacaaagttcacaattactctaccaaccaaccaaaatcttatgtaaagattttcatgaagttagtatgttcacttctttccaacaccttttattcctaagtttggtaatatttcttttttttactacccttaaaatcaacttactgctcattctaccttctcttttatttatggacccatcaataattatccatcaatacagcaacttgctcatgacatttatgccaattagttgagttgtaggtaacttaataaaaggattatacatgaaaatctcattttagggtatgaatcgaagctatcaataagcccattactaattctgattttctgtaagtttgcaccattcacataatctgccactataatatattggtcccactttccttattttgtataatcaaacagtaatcaataaaaactatgactactgcaaaatgagacttctgaagctttgagggcaaattcatcatcagcatgcatataaaagtcactgtagagagtcttttctttcttaagtgcccttgaaacccagcagctgaatcatatttcaggccccccaaagagaactgcaaggttataattgtctcacacttaattacatgcattaccaaaggtagatggacaaagtcattttgtaccatgcgtagagaataaaaatcaccatgaattttgatattgctggctcattgattcacaggaagtagaaatttatgcaagaaccatgtctaacaatgtaaatgttcagccaagtcgaagaacactgccttcactgttctgggactcggcctcacattcacagacttgctattcttctctttcactcttgggcctagcgaggcagcttatttttcctttttctttcattggtcacagttatttcttttcagtgtgtcatcttctctaagtttctgagggagtgttagcttgaggccttgccttgacataatcagatataatcagaaaaatgaaaaattccataggaaagagaactattttagccaaggtgtgcgaga

SEQ ID NO: 34889 - DNA, 2300 bp, Homo sapien
ctttccccataacataagaaaagaagactacagatgcaatttacattgtcagactagcgtggcaagacattagcacagcctataaccagagaaaaaagtccctcaaacccttaataaaaattagctggaaactatgtcacatttcaaatcgatgtaagtgcttttgtctctaagccagagggaaaaataaaaatatcagaaagagataacgtaattgggcttctgttaaatcaaaatgttctatgttgctgagctgtagtgtgaaagcttaaaaactgatggtgggcatggacataaagatgggaacaatagacactgggactactagaatggggagagaggaagggagataaggggtaaaaaaactattgggtactgtgctcactctcagagtgacaagatcattcataccccaaacctcagcatcatgcaaagtagccatgtaacaaatctgcacgtgtacccccgaatccataaagttgaaattatccaaatatattggtgataggtgcacaatctaaaaagagatcttgagcggcattcgtgatgactttggtctgcaatattttattaatatatctgtatacaaggctccacagttgagtcatccatcaagtcaaaaattatccactcttttgtgccatggtgacttttcttatcattcactcacaaatatttatggaccataacatgtgcagaacacagggtgagacactgtagaaggtcacaaagttaaatcacaggagagcaccctctccgtatgaagacaatgtgcatgtgagtcatgtcatctcaccacattgcggaacccactacctgtatcttcactagcagcttctacagtgaggagacaattgggacagagaaaataagagaaagagtcttgtagaaagccgaagaaaatattgcaatgagtcataagggacaaagtagctataatttgttgaagagaaatcaggagtgcattctaggcagcaaatccaaaggcccagattttgaatcagatgagtctttccctgatgaaaccatggcgaactgtttttttaaaagttctatttttaattaggaaacaaatgcaaagtaaaaataagacaatattgtccactgatcaaatttgcaatatgaaataattataatcagagctggcaaatcatgctctgaggttgtgtgtgatcggctacaactcttttttagtgagaatgggcaacatatatctatggcctaaaatctgtcataccctctaagataaaaatgccccttcttaaaagttgcatcaatgttgctaaatatatggaacttcattgtggaatttttttaaaatggagaaattacaaaaacccagatgtccaatagtaggaaatcagttaaattgtggtgcatccatatggtgactaaattatcatagagagaatgtttaataaggtaaaaaatactcataacaatggatgaaggtgatccaattttgctttttaaaatatttgcatgaaaaacatttagagatgtattcaccaaaatttaaaccaatgatggttctttgagttgtaaaattaaaggtaatttgtatttttttctttttattcatctgtcattttgaaattttttataatgaacaggtatcacttcagagaccagaaaaacattaaaagtattcagttaaccactaaagagagacattagatgggtaaaggtcagtggtttcccactgctcacagtatcaaggtcagatttgctcacccgggttggccgccacctgccaccccaatcccctctctcattatgcctctaccagctctctcagctctagccatgcaggtctccaggtcttttgttattttcctgctaccacagagccttaatatagtaaattgtattatttttttcaattgttcattcccacctgtgagggaaatggttgcacttccgtcaggagtaggccaaggcagccttttggtgcagcatgactcagcagctttggagtgcgggcacacaacccctccacacattatgtaaccattccatgtgaggtgcattaggtaatcacccatgaaagcttgtgcttggcttggagccactattgtcagtaaaaagtataattaccctgctaatgctgtatatatggcttacgttcaggctctcctgtgcccagagagagaataaagccatgttgaaaccgtccacaattgcttaagtgtttttccagctaccgccactcgcctgactccccttggacctcagttagaacctgacatttggcgccatgaacagatcctgaggtgagtgagcctttggtccccacagat

SEQ ID NO: 34890 - DNA, 2300 bp, Homo sapien
aaagcttcattgttctgattgtctttttgattctcttcccttgcagatggacccccatgagaacatcttactgagcactctcgagataaaaaatgaaatggccacatctgaggctgtgatgggacttggagaccccagaagcacaatgctagcctatgatgcctccagcatccagtatcggaaagctgggttgcccaggcatagttttggccgaaatgctctggaacgacatgtggcgcaaaagaaaagtcgcctgaggagacgcgcctcccaactgaaaatcaccatccctgacttgactgatgtgaatgccatagatcggtggtcccgcatattcttcccagtggttttttccttcttcaacatcgtctattggctttattatgtgaactaaaacatggcctcccactggaagcaaggactagattcctcctcaaaccagttgtacagcctgatgtaggacttggaaaacacatcaatccaggacaaaagtgacgctaaaataccttagttgctggcctatcctgtggtccatttcataccatttgggttgcttctgctaagtaatgaatacactaaggtccttgtggttttccagttaaaacgcaagtgatttttacacatggtggctagacagcctgagtgctccatgttgtctgtttagtatgcagcctactcagaggggaataatttggaagatattcttagaaggctcaacagcattgtcagtcatttggtcataaccagatactcctcatcttcctttttaaggtcggcatgctgttgagatggcattgtccttatgaaacattatctgtaatgccatgcaaacacattacttgaagatgatctatgattttcttactgagatgataatggtgtcatgggaagattattcccactggtttctaaaagattctcttgtgatttgagcaggctaggggaatcaagacagagactcaggaaaccgatttggccagtccctttgcttgagcacggagaatcaactatgatgtctttcattttggcatttagagatgaggagacttctggacaatatcatgcatggtggccaagaaaatttttgctaaacggctatttcctaggtggttaaagtaagagttaacaacacagagcagagtagaaaatcagaaacgacggttgtaacaaaaagcaagcaagcaagaaagcatgacccttatcagctccacacagcatctggtctatacatactgtgtctagtggcagagggtgagtaagagagattgtttttccaacatcactagcttttgacagcatacctaaagaggtttttatagtttaatcgaagataaccatgaaatacaaaaattagagaaatgagaattgtcttagatattcaggttagattcagagtcattcaaatatacaaatacagagcacaaactagcaaacagattgtttttctcagacgaagtcagctgtccctgcaatttttgtccctataattttatttcttaatttaatagagtatttcaagagaaggatttgttcatcactttaaaggattcatggtcctctccagctttttttttgcttccaaaattctgattatattcttaggagactggcaaagtaaggctttggagagattgagtgaactatattttcttatatgcaatgaaattcaccattgtatttttcaaagcaaataatacttcaaggagtatgaacacacagagagttaatttgtgcattcattggtttggggcttgattttcttaagagtgctttcattgtatatgttgcaatctgcctaatcaaggaaaatatgaaaactagtggaaaataataacaaagccacattaacatgataaatgttatgagcctcagttgatattgcagaaaaatatataactgttaatcaggcaggcatgatgtattttttttctatttttaagttatgccattgtgcttctttctacactaattggacataagcattcatatgttggacaagaggagaataagctaatatgtcttccttctatcaatataaggctcatattttgcttttcttatagaaaatagtgaattgctaaattttccttaaagttgaatttgattgaactttttcttggaggatgactttgctatttctattttgaaaacaaagaaagctcttctttttagagtaatatccctaattgtgcatagcagccagtatccacctgtgaataatgtatgttttcttgattccttgtttccttcatgatttagcagcttggaatatgatggagtactattgcccttgcattcca

SEQ ID NO: 34891 - DNA, 2300 bp, Homo sapien
tttgtatagctgagtgacactaaaccttgtttgttttcctgtacattcattatggcttattcattaaaagattactaatatttattaatcacagccaaatactacacctatatgtacctcattctagagcaatccagtggagagggtattcttttccttctcagttttccagaagaggaaactaaggcttagaggttaaatgacttgcctgagttacaaagttactaagtatttgacctgggttttgaacccaaagatttacctccggttcttttatgctctcagtttacactacacaattttacttgctgacatgcaagctattttaactctttgcccctctctttcttaactttctgtatatagtagacctttaatatatacttgtttcatcattccctgggccattattattattattattatcattatagatgggtgacagtatttgtggtttgttctgtctactgaattttgttctctcaacttacactgaagcgagcctaggtagaaggggctgatggtgcagaaagaaaaacgtgggtaactgagggtcagaaggaaaaccctattttgagatgtgttagaggttcgaggggaaggggagcattttaggacttcatcattttgttacttgagactaaactgctttaggaatcttctggacatcatgctgataatgccctaaccacccccccaaccccgatcctccccctacccatcattctactcagctggtgcaaaagattctcactgtgtataggagtaaagagaaaggaaaatcagcagttttccttggctatagttctacattctgaggtaacgctaaacccaagtaactgcagatgggagacttacagaccttcctcccccaccctcgtgtgtatgtgtgtgtgcgtgtgtgtgagtaagcgcgcgtctttggatgggctcctatgagcctgggagtctatagagcgccgcgcggtagatcagcagtatgttcatggtgctgggctttacctgttcctaacctagaaactcccttggtcggtgaaggaactcggctttcttttcctgtttatcatccatcccagaggagctgtcggattccccccttttaaagccctcccgcctccacacttcccccggagtcatccccacaaactacccccagatgaccctctgaccaaggtgggggaggggaaaggttatcagaaggtaagtgggtcaagagtgcagcacggaacaggaccctgaggagcccccagggctgccggggtcgcaagcctgtggagctacttccgccgcctgccgccaactctgcgggccggcgacccctcctctccgcagacaccggccgggtctagctcgtgcggtccgcgctcaactccacccgcagccgccgcgggctcctcgggcgccaggagcttgacccgccacagcaaagcgctggcagcgggcaaggtcgctgactcaggagacttcggagtgtaggctgtctagttcagtggttaggaacgctggctctgaagtccaatcctggtttcacctcatgccatctgagtgaccttgggcgagcttcttgacttcagtgagacaatttctgaatctataaaatggggacactgaagtgatagctaaacgctagaactgttgtcagaattaatgaatgcagcgctctggcacgaagtaggaactcacttaatagtgaccatgattggcagcagcagtgagaggctaagcattggggtccagaatagagatttgagctctggcctttccagttcttcacccagggtggggttgggggaggggtagcgggaacgtctactcttcccgcctcttccccagttccaagataaactcaggagtacccggagagccgctggtgtggactccggttccttcggacggccttgtgtccccagactcgtagcacctcacgccgcccgtggctcctctctttccctggagcggagggaagacttcttttgtgaattgagtatctccctcccccaatttccccaccccaagcttgctgcctcctccgggtcccggcggccacggcgaggcggcctgagcttcaggaggaagggaagaggcagcctctgggtgtgcgagtcccctgggcgcggggaagggaagaagaggacgaggtggcgcggagaccgcgggagaacacagtgcctccggaggtgaggggctcttcctcattttgcctgccttctagggaccgctccggcttcttgtatccagaggtacagcccctgaacagccgggagtccccgtcccctgtcccggacgaggggccgggggcg

SEQ ID NO: 34892 - DNA, 2300 bp, Homo sapien
tgaacaatgagaacacatgaacacaggaagaggaaaaacaacacatgctgtggcctgttggggatgtggggaaagggagagcatcaagttaagtagttaatgcatgcagggcttaatactaggtgatgggttgataggtgcagcacaacacaatggcacacgtttacctatgtaacaaacctgcacattctgcacatgtatcctggaactttaaattaaattaaatttaaaaaagaaaaaacaaaaacattcggtctgaaaaccctcacaaagctttctctctgatgacacaaatcagagatgagtggtaaacatttcgataggaaaaaaaaagaaacacagatctaaaaaagataacagggataaatatagggttctctggttgaaaaaaagttgtgattaatctgaagagaattatttcatagcatcatatataccagatatttaggggatttaagtaatagcacacttaatgtgagttgaaaatacattgtgatcaccagtggtaggaggtttaaaggagaataaaaagaatgagtagagatgtgaaaattggatcccataacaaacacgaaaaggttttaggggtgtttcccttaaattagagaaaacattgtaggtatcttcatttaattggctgccatgtgtctttccctgacaataatgtattcaaacgttcctcaaatgatttatgtcatgttctcaagtgtgactgttacggctgtgctagatgtctgcaatagttaccatggcctttgtagaatttgaattccaaaggtacagactgtgaactgggtgagtaaggaatgaatttggcaggaggatggtgaattgagacttttgatcctcaatcttatgttcctgaatttaaatatctgtgtgtatgtgtgtgtgtgtataatatatattataaaatataatattttatattatatatatttttataatatatatattatattatattatataaatatattctatataatatatattctatataatagatatacacacacatatctattcacaatgccttttaaaatttttttatttaataaattttttatttaataaatttttatttaaagaaaagattaaaagtttaaggcttaaatgaactttttttgactacaacttcctcctagcagaactgagaatagaatgctgtttcttggattcagacattttcctttcaacctgtggcaagcctgagaaaatagtgccagaatcatcaacattaaccacgtctatagatgctttatttttgcaacatttctgcatgaggagccttaacctgctatttctcaggcattgtctcctataggtggcattcaagaaactgaccaggtctctaatgatagcagtagatcccacttctgtcttagcttaagatgacacacctttgacaagaagggtcagcaaagtatctttaaaaaaatatttaatccacagcaagatggccgtgagttgttctgttgtgttacaagtgctggtaaataaatcatgagcaataatctttaaatacataagggtgtggctgtagctagtaatgctgatgaaaatcagaaagggaatccaagagggtcacaatagtgttagactttttaaacagtaagagctgtgtaggaatccttctgtgaaccataaaaataataaacgctgagcctattggaacataatctcaatcagcaagatgccaatgctttccagatttcctcacagggccctgctaattccatgccaaaactggcagtggatttcttccttctaatctcccttaatgccttattcgattattgtcactgctctccgaccatgcactgtcccttcagactctcctttcccaactgagtcagtcagaggagcctgggtgtctgcaggacataatctaagaccacaaaccaccttgttccacgtgagaaggaaacaagaaagaagggagccaggggaatcctgcaaatttttaggcaacctctttatctattggattactgacttgaggcaaacaaggaacagagatatgaagggtttgaaagatttctccagttgattggcagagaagagctggctagcagggaggacgaccctaggagggtgaattctgcatttcagtgcactgcaggatggcgtcgtctctgccctggctgtgcattattctgtggtgagtaagatcctttttcctgatttttctttttatctcagaggaaaggaaaagtatacatccattgggtgactcctatatcaaatcatgaaagaggccagaagtggtgttgcatgtatttgtaacagggtggaat

SEQ ID NO: 34893 - DNA, 2300 bp, Homo sapien
aacagtaaagaggtcatttggaaaggctgatgctctccaccttttacattgaggatggaccagtaggtgttctggggactctgttccaggtacagatggctgtagcattcataagagggtatttatagtaagtagcaatgaaaacttgaactcatcttttagaacaaagtgtatcatggtattcttttacggttctcaggtggcatttctctctaaaacggaagtgtaaatatgaatgctgaagtaaacataactgtctttaaagaggttcaccattagattttattaaggaaatgtaattctaaagaaacagttattggagactttttcattttctgcttttttaagttggcaagaaaagaagatgtaaagaaaggaaaaaggaaggagtaaaggaagaagagaaagggatatggaggaaaagaaagaagaaataaaattgaaagaaaaggaaagagggaggaagggctttattcaagagataattatcttactatataaggagaaagaggagttagcaatattcagaatcctgaattattttagtatcatatttttcattcgtgttctaagccactccaagtataaacaactacaacaatttgctattgaattgttgaagtctgagtatacttagtgttctatcttatgcttgtgtctgtttttacagtttatttgtgcaataggtccctattatatcatgagtcattattgtatggatatattgcttgtcaaattatatttttaaaatgtaatcactgcttgccataatacgtttcataaaggaatttatatagtaggcaaagcaattattggcaatactttgatataattacaagttgttatttgttattgacttttgcaatagctcttattataattcttaaacattttaatgctatttcataaaagccacagattaagtcataattttgatgatacatacttaaatgataccctctttagaatagtcacggtaacacttgtttatatgttccctgagaacaatataaaataattttgatgtgcagctatagtgtgtttatcaagtaaggtttatctatgtgtggaattttactgaatggtactctgaagctctgaaatacctttgagggtgaatgaggtgcaaaggggaatagttagtctaaccgatggtataaaggccagccagcacaaaggctaaactaaatatttccatattttttttctagattaagaaggacatattgatagatggaaatatggatgactggatagataaagaggaagaatattaaggaaagtcaaggtggaggagggaagtttacatatcacagcactatcttttataacaatgcaaactttctgagtttgagaacaataataactagctaaaattatagctttgtgagaaattattgcgataaaaagttgctttattgcttaagttttgagattgggtgtataggctagtgaataaactattcttagcaaactatctttccagcccacacaaatattttattttctcttaggagtatacgatggatgtttttttccgccagacctggactgatgagaggttgaagtttggggggccaactgagattctgagtctgaataatttgatggtcagtaaaatctggacgcctgacacctttttcagaaatggtaaaaagtccattgctcacaacatgacaactcctaataaactcttcagaataatgcagaatggaaccattttatacaccatgaggtgaggtttctccaattctatttcccctgcctaaatgatatgtccataatactaactcagaaccgttgatttcaatgtttctaggcttaccatcaatgctgactgtcccatgaggctggttaactttcctatggatgggcatgcttgtccactcaagtttgggagctgtaagttacaacaggcttctgagagtcaaataatacatccaaaatatataattacttggttttagttgatactggaaatcaaggaagaaatagaatcatgacactatcagtgtgattctaggaatatacttaatcattctgtcaatctcataaattgaggctttagtcaccaagattaaagaaaacattaaatacaatctatgtttgtatttccttttttatagacaatgtgcactttgaaggaaaaaaagacaactcgtcaaattcactgctatatttaatttgtttcaaatatttagatgcttatcccaaaagtgaaatcatatatacgtggaaaaaaggaccactttactcagtagaagtcccagaagaatcttcaagccttctccagtatgatc

SEQ ID NO: 34894 - DNA, 2300 bp, Homo sapien
tagtgtggatattcactagctgtgtgaccttaggcaagtcttttgatctctctagtctacaatttactgaatgatttgtataacagaaatattaagaccatctctcatagagactcattttgagaatcaaattgaattattatgaaaattacttttcacattacttggcaccaagtaaacactctaagaatattaaacaccatagttattatcatttaaaaaaactgacatcattatatgcacacatagtttgaagtggttcattctggctaaaacaaaacacaagaatatcaaaaattatataaaatattgaatataaaaacacaatataaagtattttcttgtcattaatttattatattttatggtagtatgtgcatatattaatgacatatcagatggaacacaataaacacacccataattagagtatcaattgatgttttggagtattaaaatatcattatttttaaacactcacaatttatgaaaaatatagatgtcttaaagcaaattacatgtatgtgtgtatgtatacatacatgcatatacatattacaagctgatattcatagagaatcatctagtaaaatctaccttgtgagtattacattttaaagagagaatcatagtataggtatttccatttccatatacacactatagcccccaaattatttaatatttatttctttaaatgtttgaaaacgctgtgcaattgtatcctgtttcatagtcacataacattttttaatctgaagcagaatgtaattggcattgctctgagactattgttcacatgatgaagcttcagtgaatttgtttgcaaaaccaaaatcagtagagtgatttagttgtgtttcattagataaaggatataaatttattttcaatttgtagaagatcataaaaggacctgcaacagtttagccaggagaacactaaaaattcagatttttataactgttgactttcattaaaacaagacaaaactgtggaattgcattgtagatgaagtaaaagaataatgttttctaatcgttaactcaggatttcattattaattataaatctcattaaattcagttttattctccaaaccactcaataaattaattaatcaatggataagtaaataaaaattgggtaatgacacatagggaagctgtgatgtttcttcagcgaatatctttaagaatacattggcatttattatatctgaacataacaggcaattaactactgcccagaaacagggctatcttaacataatcttcaaatctctcttccaaaagtttatctctaaaatcacttcccagttgacacttgaccacaaaactcagaaggtaaccaagcccaacccctaatgtggtcttcagttttatattccttattattgcaatcaccttatttaagttttaatcattaagctgattgcattgctgcacaaggtcaagaagcacttgtagaatcagaaaccccaaagtggttatggactggctactcagatttttttcttcacttgctcaggctccgccccatctgaaacgtcttctctgctaggaactcactaggagaaaatgaccagtgagcttaccaaagctcagaccttatccaccagaaacattgtatggggcacctcaccttttcagcacctcctgccataacaggacggaagtgctgaagggacagctcccagtgttttaggtcttagtaagcgctcccaggaagacagcacccatcccctctctgctacaaacagccattcacaaaatccgaggaggaaaccaagtcatccctgattccttggaaatttagttagactgatgttgaaacacacccccctttcctagtgtataattatttgtgggtggagagctaccagggagggtaacagaagatgccggagaaggggggggaaaagtagatgcggatttcgtcctgacttctaaaaattcctcctctccctctcccattttcctaatccgagaatgatggagctcgaggcaaaggaatgattccggaaatggagatatgattctcaaacctagaaatgatcggagtgatttattagttaaatattcttcgtccaggaacccagcacaattcagaggtaacagcgcctgcgttttctccatgataacatagacaaacagttgcctccaaaggtaaaaacccggttccggagggtattcttgctgtcctctaagctacagaagaaggtggggtggaaagcgctcccaacctgagaaagtgcgaaagactctctaaatccagtagccaatttcctacctgccaga

SEQ ID NO: 34895 - DNA, 2300 bp, Homo sapien
catgatgaagcttcagtgaatttgtttgcaaaaccaaaatcagtagagtgatttagttgtgtttcattagataaaggatataaatttattttcaatttgtagaagatcataaaaggacctgcaacagtttagccaggagaacactaaaaattcagatttttataactgttgactttcattaaaacaagacaaaactgtggaattgcattgtagatgaagtaaaagaataatgttttctaatcgttaactcaggatttcattattaattataaatctcattaaattcagttttattctccaaaccactcaataaattaattaatcaatggataagtaaataaaaattgggtaatgacacatagggaagctgtgatgtttcttcagcgaatatctttaagaatacattggcatttattatatctgaacataacaggcaattaactactgcccagaaacagggctatcttaacataatcttcaaatctctcttccaaaagtttatctctaaaatcacttcccagttgacacttgaccacaaaactcagaaggtaaccaagcccaacccctaatgtggtcttcagttttatattccttattattgcaatcaccttatttaagttttaatcattaagctgattgcattgctgcacaaggtcaagaagcacttgtagaatcagaaaccccaaagtggttatggactggctactcagatttttttcttcacttgctcaggctccgccccatctgaaacgtcttctctgctaggaactcactaggagaaaatgaccagtgagcttaccaaagctcagaccttatccaccagaaacattgtatggggcacctcaccttttcagcacctcctgccataacaggacggaagtgctgaagggacagctcccagtgttttaggtcttagtaagcgctcccaggaagacagcacccatcccctctctgctacaaacagccattcacaaaatccgaggaggaaaccaagtcatccctgattccttggaaatttagttagactgatgttgaaacacacccccctttcctagtgtataattatttgtgggtggagagctaccagggagggtaacagaagatgccggagaaggggggggaaaagtagatgcggatttcgtcctgacttctaaaaattcctcctctccctctcccattttcctaatccgagaatgatggagctcgaggcaaaggaatgattccggaaatggagatatgattctcaaacctagaaatgatcggagtgatttattagttaaatattcttcgtccaggaacccagcacaattcagaggtaacagcgcctgcgttttctccatgataacatagacaaacagttgcctccaaaggtaaaaacccggttccggagggtattcttgctgtcctctaagctacagaagaaggtggggtggaaagcgctcccaacctgagaaagtgcgaaagactctctaaatccagtagccaatttcctacctgccagaactctttcctaccatccgtcaccattcgtgactctgcaagacacggggacttagacatatgtgtgggagtgtgtgtgtgagggagagaggcgagacgagtgctctccccacacgtgtaaccctgcatctcccagtttcagagcttgcgttcattcatatgcaggcagtggtttaatatttgatcaaaggtagaatagttgcactaaatagttgtatttttaatgggctcaccttaaaatcgggtgttcataaattgcaagtgtgaaaagactctaagtgcagtccgtatgtctctcaccctttctacccttccctcccccattgccgctccccccaaaaagagaagcttgcagcagattgtagaaggatttgagcctgcagctagagagaaggggattagggccagagtggtgcaagttaaattgtgctgcatataaaaaatgggcggattggtctccagatccagaggctggtaccaccttcctttctaaaataaaatctctctggcatgaagtcaccgcctatttcacatccggtttgccctgggacgtattactactgtcttggtaaagagaaatcttttgttgtatagctgcagattggatattgggaagcaaatttgggtgtgaaatcttcagcaaaggagcacgcagagtccatgatggctcagaccaagtgagtgagaggcagagcgaggacgcccctctgctctggcgcgcccggactcggactcgcagactcgcgctggctccagtctctccacgattctctctcccagacttttccccggtcttaaga

SEQ ID NO: 34896 - DNA, 2300 bp, Homo sapien
gctgtgatgtttcttcagcgaatatctttaagaatacattggcatttattatatctgaacataacaggcaattaactactgcccagaaacagggctatcttaacataatcttcaaatctctcttccaaaagtttatctctaaaatcacttcccagttgacacttgaccacaaaactcagaaggtaaccaagcccaacccctaatgtggtcttcagttttatattccttattattgcaatcaccttatttaagttttaatcattaagctgattgcattgctgcacaaggtcaagaagcacttgtagaatcagaaaccccaaagtggttatggactggctactcagatttttttcttcacttgctcaggctccgccccatctgaaacgtcttctctgctaggaactcactaggagaaaatgaccagtgagcttaccaaagctcagaccttatccaccagaaacattgtatggggcacctcaccttttcagcacctcctgccataacaggacggaagtgctgaagggacagctcccagtgttttaggtcttagtaagcgctcccaggaagacagcacccatcccctctctgctacaaacagccattcacaaaatccgaggaggaaaccaagtcatccctgattccttggaaatttagttagactgatgttgaaacacacccccctttcctagtgtataattatttgtgggtggagagctaccagggagggtaacagaagatgccggagaaggggggggaaaagtagatgcggatttcgtcctgacttctaaaaattcctcctctccctctcccattttcctaatccgagaatgatggagctcgaggcaaaggaatgattccggaaatggagatatgattctcaaacctagaaatgatcggagtgatttattagttaaatattcttcgtccaggaacccagcacaattcagaggtaacagcgcctgcgttttctccatgataacatagacaaacagttgcctccaaaggtaaaaacccggttccggagggtattcttgctgtcctctaagctacagaagaaggtggggtggaaagcgctcccaacctgagaaagtgcgaaagactctctaaatccagtagccaatttcctacctgccagaactctttcctaccatccgtcaccattcgtgactctgcaagacacggggacttagacatatgtgtgggagtgtgtgtgtgagggagagaggcgagacgagtgctctccccacacgtgtaaccctgcatctcccagtttcagagcttgcgttcattcatatgcaggcagtggtttaatatttgatcaaaggtagaatagttgcactaaatagttgtatttttaatgggctcaccttaaaatcgggtgttcataaattgcaagtgtgaaaagactctaagtgcagtccgtatgtctctcaccctttctacccttccctcccccattgccgctccccccaaaaagagaagcttgcagcagattgtagaaggatttgagcctgcagctagagagaaggggattagggccagagtggtgcaagttaaattgtgctgcatataaaaaatgggcggattggtctccagatccagaggctggtaccaccttcctttctaaaataaaatctctctggcatgaagtcaccgcctatttcacatccggtttgccctgggacgtattactactgtcttggtaaagagaaatcttttgttgtatagctgcagattggatattgggaagcaaatttgggtgtgaaatcttcagcaaaggagcacgcagagtccatgatggctcagaccaagtgagtgagaggcagagcgaggacgcccctctgctctggcgcgcccggactcggactcgcagactcgcgctggctccagtctctccacgattctctctcccagacttttccccggtcttaagagatcctgtgtccagagggggccttaggtaagtgcgactttggaccacgatacacagacagagctttgaacgtggcttttcctagctggagagacaggaatgttatagtcggggggggggggcggggggagacggggggagagagagagagagagaagaaggagagcgagcgagcgagcaagggagcgagcaggacaggagcctgatcccacagcaggtagaaacaacgaaatgtttttctttcagggtgaaaccgcagcaatataagagcattattattatttttttcccgctgtctttcttcttttcttctcctctttcttaggcatatttgaatgtattccgcagggtgggtggtggcatgttg

SEQ ID NO: 34897 - DNA, 2300 bp, Homo sapien
tgcattttaaaaattagaacattttattctgcaattcttatttccatttcttctggcaattctgactggaactgaacagtggcagctccatttggatggagtattggcacttcagtgtgcatggtttccaccactttactgattcataaactgccaatgtcttccatttatctcacttgcttgggttttgtaggcacttaagtaaatacacacatacacacacacacacacacacacacacacacatcttagcctacaaaagtgtgattgaataatttcactaagaaaatatatagagctataaacaaactaggctctttggaataaaaattgtgaacataagaaggggcatgacattagacagtcatagtgatgtagtcctatagtcccagctacttaggaggttgaagtaggaggattgcttcagcccacgagttcgaggctgcagtgagctatgattgtcccactgtactccaggctgggtcacagagcaagaccttgtcactaaattaaataaataaacaaataagtaaaaatcaaagaaggggaaaataccttcacggtgcagcaaagaacaagagcattatataaaaaggggattatgtttgctctgcctccattttagtcacaatggaaagaagtcaaaactgcatttgaatgtggttttcattggatttttgtctaaatgccttaagaataactctgcctaaggcagaattatgaagccatgcaggattccaggtgggtctgtcaggacttttttgcttcattgtcaggatgcatctcctcagcccatgtgatgggcagcagccactggtaattctttctgctttccttggatatactttagtgttagtgatggagtgtggacctgattttctcatgttctattcctatgtctcctagactccttacccaagttccattcctggaagacttttttcttgcaaaaaaggcacttattttgaaacaactccttgtcactttccacaaagagctaagattgttcctcatcactactactgcttcctgcatactttcaatgtggtatcttgactttaaagaaccatgaaacactcccccactttatttttcatgattaatgaaagggatttcctctgtggtggatgaactggtttggcataaagggggtatcttctacatattagtatctatagtaacattctaggcaagaaagaagcatactaataccactcatccaaactaaaaactttcgggattattaccaagaacaaaaaatcaaccccccacatgacaaacagaaatccctttgcattgttaaatgacctcctgattatacccctctgcccacccttccttcaaaaaacagccctcctattttgtgatgtgtaatctttattcaagcagctatccccacgcaattacatttgtcaaacttcaagcagttttgtgtctgtgcattttcactggggttggagaactgacaagggaggaatgaatcttgagtagcatagaatttctccatgtcctttaattctatcaatgttttcttctctcattcaaattgaattcaccaaatctgtctgcctacaggatgacttactgagacactcacacctcccccactgtctgctcccccagctctaacaatgcaaccatgatttctaagactgtacgagtttaaaataaggattcttggcagatctgacgaccacaaaccttctgtcattgatgatgtagcttctgggcttgctaaagcatctcttgtccccatgaatgccagtccttgcatgctggtgtgtgcagtaaagggttaaaaagctttggaaagacaccacgcatgtgttaattcgtgctgcagcagcgtgcatcacttccactttgacctcatagttaatctgcgtgatagttaatcacgcagagtctctagtgatttttttcctatttattttaaatacacacacccacagggctctgccccctgtaaaagaaaaaaaatcaaaacaaacaaataaataaccccaaagagatggacccaggggagaacgcgtaagtgtgaggggcatgagtatacacgagtgtgcgtgtctttccctctcccttatttgtctccgtatgagtctctccttgtaccctccccctgcctcgatgatattactcccccagacttggaagccgctgccagagtgacgctttgatggtatctgcaagcgtttttgctgatcttatctctgccccctgaatattaattccctaatctggtagcaatccatctccccagtgaaggacctactagaggcaggtggggggagccacca

SEQ ID NO: 34898 - DNA, 2300 bp, Homo sapien
tttaatactaagggctaccatttatcaagaaatctactgtgatctgggaatagtgactacctctttatgcactttctattatttaatcctcttcataaccccatgaataatgtattttttacttctcattgttgagaaaagaaaatgtgattaaataacttgctgaaagtcacataacaagttatgagctattcctggatatgaatataagtttattttattctaaagtctatgtgtttatattgcccacaggttacatgttctacaaggacgggtaccagtctaatttgttctccactggcctatgctatgtgttcaataaatattagttaatttattcgtgcttttgattgctataaagaatttttttttttttagaccaagtcttgctctgttgcccaggctggagtgcagtggcaccatctcggctcactgcaacctctacctcccaggttcaagcgattctcctgcctcagcctcccgagtagctgggattacaggcacgtgccaccatgcccagctaatttttgtattttcagtagagacggggtttcaccatgttggccaggttggtctcaaactcctgacctcaggtaatccacccgcctctgcctcccaaagtgctgggattataggtgtgggccaccgcgcccagcctgccataaagattttatgattttttagccattttttttaaaaattgtgcatatacattcctaattttaggaattaggaataataggaactaaaagccaaaaggagaaactacatttataaactcacacattacagcaaaaagtatttttaaataaaatcacttgttaaaggttataaattgccaatttatattcactaggtaagcttttattttcaaaaggaacaaaggcctcttccccatttgagccccagtttcttaaactgacctgattatgtggctaaggtattattgtgaggtattgatgttttctcctgtttttccttccccttcctccccaccccttttccccctttccagagttttgttctgtggcattgccttgggtaagtacacggcagggcaaatagcagagtgacggcaaatctttcagattttcactttttcaaagtaagagagaccgaactggggccatgagaacagagacatccaactactgtgtaattcataagagtttagaaatgactccttgtgcaccctttttcaggcccttttacaaatggacttttctcacttgtgatgatctgggagagtgagagtgaggagagtctaagaagagttcaggctaattattttcccactaatctggcataggagaggctcacagagattaaattcattatggtaaatacaaagagtaatactgctttacactcgggtctgtagactgagattcacactcaccacaattattcctgttaacagtctgccacatacctttcattttaagcaactgaaaaattgtaccaacttttctctttaaatttgctttaaaagcaaattcagaaaattggtagagggtcaagaaattacacagtccaactccattatttgataaattgtataaaaagcaaactaaggcaagaatcaactgacttccaaagttcacgaagagagcactctggaagttgataaaccaccaaaccatataaattccaccacctctttatctgtaattaaaaatcaaaggttgacttttttttttttaactactcactgtatttttagaaagatggggcagaaccactgtagaactcctaaaccccacagaacaaacagtacattctggaatgatacgccggccaatccggctggcagccgattgacctgacccaggcgagggttgctgcaccgagtatttagtttggccccctactgaatgaagacactttgttaaattctccaatgagagacgcttagaggtaggggcgtggaagggggccggggaatttgaggccagataacgggaagtgtgagccgattggccggacttctcactccacggcccagccgtttacggatcgcggaggccatccatcaaaagaattacaccaatcagcggcgaaaatgcccccttctcgcgagaaagccccgccctccaatatattcctcgttagggcaggcgcggccccttcggctccgagctgaccctgatcagggccgagttgtctcggcggcgctgccgaggcctccacccaggacagtccccctccccgggcctctctcctcttgcctacgagtcccctctcctcgtaggcctctcggatctgatatcgtggggtgaggtgagcaggcccggggaggg

SEQ ID NO: 34899 - DNA, 2300 bp, Homo sapien
tcagcaggttaaaaaacctattatcattacattggtgctcaaaattattgtacatttggctggtagaagtccattctgggtggcctctgtgtccttctgacacattcccatcattattcaatgaatttgttactctctggcataagatataccaggcttctcatgctgtcctcgacctaacccaagaatcagccatttttccgtagagcctgggttctctttagtgagtaatatttaaaagccaagatctgtgctagtgtgcaattgccgttggtgtgtatatataatgcatgtctttacatctatatttctgcatctatgtatattgaaaaccatgaattcacatataaattctgatcccatgggcttcattttcattttttccttctccacatttataaccgttttcagtaccagtgagaaacctgattcctatttgattatttgtggggttttttttttttaaggtggagtttcactcttgttgcccagactggagtgcagtcgcgcgatctcggcttactgcaacctccgcctcctgggttcaagcgattctcctgcctcagcctcccaagtagctgggattacaggcatgcgctgccacacctggctaatttttaatttttggtagagacggggtttctccatgttggtcaggctggtctcgaactccggacatcaggtgatccgcccgcctgggcctcccaaattgctgggattacaggtgtgagccactgcgcctggcctgattctctattgtaggtcatctccccacatgaatgtcttcctcaccctgcttaggcttcgcatcctatgctgagcaggaatgtcctcctcatcctgcctggaccctaatacctcactccaggccatggcagtccattcaccctgtgattcctatcttgctcattttaggaatgaattgtcgggggaagaggctatttttcttttaattttattctctttgacatttaacaaaattttttgagtaaagtaaaattaacttttttggtgtatggtttggtgaattttaagtatagatatgtgtaaacacctccacagtcagagtattgaagagttcaatcaccgtaaaaactctcgtgctctctttgtactctacacaccctactcccagcccctaaaccttggaaaccactgatctaatccccatctccatatttttgtcttcaagcatgttataaatgggatcatatataattaagaaaaacgctttattgtaacaacatacatttcacccatttaaggtgtgtaattcagtagcttttagtatatacacagataaatgcaaccattccaataatcaattttagaatgttttcatcacctcagatagaaaccttgtatagtttagcttttatccttctcctgtcatcccccgccatccatactacctcttttcatctcatagatttccttattctggacatttcatgtacatggaatcataatacgtggtctttggttactggcttccttcactttacatgtcttaagaggttcatctatattcgagcatgtatcagcacattcattagtatgtctgaaaatacttcattgtatggctgtagcactttgtttatacatttgtaagttggacattttgggtatttccaccctttggctgtcctgactaaagctgctataaacgtgtacaagtctttatgtgcatatgtgttttcatttcttacctaggagtagaatttttaggttatatgataactatgttaatcatttgaggagctgtcattgtttcccaaagcagctacatctttttactttcccaccagcagtgtatgcaggttccattttctctgcatccttgccaatacttgtttacctgacattttgattttagtcactctagtggatatgaaatgggatctctatctagttttggtttgctattctctgatactatgttgagcattctttcttgtgcttattggctatttgtgtatcttccttaaagcagtgtttattcaaattatttacccatttttttagttgtcttattgggtagtaagagtctttatatattctgggtacaagtctcttaccaggtatatgatttgtaatttctcctattctctctttactttgttgatagtgtcttttgaagcacagacttaattttgatgaagtcttatccatcatgccattggtggatcatgtttttggtgtcatgtctaggaaccttaaccccaggtcatgaggaatttttcttttttctttttttgactcacattctcactctgtcacccaggctggggtgcagtggc

SEQ ID NO: 34900 - DNA, 2300 bp, Homo sapien
actgcaccaggcccagtagctcaggcctgtaatcccaggactttggaggccaacgtggattgcttgaccccatgggtttgaggctgctgtgagctacaatctcacccctgcaccccagcatgggagacagggaccctgtctcaataaatatatatttttttttaaagagagaatgcctaaactcaaatccattttaatttgttgccaaatttaagttatagaaagtgaaattaaatgtcactaggaaaagcccacattttaaaatatgtcaaaattagtgagaaaaaaatcccactggtctatacgtacatcagaaatcccaaattcagcagctactgctaaattccgaaagttactggatttactaatttataatcgtaatctaaaaccattgttgaggaaactatgaattgtacaattcagaaaagtaactgagatccaagctgacataatgtctttcacacgaatcttgaggcactcaaagcacctccatatactgtaatatatataatagctaatagctaacatatagtatgaacttattacataccagtgaatactccaagctcttcatacacgtgaataccatgttaagctcaaaacaatcccatgagaagggtactataactaccttatcttgtggataaggaagatatagagacactgaacaatctctcgcccaagtttacaaaactaggaaacaagtagtctcccttcaccatattacactgccatcaaacatcttgggcatctaacctgagaactaaatctaatttcaacctgttagtttaattatacacttaacaaagaaaaagcgggtccagatccaaagagcattggtgaaaagaaataaaaggagtactacttattttatgcacacacctcttcaccacctgcttgaccactccacaaacatgcaggattttcaagcttttagatgagaaaactaatcacctgacatcatctctaaattctctgcccgttattctatccctattttctttgttgtcctttcctatatttatctatttatgaattacgcttccgtacaggagcttaacctctccactgcaggtacgttatctgttgtcttcctgcctgtcttcagtgcacggaagaaatatttgttcctttagcaacctagttaatctgttcccagctgaagcccgtcagagaagcagaagcagcagtcttagtttgaaaactaaacacgaaaataggctcctcaaatttccacaactcagcacctgccctgaagaggcgggggctctgaccagacccaaacctggtcagtgttatcctctttctctttctgccagccacaggagccgtcgggacacccaacagtcgttcagggaaacggggctgggggcgtctgggaagaggaaactgaacacaagccccgagctgccgctaccttgaggatctcgcggccgcccaccgacagcgccacatgccggctctggaggccgcactggatatcctgggcgcgcgtgcctggcggcacctgaacttcaatgaacacctcctccaaggtctggtaccactggccccacggggtcccgcacggtaccaccccactccgctcctcaaacggggccgacataatccagtccctcccggccgcggccgcaccaggcggagccgagcgcacgcgcggaatcccacgcttaggctacgcctcggcctctccgctcgggtcactgcgcatgcgcaggaacgcaagctagcgctttggtgtgcgtgttcgtttttccctttgaatggccgtttacggcaccggcaggccccggatgaaagaactgaaatccagaaaagttcacatgcaacgaacaatgggacagaattggaaccagtgaagccggaactcactacaccgtcccctaagtgacgccaaaatgcactttctaacgtctccggagggaagtgcgcttgcgcaaatgctaggttacacttgagtaactccgggaatgactgggtgggtggggcggggaacagtaacggtctcctattggatggcagcctaaactcgcaggccagctaattggacgcaatcagaacccagcattctttcttcgtgttcctgtgcgggattggtgtgcccaggggtttggctttccaattggctaacgccggggtgggtggggaatgtggggagatttgaatttgaaaccggtagggagtgataatccgcattcagttgtcgaggagtgccagtcaccttcagtttctggagctggccgtcaacatgtcctttcctaaggcgcccttgaaacgattcaatgacccttctggtgcgt

SEQ ID NO: 34901 - DNA, 2300 bp, Homo sapien
actatatctttgataaagccagtttaacctactataatgcaaacaacaaaaaaaccaaaaaaaccttaaagccacactgctgacaaaacttaagagtaggtcctttgattactcgggaaatcatatggtccttgagtcttttaactaagaaaataagtttgtgctgattcacttgctcatttggccttcctttgtgagtagttgtattttcattcacacgttggctgacaaaacttagagacgtaatgagtaaccacgaaatagtgtatgatagtgaataaatcatgagctttaatatttagctctaccacttactgattgtgcaagatacaaaacctctgttttctcatctgtaaaatgaggtcaatatcagtaccttcctcacttggcttttggaaggaataaacaagatctagtagcacagtcccagcatacagcattttttttttttctgtaagacagagtcttgctctgtcgcccaggctggagtgcagtggcgcgatctcggctcatcgcaagctccgcctcccgggttcacgccattctcctgcctcagcctgtagtcagctgggactacaggcgcccgccaccgcgcctggctaattttttttgtatttttagtacagacggggtttcacggtggtctcgatctcctgacctcgtgatccacctgcctcggcctcccaaagtgctgggattacaggcgtgagccgccgcgcccggccgcatacagcatcttaaatgatgagtgcctaccaaacacagctaaggcttcctggttactgtgctgtgcattgcggtgttaagagcacacgatgggggctgggttcatattccagtccggtcactttggtaatgtagcactgagcaaatttaagtctcagtctttttatcaataaaataataataggattaccccttagagttggtgggaaattaacataactaataatcgatgtaaagccttagtacggtgcttgaggtataagtggtcaatatcagccataacttcattgtttatgttttcaataagtgctgctgctctaattttacacccataaactgcctttactaatcttccttcttttatgcccaaatggaatacacaaaagaaatgcacaagttcagactacaagtaatactccagtgttcttatcagtgaggccctctcggacttgaaaatcaagtagctaccaacgtctcgggtccattcccttcgccctgctgtagtttctccattaccgctgtttattgacagtattccccgcctgaatgtaagccccacggggcggagactgtttcactgcggtatccttagcatcctgattagtgcttggcatgtaacagatgcttagagcatatttgagaaaaatcaatcaactgaatgagccccagcccgaccctaaaatcgcctcctgcttgcctcccaagaagggagctgaaagaggcaaagggcgttagggcgtctcccgtcccccagctctttcccccttacgcaccagaagggtcattgaatcgtttcaagggcgccttaggaaaggacatgttgacggccagctccagaaactgaaggtgactggcactcctcgacaactgaatgcggattatcactccctaccggtttcaaattcaaatctccccacattccccacccaccccggcgttagccaattggaaagccaaacccctgggcacaccaatcccgcacaggaacacgaagaaagaatgctgggttctgattgcgtccaattagctggcctgcgagtttaggctgccatccaataggagaccgttactgttccccgccccacccacccagtcattcccggagttactcaagtgtaacctagcatttgcgcaagcgcacttccctccggagacgttagaaagtgcattttggcgtcacttaggggacggtgtagtgagttccggcttcactggttccaattctgtcccattgttcgttgcatgtgaacttttctggatttcagttctttcatccggggcctgccggtgccgtaaacggccattcaaagggaaaaacgaacacgcacaccaaagcgctagcttgcgttcctgcgcatgcgcagtgacccgagcggagaggccgaggcgtagcctaagcgtgggattccgcgcgtgcgctcggctccgcctggtgcggccgcggccgggagggactggattatgtcggccccgtttgaggagcggagtggggtggtaccgtgcgggaccccgtggggccagtggtaccagaccttggaggaggtgttcattgaagttcaggtgccgccaggcac

SEQ ID NO: 34902 - DNA, 2300 bp, Homo sapien
ttgaaagagaagaatgatgaaattttaagccttaagcagtctcttgaggagaatattgttatattatctaaacaagtagaagatctaaatgtgaaatgtcagctgcttgaaaaagaaaaaggtattacagtgttttatagttactttgtttagataagtgttacatacaacatttaggaaaaatactactatgctaaaacaaccttttaaatataattagctatactaacattttaaatataattagctatatagctatacaacagcaaaaacctgtactgcattttagaatattttactcttataatgtttgttttctgtttatttcaatacagcatattacctgtcttgattgaaatatatacagtcatataattcttgacttttccactaggtggctgtgtaacaatcagtagataacacagaacaagatttgtgggttttattatttagcacatagtatatattacatggagtaatgatacaaagttcacagttttgttttcttctttggaaataccatgctaaaagcagtgtaatggaatattatgggagtccaggtttctcagtcttaatgttcttatctaattccagtattcttgatgttttgcgttttctagaagaccatgtcaacaggaatagagaacacaacgaaaatctaaatgcagagatgcaaaacttaaaacagaagtttattcttgaacaacaggaacgtgaaaagcttcaacaaaaagaattacaaattgattcacttctgcaacaagagaaagtaatttaccaccatatttttttaaactgttcattttgtgtcatacatttccctatgtctctgaacacctttaaattgtgtatatcctttgatctaccaattctatctttagagtcttatcctgaggacataatcatggatatgctgaggatttagctacgtattttcactacatgttcaccctagggttatgaataatgtgggaaaatgacaacagatacagcaaaatagggaatttttaaaaaattttctggctcattcttgtgttatttaggctatataaacatttacacttaccttgtaaaagactgtctaattacagaagaaacaaagcaatttttaaaatccagattatttatagaacattttacatatcagtgagaagaaagaaagtccactgaaaaattatgggcataggatggaaacagagaaggagaagttctggcctgtaaatatagaaagatactccaccttagtagtaaccaaggaagtagaaataatatttttttcacttacaaaattggcacaaattaaaacatttgataacacaaaatactggtgagagttaagccaacaggtacttacatgcactgatgtgaaatattatagtgttggacaacctacaacagctaaaggaattgagtagatctatatacactgacctggaaagatttcagcaacagagtatatatcatttatatccctccccaaatgtatatgtatatataagtgtaaagaaaaataccagaaggcatatatattccaaactagtagctatctctgcaatgggaaaactaaaattagggggggaagtcgtcaaagataatattaacatcatttgtaatgttagaattatttcacaatggtgatgtatttgtatattgtatagcttaaaaaataattttatgtaatatggaaatcaccacacactttttacataatatgtgaaaaataatgttaatatcaaagccagttgtaaaacagatatatatatataaaatataattttagattaagaagtttctgcatgtgcgttgcatagaaaaaagcctaagatgatatttgccacaatgttaacaaggtataggaaataatctatgaaaacaaatatgctatttctatattgttttaagtttccttgaatctgttgaatttaggtttcatccttctttatctgtacttttttttgtctcctagtacaacctcacaatgccattccaaattattttggtggttttctgtttggatataggaattatcttcgagtcttcatcagaagctctgttcttttcaagaggaaatggttaaagagaagaatctgtttgaggaagaattaaagcaaacactggatgagcttgataaattacagcaaaaggaggaacaagctgaaaggctggtcaagcaattggaagaggaagcaaaatctagagctgaagaattaaaactcctagaagaaaagctgaaagggtttgtattaataggatctcatgtttatgtatgacttcagatgtatttattttgagtacttttt

SEQ ID NO: 34903 - DNA, 2300 bp, Homo sapien
tgttaaagtatgtggtgcagtaagccacagttgctgcataccaagggcatgtttacttccttgactacctattctgcctcataatgagtataatgaggacagttggttgtttctaatgtcactggataaagtggtgcaaaagtgagtgtagggatttttattcccagctcaagtgctccataaataatctgaaagcttctatgtgcaccctgaagaaaaccctatctcctgtagccccagagctgagactgttgaaaatcaaacacagcatctcatcctgtgactggctgaattacaacacaaattagaattccagccttgcagagtgactattgtcaaaaggagggcacttactgaaaaaaaaatgggattctgtaaattaggattgggacatatgggaagaccttgatgaagctggggacattaagcccctaaattctgatgagtcttctttgctagtggagaggcttctcaaccccattggaagcagcttctccatttccagtgatagtaccctccaacctgtctgtgatgattaacactgcattgcctgaggaaattgtaatggcctcctttgaggcagttgatatgcaagacaatgttggttctcctccagacccaactccaccacccttctttgcttctagacctgaaactagacaggaacaaagtgttacctatgaagagatgtgctatactccaaagagttactcaaagtctctaatttatacagacaaaaatctgggaacatatgtcggaatggataataaaggtgttggaaaatgatggaaggaacataaagttggatcaggtcaaatttattgacatgggctcactaagccaagattctgcatttaacattgcagcttggggagttagaaagggtgctcacagtttgattggcttactaaaacatggaaaagatgaattggaagtgctggacatgccttggtttaatctagaggatgggattaaaaggtttaggaatattgggaaattagatttttcacttaagaactactcatctcgggtggatcatgaggtcaggagatcgagaccatcctggctaacaaggtgaaaccccgtctctactaaaaatacaaaaaattagccgggcgcggtggcgggcgcctgtagtcccagctactcgggaggctgaggcaggagaatggcgtgaacccgggaagcggagcttgcagtgagcagagattgcgccactgcagtccgcagtccggcctgggcgacagagcgagactccgtctcaaaaaaaaaaaaaaaaaaagaactactcatccacactgggaaggtcaagaaagcatacctttcaccaatactatgagaaagaaatttgcgaggagagctccagcatctttttcagaactctgtgatggctcttctctgtaggccagagctcactgcagtcactgaactggaaaacctaaatataatggaagtaaaggatcccagggtggcaagggtcaagtaatgggactcaaccaccaaaggcaaggtgaagtggttatcataatgacagagccaaaggaacaattagaataatctcacttgtagacctatgctttggctagttgatcatggttttcctagacgtgaaatagataggaagcctactgaagtcttaacttgatctgtataagcagaaaacttctaagtcaagtgacgaaagttgaactcgaatcataaaaacagaatcgtggtcccttaattcccaaacttgagccactttatagagcccaaaaccctttgattgaaggggaggacctcaaagggaccctggtccataaccaaatgtttatactgttagtctttctcctagtcctccgcaaagggatgtacaacctttaccaacgtaactgtgcattagaaaaagggaataatcagatcttttgtgaactagtggacactggctctctgaagtgacactaatttcaggagatccaaagtgctactgtcagggtagcagcttatggaggtcaggtgatcagcagagttttagcttagttccatctcacaatgggcccagtgaattcctgaacctatcctgtggttatcccctagttctagaatgtataattagaatacagtcagcagctgacagaataatccacacattggtttccttacctatggagtgagggctattatggtggaaaaggccaagtagaagccactagaactatctgtacttaggaaaatagtaaaccaaaagcaatgctcaattcctatagggactgaagagattagtgccaccataagtacttgaaggaaggcggggtggtgat

SEQ ID NO: 34904 - DNA, 2300 bp, Homo sapien
atctttgggtcttcacttcctttggaagggcccatgccacattaagtttgtataaaatagtcttgtatgttgatctaccttaatttaattcttaagtctagccagaaaaccctgaaaaggtggaagtaaaatttgcctcccttatattatcatttgatgctttcagtctttaactttggccattctgttaggtatgtaatggtatcttgatgtggttttaatttgcttctctaatgttgagcatctttttatgtacttatcggctattcttatatcttcctttttaaagtgttgtctgaactgggcgctgtggctcatgcctgtaatcccagcaccttggtaggctgaggcaggcggatcacttgaggtcaggagttcgagaccagcctgaccaacatggtgaaacaccgtctatactaaaaatacaaaaattagccgggtgtggtggcatacacctgtaatcctagctactcaggaggctgaggaaggagaattgcttgaacccgggaggcggaggttgcagtgagccgagatcatgtcactacattccagcctgggcagcagagcgagagtccgtcttaaaaataataaataagggccgggcgcggtggctcacgcctgtaatcccagcactttgggaggccgaggcgggtggatcatgaggtcaggagatcgagaccatcctggctaacaaggtgaaaccccgtctctactaaaaatacaaaaaattagccgggcgcggcggcgggcgcctgtagtcccagctactcgggaagctgaggcaggagaatggcgtgaacccgggaagcggagcttgcagtgagccgagattgcgccactgcagtccgcagtccggcctgggcaacagagcgagactccgtctcaaaaaagaaaaaaaaaaaaaaataataataataataataaataaatagcgttgtatggcagatgcacctgacagcaataactttaagcataccctgagaataccctgtggtctaagaagaatgtgtgcttggagctaaggaatccgggaatggccaaggcgaatattcactccttatctgtggagctgcttgggaggctgaggctgtagaattacgtggggcccaggagttcgaggctgcagtgagctgtgatggcaccactgctctccaacgtgggtgacagagggagaccctgtcttgaaataataaaaataaataaattatgcccagttagccacttgggatccatcttgaaggactggctttttcaggttcacatttgttcacaaatgcaaacacacacacaacaattcctcataatttatattaatagatttctctgaatgcctcttagagtttaccatgcgctgtgtgctctaaatgaatgtaacattaaaagtcagatgatttttttagttcaatttgaatggcaatttttgatgttcttaaattggtacagagccataattcagaatagcggtgcaaagctcactgagcacgttcatgacccttgaaagtcttcgaaaacagattactgggcttcgctcccagagaatgatttcgtttcttaggttctgtggtgcaggcaggtttggaaatcacttatctagaagtccttaatgctttgtgaaacttaaggccgctcactccatctaccattttctcagagggcagcatagtattaatggaaatgacccgttgcattttacttcttgcgtgctgttaccaccactgccttttactctcctttgaaataattaaaagcactgggaagggaaagcactggagaattttactaaacataatctgttgcaataaggtgtaactaaataaaatgatagaaaactgtgccttttagaacaggaatcaactgcatgatctgtgtgctttccaaaagtgtggctcactcttcttttgcaaaagaaaactacaaggaatcttgacaggaagttgttgggtttttgtttttgtttttgttaagtagttagttctaccaaatagttttgcaaatagacccaggcttgactggcaattaaacatgaaacttctcattgggtattttcgagactactacggggaatcagctaccagcttactgccatgtggagaactgcacgagattccgggattggaatcaaaatgctaatttaaaaggtcaagtgaagctgctcctcacgttttggcgtgcctgcgctctctgcaggcagaagcgaacaaagacccagcaagagaaggcagaggctaagacccatcccgtatctgctctcctgaaataattctggagtcatgcctgaaatgccagaggacatggagcag

SEQ ID NO: 34905 - DNA, 2300 bp, Homo sapien
agcattccagtgaacgcctgctaaaaccagaattgttgtgtaaagaaaatagaaacgggtgtcattcatttccttaaaacataacctcgggacatggaagaataagccaactttagttactgacccggagaaccaggttatgaagggctcagctaagtctcactagctgacaatacagaattgcactttcatttaccattttaaatgcaattatgtatataaagtttctacataaataaggattttatctgtagtgtgttcctttccagatgttctttgtctttgtatgaattgaatctgctaacataacttttagtttcaggctgctctctttaaatgtatagacttagccaccacacgaagttgtatattgtctatgttaagaatggcgtttgattcgcatagaccctaccatcattaaagaaaatgattaaaaaccatatccaaacatatgcccctagaactgtacccaacttttacggggaaagtatcaagtcagattttcaaaagcagccaagttaaattctttctgttcctcaagactaggctgctctgagaatcagaatgctaattgcatatgcttgcccttaaacctgcttcacgttgaagaatgaagaattaattttcttttctcccatagaaaggtaagattacatcacgtgttgcgactagaaactttaaaccgaattcccagttaagagaaaaagtagtaagatgatcttggctgctcccccggccctcttcccgccctcttctttgttgtcccctgattatgcttgtttagcgctggggcagtcctcaaggattccctaaataaagccaaactaatgaacagtaatagcctgtgtttaaaaaaaaaaaaaatcggaacataagaaacctcaggctgtcttcgattactgttctagagaaactttatgtttacacgaataaggaaatgagtttttgttgggggttgaggaggaaggaaagtcatggtgttctgacgtggaaaacttctttaaaaggctgcttagtctttagtttgaaaataaaccaaaaaggtttaggagtcggggaaaggccctaggaaaatccagacagtggtcacgtttgtggacgacgtttagagcttgctatcctgggcacacaagaacccttggactgttcggtgcaaagttggcaaatcctacacggcctgtgccagggtttactttctgcatcaatttcacaggcgtccagcctggctgaggattttttgcggtttttaactggaagggaaataagtcggcatcagcacttagggctgcttaacttttaaaaggtggtagaacgcccagccttacacgctgctgcttaaattctcggtgctcaccaaggctgggctcgtgtggcccaatcctgcaatccccgaggcggtgtttcttaaagagtgggcttgattctggttaaacccattaagaagtcggaccccgggctcgtttcttgttctgtaattatgggtaaagtccaaggatctgcgttttgaagaggtacctaagtagttcatcttccttccccctacaactttttatttttaattagttaaaaatagttttacatttttgatatctcacacacaggttttttctttttttaagcatcccaggaagacaaatggctcagacgccaacccttttatttttattccttgtctttttctaaatctttcaaaacccccacctagagctctagagatgtgtccattatgctctacccacctccgcccccgcccccatgactttaaaatgctttttattccactttttatattgctcagtcgatcctcatgcactgcgcagtctgcaaacttgaaactcaaggcgatccacttcaatcttttcccgagtcaagaaaaaaaggaaaaaaagtagaataaaaagcactcaaataaaatctccgaaacaaaacctgaattcactgcctaaggtcagggcctttcttttgtgtgtcgctttaagcatcggcgcgtgggctgggggcagaccgcgcgtacccgccctctttctggggcgtcggcggagcgtggccaatcaacgggcgcggctatggcagcggaagccggaagcggcgagcggggtcgttctgggcctaggggaggcgggccgagggcgtctgagctgaggcccgcgtcgatcctgggttggaggaggtggcggccgctgaggctgcggcgtgaagacggcgggcatggtggggcgggagaaagagctctctatacactttgttcccgggagctgtcggctggtggaggtgagggagtcggcctgggcgtctccggt

SEQ ID NO: 34906 - DNA, 2300 bp, Homo sapien
gcaggagaattgcttgaacccatgaggcggaggttgcagtgagccaaggtagtgccactgcactccagcctgggtgagcctccatctcaaaaaaacaaaacaaaacaaaacaaacaaacaaacaaaaaacacatcacacccattaggatggcactatcagaaaaacagatcaaaaatagaattaccgtgtgatccaacaattccacttctgggtatatatccaaaagcactaaaagcagaatctcttgaagagagatttgccacccatgttcattgcagcattattcacaatagccaagaggtgaaagcaaaccaaatgtccatcaacagatgaatggataagcaaaatgtgatatctacatacaatggaatattgttcagccttaaaaaaattcgacatatgctacaacatagatgaaccttaagaacgttactgctaattgaaataaaccagtcacaagtcaaatactgtatatgaaatactgtatgattccactcaaatgagttatctagagtagtcaaattcacagagaagaatgctagttagcaggtgcagggggagagaaaaggggcagttgttaatggctacaaagttttaattttgcaagatgaagagttctggaaatgggatgcataacaatgtgaatgtacttaatgctactgaaccgtgtgcttcaaagtggttaaggtggtaaagtttatgatatgtatattttactacaatttttttaaagtaaaaaaaaagtcaggataacggttacctctggggaaaaagtgatactattatggttaatgttatgtattaacttggctgggccatgggctgcccagatatttggtcaattattctgggtgtctgtgaagatgttttggatatgattcatacttaaattggtgaattctgagtaaagcatattgccttctgatatggtttgtgtccccacccacatctcatcttgtagttcccataatccccatgtgtcattggagtgacccagtgggaagtaattgaatcttgggggtggtcaccctcatgctgttttcatgatagtgagttctcatgacatctgatggttttataaggggcttttcccctttgctcaccgtttttccttcctgccaccatgtgaaaaagaacatatttgcttccccttctgccatgattgtaagtttcctgaggcctccccagccatgctgaactatgagtcaattaaacctcttttctttataaattacccagtcttgggtatgtctttattagcagcatgagaatggaccaatacatcttccataatgtcagtgggcctcatctaatcagttgaatgtctgagtagaataaaaagattgatcttccccaagcaacagagaattctctagcagtcttcagacttcacctgcaacatcaactcttcctggttctgcagcagattgcctttcaactctaactggaacattggctctcctgggtcttcagtctgccggccacaagctgagcacagtggtggatgtctctagtactatctacttaagaggctgagatgagaaggttgcttgaggctacgagttccaggatgtagtggctatgactgcacccatgaatagccactgcactcgagcctgggcaacataccaagacccccatctcttaaaaaagaaaaatataacacagacacacacgcacacacatatcctattgtttcttttctctagagaaaaaattacgcctaatacagaaacaatagggggaaagcatttgcagagcttctaaggtatttgtaatgttcttaacctgagtggcaggtacacaggactttatcattattcttcaaactgcacatacatttaatgtactttgttgtatgcactattcttttcacaattaaaaacatttttttaaaaatctaaggttgggatgcaaccagtctattcaccaaagttcacatctttttcacaagtcttcaagattttaaataaaataaataatctgggtctgataacactgtctgtaggcagagagtgtgttaaattggtttggcagacttaagtgggtcatagatcatagatctgtaatgggtcattaagaaaaattcagggccgggcgcggtggctcacgcctgtaatcccagcactttgggaggccgaggcgggcggatcacgaggtcaggagatcgagaccatcctggctaacacggtgaaaccccgtctctactaaaaatacaaaaaattagccgggcgtggtggcgggcgcctgtagtcccagctactcgggaggctgaggcaggtgaatggcgtgaacccgg

SEQ ID NO: 34907 - DNA, 2300 bp, Homo sapien
tagtgacaaaaagaagatgaatacaaagtgtctaacccagtacacaccacattgcttcttaagaactgctatggattcttacgtctattttgcttacttgttctttaaattttaatctcaactcaatctgagggtgtgaattccatgaaagggcatccaaaaccacttatgaaaaatgctttatgttggtacatcattgaggacagatactacctgctagcaagtccaaagccagttttctctcctgcttttggttgggggactattcctctggttaaatattagacaaaggccatgggcggtggctcatgcctgtaatcccagcactttgagaggccgaggttggcagatcacctgaggtcaggagtttaagaccagcctagccaacatgtctcagaaaaaaaaaatatatattagctgggcagaatgaatgataggtgcctgtaatcccagctaccctgtctcaaagaaaaaaaaaaaaaaaattagctgggcaggatgatgggtgtctgtaataccagctactccagaggctgaggtgggagaatcgcttgaacctgggaggcggaggtttcagtgagccaagattgtgccattgcactccagcctccatctcaaaaacaaacaagcaaacaaaaaattagaccacctagctggagtagttggcttacatctaattttttttaagcctttaaaaagccatcatacccaggaagcttcacttaggaactgagacccacaggggagaggaagatttccatccccctaatttattcacacactaaagttaagccattagctaactggcctgggagttcacatgcctgaaagtgtggcttgcctttttcttgtctgagcacacatatttgaactgggctgtaattatgagaaaatatcatctttggtgcctcggctggcaaaagaaaaaaaaaaaaagacaaaaaacagggttggaaacactcaacgattggactcacacccagaaaagtcattttgtgcacactcttgctttaaataaaaagtatgtttcaaatgttatagacagatacatctactgaaagatttaaaacaaaaagacttaaaatttcttgtagatcccttcaagtatgcctgagtgtttattctaagtcccttatgttataattaaagccttaccttcaaatattttctctgatttcctaaaatgattttgctgtattttcctccctccctgagtagatctttgccttagaaaactaatctgccaaaagacattcctgcagagatatactgccaaggcaggaaaaagaaaatagtaaacgttagaggcatttttactgctaaagccccagaagcaacaatcttatctctaagtctgtaacacaagcacattaatctgatttgcatgtcatctaaacagagaatgggtttggagagctctgtatcatctcaagtgaaaattagattagcaatgtggtttaatgttggccaataaaagagaggagaaagtatgtttaaataattttaagtttaaaagagtaaaataaatggaaaatgtacagatctttctttaaataaagagtagctgctgttctatcgcaatgatatgatacattataaaagtatatagcctaacttgataaaggaatagggattgagtctatttttctgaaacggaatataactttggatcttaaacactctcatggatctataacagccatgaaaatattcattggtcactgtacctagggcttaaaataagtcaaagaagtggatgactgatgaaatccctacacattttaccttgtgatatgctttcctacatgtttaatttatgtagagccctttggggaatattgactgtgtttgccagagacacatttttgagttcatcatgtcttttatcaatgttatcacttaagaaagtggtattactgttatatcaatattttatacaaacataggtcatttctagtgacaaaaagaactttagttactaaaccacagcttcagtttgattttatttttctgagaaacacttcgtattacatcgagtttcaattggatttttttcacatgttaacatctctcagaaagatcattttttatcatgttccagattgatttccaccatcaacacctttacctcttcccgcctgaaaataaaatatgaaatataacaagtaaatcgcaatctaccttggtaagtaaaatgaatttaatgataaagaacaaattggctcagggcccccaattcacttgttcagagggaagacactagggtaaagttatacttcctttgattgcgtaacttcaga

SEQ ID NO: 34908 - DNA, 2300 bp, Homo sapien
ctttaggcattgttattaaagagaaaaagctcctttgtcagcattctttacaccattaataaccttccataccctgttatactctcccttggttaaggccactaaataattgctttatttgcatatttgtaccatgtccacctcattatggataatcaatgcaccttattaatagcatcagtatcaaaaaagagagaaaaatcatataatttaccaatgacaaaacaaatttaccaagatctgtggtaatttccttctaattcctaagtcaaagcactgactttgagacagtgcatatggtttttagacctctacaggagacaagaaattataaaattcacaggcaaattgtggctactgcactagctaacatttaatctgtgatgactacatactcctcgtgactttaagagctttaagtattttaactcatttaattcttagaacattgctatgagttctgtaatactattgttgtttaccgaagaggaaactgaggcacagaaagcccaagctcttgcacaaggatcagaagggggtataaccagaatttgtttctcagcatcctgaccaacaattattttacctactaaacagggaagcctttcaaatataatccagggtatccgcttcattttacaactaaagaaatgaaggctgggtaaggataaaggactcacaaagatcgtgtgtttaggtaatgattgaactatgacagaaactcccattctccagatttccaattctgaactctcccttctctgtctataataaagttctccaaaccaaaaatatatagtgacttcaatcatctagggacctaacatttcttaccattttgaagtggctttgtaatgtttaacttggctagtctgaacttcgttttctggaatttcctttcttgtatgcttctgtttaggatggaccacaaagacattcttctgtgagacttagagaaaggaagcaaaacaggcaccatgttgttgctcacatatgttgctgctgatctttcaactgacctcattggcatgaggctacagctgggcctgagactgctctatattttcttaaattgtccttcagtttctttgattcttgggccaagtgtgtgtgtttaacttcatgatgaaaaacttcaactacttcagatcatccgtgccaaaaatttcagaggcagtgagaacatacacaggtttcaatgtaaattctcactgggtttcagcctatgcctgtagcttccagcttcttctaaatctccctgactttacatatgtctttcattactggcttcccagccactccagtcattatataatgggctcataaataaagtggccatcatggcaggaatcaaggttatctatggcatcaccaacatgaattttctttcacccaagccaatatagctacagccattgccgaataccccgaattgcaggaatggggccattcctgcaatatggccccatttcctgaaggatcagccagctacctgttgccaggttaattacattgggccacttctgtcattgtaggcacagcattttgttttcactggtcaagctattaatctggatatagatttgccttcttacttgcagtgcatcttcaaactgtccacagatttacaggatatcttattcaccatattccacatagcatcatttctgaccaagaaactcatttcacagcaaataaagtgcagcaatacacccaaacccatggaatttactggtctaatcatattctctattgtgctgaagcagctagcttgatggactgatgaaatggccctttcaagtcttattcatgacagcatctgggtggcaacataatgcagggctagaaaaatgtcctccaggataaaatatgtgcattaaatcagcatatggtatatgacgttgtttctctaacaactaggatttacatatctaggaaccaaggggtagaaataagaatgcttcctctgaacattatccctagcaatccaataactggatttttgtcttccatccttaccacttcagtttctgctggtctagacatctgggttccaaaagaagaatgcatctcccaggagacatgacaatgattccattcaacaggaagttgagactgccacctgaacactttgggctcctcatgcctctgaatcaacgggcaaagaagagagttatagatcctaaccacccaggagaaattcggtggccactacacaaacagagtaagaggagcatttctatgatgcgggagatcctctagaatgtttgttggtattcccaggtcctgtgattaaagta

SEQ ID NO: 34909 - DNA, 2300 bp, Homo sapien
gcagcagaaacgtctcggggatttttgaaaacctcttcctgtgtataaggtaagttgatttttgttcacatgtgcagtgcaatccttaactcgtgatgagaataaccggttaagaaaggcatgaagggcaaccttcaaggaaaactttgcagaatacttaaagtgttagttgatattctgctggggcacccaggacacgaacttttaagctttttgagaagtcgtgtaacagctgggcattttaatgtagatcatcacagttattcttcatagcaactctatgatccccattttatagatggagaaacaaaggcttcaaaagagcaaatcagttacagccaactcatacaactagtaagtatccaaggtggaatgtaataccaggtctgtctgctgccgaattctgtatggtgaactcttcattctgctgcctcgaacttcccacatccatttgaacagggaggcagatgtagggaggggtgatggtgacggctcatttgtacttggtgtgcacaacacttcgtgtataatagtatcattattttccaagaacacttaaactcagttaggatagcctctctaagggagcattatttgttttatttggcaaattagaaaaactgatgtacatggagcttagagggcaaaagaccaaacaaaatgagtgtcattggagcaaaggcgtctgagttctcattgatgagcctttattcccttcgcttttaaatagcattgcactgtaattgtcaaccatttcccaggtcacacagtctcaacagacattctcatcaattttgtaaaatcctttacagagtatatgtactggagaattttcactttcatccggatgggaaatttagaagtagaaaaaaacagattttttttaaatcacggcagttctccatgtttgtttccaatgtcttcaacatcctttaaagatgttttagtagatgctgtgacttcccatttttaagagaggccaggaaaaacccttgaaaatataatctcaatcaggcagattaacctggtgccattagttcactcatgtggcagcatttgcatttttgtatagggcaccttgcatagaaaagggtaaccaatgagatcttggttctataacttaagggtagaaatcttgtttggtatattgtaagataattatttatctttccagaaatcagttagataaaaagcttaatgtctgagaacctcacacagatgtaatagtacagtttgagcatcacaaatccaaaaatttgaaatctgaaatgctccaaaatgggcaactttttgaacaccaatataactcaagtggaaaataccatgcctgacacctttactttctgatggctcagtgtatacaaattttgtttcacgcacaaaatgattttaaatattttttaaataactttcagactgtgtataaactgtaaatgaaagttaaatgaattatgtgtttagacctgagtccaatccttaagataactaattatgtatatgaaaatattccaaaaatctgaaaaagtccgaactctgaaacacttctggtcccaagcatattggatgggcaatactcaacctgtgtctgaattttaaattccaaaaacgcttcttcttctttttttctttttctttttttttgagacagaatctcgctctgtggcccaggctggagtacagtggcgcgatctccactcgctgcaagctccgcctcctgggttcacgccattctcctgcctcagcctcccgagtagctgggactacaggtgcccgccaccacacctggctacttttttgtattttttagtagagacggggtttcactgtgttagccaggatggtctcaatctcctgacctcgtgatctgcctgcctcggcctcccagagtgctgggattacaggtgtgagccaatgtgcccggcctccaaaaaccctttacataattgctcagagcccataaggaatgagaagacaagaggtaaactgctatttctaggaaattaataatagtaagaagtagaatctgataaccagaagatgaagaagataaaatttaaatttcccataaaaaatttgaaggcttggaggagccaagatggccgaataggaacagctccggtctacagctcccagcgtgagcgacgcagaagacaggtgatttctgcatttccatctgaggtaccgggttcatctcactagggagtgccagacagtgggcgcaggccagtgtgtgtgcgcaccgtgcgcgagccgaagcagggcgaggcattgcctcacctgggaagcgcaaggggtcaggg

SEQ ID NO: 34910 - DNA, 2300 bp, Homo sapien
tttagtgattttaaccaatatattaaatgtcataagaggcatatcactatcccagagagtttatacactcaatttggccaaaacaacgtttattttgtcttcttatgtggaacttcacacacacatacaccatacctagctagtatttatgcagaagtttgctttgctgtatctgagattcaaacaaaatcctattttgagattgacctgcaaaccaatgaagcttgactaggttagaatagaggtaacagctcgattgtacgtttttcccctgagagggaattcaaaagaaacatagttgttaatcctcctacaaggaattctacggtatgcttatcccttcttgaaaacagcataggctattctctagaaagaagacataagattccatgtaaacactccagccaatagatgtacccgtttcacatgagcaggagtgtgtgtgagttcttcagtgggtaggtggcacaggtactgaaggaggtatcaggactgaccacacccaagaaacatgggtcagtggtatcctgccatctgtctgtatactttccatggtatggtgatagatggccctatctgtcaagagctgtgatgcttacatcagatacatataaatcacttagacaagactacccttttacagaaagctcattcctacaaaagaacaactacatcaaacaaatgcatggaacaacaaacaccttttccttttattccatggcaccaagaggaaggccaaaagagggatatgacatattttgggatttaactttcagaaaaataatttatttattgtgataaagggtaacactttcttcatggaaatgtcagcatgggcaagtggaatttcaatgagcacagagactatttattgagtgcttactatggtctatgcacaccgctgagtgtgctacatgcgtagtctcatttatttctcaaaatgacactgggaggacagtattactgccctgattattttacagggagagaaacagaggcttgggagttaagggacatgcccaaggcaagagatcacacatcagtggaagagttgcaatgtgaccacaggaagttaggccctaggacctataaaagagaaaatcactaaaatagtagctcatatttaatgtatactgaccatgaagcacaacctttacatggactttatttgcatgtttttctttccacaactattactatcatcccattttaccaatgagacaacgaaaacatccagagttgaaactgatcaccttggtgatctactgccagtgagagaacagagcccctagctatttattaaaccccactcctctgccaccagaggaagcaccaaaggagtgcggtttaataaatagctaggcaaaggaagcaccatatccctctgtacagacgcttccatttcaaagattaatttactgttattattaaacccaggcatcaagctgggcaacgtggctcacgcctataatcccagcactttggaaggctgaggcaggaggatcacaaggtcaggagatcgagaccatcctggctaacatggtgaaacctcgtctctactaaaaatacaaaaaattggctgggcatggtggcacatgcctgtagtcccagctacttgggaggctgaggcaggagaatcgcttgaatccaggaggcagaggttgcagtgagccaagacggtgccactgcactccagcctgaacaacagagcgagactctgtctcaaaaaacataaattgattaaaaaaaataaactcaggcatcattttcaaatatcaacaaacatgtattacacactcaggattatcaaggccttgtgctagccgctacaactgaacacaaagaagcaaagttccttccatcagtaactgtaaaataagtctgggaaaacaacgcacaaagccttatggaaaatttaagattgaattctgttgaacaatttcttttactatgcagaagaagcacaagtaagtgattatttgaatggaaaggacaattcagatgatgaagatatcattggcatgtgtggtagcacaaaagtttcaggatgatgctggtattggagaaaacaagaggacttgtgaagggtagcaacaggatatggaggaagacatgtggacaatttttgctgagacagctggtgaatacagagaacagtgaatgcaaactggatcaagttagagaagaggtggaatctcaggcagagtttggactgtattttgtgcattaagagacgtttgacctcagccgtgacatgatatagaacactgcttgcagaagataaattcgcccttctaggt

SEQ ID NO: 34911 - DNA, 2300 bp, Homo sapien
tcttccaaggtttcatattattcagatgaaacacagaagtctgatttatggaagtggatgccttggtggatgtagatcaagagttttacaagtgtttggggtgaattaactaataaagcttaaagaatccccacgatccagtaaccataaaatctattaagcaaaccacgccacttttgagagtaaaacggggtgttatcagtaattaaaatgaacaacacacataaaccaagatcatgccaggcaaacgaggaaggggtcagcttctctcaagagctgtgagatgtggctgaatgagcagatctctgagtctctctccaccccaactccccatacccaatctagcaagaatctcctctttttgtttaccttgtacctcatggttctgtgtggatgctcgtttaaaaaataaatacaatgggcacctgttgattttgtctgccaagcatcagcttcttttggtggctgcaccttaatttcctttgcggaaaaccaccccaccccactctatatcctttatcatcagtctctgcctactccatagatagaaacatcttccaaacctggccaatcaggcccttctattcccatgaccacaatgattggttgcagcataagcataagaccagggcagcccaaggagagtcaatcctgaggataactaagaaggtgaatgctttttctattgaatttctagttgtaaggattatgcaagcctgcagcttctgggaaccagtgagtagacggcctgtttgagatccatctaagccagagggagacagacaaacatgcctaagctatcagtgacatggtttgcaccactgactctaggcaagcctgaagctaattatacccctgcgctcggaggtgaagtgaaacaatatcttctaaatcactttttagtatttatttattaattcttatttctgttgtccttatttacttaagtcagtttgaactgggtttagaccagcccatcaaaggaataattaataagatgtatagtttgtgaaaaccacttgaccaaattaacttggcaatccctttcagctccagggacatcactcaagtggcaccagctaagtaagaatgagaattagaattactattttccaggtgctaatattcaaatctatggcttgaaattgctgtgaactttttcaatgcttactacttcttctaaaaatagattttcttaacccaactcactcactttacagttggaaaaatgagccagagtgtgaattctaaattcacgttccaagataggaagcttataaaatgttgtatatgatctgattttcaaaacatttgaaggggctggtttagataatagaaattcagctaaagcaggaggctggaattaatgctttcaaatttatttgcttctgattctaaaactcataactataagctatttaaatgcatcattgttagtattccagggacagtcacaacagtaaataaggtacatgctcagtgcaacgtgccctaatggcatctaaggaaaaatatctaccattttgcatttcttctgaatgcttgacttaaaatgctgagtctatgcactgtgatacttttatttttcatataacttgttatttatactaacaactaagtttttcatacattttgaaaatagaataaaaatatgctcttaaaaagatgagtccccagcacccacaagctactggcacagagaagttcttcaaatacttgctgaataaatgatgaatgaataaatatggctgatacatataatatgttaaggaacataaaatatgtaatacagacaggagaatgtactttcctttagatactagttactacttaggtcagaacttcggaacatgcatttccagaaatacaagtgccaatgcaaggtgttagactttaaaaaatgataagttactgtcagcaaaaagtttgaaaaaataaagctaaagacatttttttttctgacttcttagagcctttaatatgtcagtatacattatcaatatccaagaagggacaaaaaggaagcagaggtttttagacataattattctaatttgaccaccacatttaattttggtgtaatatcttttttttttttttttttttttttttttgagacacagccttgctctgtcgcccaggctggagtgcagtggcacaatctcggctcactgcaagctccacctcccgggttcacgccattctcctgcctcagcctcacgagtagctgggactacaggcgcctgccaccactcctggctaatttttttttgtatttttagtagagacggggtttcacc

SEQ ID NO: 34912 - DNA, 2300 bp, Homo sapien
actgattttacaggtttagcctagcattgcaaggatttagttatatgggtctatacacaagagagtacttgaatgtgtccttcatactgatgccagaaaagtagagagaactccttaattcctctaagtatctagaaacacattttttagccaaggggatggttggctatttgaacgagaattttgactgtaccccgtggtttctacaattaaagaaatggcatatctggacttagaaagataatggtttcctaggagtttgcattcttagaccacacccagaaaattatgtttcgtttgagattatgcaatttaaggatgttgacaaatctgaatgcatgcaaagaaaaatggtaaggatgaagaaaaacccaggaagactgctatatacggaaaagttgctaaaaacttggaagggttggtctgaaggagatttagggatacattacagctgtctcaaatattgtggagtactgtcagaggaaaagaaatgagactatcctggctctgtatttcctaatagacctggggtaaatcgattgaaattgccaggagcttaatttgggctcagtgtggaggagaaatttctgacaacaatatgtagccaagaataggatgggatctgatttcccttgtgcaaagagtaattaggaagagactggatgttggtaatattgattgtgaaaagcagtgagttgtgtttttacatgtattaatgcaatcttcatgataacctgttgatgttgcttctgttattatttccatattacagatgaagaaactgaggcacagtgtgggtaagtcacttgcctaaaatcacacagttagtaggtgacaaagctgggatttgaactcatgaatgtcctatcgtcaatttgggaggcttaaacatgctgacatgttgccttcaggtggccatcacataggtggatagtatttctgccccgggtttccagaatggtctttgaagagctcactgatcatggtgtattccatggtgcataacagacagattctgtggtagtacctaatgcaggcagaggtgccttcctgcaggtgtgccagagtctttggtaatgagccattatgctccgtcagtcattctgctgtaaccatgcatagtcatcctgtttccttcctcacagtatatggagttgggatgcattgtttcttggtagaatttactttgtctgccatattgataatatccacttcagcagctacactatgacattcccttaaaaaaaagaaaattacaaaaatatccaaaagccctacttttgggatatgcagactgcaactatactttccttccagacatgatggatagttgtttccctataagatactgcaccttgtgtgagtgttggagagagatctctgctttattggccctttgcacgttaggaaacacaataaaagaggtaaagtgctttccagtacaggaaaggaaaaataatccctttcaaacttgatcagatctatctaaaggtaaccgaccaggaaggagaactgaccccatttcacatacaggtgctttaaaataatttcacaacaggtagttaaaatgtaactatgctgtgctgtcaatcacatctcgtccttctggattttaacgcttgttttacttgagggaagatgatatttgaacattctatagcatccgtcaacaggaatgcgcacatggtttcaaataagggttttcagccttctgaaaccaattacttctgcctaagtggaaatgccagagcagagatgtgtcagcaactaagagaataatttaaaaaaaaaaattaagtatacacagtgatgtcagaaaacaacagaaattgtgcattcctgcacacacatgtacacacatgcacatgaacaaacctttttaagagatatttcaaaaaaaaaaaaagtctgtgtcaaacaacgttaacccagaaagatgcagaaatgtcagagacattacatgggcaggacttgcggttggcatttggctggcagcgggggaggcgtcctccccaactaattcctcaggaacctcatgctgaggctgtctacagggaagggagcagaaagggaggagggagagagcagatattgcctattatgcttttccttcccagctggagaaggcctcagctgtgtcagactgggactgctggtgatttttctgtagttagagggaaacacaaaacgaagagcggcccactcccagcttacgccgatggtgagcccacctctcctgatcattagcgttgctggcacaattgaatgcaagccagatcatctcttatggagacccggca

SEQ ID NO: 34913 - DNA, 2300 bp, Homo sapien
cctgggcaacatagtgagaccctgtctctattagaaatacaatttttttatcaaattaaaaaaaactaaaatgcatggaatcccttaaatctcactttaacggagaaaagtattctatcccactctctctaagccaggaagggaactgctgaccaattggaaacctgggtgctgagagtattacattttctaggaaatgtggagaaatggctttggcttgggaatctggaaattaagcctgcagtttccgcagtagtttctggttctgtcttcctgcacgccctcaggactcggaacattattatgcacttgcctagagtcctgtgcctctatccctttacctgggctgattcctatttactcaactaccattcaacaaatatttgagtggtctccatgtgctggaaatgagagagagcaaagaaccatggagactgtctttaaggagctaatggtagagtgggggaaactgacaggactgactcatcctttaagatcaagtttaggttggcctcttcttccaggaagccttctggatgatgcccctggccaggttattgctacaaactgaatgtctgtgatccttcgaagttcaatgttgaaaacttaactcccaatgtgatggtattaggaatggggcttttgggaggtaattaagtcatgaaggtggaactcctataaatggatgagtgtccttataaatgagaccccagagagcacttcagtactctttctgccatgtgtggacacagcaagaagactgcagtctatcaatcaagaatcagggcctcaccagacactgaatctgctggtgccttgatcttggacttcccagcctccaggactgcgagaaataaatgtttgttgtttaagccccctagtctatggtatttttgttgtagcagcccaaactgaccaagacagttaggaatccctgttctgtacatccctgaatcagaggttctcaaagaagcattctgcatcagaatcctgcaggaagaataaacggcccaccccacatctccccagggagagcctccaggagcaggccctggaatctgcattttaaacatgattctcaggtgattctaacacacaatacgatttaaaaaccattgttaatgccaactttcttatagtagaattaatgacctcttaatgctcgcctccctatctggaaaatgagctctttgaagagaaaaatgatgtcttattaattttatattcattcctctcttagtaccaagcacagaatcgggcactcaacagatgtttgttgaatgaataaaatgactgtttcccattcctcacctgtctgtgagggctgaagatgggaatgtttagggcagtgtttgctccttggaatttctgataagaacgaattcgttagtcaatccttattcactcggctgggagcggattgaatacacagtggagaagcttggagaataacttgcttgcacctcctggatttgatagcaaggcatttttttggaccataattagaaccatggaaacacgcactcaaaccctgggctgtgccttgacaaacacttgtactggaacgctgaatcagaggcctggctgggtgctttaaatttactacagtgtaattttttggcattacccttttcgtttggttccgctaatgaaaatgaaatatgtaatttcaccaaagttccactgtaatttagcaattaatgtgcaattattttaatgcattactttctttttagcaaacaaacaaattaggaggttgcatgttttgcctggctttaaattactaaaactagcctctcattttccacatgggcaaatgttgctcatgtgcctcgtaacacatttagatttacacaatttcctagaaatgcagacacaggagggtgagcaggcatgcacactttagattgagagactttcaaaatcaaggctctgaacatctcgggctgatatgctggctgaatcggatactccccagttccccggagcctggcaaacctcagaccctagaaacagcactggagattgtatcttagtagcaggatgatatccaggcattgtttcagatccacattcaggctgtccaatctggaggaccattggcagcataagaaaaagaagaaaaaaagtgcatagaattctgccttgaacatcactgtccacgggctgccttcaaaagacagaagggctctaccacggaatgcctgtttcagatttaaaaaataacctgctgagatatgctggcagggcttccttcagcagccacaagaagcttctcaggtgagaagaaacccactgct

SEQ ID NO: 34914 - DNA, 2300 bp, Homo sapien
atgtagtaaaggcttgacccaaacagaggaagtgtagagggctgtgggaattcccccataaaggaatggggaattccaacttttgggtgttgagggccagtctgaggctggtgtccctggactctggtgcctggtatttatggaatgaaggagggccaagcactgagccccgaggcctggcctcagggaaggaattaactatgaagaaggcatttggaggcgaggctcactctggtgggtcttttctgtcaagaggagatgagaccacaaacatgattccctctctggctcagcaacaccctggtccatacagcacagggtgctggttcttctggaagaccgtggggctcaggcaagagaagacacccaactgggcttcattcgaccagtccagcttcctgccatatgccgagggcaaaaaagggttaaattcccactcagtacacagatgtaagaggagatggggaagtgaacagccagttgatcattcactcaatcatgctagcttgctttttgtatttaatgctacattttaaatttatttatttatttatttgagacagagtctcgctttgttgcccaggctggagtgcagtggtgcgatcttggctcactgcaacctccacctcccaggttgaagtgattctcatgcctcagcctcccgagtagctgggactacgggcgtgcaccaccacgcccagctaatttattattattattttttagtagagatggggttcactatgttggccaggctggtctgaaatcctgacctcaggtaatctgtctgcctcaccctcccaaagtgctgggattacaggcgtgagccaccgcacccactaattctacatttttaatttctcaagaaacattgtgtctctgattgttttattctcttgaacatttttcaagatggaattttgctttgcttactttcttctttttcatagccccacttctcccaaatccataacacacctacctcaaagtatcacaggaaagaaagcctgtgaagctgctagccacagcctgtcacaagtaagtcctcaatttagctaacaataacaatggcattactattacttttacaaagtgttttccctgacaccctctggaagtcctcccaggaaagcggatccacagcgctcctaattttagggaccctgaggggagccagctacatttccaaatggtggggaagggtggagggtgggcgaaacgtcgtagggagagttgaatagaaggagacagatggtgcctgtgttgggggaagggaccagagatcctggaaaacttatgtttcccaattcgcaagaatgtttccatttaaccacttcttgcctgactcctgattctacaccacagaaaagcagggagtttttaagatttggggccacctgtgccgagagcctggctactccgggtggagagagacaggagcgttttaagtacaggcagagcggtttttggcccagccccctaggtctgggacgcaggtgaggggcggtctctccttcccctggcaggggcagcgtaagggtggccggcggctgggactgtcccacgagggggcgcgtctcgggccctaggacccgccctcgaggcgctgcgcgcggggaggggacccgggaacccaggcgcccggcgctccgcctcccgtttccggggcagcgcggttacctgcaccgcccgagccgcacctggcggaggcagaagtcacaaacccggcgagctcagagcggtggagcggagaggagggacggcacccggctgcagggaggagggaggcggcagcggcagcggcggcgtggagggcgcagcgcgccgcgcggcggaggagggcagacggcggcggcggcggcgctcggctcgctctgcccggccggctgggcgcgcacccgggctcgcaccgcgccgctgcggacgcacatggcagcgtgagaggccggcggcgggaggagcgggcggcgccgggtcggggctgcagggccgcatggacagcggcgccaccccggccggcccctactagggccccccatctgcgggcgccaccccccggatcatggtgcctcggcggccgcccgggctaagagcggccggctggagccgctgagcccccgctgcggccgggagctgcatgggggagcgccggcagcgcttgggaagatgccccggccggagctgcccctgccggagggctgggaggaggcgcgcgacttcgacggcaaggtctactacatagaccacacgaaccgcaccaccagctggatcgacccgcgggacaggtaggaccctggaac

SEQ ID NO: 34915 - DNA, 2300 bp, Homo sapien
ttgcgccattggactcaagcctgggcaacaagagtgaaactccatctcaaaaaaagaaaaaaaaaggaaagaaatattgctgtgaggggactagcacaatgatgccttgggccaaggctttggttgggtgagctgggacccctaaacataaaccctggccccagccagggggaacctgagcctggagcagtcctgggaagccagaggtgggctccaggtgtgggactgggtacaggtggggacaaggagccattcacgggctgcagagagagtctgagaggctcgtgaagcaactaacctttcctggcatgagggtggcaggaggtgtggccagattccagagggctttcccatcagggattaggacactgccctcgccaggccctggctcacctgtgcacagcattttatcggaagcacggaccttgccccaacacattcctgagataacactcccccgcccgtctcagaagacactcagtccgttggtgtgagggaggctgctgacaccccccagattcatttccagtttgtttgacgttggcatgtatgtctgtgtaacatgactgaagaacgagtcattagtgagctgtccaaagtccctttgggaacattccaggaaaataaaccaatattccatcaaagccacaaataactttttttttttttttccattccttcaaagcaggctttctcagagtgtggtccacagacttcctgctttagactccccagaggagcttgtaaaatgcagattcctgggccgccaccctaagcctactgaatcagaatcccagtggggcttctgggaactgcatttttatatgctacccagatgattctaatacaccttaatctcgaaaacctctcactctctttgcccctttgcttgatcgttcctttgtgtcaacaccgtgtgcccgctgcgctctgatactacctccctgtgctgccccacctggtgaacttcagctgaagggccacctctccctgggagccttccttgccatctttgtcccatcttgtgtaggggcccactgtgttttctcctaatatgaatctaccacaaagtagtagtttctttctgcctgactgctcccctgaatggggaagcatcctgcccagtctctccaggcccagcagaaagttttgcctataattggtactaagaaaggaatcagtgcaagtgaagggtgctgagcggcaacggaagggctacagagtaggggtgacgaatggtcgcttcccgttaagaagctgtcaccttctgactcctctcctggtgagtctgaactcctaggtcaagtctggggccagagggcgagcatcagacccaagaagaggccaaggctctggctggcaggaggcacagcccacctgtttgggactgcggtgtccctggtgtaagctcagatccctgtctgtatttcagggagactccatagcttgacattcttcctgctacagaaaaacagatgaaagaacagttttccagtcccagggctgaccccaaacccaggacagctagaatgctcaggcctcccccctcttttcaggcaggagaagctgaagaatagaactattggaccatgaaactcccaagagtccttccccctcagcgtttctcagaatttgcgaccacgattttctctgtgaggctcgcaattgctatttgccaaactggtaactgttgacccaacagaaatcaaacaaagataccagcagccccagacaggctgtcttcatcgcatcagtgaagggagagcaggtgcctgggatcgaaaggacattgtccatcacctggctctgaaaaacaaaatgcatttccttattcttaacaagctgagcaccagaaacctgctttaccagtccagggtgcctcctggaagctggctcgcttatctgcatgtatgtgagggctgggggtgtttttgtggggctggctccgggcagggtggctttggaaaggagaggcctgacctagcgagactctagggtcagcccagactgctgtgacctcaggggactcagcccaggaggtccaggtgagggcagcctgccctctacgtctgcagtaggtgaagaaccccttggttacttgaagagaaagaaaggactggctgggttgtaggcagcagggccgagcagctgagggctaagtgcacagcaggccctagcaaatgcttctggaattgaattggtccaaggggagactccagctttagttcaacatgggctgtatccgaatccttctgaaatttgctgggattccatgagggagtcaggtattacaaggtttt

SEQ ID NO: 34916 - DNA, 2300 bp, Homo sapien
acaaaccacttctgtctcatcctgcaagggattcgaagcccttcttgccctgttggcagaggacagctgggcacagccccctccccagagtccccagccctcagatatgctccaacaaacaacaactccctgcagcccctatgcccatctgcagcagggccactgcctgtcccggacactggctgtggggagcctccttgccacggagcatcttctaagctcccttagactaatttttcagactaaatctggggccggtccttgccgacctgataggcctgccgaggcccgagtcctggaaaggaatagacaggctatttttagtggggagacataaacggggctttgttttctctccatggaggctgaagtaaccgcagggggagcctgtgttgagaccgtgctccatgcctcgctctctcctctgcttggaggcgcagacgatgaggccgggatgaaaacttgcttctgctcaggattccccatgagggttatttttagcccaggacagtttggtctgtagcaggaaaccacaaaggaatgcctgtgagtagtttctcatcctgaaataatgagtttgtggtgttcccgcagactgtaaaactcctttttctccaccttggactgaaacctcaggcctagcctttggcgaaagtgtgatgtagttaaaatgcatctctgcccctggacctttttgacacctcggccctccttctccagaagctcacccctgcctgtctctggtttggtctgaccttcagaaaactatgtcaggacacttttttttttttttttttaatttttcccccatcaaaatgaacctgtatgtagggcctggataagccaataagctctccagactagaagcgttttaatcccttatgtttgtacagtaattcttagctcatcacaagattgcccatcccatattccatttgatgttcttgacaacttcatgagtatgggctaggtggataatgttatccaggctttttagaggaggaaactgaggctctgtgtatttgagagacaacctcagggtcatcctagtaataggtagtagggctgggagtttttcatccttctctccttttcttcattgtgttcattagctcaacacatgcttattaaagactggttcttgaccagcatgattttgctccgtctccctcaagggacattaggtaatacatggagatattttcagttgtcaccattcagggtgggggtaccaccagcatcttgtggggtgaggccaggtatactgctaaatatcatacaatgcacaggacagcctgccctccctccaaaaaagaatgagacagacacgttcaactctgcctcctgttcccaagcctcccagagtcaagtcaacgatgctaccgcataaactataaattatcacacaatgtaacgactgcagagtcacagctatgtgtgatgtatatgggaagcccctacccagcccggaggacccagggaagtaatcagggaaggcttcccataagagctgatgtttagaggactgtgacttcatgagcagtgttgcttctgcagccacacacgttggccgtttaacagggactttctatgccttttttttttttccttttctttctttcttttttttttttttgagacggagtcttgttctgtctcccaggctggagtgcagtggcatgatctcagctcactacaacctctgcctcccaggttcaagcaattctcatgcctcagcctctcaggcagctggaattacaggcttgtgccaccatgcccagctgatttttgtatttttggtagagacggggtttcaccatgttgctcaagttagtcttgaactcctggcctcaagtgatccacctgccttggcctcccaaagtgttgggattacaggtgtgagccaccatgcccagcccgggaccttctatgccttatcccacaagtgggacctagggaggaagggttagcaggacagagggaggggccttcttaagggactgaagtcctgtggtctgtgcttttcccctggggagaccctgtccctcaccctatctaaggctgacctttcccattaactgtctcctagaatcgataagaaaatgtctgatgctcagggcagctacaaactggatgaagctcaggctgtcttgagagaaacaaaagccatcaaaaaggctattacctgtggggaaaaggaaaagcaagatctcattaaggtatgcaagttcctgttgatgtgggtgccatcttgatttctcctgagtattcctgtatgccagtcgtatgcgggctatttc

SEQ ID NO: 34917 - DNA, 2300 bp, Homo sapien
ctgaaagtggcctgtgtctcagccgccgtatcggacgagtcagtggctggagacagtggtgtgtacgaggcttccgtgcagaggtaggtgtctgggtgctggctctctctgtggccctgtaagccatgaactctgaatatccagagcctaggcctgtggagaggcttaggttttggcccccacagtgtgtgggaggagccccaagagggcatgaccccaccttcctcttggctgcccaaggcacagacagcataacttttcctggggttagagatgcttcaggtttgggggagtgctagttctgtggtagctacgaaaaaggtatatggctaaggagcaagcactagagaaagggaaggccccttaagagaggagtccaagctgggcatagtggtgtgagtctgtaatcccagctacttgggaggcttcagtgggaggatcacttgatacaaggagttcgagaccagcctgggcaacatagtgagcccccatctctaaaaaaaattttttttaattaaaatttaaaaaaggacctgaagggaagctgagcaaaccccaactttccttcctggggatgtaacctcagcctcccagaatagtttgttcactgtagggaagcctaactcctcctcccctgttgcctttcagactgggtgcttcagaagctgctgcatttgacagtgacgaatcggaagcagtgggtgcgacccgaattcagattgccctgaagtaagtgacgaggacgaggaggacagaaggaacggtctgtgtggggtcccttcttcatccacagcgttccccagcatttaccttcacagccgcccagggtggaaggcagcaccagcaggacctgctggccattgcagcttcttaactgaagggatgctgattcgttcctcacctcccagccatccgctttacagataggagaaatgaggttggagaaatggggttttaaaagaccttatgacttggcccaactcactgagctggctggtagcagagccaggactgggactgagacctcctgcctctcagtgtgtttgttcattgttgctgtggcttttgtctttccatcccatctaggtttcattgatctggatggaagttgatcactgggggctgcagcccagattgggtcaatacacacatggttgttctttttgttttcttttgttgggggatgatatgatctcaatttttttttttttttttttttgagacagggtctcacctgtcacccaggctggagtgcagtggtgtgatctcagctcgctgcaacctctgcctcctgggttcaagcgattctcctgcctcagcctcccaagtagctgggattacaggtgtgtgccaccacgcccggctaacttttgtatttttaatagagatggagtttcaccatgttggccaggctagtctcaaactcctgacctcaaatgatctgcccgccttggcctcccaaagtgctgagattacaggcatgagccaccacacctggccttcaatattttttaataggaattagttgacaacatttccatatcatgaaatttcacccgcatttatgggttctttttaaaaattcagacaactggctgggtgtggtggctcacacctttaatcctgacactttgggaggctgaggcagaggaatcacttgattccaggagttcaggaccagcccaggcaacatgatgaaaccccatctctactaaaaatacacaaaattagctgggtgtggtggtgaacacctgtagtcctagctacttgagaggctgaggtgggaggatcacctgagcctgggaggtcgaggctaccatgagccccgatcatgccactgcactcaacctggatgacagagtgagaccctgtttcaaaacaaaaaaaaaattttcaaacaattggcagctctagctctacatccctgcatggcagcaaagcactgggcctgtgctctagagctcaccataggccccagggcagccaacagccacgtcctgtgacttttaatggagagaaggaatgagagagatgagtgtgttactaataggtacttcatatgccccttttcatttcaggtatgatgagaagaataagcaatttgcaatattaatcatccagctgagtaacctttctgctctgttgcagcaacaagaccagaaagtgtgagtatgtagctggacaggtgtatttcataccctaaccctctggagttacccctgggggtcacttttctgccctgtcctgatccagttatgggccttgtcaaggcactgtgggtttgtactgcatatgactgt

SEQ ID NO: 34918 - DNA, 2300 bp, Homo sapien
aaaatctttcgctattacaaagagggtcagaatgaagactcttgtttgtgggtcgttttgtacttgtgcaggtttctgcaggtgtatctgtgggatagacagctacaaggagaattattcggtcgaagggtaaaatgcatttatatttttgctagatatgactaaattccttccgtcgggtttctgccattttacatttccacgagcaaggtgagagagggcctatttccccataacctcaccaatggcatttgttgtcaattttttaaacttttgcaaatttagtggagaagaaatgatacacagttttctacctcacttggaattaattacttgttcagttcctgagttccttgggagagtgctggctcccagaaggtggaaccaggtggggaccatcattatcctcagtacctaacacagaacctagtgcttaatataagtaacacagaatgggtattcaacaacaaaaaaatcaacccaatttgaaaaggggaaaggacttgaatagacatttctccaaaattaatatacaaatggccaatatgcatgtgaaaagatgttcaacattactagttatcagagcaatgcaaatcaaaaccacaatgagataccacctcacacatatttggatgatggctatccaaaaaccacacaaaataactagtgttggtgaagatgtagagaaattggaactcgtgtgcattgttggtgggattataagcactcccttagcaagtcttaaggtaaacagtgtagtagttccactaaaaaattaaaaatgtaactaccatatgacctagcaattgtacttctgggcatatattcaggagaattgaaagcagggttttgttgttgttgttgttgttgttttgttttgttttgtttttgaggcagagttttgttcttgttgcccaggctggagtgcaatggcacgatctcatctcacctgcaacctccatctcctgagttcaaacaattctcctgccccagcctcccgagtagctgggattacaggcatacgccaccacgctcggctaattttgtatttttagtagaaatggggtttctccatgttggtcaggctggtctcgatctcccgacctcagatgatccacccacctcagcctcccaaagtgctgggattacaggcgtgagccaccgcgcccggcctgaaagcaggttcttaaagaattacttgtacactcatgttcatggcaacactgctcacaatagtgaagaggtagaagtaacccaaatgtccatcaacagatggctggataagcaaaatgtagcatacccatacagtggaatattattcagccttaaaaagaaagggggatctcttagcccaggagttcgagattacagtgaggtatgaccgcatcaccgcactccagcctgggcaacagagtgagaccctacctccaaaataacagcaacaaaaaaggaatacaattctgatacatgctgcgacacaggtggaccttgaaggcattgttaagttcaataagccagtcacaaaaagacaaatgctatatgattccaattatatgaggtatcgaaagtcatcaaattcatagaaacagaaaatatagtggtggttaccaggagctgtggggaaggggaaaaagaggttgttgcttagtaagtgtagagtttcagatttgcaagatgagaatgttcagtagatctcttttgcaacaatgtgcgtaatgtttaataccactgaactgtgcacttaaaagcggcaaagatggtaaactaaaggtttttttatcacagtttttttaattaaaaaaattcataggataagtcttcaataaagatttggcaaatgattaaaccaatcaatcaatgaatgaatgaacaaatgagctaattggaaatgttaacaacttggcctctcttcctgccgggatgcctacctctcatctggagtggtgttttttccatactgtcctcttgaaccaaattccctgacacctggtgtcccccccaccgccacttatgttctccttgtttccatccccaacagggaggcgcccagatcagcctggcggaggtctgccggtctggggagaggtcgactcgctggtacaaccttctcagctacaaatacttgaagaaacagagcagggagctcaagccagtgggagtcatggcccctgcctcagggcctgccagcacggtgagctgggaccaggtgtgccaccttcccacaaggccgcacccggatgttggaagggaaagcctctcccagaactggaggtgatcaggcgtcatgagaggagaacaat

SEQ ID NO: 34919 - DNA, 2300 bp, Homo sapien
aaaaaaaaaaaaaaatttaattaaaaaaaaaagtttttatgatgctttgaagaaatatatgtaaagagcacttggtaactgttccattgtgactttgttatttgaaaatcttggccgggcgtggtgactcatgcctgtaatcccagcactttgggaggccaaggcaggaggatctcttgaggtcaggagtttgagaccaccctggccaacatggtgaaaccctgtctctactaaaattctaaaaattagccaagcatgatggcagtcatctgtaatcctagctactagggaggctgaggcaggagaattgcttaaacccgggaggcagaggttgcagtgagccaagattacactgtcgcactccagcccgggcagcagagcaagactccatctcagaaaaaaaaaaaaaagaaaagaaaaaaaagcttatatttgcttattttcagtgaaaaaatatgttctgttttcattttagcgcagtacgctttaatgtattaaaatatccttaaactgtctcccccgtttggaaagcccacacctactggccaggcagactagtcagaactcagttgagcagtgaagttagtcttacatatggggtattggactcctatgggatcccgaccacatcaaaaaagttaaatagagagtgttttggattcaggttttcttgtaatcatctgtaatgatccttccctctctgtaacggttgttccctctgtcgatacttggttagtttggacagccactgcctagaatttcaatggagcggatgggttgggacatacaggtaaagataagggtagcaaatagagaaattaagtctattttctttgtctctttctcctcctcctctcctttccctcccatccccaccttctttttcatcgtcatcatcatcatcatcattttctgtacttccttttgcatcaggcactgttctgtttattatgtgcagtttaccaaggctcagagagataaccaaattacattaagatgtacatctcatcagcaaagctaggtctcaaacccaggtctctcactccaaaaggagactgtgagctgataaaggtctcgaaaacaaactcctctcctttctagagcatgaccttgagtaagtaacatcaaccctagacacactagttctctccttcccatttctcaagtgagtcataataattcccacctgtcaggatggttgtaaagattaaataagatgctacacataaaccatctttcacagtgcctgctatataccaggccttcagttgattttagttccctctttcccttcttacaagaaaatgtcaggaatttttcaggctctggcccacactaccaagggtaaccacaaattaaccatgtgctcagaaaactacaggatccagtttttgctttggtattagctaccatttactgggtgccaattatgtgccaggtattcttctgtgttcctcatgtagagtctcaattaatcttcataacaaccctttctagcagttattagaggaaacagtctcagagagtttaaataatttcctcaagtcacatgggctttttcactgtagataccattcagtataaatgttcctctttcaggaagccctccctgaatgcaacttcccaagctttatcactgttccgctgttcccaaacagccagtacttatctcctttcacctctcttctatgtcatatccttactgtgttatgttactgatggttcacacattggtctgatgacactgtggtctgcttacagtcagagaccttaattctctctcacttcactgctaaacttggctatcttccatcacgatgctgagtaagttcatacatacaggagctattctctggagaactgctagttgaaggaattaaggacaatttttccagtttatcagtgaccttgggcaagacacttgaccactctggtctttggtttcaccatcaattcactgggagggtcacagctctgagatgctctgattcctggcaggtagggtggcacctacattgtacccaatgacccagcaacctttgtctctataggacgctgtgtctgctctgttggaacagacagcagtggagctggagaagaggcaggagggcaggagcagcacacagacactggaagacagctggtgagtgagcccgcccttgggccccaggagctgccctgcctggacctaggcccagcaatgagatcccccaatgccagtgcaactaagagaagggttccactgggaaggctgagaacccctctcctcatgggttctctacaggcaaaaaggcaatgta

SEQ ID NO: 34920 - DNA, 2300 bp, Homo sapien
ggctgtagtgcagtggcactctctcgactcactgcaagctccacctcttgggttcaagcaattgtcctgcctcagcctcctgagtagctgggattacaggtgcccaccaccacgcctggctaatttttgtatttttagtagagacaaggttttaccacattggccaagatggtcttgaactcctgacctggggtgatccgcccaccttggccacccaaagtgctgggattacaggcgtgagctaccacgcctggcctgttggtgtttaaaagggtaaatttatacttaccgtatgacccagtaattctattatctgttaggggctgatttgtgtccccccaaaattcaaacattgaagccctaacccctagtacctcagaatgtgactgtatttggaggtagggcttttaaagaggtggttaacacgagaccattgaagttgggctgggacctcatacgaggatatttggacacacagacaccagggatgcgcatgcacagaggacagactgtgtgagcacgctgcaagaaggcagccatctgctagccagggaaaggggcctcaggtgaatcaaacctgctgacaccttgagcatggatttccagcctccaggactgccagaaatcagtttctgttgtttaacccacctagtaagtggtgttttagttttgcaaccctagcaatatccaacagaaatgaaaacctatattcatgcatagacttgtacatgaatgtacaagaagctttattcatacttgcttggaaatgtaagtaatccaaatgttcatcaactaaactctccttctctccctcttcctcctcctcctcctcctcctcttcttcctcatcttcctcctccttttcctcaaccacccgcctcgttccaacgtttggaagccctaccctgggtgcatttaaaggcaggtgaacagatctaaacatgttgcaatatagccatccaatggaatattaatgataaaaaggagtgaactgtctgggcgcggtggctcacgcctataatcccaacactttgggaggccaaggtgggtggatcgcttgagcccagtagtttgagaccagcctgggcaacataccaaaactctgtctctacaaaaaataggataattagccaggtgtggtggcacacacctgtagtcccaacaactcaggaggctgaggcaggaggatcacttgagcccactggtggaggctacagtgagccaagatggtcccactgcactccagcctgggtgacagagtgagactctgattcaaaaggaaaaaaaaaaaggaatgaaccgctgatgcatacagcattgtggataaacttcagaaatgttatgcagacacagagaagtcagagacaaaacagcatatattgtctgattccatttgcatgaaactctagaaaagtcaaatctaatctataataacagctaatcatggctgcctagtgggtgattaaactgggaaaaggtaggagagaattctggtggggaatggaatgttctacatctcaagtacagtggtggttacataggtgagtacattggccaaaactcatcaaactatacactgaaaatgcctcattaacaatctttttttttgttttgagacagagtttcactcttgttgcccaggctggagtgcagtggcgtgacctcggttcactgcaacctccacctcccgggttcaagcaattctcctgcctcagcctcccgagtagctgggactacaggtgtgcaccaccatgcctggctaatttttgtatttttagtagagatggggtttcaccatgttggccaggcttgtcttgaactcctgaactcaggcagtctgcctgcctcggcctcccaaagtgctgggattacaggtgtgagcctggccccccaaaactttttaaaatatatcttcaatcatcaaaaggattggaagccctaccttgggtgtattaaaggcaggtgaacagaggcagagcggcttctgggtgggtaaccaaagtgctttgtcatcacaggaggtatgaggagaccagtgagaatgaggcagtagccgaggaagaggaggaggaggtggaggaggaggagggagaagaggatgttttcaccgagaaagcctcacctgatatggatgggtacccagcattaaaggtaggaagggctggggggatagaagggctgtcgtggggaaggaaccttcaatccttgtgccgaggcagtcagaaaagactcagagctaagtcttggcttccagcatcagggcacaagccctcataatggagtggcctttgggtcattct

SEQ ID NO: 34921 - DNA, 2300 bp, Homo sapien
aggatagtttatatagttctgggtaaaattaattaattaatttaaaaggaaaaaagataaaggcaaactttaagcttgttaaaaattaagtaaaataatttggattatttaattggacaaagaggactggctttgccaatgaaacaatatggccgacatgttccataaattggacaagctaaacttgcaaatccacagttttgacgaaaatatagtgagagcacttatgaaacatcatgccagaaaataatccattcccagaagttgtgaaaagagtttttagatgtcttttttttttttttttttttttttttgagacagagtctcactccgttgcccaggctggagtgcagtggccagatcatggctcactgcaacctcaaactcttgggtttaaacaatcctgcctcctaagtctcctatatagctgggactacaggtgcacaccaccatgcctggctaatgttttgtatttttggtagagacgatgtttcaccattttttccaggctggtcttggactcctgggctcaagaaatctgcctgcctcagcctcccaaagtgctaggattacagacatgagccactgtgcctagctcgatgtcaacttttaaaagtatacactgggatatgaatttttaaaatacttttatgaggcacggaagcgaaaacgtttagagtgctactttctaagttctggagtcatagagaagagtgaacaagataattaaggtccctgccctcttagaacatatatcccaggtttgctgtttataattttaactcaatatatatacaatgaaatattattcagccttataaaagaaaaccctgttatgggtgacaacatagatgaacctggagaacattatgttggtgcaataagccgggcacagaaagacaaatactacattagcccatgtatatgtgtaatctaaaaaattcagattcatagaagcagagcatagaatggtggttgtcagggcttcagaggtaggaaagatgggagatgttgctcaaagttacaaagtttcagttaggcgggatgaatagattctagagatgtaatgtatattgtatacttgcagttttcgttttcgtttcgttttgtttgtttttaaatagagagagaaaaggtctcactctgtcatccaggcagagtacagtggcatgatcatggctcaccgcagcctcaaattcttgggctcaagtgatcctcccacctcagcctcctatataccagggactacaggcacatgccaccatgcccggctatttttccatttttttgtagagacgaggtcttagctgtttcccaggatgagaatagatcttaaatgttcacagcacacacgcgcgcgcgcgcgcgcgcacacacacacacacacacacatgcaaatgataactgtatgagatgaaggttatgttaattattttggttgtggtaatcatttcagaatgtatacatatatcaaaacattacgttgtacatcgttatgatatacaatctttgtcaattatacctcaataaaactggaaaaataaataagattttaactcaaatgtcacttgcttagagatgtcttctctcacccaagtcactctatcacattgccttcctagcaattaaaactacctgagattattgccttttttggtctattttctctctccattctaaaatgtgtctgccgtgagaggggagatcgtgtctgttttgttttctttgtgcccccagagcctagaatactgtctggcattttaaagtacacaataaatgtttgttgaataaatgaatggatttgttagttttgtgcccatttcacaaaggggcaaagtgaggcctttgagagccagaagctctaggtcagtgactgtcctagtctatccaagcacagagcagctctggttagtgtctgctcaattcctctcccctcgcccaaacgtccctgagttgcggcctcgctcctgaccgaaatccccgcgggttctcctcgcagtgtctactggatcccgccaggaggcagcagaggcgccagcacccagtccgacgggacagcggaccggagggggtttccgcttccgggagaggctgaccgtttccgcttccgtccacttggcgagtgagacgctgatgggaggatggacgtactggtgtctgagtgctccgcgcggctgctgcagcaggtttggacgcaggagaccggcgggaaggcctgaaagagatggagcaggctctgactcctgcccaagcggcttcgggggcgggacagctaggcgaggaccatcctggtcctctca

SEQ ID NO: 34922 - DNA, 2300 bp, Homo sapien
taacattaataatagaaaattcatctgtaaatattcacagtctagtcactgaaaaatgggaaaacctctaccatgccttattattaccctttgctgtttgaggagccagaaatagaggtgcagttagaggacggtcactttttccaacaaaacccactccatagccatgtggatttttatccaaaggctcaacaaccagagggaatggtgagacctgataactaaaatactgttattggcaagggtttgaaatgtgtaagaacctaggagggaaaggaagattgagcaacataggaaaaggggaagagaggctgagtgtcaccaaggtccaaactccatttataaaaatactgcaaaaccaggagttgatggtagaaatgcatatgatccatggcaggagtaaatctctccacctcctctaactctctgaaaactctagagttggagcaagtcttccatttgcttcttatccccttaaaagaatgccttccacttcccaacagcccccatcaagggaccccaagaggccaccatgctcttatctcgcactttctttcctattccccttgcctgaatctggagtggggttgagccctctgccttcaaccttaagatttaggaagttctttccccaactgtctaacttggaaaggtagatgagtctgaattttgaagtaacgaatgcaaattccactcagcagaggcaatgttatttatgtacatagggatagtggaatgagttttaatagattctgtccaaaaggggtttgttcctcttatttcctctatgtaggaagttgtgtcttaggcaactttatcagtatcaatggaaaaatgataggcactacaatgaaatggcaggatgccaatatgagatatttcaggaataataagaaatacagtttgtttgtataaaataaactatctcaagaaagttttcaacgacagtgatagtgttcatttgtaagagagagttctagaacttcgatgtccagtgcagtagccactacccatatgtagctgttgagcatttgaaatatggttagtccaaattgagatgtgctctaaaggacaataaaaggttaaatatctcctaattttttgtattgattacatgttgaaatgttaacattggaaatattgggttaaagaaaaatacacaattaaaatgaatcttggccaggcgcagtggctcacgcctctaatcccagcactttgagaggccagggtgggcaggtcacctgaggtcaggagttcgagaccagcctggccagtgtggcaaaaccctgcctactaaaaatacaaaaattagccaggcatggtggtgcgcacctgtagtcccagctacttgggaggctgaggcaggagaattgcttgaacccaggaggaggaggctgcagtgagctgagattgtgccactgcactccagcctgggcgacagagtgagactctgtctcaaaaaaaagaatcatctgtttccaattatttttaaatgtgcttactagaaaagataaaatcacacatggtttacattttatttctattaagacagcaccgttaagaacatagagctttgaggaattgtggtattagaaccaaatctatttaccacagtgagcttacagggagttactcgagatcttaataaaaaattataatctttggcagccttcattatgattttgtgttcttattattccagtacctctagattacatatgggaaaagctaaagagccacagtggtgagatggttgctcactctagcaggtaatttcagtttgaaaggataaaatatatgaatcatagttcacattaaccaaagtacagtgatgaaataacttagactctgaccattccattttttcttaaagattgccctaaatctatagatgctaatacagtatttgccacaggtataaaacttgtagttactgtcattcaattaagattcttatctgtacagatatacaaatcagaaacttttaaaataaattgaactaatggaattttggctccaatatttagtcactacaatggaaatattaaagcaaggaacatgaagtcattgtagggttttaaaatggctactgactgacatgaattcagagtttcaaacagtctaaattctaaaaacttaactttacacgcttttcctcctaaataaccactctaataattcatacattcatatcttcaggtaaagaaaactgaattttaaacaattgaggctgggtgcagtggctcatgcctgtaatcgaatataaggacttgagtataaaatttgaaaactacatgggg

SEQ ID NO: 34923 - DNA, 2300 bp, Homo sapien
atgtttgttaacaagtgatagaaccaatatttgaatttgtgtgaattcttctttaacttttaacatttttattttattttggagatgggtctcactatgtcacctagcctggagtacagttgttaccagaaagggatcccgatccagatcccaagagaagggtcttggatctcttccaagaaagaatctggggagaatccagaatgtaaaatgaaagcaagtttattaagaaagtaaaggaataaaagaatggctactccataggcagagcagcagcatgggctgctcagctgcttatacttattattacttcttgatgatatgctaaacaaggggtggattattcacgagttttccaggaaaggggcggacaattcccagaactgagggttcctcccctttacagaccatataggataacttcctgatgttgccatggcttttgtaaactgtcatggcactggtgggagtgtcttttagcatgctaatgcattataatcagcatataatgagcagtgaagacgaccagaggttcctttcattgctatcttgattttggtgggatttggccagcttctttactgcatgctgttttatcagcaaggtctttgtgacctgtatcttgtgccaacctcctatctcaccctgcaactaagaatgccttaaactcctgggaatgcagcccagtagatctccgccttatttcatccaatccctattcaagatggagtcgctctggtaaatgcctctgacacagttgctattcacaaactctatcacatacagcctcaaattcctgggcctcccaccttagtctcccaaatagccgggactgcagacacacaccactgcgcccagcaagtttttttagtttttaatcattgtatttcaaaaagtagttgggaggattaaatttaaattttaaaagtaaggcactttgcaaagtgtcagcccttggtatgtactcaataaatggtagcttgtgtcctctcctgtccttcttcacatcccttggcttatcatctgcaagaaggggcagtaaggctctttggtaagcgggtttctttgactggaatgcccaatcctctactgccaaccctctatccatctattgtaaaaactacagaattcctggccatctaactgggcaacaaaagtgaaggccaagagaagatacccaatgccatcttctcccattccagctggaggactaagactctaggaggcaaggggaaagggtgtcctggctttactgtgagaactggagcaactaaattttcttctctgggagtcagttttccctttagaaggagagagctgggctggagggccccaggggaatatggatcggtggcaaaaagaatgctcagcaagcaatttaactcctcagaccgtgccccatcttcaaaatgagtgacaataaaatgaataattgcacgtggtccacaaggcccctgaatttaagtaaatcacacaaagtgcttagcagagtcccatgaacataacgcgttccatagatgttacctctattcctgctattgtcatcattccgaccctaacattcaaggtgtctctattaagcaaaaggattcctttgtgaataattttaatccgccaatgtactcaagggtctatcttaagcacagctctagagccctgattgtagcgctttccatggcctgacgaccagctttcctgtctcaaggggaaatctgagaatggccgaacagccatgacagtcctctcgaagagttcattcccccttctctccgcgacctgctgaggtctgagcccgacttccccagcacgcccatctcagtcaccattggtcgcctcctcgctggcgtgactaagacccagccctcttctcgctgggaccactctgaggcgatctgcggaagctgaggggcctcggaggaggggccgcgatgcatctcgggctttgtagtccacctgcacaactacagccagagagcggggcctcacgaaccggagaactacaatccccagcagccgggcggaagcggagcgagggggggctcgcgtcacgtgggcgttcggcctgggcgggctatttctcagtgcggcggcggcggcggtggcggcggctccggggaccggggccttttgtttggagcggctgcgggggggccccggagcggcgaggccggcggccttccccagcttgctcggtcccggccacccctcgcgggggtggggggccgccccctgggccgggcatctcctcaggcgccgccgccccgccctaggccggccccgcccggcctgaggggaggaac

SEQ ID NO: 34924 - DNA, 2300 bp, Homo sapien
ttgtttcaataattaaatgaatatatatctatttcacaattagagtggtatctgatgtataataaagtactaaataaatctgctattataataatgtttgaaacaggctgagcatagtggctcacacctgtaatcccagcattttgggagactgaggcaggaagatggcttgagcctaggaggttgaggctgcggtgagctatgatcgaaccactctactccagcctgggtgacaaagcaagaccttgtctctaatgacaacaaaaaacaaagccatcataaggcacagtacctggaacataatggagatttacatgcacatttttagataaattcctcagctatatccctctctcccttctcttcatcccctccatcccttccttctttccttccttccttcttccagttgcctcgttttcctccatcttcctttcttttctttctcccttcattattccctgcgtctttggcccaccattggtactcacagatcaactaggctcctctagggaacctgagggctgaaaggtccaatgaattccaaactcttctccctgaaactcctacagtggaagctcctgggggaaggagggatggatgataagagccagggagttggtgtgaacagctgagccctggaagatatgtggctaacctgatggggtggaagggggcaaatgggagtgagggagggagagacatggaaagaaacaggggcagggaagtccccttcaggaatggaggcagaggctggataggctgcccttggtcactttccctagatgcataagccctggtctccagaatctttccagatactgcggagggagaaggagtgagcaaggcagaacaagagcaggaaaaaacatcatattatttccttttccggcagggctgctctgatggatttaagccgcctgaatcacctgtgctcacccattctagaggaagaatctcaagctttgggtctggacttctggtctggctcctccacttatctggtgtgtggcttaaggcaagttccagagcctgtgagggcctaaacttccttcttagtgaacccagctctactcccttatccttcccagggaggcaggggttgcatagataaaataaggtaaagtttggatatgcattggaaagtgtcacagatgggcaaggagtctctatcgtcatgctggtgacctggaggatcaggtggcagaggcctgtcttacaacaagagcctccaagaaccttccagagttggacatctagcgctgtgggcagacttgacttggctcccagccttccgcttccaagaagggctgactaccttctctactgggatacattccaatgaaaaattacctggaaggaggagagagggccagtgcatgggtcctgaggagacaccatgatattctcttccctcgcctcctctaggaagacccctctcctggggaggagcaggaaaaatagcagctgttttaaaatttggtaagacagttccaaatgacacctgtagcagacttcaatagtcagtcctcgattggaagccagggccagccaggaaggagaagaggggtcccccagtgggttcagatacggaagccagggccacccaggaaggagaagaggggtcccccagtgggttcagataccctgaaggggggtctgggacagacagggacagcaatatttttgagtggcagtgagactgagaaggccagggctcagcagcttttcctggaagaactgggcattttgggcactgacatccaggactccgaaaagctgggtaattttaggggaggaaaaataaaagggagttaaaaaacaagaaacaaaggtcttttccttctctctcttcctcttattcctttttctgatctcaatgagcagctcttggtctactgccgacataataccgtttcataaacatgaaaacatcttcctccttcctcagacaggctatcattctttattcttatccttttgttttaaagcatttttattagtctatttttttcttaaatttttaaacagctatttttaaaaacacaacaaatacacaacacaaaacttggtaaaaataactcactatatggtacatatacgcagatggtgtaatatatttatataataaaagatgaaaatagtcactttccataataaaaataagttctattttttgtttattttacaatatacttaatattctcttcttctttaccttcctctccagcttcatttccttcatgctgaatcaccagggggtcccacatggctgtcccaactccatcaagctggagtcc

SEQ ID NO: 34925 - DNA, 2300 bp, Homo sapien
tgtgagtgtagagactttgttgcaagagatagctgagctctggttgtagctcatgcacttcctaagtgtgagagcttgggtaaattatttcatctttctgaaccttagttgtttcatctattaaaagacgataataaaacttatttcacaaggtgattaagagtactacaagagataatgtgtttaaactgcttcacaaaggcctggcattatagtagattaagagtagctgctaccaaatgttacacagtgattcctgtgcttttttataatattgtggcttcccaaggtcactcagctagtcaatgggaaaatggagatacctggaaagaggtaaatgcctgaactttgagcttggttttgtgggtatctggggatttctgttagccactcatgcagaactaccatcttagtcgctctgtttgggcgggctctaaccccggcaagaaggaaagcagggacatagcacagagaatttgatgcaaccctcagttaaaggatcccttgggttcaacctcctccattttacagctgaggaaactgaggtgaggagaagagcgagttctgtccaaggtcatgcatcacataggcacaggctccagagggtcctgcttggtgttcttcccatggctacactctacttgtctctaacctggaaattcagacaggtcctaaatagtcagggatcttccaccttagcccctgcaatcactgcacttgccaacaggcagtgagtgcagtggccaggagcacagcttctagagtcagttggttctgagctttgaatcccaactcccttacctaccatgctcagtttcttcaactgtaaaatgagggtcattttaggaactgtattctagggctctgatgaggagtatgcaagataatacatgtaccttatttagtctactgtcagtacatagtagatactcaataaatgctggctcttatgttactgttattatcatagttatcatcatcatcaccaccatctgtaccattagcaccattaccatcatcaacaccatcaccattgtcacctttgtcatcatcaccgataccatcaccatcatcaccttcaccatcatcatcttcaccatcaccatcaacatcatgcaccctagacctgcctgggctcaacactttcctcaagatcaaaatctctgttcacattcttctaaaattgacatgatgttcagaatcttgagaacaaagttcaaacaagtggccttatcctgcagtagctctgaagatactctctttgctctgacactgacggtcaggtcatgcttcatagtacagtcaagtgtagctggaagaagcctggacttcaaacccagctctactactttcagactcaggccagttttaaagagaaggaagcaagaatcagaatgtgaaacagtttaccttatctttagaatggggatgatactacccatctcataagctgattataaaaatcagagaagaaaataaatgcataagctccagatgagtgcctggcctttattgatgattcaaaagagaactatactatgtatggaattgagaatgttacaaatgcagtcacagttctaggagaatgactgaagtttcttggcagttcacagtgccatagactgataatcctggatcaaactagcaacataccacctgttactgatggcctattccacacccaggtatgagggaccaccatgcaagggtaaaggtgaaaggcagcagtatgccagcttattgagtgctcactgaatgccaggtatcatcctagtgtattgcgtacattactgtacatttgattcttacggcaaacctatgagacaggtcctagtttgcagctgggaagacagatgaaattactagcaatggctacacagctagtaaatgacaaagctggaatccacacctgcttctctgtgtaattgcacagtctgaattttctctgctgaatccatacaagggagtttgagaggatccacacatcctgagtatgtctgctgttaatctctattctcccctcctattattttttttgtgtgtgtgggtgccctgtgactgaatttataacattctcaattccatacatagtatagttctcttttgaatcatcagtaaaggccaggcactcatctggaccttatgcatttagtctcttctctgatttttataatcagcttatgaaatgacggtgtatgggtctgggactcagtggtaagtttaagactttggaggtggctggcttcaaagggaatcctttggctctcttgtcccaggcccataggtggcactctgacacc

SEQ ID NO: 34926 - DNA, 2300 bp, Homo sapien
cacatactttttttattctctttctcccactttggtttattctcttctttctatggcattttcttcttccctgcagattccattctttccacataaaattctgtacatgtagagtctcctgtttgatttctggtgttctcaaaaagaaaaggaatagaaaatgcttcacaaatccagtaaataaataatatactaatagcaaggacctttatgaaatgtctgcacgaaaaccaatgcaccacaaactgccatctctacacaccccagacttcccaatgtgatgatttagatccttttctacttaggcggatggtgccatttttgccgaattcagcatgttcattgaacagtttctcgaagccaaaagccaactccactgcatttctgcttggtaaggtttggtggccttggcgtggggtagaggttgttgattcaccggcctctaagctgatgataaatctagaagctgggcagcaggactagactgccttcatagaacctctgcagggagtcggcggccccaacactgcaagaaatctatgaaaaagaggcttagcaaacccgtgtgaataaaggctccagaagaattaggggtcgagaagatgtggtgagactccgtgtgagtgggcatcagtgagaactttgaacactagatacagaactcgccaactgaaaatgtgcttctgcttctcgagatgcctgtggactgtttattttcttagtctaaatatctaaatcttctatcatgagcatctattgagatgatgtattaataattgtccataatatcgtgacagagtctgtctgttgtaatgcacggtatcactctattgcgttttatttgtgtgcatttatgcaattctacatctggatacttatccaaagataatagtattttaattttaatcttgccttcagtagaaaataaagccctggaagagggttcccaaaggtagctttgacatgtcttttgtggagagttgtcctgggatagtttagctcaatttacacatgaaaattccaacaccaggaaatccctccacctgagaggtggagaagattaaaagagtctaggagttttttagtacagccatagctcttttcacctgtcctgcagccccaaagaccatagtgtgctctgcagaccgagtacaacaatctggtgtcaataaccaattcctgtataacaccttttttgttgttttttatggttttttaaggaataaagtgggttatgtatgtaatatatgctattatagttggggtgtgatcatggttgatatcctgacttacacattatatatattttgatttaggaaaaaaaaaaccctggtatctgtgtatgatccctcaactaaaatagctcagtctccaactagaatgtatattagtcaaggcatctttttaagagacattattttcatgctcacaggatcacaggatggaaagggaaattacaaaggagtctggaaataggtgcatttaattcttcccaatttaaatcaaagtggtgcatctttaaggcaataacgatattccttcttcccctcttcatgaacgcttccatcaatgaatttctttaatgttgatgatggctggtgcagtttgagggaatctgtatttagtcagaaaatgcttcaatagaatgacctaccagatgggccccgtaacaatgcacagaggcatcaaaccaccacagacatttggtgcttagaataataaaaagactataaaattagattagttgagtctaatttggaattggtatattccccatgcacccttgccgctcttgggtagataaagccttgagatttagcactgtgtcagagcagaagactgcaacttccagtaaaagggagacgggggaacgggagagaggaaaaaagcattctgggaggtcgcggagggcagagcagtgacctccaatgatttacaggcctttagcttaatgaaattgtttcagtgacatgacggtaagagctcgtaatggattggatgccctaatgtaatgaaattactcccttctgcctaaaaaaaaaaaaaaaaaaaaaatgcgcaattaatatttactgagacctgacagccttttggtgcgctcgtctgtgtagttctctcagacagtcagagaggagagacggagcagcgtggcagacaggctggctctgcacgagctcctggcggggaccagcagcgcctgcaagggggtggagggacaggcgctcgggtggcctgggccgccggcccctcacgctgcccccgctcagccttcatgctctcccctgcttttccacaggcaa

SEQ ID NO: 34927 - DNA, 2300 bp, Homo sapien
gtcccagcctggcccaggctccagcatcccagaaatgacatcaccgagttctgttccaaaatggctcttagaagcctttgtgaaccctggagtttttggcgtgtccgactccacattaccactctccagtgtgtaaaaaagccagaactatgaaaagatttaatttggagaggtgaccatagtaagtctccactgcttgtggcttctaggcaaaattgtaataggtctagctactaaagctttggtttatcatcttccaggccaggtgacacccatctacaaataggaagatggcttcattcctccgcggctcaatgaggacagtgtggatttatggaggtgatttatggagaagagagccgtgcaaagaatgaggccagactatcagaggtcccttgtagacccccgaggaggaaggctgaggaatgcactgcccagcacactcaagacagtcatttgctgggggagaggaggggcctgctctgtcagagctcagggttttacacatcctaaaatctttacttatggacatcaggtcaaagggaagggaaaacactcaaccacacttgaaaagtaacccgatgttattgtcagcaaatgtgctgcagctgtttttgctattacaaaagctggtacttttgttgttgttaagtatgaatcttgtaggaaataaagagtatgattctggggaagccccctgtatagcactgcccactttgataaaaatatcatttattcattcaacataggggacttcaaaaacagagtaatattctttcttgcttttttttttttttggtttaactaggtgttagaaggtaggaaccacttttattgtcattttttattctttataacttgatatgttataaacattatttattatctactaaatagcaaatacaaatgataactcttcattgttgatgaaagccatttttcgggggtacaggaaagggcatcttatagattgggagatgaggattttgatgattgcctagaagactttattttgtaataatcctgaagcaaaatggcatgaagctctgctgacctgtgataactgtgtgtatttccttccagtgtctcaccaactggcagccatccacttcaggtgtgcccgttgaaggatgccacctcgaaggagatgggaccagccttgtgttggggtgaggattctggccacttgatctgggcaggagtgctctgctcagagtgcagtgctcaatcttacaagcctggctcgcctgaactgtgaaaggtcagcaggactaagctgagcgccaggattccaacttcccttcttccgccccaggtctggcaacttgtaaatgtggaggctctgctaagcactgggattttattaagggcctcgttaaaatttactagaatcaaataaagaaaagatccagccttggaaatcattctccacgctgtctctccttctgacctcttctcaacccccatcccccacaccatttattcatccgtgaaacctttaacaactgaactaattctggaaagttgcccatatcagatatcttcagaaatcactttggaaaatgcctttaggaaggtaggacacctcttcccatttgtcttatgatggcaggtccagagcttacatgaagaggcagtgaggcaaagatgtaaagaatatggactcttcagtcagacctgggatgaaccccggccattacctactcacggaggagcctgggccacttatctaacctctctgaggctcactttctgcgtctatcaaatgagaatagcgctactatctgctgtatgaaacactgaccgagttaagcaaaataatgcaggttagctgcttaatccagtgtctagcacatagcaagtgccaaaaatgtgagcgattaaaaggggtcttttactagcactggccacatccccatcttatcgctttatcttccattgagcagaggttctgccaggtgcaggggacaagggagaagaaaagacacgcacattctcctgggcttcaaagttgtcccatccttctgtgatgtcataatctgagccatagcccacaaatgtgaactccaacaacccccaaacccagtcctcacctcccacatgcttttcatcacccgctctcacatcccatctggggcctctgcttccatcctaccatttcgcaagcctggccaactcaagctccgtgtgctgcacctagagcagcccatctctgtgtcaggtaagcacgtcagggcccccaggatgggagacaggaaaacctcttctgggggaagccgaaatggagcaaaatgggacag

SEQ ID NO: 34928 - DNA, 2300 bp, Homo sapien
tgatttctaaggctgtaccagcccaaacactccatgattctgtgtatcctggtgttctgggcccctcctgtatttcccacttgcctcctccttggggatgattgactctgaaggaaatcctcaccatctgttctaaggggcttctcccaggaaaagtcacacttgaatgcctataaagtcccttaaagatacagtctggctcatgaaacccccctgagcagcttaaatggaaaacgcagtcccccactgcgctcagagcacagatccaggaccagcccgaagggattgcaaaacatgctctagcatgcatttgggaaaacaaagaaaaccgtactgttttctgctccagacagtctgagacgctttgtgcccttgggcccttgcccggttctctcatctgcctcagtcctggtactaaattggttcaaggtttggaggaaagcttcagagcaaagggataaaaggatgtttagagttcttaaataccgaagtcaccctgaagaccggagcatagaccctcgccagccaccagggggcgataacaacagcatctgtacagaaagccgttcccaagaataacagcagtaaattgcacctaatgtgtttatgaatgatgaagggactcgagtgtgtgtgtttgagtgagtgtgcgtatgtgtgtgtttgtgtgtacgcgcgcgcaagtgggtgcccaaagctaagactttgaaaatctgctaagtataatacaataaaatctacaactctactatatattcacaggatgtggtcaagtagttgaaagtttccttgaaggaaaatgaggtagaagaaatcagaatagtattcttatgaaagaaaagagaagcgctctcaggagtatagttgtcactatgtgagtgtgtgtgcgagcatgcatgtacacgtgtgtgtgattgccggtgtataaatgggtgtgtgtgagcctgagtatgtgagagtgtgtgcgtggctgtgaatacgtaggcaccagtgtgtgtgtatatatatgcagggctcattcaggccttctcagtgtgaggggacctcaaggaaatctgggcaatacttcctccagttcctgccctttcctttcaaacaaacaaacaaaatcattcctacaagtatttatggagcctctaacgcacacgcccctccccactggcatctggaaaagctcagacctagccaatttaaagcgggcgctggaagaaagaaggcgctggggacagaagggatgcctcgtctgcgaatgacttttgcaaaaacacgttctcttctgtgatgctccaaacaacccagggaggtgaggccaggtaggactgtggccccggatttgagaaaacgaaggctcagagatgacacgattggcccagagtcacccagtcaggaagcagaaacccgaggatggaacaaggcattgtcaatccaggggtccaagtcgctgccatcactacttttaccagtccaccaagcgctgggtctgggcaaagcagggcaagtttccgggtaaggtttgccagcagtgacctcaacaacatggaccacggtgtgtgtgtgtgtgtagctgtggagtacattggtgtcaaccaaggctcttcaggcaaaattgtggatctctgccatgagtactaggtgcggtagggaagcggcttcgtgggcgacactgccatggtttggcgtccctagcagctgtgcgacctccagcaagtcgcttcacttctctgagctgttttcagacgaccccttggaagatcgtggacttaagtaaagaatatgagtagagtgctcagctcagtgcaaaaattaaaaaaaaaaaagtgtcaggagccttatccgtccttggatcttaacagtgaatgagtttcagtgtttctttccaggggccctgctggccgagcccctttccttccctggttccttctctctccctcctctactgcctcctccctccaggctctcggtcgctccagcaaagttcccaacttagtcgacatgacgcgcggcgcagccaatgggaggcggagttggcgtttcttggtcgggggggggccggaggggtgggccccgcgtctccggtgtctgccgtgctcactgaatggagagagcgagcgccggccagctcacccggccgccccgtgccccagccgcagccgccgcgctccccagcccagccccaagccggacctccccgggcgccacgccccattgcgctcgccccaggtccccaacccggcccgcgggccagcggggccagggggcgctccgcacctgggcactcccagcgatgcgcagcggggcag

SEQ ID NO: 34929 - DNA, 2300 bp, Homo sapien
tggtatttaggccatggtatgcggaccttgcctgagtacggagatctgcatctggtattgtgaatcagaagttccattaagttatcttaaaagtagaacccatctagaattcatttcacttgtgacatctagcgtccagtggtggtattggcagtcctgtattcaggccatccctaaagaatgacctttattatgacatggggtaacctctaagactttcctaatgctgtcccctcccctagaatgcacccctccttagctctgccatccttcaaggccctgcttgaagtgtcacatgcactgggaagttttaaaggaacatttagacaaaatatacctctcccttcacacaactcctttagtgtggggcacataccacttgcatagcatttacagccctgtaagttctatttgttttttaaaatctcctactatattgcgagcatcttctaggcaatagtcgagtttaccacatctctgaattcctccactatgcctaacacattgcagtcactcaattaatagtttaaaatacatatttttaaaatagaataggaagaaacattaataacatagggtataccttctcttgtaacaaaggagaaaaaataagttcagatcgattttagattacctaattgcagccagtcatgattggcctaagctagaacaatcttttcctggcccctgagttaaggaatctttgttcagtgatagggaaaatggtatttgtttcatttctccaagaacataggtgtgattacaaatgaatgagcatctggttcattggagtcccagataaatctgtgagacaacactgtgagcaatttgttgccaatcttaaagctcagatcaaccctttgagtctggcttagctcaggcagaaattgtagtctgcaaaagaaactgagaagaagagggcaaggagagtgtggcatcccaagacataaagactcaaatcaatgagagcaagcaactctgtcaaatttcaccagaagtgaggactaaatattgactaccgaattttgcaaggtaggaatcactggtaaacctaacaagagccacttcatagtattggttgggaccaaatcctggttaaagtgggaaaaacaaacaaaagaacaaaaggtaagaaaatggagataatggatgtaaagattttttttccccagaaattttgttataaagagaagaaaacaaatggggtggttgccgattggtgtcaaggaggattttttaaaaaatgaaatcatgaaatgattttatggcaatcactgcagcatgtttatgaactgatagggaagatccaatagagaagaaaaaactgaagatgcaaaaaagagcagttagagccaagttctcaaataggcaagaaaagatgggctcgaaagaacgacatgattcatgtaacagttactaggactcatcagtgctcattaaatgttatctattattatttctgatcgcttcaatttttgaataggcatcagggttacaaaatattattattaaaaacacatgcaaacagcttggactctaagactgcattcaattctagttctaccacttggacaaggcactttttttcttcgggctttttctctgtagaaaacgaggagtaatatctgcctcataaggctgcgggcttaactgagataatctgtaaactttaacacatggtgggaacttaaatattaacgccagtattaccactggtagggtgcatgagatcgcacgatggtgccaaaggtgtctctccaccgcccagcccagcgacactgttcccctagaaggcattgtcgtaaaaacaaaaaaaaaaaaaaaacgaacaaacaaaacaccaaaacacggaaactaaaagcaaatacttaaaagacatgcaggaaaccagcccaaggaaaaatttatgtggagccacgtctgcgcctgcgcctgcgccaagcccacggcgcgccacttgcacatgcgcagtagctgtaggagggggtgggcgctccattgggcgtttctcttggtttttcctttccgcgcggcttgggcggacgtctcgtgagacgtgggacttctcgcgggaactgcattcaaatatcccaggcgcttactcgagagctagctgagcgaatgggccggcgactgtggagttagcgtcctcaatgtggacgccctgagctcccattaggagccgctggctgcggcagcaggggactagcgtgagaggtaggggcaaggggcctggtgggaggtgggtgtggagagcggcagtggggagagtcgaacaggccctaaagaaagctaggggc

SEQ ID NO: 34930 - DNA, 2300 bp, Homo sapien
ctccttaatacactgtttattgccttccaggacaacacatactcctggttttccttctacctcactggtcactcctgattctccgctgtcttcttccctacctcataacagggttcagtcgttggtccatttctctttaaatacttttatcctctatagactgataattctcaaatttgcatatccagccaagattcctcttctcatatatccaattgcctacttgacatagttcatgttcaaaactcaaattcctgattttatttccaaaacattatttacatcagtgcttcagctgatggcaattccattttactaggtgctcaggccagaagacttggaggcattttttacttttccctttttcacacatcccaaattatatctttcagaaaatcatattgaccttaccttcaaaaccttcaaaatctggccatttctcacagcctcctatgctgccaccctagtctgagccatttcacatggtctctgcttccagccttgttccccttctaaactagtcaacatagcagccaaaatgattcttttaaattatatcagatcctctactccagactttggaatgacttcccatgtcacccaaagtaggagccaaagtccttataatggcctgatttgcccactctctactatctcttagccaaatttcactccctgggcttcttcctgccttaaggattcccctcttgctggaacattcttcttctaaatagctgcctggctgattctctcatcttctgcctcctggttacatcacctgtcccttcttcccagattcttattctgttctattttttctcatctcccctttctaatttattaatattctgttacttactgtttatcttcccctcctggaatgtaagtttcatgagggaggagcttttttttcgtccattttgttccctaatgaatctgaactgcccagaatggaacctagtatataaggcattcaagaaatactcgttcagtgaatgactacattgacttgagacatgggggaacatcttgcaatgacctggtgccctttgaaggcaaaggtgagtttgagtctcgcttaggaggctgggaccaaatagtaaaggataattagtaaggttgattaaagtggaatgtttctatatataatgtttaagtctttgtttataaatctagaatgaaagcaacatcctttaattcttatggatatggtttctatttttgcatacttttatgaataactagaaaaatactagtgaatctctttccaggaaagcagatttaatatattcaggaagttaacactgttgtgaaaaattacagacatgatatttcttactttaccttatgagccttattcacagctgcctttttatattttatgtgtttatagtacccagaccttccttttctggtggtattattgttattatcattattatttctcaagacagtgtcttgctctgtcagtgccatgatcataactcactgaagcctctaactccatcaattttccttccttagcctcccaagtagctaggactacgggggcttgccaccatccccaccttatttctattgattgattgattgagatggagtcttgctatgttgttcaggctggtctcgaattcctggcctcaagtaatcctccccagttgctgggattacaagcatgagccaccatacctgctactatgaggtttcttgattacttttttgttattcccttaattttgattatatggatagtggtccaattatgagaccaaacttaccttaacatattggaagcttagcatacaacaactgaacagttttctgatggtgaactgtttagaagcaaaattaaatgtattctattccactctttaatttttgatcccaaatcagtaacagaattgtcagaacagttcttgctcttggaacaagaatgcaaatttgactacttattagtcaggaagaaaattttaatgtttttatacgacagtagtattgagtagatatgtttcttctgttattgatattattgcatggagttttttgtataagcttaagtagttttatttcctctatttacagttggctaaaaaaaagaaaagaacatggaggcagatataatcacaaatcttcgatgcaggctcaaagaggctgaagaagagcgactaaaagctgcacagtatggtttacaactagtagagagtcaaaatgaattacagaatcaattggataaatgtcgtaatgaaatgatgaccatgactgaggtaggactctggactcctctgtctgcaagagtgtgc

SEQ ID NO: 34931 - DNA, 2300 bp, Homo sapien
tggtttctttatataccaaaaatctagaacttttagtcaatatcttccctttatttctcacatttcactcattaataagttctaagaactagactacaaagcatgtatctttgctactggcactgtagtccagatcaccatcatcactcctagacaagtattgtagccttctggccgggttgcctgcttccattgttgccattcatgccattcattcttcactcagcgtctaagtggtcgtggaataacacaccaaaggtcatgccacagccctgctaaaaaccatacaacagcttctgattttatttacaacaaaatctgagctccatccttgggtttgtagatccctatgtgacctgacccctgccaagcttctgacctcacctcaaactgctttgccttgttcttgactatactggtcctcccttatgggctttacaccagctattgccttttttttttttttgagttgtttacccctcactgctcttgggttgagtcctcagatttcagctttcatttaaatgtcacttcagcggagaggtcagcccttactatgtaatgtaaagttgccctgattcactttttttttcttttttcttttttttttttgaaacagggtctcactctgtcgcccaggctggagtgcagtggcgcaatcttggctcactgcatcctccacctcctgggttcaagagattctcctacctcagccttccgagtagctcggggttacagatgtgtgccaccacatccggctaatttttgtgtttttagtagagatggggtttcaccatgttgaccaggctggtcttgaactcctggcttcacgtaatctgcctgccgaagtgctgggattacaggcatgagccgttgtgcccggccctgattccactcttaattatctgcattgctaattatctctagattataaactccatgagagagggaattttgtatgccttgttcactatcctgaatgcctgccacacgattatttcttaaaagaatgaatgaataaatctgggtaatttagcaaatgctcagtaacatatttaaacttgaatctcaacattgtaaatatggcaggtaaaaaatatctgtagcaggtaaaaataactagtgatggcaacctttgtgtttctacatagtactgttgtaaaccaagaactgagtgcaaagtcataaaggcaaagtaaagattacaaatatcactaatagaaaataaaactgttatacttaatcattttgagtcataacttgtcaaatttcagtgtttaacagttaatactctttgtcttcctttaaaataaaatggtttttgaggggaatattttatcattttttaaagcctcttgaaggagttcgtacttgtaacatttttaatgtctaaacttccctgtgagtaagcaaaagcccttttaattactccttttgtctcagctctgcattcattctgatagaccttttgtgacatttctcagatgactacattctgaaagtaaaggctaattcagtatttcttttttttcaactattattactactacattgtgttcagagctacaagtagagcatctcattatcaaactaataattctcatgaggaaagcttaagtgctgttaaatctttttttgttgttagcagagattacttgacttgacgtgttgacataccatggagcacattttacttccttgacaaggcacagaagcagtaaggtatcccttgcatgggtttaacatagtttcgaaatacacctcaggggtttattaagactgattaactacaaagttattccaggtttaacatgtcttcgttatttggaaagcagcaaatgcttgaaataagaatgaaacaattgaagttgaaaactgattgtatgtaatggctttaggctatttttatgtaattgaattgtaattgaatctgttttcagagttatgaacaagaaaaatatacccttcaaagagaagttgaactcaagagtcgaatgttagaaagtttgagctgcgaatgtgaagctattaaacaacaacaaaaaatgcacctggagaaattggaagaacaactaagcagaagccatggacaggaagtgaatgaactaaaaactaaggttgggatatctgcgtatttcagcacaaaatattccatatttatgcagccatctgtaaactttagatgataaagattttcttaagtgtcagctttgcaaaatagccaagatctaagtcttcattatcttaatattgggggtgggaacactgagatacaagagtttgtctaagggacttgtata

SEQ ID NO: 34932 - DNA, 2300 bp, Homo sapien
cttactaagctagtattacaaaaaatactcattcacatgatattttgaattttattaataaaaaaaatttagaaccttttttctttctttacataagtacctgcatcctacatatatacttgattttgctttctggactgcaaagactaaaatactatctgtgactttacagaaaatgtttggcatcctctattgtatagtcccaatttataacattgttgtgatagctagttttgtgagtcaacttggcaaggctatggcccagttattcaatcaaataccaatcttcacaatcttcacaggggttgctgtgaagtactttgtagatgtgattaacatctaccatacattgaatttaattaagggagattatcctcaatacatttggttggtgtgatccaattagttgacaaaccttatgaatagaactgaggttccttgaaaaagaagaaattcctcctgaggacatctgcctgtgagtttccaaactgctcttcctgacagccccacaatcgcattagccaatccccaatctctctctgtctctcatatacatatatatgtatgtgtatatatatatatatatatatgcatatatgtatgtgtatatatatatgcatatatgtatgtgtatatatatgcatatatgtatgtgtatatatatgcatatatgtatgtatgtatgtgtatatatatatgcatatatgtatgtatgtatatatatgtatgcatatatataaaatctcctactctggtcatctggtggaaccctaataccactgctgactgtataagacattattacctaatttgtgctgctagaaaacagaaaagaaaataactgcagataaaacaaaatcaataattttttgttgctccagttcagctgtgatattgcctaatctatcttaatgactctccagtgtaaggcagaaaggggtagtgagagtcatgaataaagaaagaaaactcagcaaaacttaaattcagccttatcactgtggatcagactttttttttttttttttggacagaatctgttctcagagcaaaaatgagatttttcgaggaaatgtctccattagcctaactctagggctcttttcctgggtcccactgttgctggctgtgacagcacccttcaccttgcagtgatgttggtaaatagtgtatttacgtattttcagagtagagcttctagagcttacatcagattttccaacgggtttgtagcaccaaaacgataaaaagctgtaaatgggccaggcacggtggctcacacctgtaatcccagcactttgggaggctgaggctggcggatcacctgaggtggggagttcgagaccagcatgaccaacatggagaaaccacgtttctactgaaaatgcaaagttagccgggcatgctggtgcatgcctgtaatcccagctactgggaaggctgagacaggagagtcgcttgaactcgggaggcggaggtcgcggtgagccgcgatcgcgtcgttgcactccagcctgggcagcaagagagaaactcgaaactccgtctcacaaaaaaaaaaaaaaaaggctgtaaaggatccacctccaggtaaacatttactcttccatgtcacctgctgtgtacattgtctctctaaccctcacaataatcatatgaagtaggtattagtatcccatttcacagatgagaaaactgaagcttagaaaaatgaagtcatttgtccccgtctggattcgaaccgagatctgacaccaaagctcatgctgaggggagttaaggaggtttgttcagtccctaggcacggcaatcaggaaactctctgcacttgcggtggtggtctggcgagccccaggtggggactggcctctgctccctcgcctggggaggagacaaagtgggagtggtccccaagttttgcgtgaagtggggtggggtggcgtgtcttagcctacggggcaccagccttctagtgtgcccctgcccaacgggagggaggagggagcggggagccccggcgagggaggagagggcgggccctgagaggagtttgaaaagaggaaggaagtggggccctgcggcgcccagccaccccctgacggcttccccacgggaggacgcgaggccccggcccagccatggccccctggcgcaaagctgacaaggagcggcacggcgtgggtaggtgcgggccccagggcgcggcagggagcgggacaggtggcgggagagccgcgagcaggaggatgctgcggggccggcggcgcggggtgggcagggcgcgctgcctgcaggtcaga

SEQ ID NO: 34933 - DNA, 2300 bp, Homo sapien
gaagatgctggtgggtgacatcattcagattcgcaaggactatccacacctggtggacaggaccaccgtggtggccaggaagctgggattcccagagatcatcatgccaggtgagacacagctgctctgaccttcccctggggacataggggccaattcagcttgtctaattcattttccttctaaagagtcaactccttccttttttactgcctctctccatttctgtccctgaaggtaacaactaaaaatgatgtctgtatatccaaaaacttctatgcattaacaaaatagacacaagcatgtaaatataaacacataccccttctccccacaaatggggtcatattttatattcctttacttaatatactttatatagtattctacaacttgtttttatcacttaataatttattgtggccatcatttatattttatacatgcagaacagttgcactctttctgggagaatattgtcattctcttatatttttaagctttttttttttatattaccaaaggaatttgtgttcattgtaaaatattcaaatggcctgaaaaggtataaagtgaaatgttaaaagttcctttatatctttgtctccagaagtagccactacatttccaaatgtgtgtataattttaaaaaatgagtttatataatattaaacaaaaattataggagggcattgttttggactaagttcctgcaccagcccccaacaaaccagactgaaaatcaaaatggagtcagctatgctaaagggtcatgtcatcaaacctaaactaaactgttatctgatcttgcaagaaattcggagaggggagagagggcggcgggcgggggcagggagagagagagagagagaaagaaaggaaggaacgaaagaaaagacaagaaaaagaaggagagaaagaaagaaagaaagaaagagaaacagcctattttccagacaggccattttcaattttcaatgggcatgataatgaagttcctgaagtaacctgatgttaacaatcagtcacttttctatttttctgtttccctgtttcagccttatgagggctataactttgaaataaccaattcactctgtcttgcttctacttccttcaggccttctctgtctataaagccaacctcttctgctcagctctttggaatactgattctattttatggaatgaagcattgcccgattctagaattgcaatagagccaagtgaggtcttcaaactaaatttgttgtaattttgtcttttgacaatggtaatactcttttgaaacttctctttgtgtcttaaacctgtgtcttggacttccgttcacgatggctctcactgactggctgtttctttccacatttgtctggcggttgtctcctagggcctgtgctgtcatttatttgtccatgctttacctgagacttcagttacttgtgtaaccccttgtaggattttctattcctttttttttttctttttgtttttttgagatggggtttagctctgttacttaggctggagtgcagagtacagtggtttgacctcagctcactgcagcctctgcctcccaggctcaagcaatcctcctacctcagcctcctgagcagttgggaccacaggcatgtgccaccacactcggctaatttttttgtattttttgatacagacagggttttgccatgtttcccaggctggttttgaactcctgagctcaggcgatctgcccgctttggcctcccaaagtgctgggattacaggcatgagctacctgtgtctggcagattttctatttttcttacctcccttcctgaagatcctctgcagctccctcctaaccctgtgtccctaggacacatggaaagttgctctattctgctcctacacagtgaaatatcggcagatgtatatgtttggttgttttcatgggacaggatcaattcaattggagctttcctttgccttcccagaaggtgtcactagaggatgaaaattaaatgacttttaatgtcgagaaaaacatggccaattttgagtgtccctacttccctttttgcaactgatttcctagcatcccttcatccccgtgttacctacttctccagcctccctgatgagggaaaaatgctttctctaagcaattctgattttaattaataccaatccaggtgggagagcttcttctcaccctccatcccctctagttagtcagcgtctctcctgctgtaatccacactaactcttgtctctctctccctctgcctcaggggatgtcaggaacgacatctacatta

SEQ ID NO: 34934 - DNA, 2300 bp, Homo sapien
aagatcctctgcagctccctcctaaccctgtgtccctaggacacatggaaagttgctctattctgctcctacacagtgaaatatcggcagatgtatatgtttggttgttttcatgggacaggatcaattcaattggagctttcctttgccttcccagaaggtgtcactagaggatgaaaattaaatgacttttaatgtcgagaaaaacatggccaattttgagtgtccctacttccctttttgcaactgatttcctagcatcccttcatccccgtgttacctacttctccagcctccctgatgagggaaaaatgctttctctaagcaattctgattttaattaataccaatccaggtgggagagcttcttctcaccctccatcccctctagttagtcagcgtctctcctgctgtaatccacactaactcttgtctctctctccctctgcctcaggggatgtcaggaacgacatctacattactctcttacaaggtgactttgacaagtacaacaagaccacacagaggaatgtggaagtcatcatgtgtgtgtgcgcggaggatggcaaaacgctgcctgtaagggactcactgctgctctgggtgacagggtccgccttgggggcctctgcttgtaaagacgtacttttcctctccctgattctgttgtctaaatgccaggtgcctttgggatggtgttgaataatgtgttcaacaccttttgagcttggttagtgcagtgttccataataagaccttgtgatatttccttacaccaaagcagtttttcaatgtctgttcctttcctttcacaacttcttcttgtatgtatgtatgtatgtatgtatgtatttatttatttatttacttttgcttggtctcagcttataggttagctttctgcagttaaaatgttctcactgaaacctgagctggtttattcaggcaaagtccatggtaagaaagaggatcaatacagtgccttgggctggtgtggaggctcaggatgtgcttaaagcaggcattctcaacacttaatctaactccccagcgctcagccagaaatgctggtggaaagccttattcgtaaattggtctccagagagctagcagggtgtattcaggaatgcaaagcgcattgctatatttatacagcatatgtcctgtccaatatttgtcatgtgtgtttatatttatttgcttgtattttctttaaggttgtcagtgctgtgtccagtgtgtaggagggttttgtttctcagttcctcctgacagagtagttagctgaaaagaaaatcagctctcaggagaaattttagcatgggcgaatattcctcttaggccactgtgagtgatcaaatagccaagcagggcgggtgtgttcatcagagaggggatgtgaagatggaagaggcatcatttttgtccttggggcctggagatcagactgatactttgtacccaagaataactaacattcacaggggaattaccatgtgtcaggctgtgtgatagtatgacacatttcctttattatgccccattttacagatagggaaacaaaacccgtgtcacttacagtaactcgcccaaagccataatgttagcatatgtcagagatggggtttgactggttccaggccctctgagacacttcactacaatgcccgtacatgtagcaaaattctccaatttatttctcattttaaaaaatgaggctaataaccactgctggcaaatttgggaagattcataatcgttttttaaatgtaaagaaatcctcacaattgcctttttgttcataaagactggtcatgttaattagtatctatttgaacaaaatctaagcattgaacgcatcctccttttgttgcagtctgaaactttttccaaaaaataaaataagtgagaaatacttgactcaaaggaacataaaggagcggagggtttttatctgaaagggaaattgcaattcccaaatgtagagaccattgctttgaagttacttttatccaacttccctggtagagaactttttaacctcagcttcatttttgaaacattgatacgcttaccttccatgttgccaaaggacaaattaaaagacacagttaacaggcaagcagccatcttatctcctgtctgagccactctttcttccacttttgtcaccctttcaagtcactaccgagcaggctgagcagatgcacttatccaagatgagtaggtaagcaggtattctgggggctgacatggaaagggaactgtggggcatggtgatgatttgtggtttcctctat

SEQ ID NO: 34935 - DNA, 2300 bp, Homo sapien
ccttatctgtgaagtggggatgagagcaatgataatcatgctactcttccaactgacaacagtacggcaggcgctaacatctgctggggccaggcacccatgctgagaacttcccatgtgggttgatcctcgcaatcctctgacacagtactgttatggtttacactttgcccaaggcttgtgggaattaagggggcagtaaagtgtagagcaaagcagtgtgcaaagagactgagaggctgggctcaggagctgatggccagttttgaattctggctctgacactcactggcctggtgttttctggcatgttgcgtgagcttcattaatttgtaaagtgggtgtgatactagtgcctgcctcatgctgtggttgtgaggagtgagtgatttcacaggcatccaggaaggtgcctggagcagagcagtgctctgtaatgtttgctgttgtttgtaataaagtgcctgccgggcagtggggatttgaacccaaagcagattgactctagaatatatatgctgtggcagttatctctggtggcagaacaagaaggctcaggagtgagctgtgtaaaagccggggtgggggtgagttagcagagggagctatggaactagggagaggaagagaatgaggagccctaggcacgtagccacttcaacactccttgtctctgtgaccttgagctggacccagaaggtcagcagcaattgctgagtccccataaccaacgggaacattcagcactgacttcacttatgcttctgacttcaggagggctttagagagggggttagttagaaaaagaaggaaagaaagagagacagagagtgactaagacagaaagagagtgatgaagtcagggggagggtggggagagaactagatataaagacatagaaacccaaggagagaaagagagtgattgacactcaagaagataaacagaagaggcacacacttaaagccacagaaatgaagtagaaagacgggaaagaagggtgaggggaaggatggggattttgcagagacagtgctgagggggctgtgactggctggcctgctctgtggttgaggagcaaacaaacctgttaagtgtgtcagtgctttatctaggaaagcacctttgccaaggcccgggcacactgaggagctttttgagcgtgtagggctgtgacaggagagactctctttatctgaattggagacaggagcactcttctgtgcatttcacactggatgccacagattaggctgcggatatttcacggttggtgataaacatttgtttggagaagccttgagcagagcaacactcctaaggctgggggaaggggttgataacaggcaggtacctggagactggttttacatgagggactggttctatgcaattttacacttgtatattattataggcattgaaagtccctagaaggatacccattaaaactttgacaatagctaacctccctggttggattaatgaggagtctcaccttctaagttatgtatttcagttaggtttacatgttttacagtgtagggattttataatcagagaaacaaaggcttaaggtaataagttaactcctgaaatgaaggaagggaaagcaatggcccctgacataaaacaggttgttggggctcatccgacaaacagacaatgggtggcggaaatggcagtgcatttgaaaatatttctccttgatatttccaagttactttgaaaatctgatgatcacaatctttcctctgattcttgcagaagggtgaaattattaatgtctcctcagctcagacaaatttccttcctttggggtttccttggggtttaaaaaaatacggcagaaggtgtatgccctgttagttggtgggtttctgttgggtatggtggatatgaggcttttcccttgagagaatgatgcacgcagcatctgcagaatcctctcctccttgaagtccccacctcccactcctttttgttttaaattttaaatgaagtttgtgcctagtacacacttttaaaagtattgtctgttagcttgagaaatgacccagatgtatcttgtttcaggctttatgaaggcaaagaacagatggagtttgaagaatccatgagacggctctttgaatccatcaacaatctgatgaaaagtcaatacaaaactaccatccttttgcaggttggtttatgctacaataaaatctatcttctccttggccatccagtaaataacagcatgctaagataatatcttcttttacttaaatatgcaaacttgtatccagtgaaggcc

SEQ ID NO: 34936 - DNA, 2300 bp, Homo sapien
ccagcctatttcaaaatcatggagacagtttcattttatgacaaataattttacatgtgtaagtcccaatcgtctcatctgtcaaatgggacaataattcatctgaatctacctctagagcagtatcaaaagaatcaggtggctcctttagcaccttgaaatgcactaaagttctctgcagtggaatctgtagttggatcaccaggaatcagccagtggcaacccagcacctcctggggcctgccacttggtaagagctgagagggatgaaagaaatgagaagagatggctcttgctctttgtgagttcatgatctagttgggaaagcgagattaatcatgagagaaaaagagtaagaccctcaattggcaaagccaactaagtaccagaaagattcaaagaagagggaaatcaaggcagggacacagagaggagaccctctgagcagaggaggaaccacaccctttcatgcaccagaagacatcagcatagccttttctgcttcctctttcccagatttatcagtccatatcagggtgagttttctgtgtctgcaagcagcattcagggagatctattctggaacctggtaaacaaagcactagccacgaatccaccaggggtgagaagtcatttttgactgtctcttgcaagtttccactggggctgccatcttggccaaatgaagttctactgtggtccagccaagcacgggcttgtggaagatggcctggctggaagtattatgtttgaaccaaaaaaaaaaaaaaaagcatttttaccataaactgctgccttttttatataaaaaagttcctcttttgttaataaaataacaaatatgaaatatatacaggcataccttgaagatattatgggtttggttccagaccaccgcaataaagtgaatatcacaatcaagccagtcgcatgaatgttttggcttctcagtgcatataaaagttatgttaacactctattgtagtctattaagtatgcaatagcattatgtttaaaaaaatataaattttaatttgagaacataaaccttaatttaaaaatattgctaaaaaactctaatgatcatctgagccttcagtaaataggaatcattttgctgggggagggtctgggcttgatgctgatggctgctgactgatcagggtggtggttgctgaagactagagtggctgtggcaatttcttaaaaaaagacaacagtgaactttgccatagtgaagtttgtttatagtgtgctaaaacaattataatagtaacatcaaaggtcaccgatcacagatcaccataacaggtataataataatgaaaaaaatctgaaatattgcttggatttccgaattgtgatgcagagatacgaagtgagcacaggctgttggaaaaatggtgccaagagacttgctcaatgcagggttgccacaaaccttcaatttgtaaaaaacaggtatctgtgaagcataataaaacgaggtatgcctgtatgtatatatacacgtgtatatatttcctcccaggtttacaatttcgttctagtggtagagaaacaggaagccttttggaaaactgtttcttaagtttatactcccgaaagtagctcccatgatatggattttcatttgtttctaggttcttttcaattgggaagttagggatagcatgctttccttgtcagcaggaacagctatgtaattagtgagtcccagaacaaagtaaaaatgcaaagcccttgtttaaaactattcagaattttgaaacagccatggagcccttctaagcaaggggtctgtcatgactacgaagcttacaaacccaggaagctggctctccctgccaagtgaccaccacacccacacaccgtaaatgactagaaaacatgcaaatccggcggagatcacaaagctgggactctcagggacaatggctgatgatgctttgttgatgggaacttgtagcctctacactgggtggcaggcaactccttgaagagccagagtcaaattctttttcctgctcaggcccccagggggtggtagtgagtgtgtgaaattatccctttcaaactagacagaacaccgccgtcactgctaatttaaccagctcccacttaaatcaagaaataaccattattctcgtttctacctccagccaggccaaatgcaagaaaggagaaaccttagcatttgtggggtgtaggagtgtgtgtatatgcatgtgtgtgtgcctgcatatgtgtgtgtgtgtgtgtctatacacacacaggagcgtgtgtttcctctgctccat

SEQ ID NO: 34937 - DNA, 2300 bp, Homo sapien
attgccaagtcggtggagaacttcgtgaacctggtcaaaggcctcctggagaagctgctggattaccggggtgtgatgacagatgagagcaaagacaaccgcatgagctgcaccgtgaacctgctggtgcgtggggctggcgggtccaagtcagaccagaaccctgtgggggggcttgggcttggctttgggtctcacgattgttcttcatagggaagcagtgcttaagggctttggaaagcagacaaatgtggaatggaacgtctgctgcgctttctgctagctttgtgtcttgaggccgtcacttcacctttctatgcctgcctccttatttataacatgagattaatgcatattccctttagcactcaacacatcacatggaaggaagatgacagtatagactggctaagagtatgagctttggagtcacacagcctctgggtttccatcctatatctgataattaatgggatggacaagctaaggaaatgttctgaagtcttagtttgcttatctattacatggagaaaataatggttccaatttcattaggttgtgttgccctggcccatggttaaatgctcactacgtattagtttccttcttcttatagaatggagtcacactaataactagaattgctgttactatgaaccaggttaaccagagaagctaaccccagacccaagttcttaacccctatattccatgagctcccatgggctggctgccaagcagcctctctcacacgctctgtgattcgaccaggagacaggtaggtaagcagccataatgcttcatattcaccgtgtcatcccaccttaaagtggtttaaaagaatgaagttgaccaaaaggccacgtgacatccatcacatcaacctccctaccattcccaaggctcctgaaacacaaaacctgtccccagagctctgttgtgtggcctccctttaccctaaatagactttttttttcaacagcctagatattgccattgattttctagaatgccaaggagagtttaaaaatcccgatgacagcagaaaggaattcattgctaataactccaccaggcccagtttacataaagatcatgaagaggtgttttccacgagctgagcagcttctctctaaggagagacagagttggttgaggaaagtgacctttaacagccagctaagatcagggagaatgcttgggacagacagttctccaagcactgagacaccactagtttttagtgcattgcttaaatatggtgtcaaggaggagggtggggatggaggtggtatcaggacaaatgatgtccagtatgatttgccacccattgactgtgtgctctggaacatgtcaccacccttctctgaccctcaggtgcacgtgggtgtgctgcattaaaccaggatatacacctggtgtggctcatggattggaccaggaccacctggctcagaatctgtagggacttgtttaaaaaatgccacaggattaggatctctggtggtgaagtccagggcagctactaatctaaatggcccctgagctggaatagggacctagattcctacgtattgccaagtttaaatgttttggcgacagaatcccatataattcctgatagttctgcactatcaggaattctgatctcttactattaccgaggtgctaccactcactttccaactcaggttctttccagtgcaaggcctgagctttgaaacatcaagctgggctgcctttcaatgtgggcctggttaaagtagactaccccagtcttggcagcccacctctcaatgcagcaaaacactgaactgcccctcctgatatgtgatggctgagacacatcaagtcctctctgttcctttatagtctaagggtcagggaagtgactttcaaagcagaatcttccaattaggctgtttgatgcatctttggggcatccaggaaaataagtttcttattcctatctcagggtacccagatactagacagcaatcttcctctcatcttcatcaccacacccttgaccgctgtgatattgcagagaacaacactcatcattgtttttcctcccctacctagaatttctacaaagataacaacagggaggagatgtacataaggtaagattcatattttctaaaatccagacctgctgtgtcactttcctgctcagtatccatcgatggctccctgctgccttcaggataaaatttaaacttctcttcttgacattcaggccctctgtgttctgattcctgtcaatttctccagattcaattcctttcattctccca

SEQ ID NO: 34938 - DNA, 2300 bp, Homo sapien
aagaaatgggaggtagggaaagggaagaggggtcaggagtgggaccagtgaccgctgacttttttcattcagtttgccatattgtcagcttaaaaggactaaagacagacctagaagaggcatgacaagggtctgacccacatagtgcttttccaatatctgtgcctgttgcaggcatcactaatccaccatgggactcttttccactgtctgaacacagctccttaccatcctgccataggcagttgctttcaaattttcagagttggggtgcaaaatgacatttatttgcatattctatagcagtgcttcacaaattttagcatgcatatgtttcacccaaggatcttttacagatccggactcagttggttctcagatagtccagagtctccacttctaacaaacttacgggtaatgctgacactactggtcaaagggccgcctttgagtagtgagtccagagtgaaagaattctgagcttagagttagaagacctaaatacaaactcggatctgttcttacaagttgtgtgaccttcaacaagtggcctggcttctctggcctcgaaggggacaatttaggttaataaggcaactcagtggaattgaggagatcaaatgagatcatgggaagatgtactctgcaattgatttgagagctataaattcattcaatagtattattattaatgataatatagcaatgatgatgattaaacaccactagacaactctgtttgtaggggctgagccctggcataaggttgcagggtgacagcactgataaggacctcagtgactaactagtcattagtgcctagtgggcagccagcaacctgaggttcatcattcagtaaaaatgtggccccataaaggctggcctggaaggtctcagcaaggaccagctatacttaaaactgtccccgcagccaacagatataagtccttaactacagggattccagatatccagtgcttcactgtccagcctgtcttggatgaacatcccaggttcaagaataagccagtgcctgaccagattataaagtaagactcgttgtccacagggaagaaggatggggaagagaacccattggggccaccaaactgagctggtggcagaacagaccccagtgtctttctagttccttctctatcttagccagtttttccccccttttcctcttgggcaaagaatcaccctccaattagctgggctctgcccctgacaaggctgaagccaggaaggatgggagagccagggttatggctcagcaaatcctcagcaagcatcgagcatttgctcaactggatgcagtcagcctatttgttgctcaggttgatctcagagtggccccagggagtccacagacagagtgtggctgggcaagtgataggcagggtggagacagggggccttgtccatgctgagcacatgctcccagagggacatctcctcagcatttgtgaaggttgtacattgacaatggtgtgttcaggctctgataaaggaacagtagaggaagtgccgtgaaggctgatgtccacctgttctagatcagattgcaaagtcactgatgaggccacaaggtggggcctctgtgggacccaaggctgtatgcctcccagctgcccagctcattccccctaccccatgcccaggttgtaatggagcacttgagtgtcttagagtaggtcctcccctctggatgggacagtcagaaacaggatctgctttgcaagatgaaggacccttcagggagaggcagcccctcccagcagcctcacgaagtgccacagcagagcaggtggagctcagcttgggtcttaacctcccctcaccttctcaccttctcagacaggcacccatgagcaggggacaataactgtgcagctagcacggtgttctgctggccctgaagttagaatctcaccaacgattcagggagactgatttagggggttggctgggacacctaaagaaatcctttgaggacacctctgggaaattaggctcagacctcagctcctttgttgcagatcacaggaaatcatgacctaggccatcaatgttagaattccaattgcctggatactctaggggtactatgttctcaaaggggcacaagaccagtctaccttctaaattgccttgtcaggaaagcctgtgcaaaagtcactcttacggagcccagaacacagaccttgattttaaatgcaccacaagggactctgccaggcctgaagtttactgtaatgaacctccctggacagtgcagggtcagatcgggtgtcagc

SEQ ID NO: 34939 - DNA, 2300 bp, Homo sapien
accacaccatcttaggtcttgaaatctaatagtcagtgtaccccaattgttgcttttcatcaagtgtgtcttgcctcttctaagtcctttgtatttctctataaattttaaaataaccttgccaatgtttacacactcctcccaaacacattgagatttggattaattgtacattaactattagattaaattggagagaatggctatcttctcatccatgaacatggactagctctccatttatatagttctttaatttctctcagcaaaattttgtggttttcacatattttattttctttcatatatcttattagatctgctctttggtatttgatattttaaattctattgtaaatggtattgtttttaaattttattttctgtttgttaactttttgtaatacactcatcttatgatcttttatgtttgtacttcttgtaattatgtttttcaatcctaatattggttattagtaccttgtattttcttgattagtcttcttaggagtttgttaatgttgtatcttttcaaagaaacaaattttggctctgttgatcctctctgttgtaaatttgttttctatttttattcgtgtccactctcacctttattattttcattccttttctccctttgaatttagttcgctgttcttttactaatatcttgagatggatgcttagctaatttattttctgtgttttctaatatgtaaaactaaagccataaatgtatctccgtttacaaccttatctcactactatttatatgtagtttttccattagcttccttttttatataaaatctttgtctttttcatgaatgaaggatcttttctgttcctatatattagttaaattttttagaaaaacatgttttcttaggctctctttattctatttcttccaaattcattctgttttttcttcctttattctttccttcttttcttccttatttgctttcttccctatctgttggtctggtctctgtctttcctattggagactttcctccagtgtctggtgatacttggcattctcttcatagttaagagcaaggctaaagaaaaagaaaatctgagtacaagagagagggccttggcaactgggtagcattgctgtgtggcaacggaatgacccacagacgtctctctctacatgggaccattcacattctccagagtcagacccttcaagctgttatatagaaagataatcccagctgctactctgctggccatttgggaattgggaagtggagctctcaggacccaaatgcagactttctcttcaacttcttatttgcagtctggcttctgcttctgccttctgttgtgcctgatgcccctaagcccagagctccttgttctaattgttctagaggataaactcctccttcttgggaaaatgggaaaaaagaacacttggctgcagggtgaggcagtcaggcaatctaactgctcctgatacagaacttcaacacattcctctgtgtttggcccctcagctcacccgccttctctgtagtacctggtgcctccaatctctgaggccctcctggcttcatgtaggcagattggcttcttatcaccacctccctcctctgctctggaagctctggaaggtcagttatgtcctcccacctcctggcacacatattgtgtggcaggtttatgaatgtctccaagtttcactgaagatttcagtttctccttcaccttgtcatttctgggagacctccaatagaagtaagcagaaatatctttatgtcaccatcatgaaagcaatttttcccccaagtaattcataatctacccctttgctcccctggttatgtttccctgagaccacacaactaaagttctcagttctctttctgacagtgcccaccatggctctgctactctcccttaaggtagctgacacttagacagtatccactgacctcctatggggacaaataagacttcaactccctcacatcaatcctctcttcttccctcatcttcctaaggcttttattatcatttttcagagctccctactggggggttaactttatgatattagcacattcatatccttcttcagcagctgtatgaagtgcaattggctccatgtggtaagatgaggctatgccccctcctctgttttctctcagctcttgccttcctctatctctcagcttctgacattcatcctttcactttagtattgccaagaacatcttaggcaaggttttaaatcaatgcaacagagattcccctcctctgatccccacactctgccccca

SEQ ID NO: 34940 - DNA, 2300 bp, Homo sapien
tgactgctctttgaaaagtcagggctccaccttcagcaagccaggcctcctcatagagaaactgtaccaaacaaaaattctgcctctggcttggctctgcaaagtgtgccttactctaagcctcatctggacagccagagcctttcagagagtcacatttcatcactgttttatggtggggacaggttcctctgggcctaacatgaccactcctacccagttacctggaactcatcctctgggcaccaatatgctgaaaatgaagtttattcagtctcattcatgtttgccacatgtgtccccacataaccatgaaagaggagcagagaggggaagaattctttggggagcatcctctccagttgggacagtcagtgacctctttctcttgcctcaaagaaagtagggcatgcaggaagtgggaggaagctggatgggaagaagaaggaggcaagcgggagcgaggtggtgaccagaggggctgaccccaacttttctcccatctgcttcatcacagagagaagtctcagctgctaccagaacctggtcaggggccagcgcctaccctctgagtagggagaccaccacccatggcccaagctgagggcctgacctggggcaccaggggaggctgggacaagatggaggatggagcccagataggagaggagctggctgagccacagggagaagccagcaggggctgcagctcctgcttctggagcctgagggagagagagagaggacgcctggggcatggtgagtcgggcgctctcctcgtgccctggctgcctccatgccaggggcctctgcgagctgaaacatgaaaggtctttggatcagagaggagctgggagcctgcttgccctgcagctggaaagaaacttgaattgttcaagttctctcacttttccctgaagactgattccccattttccccttttgctattatttttaagagccttgctgctctccaggcaaattctcaggttctctgcccgtctgcagcatgtatgcatatgcgtgtgtgtgtgcgtgcgtgtgtgcgcgtgcgtgcgtgggcgtgtgcgcgtgtgtgggcgtgcgcgtgtgcgtgtgcgcgtgtgtgcgtgtgcgcgtacgcgtgtgtgcgtgtatgtgtgtgttgggggaggctgcggtgcctatgactggttgcccccttgaaccccaccagaagccagcccaggcccctctgcgccctcttctgagtctccagggccggttctctcctggcaactccagaaagtgcctcctcacctcaaaagaccaagaaacagggtttctgataaagtgtcccacccagtcccggctggggcagttggttagagaatgaggggacattggggggaagaggagggagaatgaggggatgggaagagaggcgcagagaaaatgagaggtggagagaaagggacagagtgaaagagaaggagaaaggggagaagccgggaagacaatgagaatggaagcgagagatggaagtggaaagaagaactggaagcctagagacagagggagagagggagagagggagggggagagagagagagagagagagagaacgggaatgagcagctgtgatgtggccagatcagttcatagaaaagaaacacagttcagagcagaagggaggaaagaaaataagaaggaaagaaacagagaatgagatgcagagaggagaggagggagagagagaaggaaaccgaggtgggtagaaaaatgtgacgaaagggaaggacagaaaaaaaaatgagagaagtaagacagaataaaggagaaaaagaagaagggaatcatgaggatggtgagaaaagacaggagagaaagccgggagagaggatagaggggcgttctcgctgcgctgcgtgtcagctctggtaagccgtctagcatgtcattagtggggacctgaggcgccagcgggaaagtcccctccccgtgggctggaggctgagggagggcgggccctgggctgggatccacaggcaggtggccgcccctgggtggggccgcccggccaagccctaggggtataagtgggaggccgggcctgctgagcacctgtcaggggcagctccggggtgcaggtgccaggcaggtggctccggccagcccagccccagcatgagctccttcgacctgccggcgccctccccacctcgctgcagcccccagttccccagcatcggccaggagccccccgagatgaacctctactatgagaacttcttccacccacagggcgtgcccagccctcagcggccctccttcgagggggg

SEQ ID NO: 34941 - DNA, 2300 bp, Homo sapien
tgttgattgaaattagactgtgggcatccatgtgacctttgtgtcatcatggaaactctgatgagagtgactgcccaaaacagagctctccagggctcagcaccctccctcctggaatgtgtcccaaggtctttccagggcaagtcgggcctcagctcagtgtcacctctccaaggaaggcttctctgggctctgcatttgatgttgacttccttgttttaatgtctgcttagcactctctggtctggcctatctgtttatctgattcttttgtgtttcctccattatctgtaagccccagatgtcagggaagttgcctgtgttactctccactgaatgcccagcctaggtcatggtggtcatcaatttcattggtcaccaatatctgttgcttcaataaatgagtcctcttcaccctgtttgctctgtgataatgaagcccagtgaaggtcttgagccccatcatgacttgaagggtggattgtgagagctcaagagtatgtctgtggaggatgcattaggactgagttggggggtcatgacatttgatccctgaaagcaagaaaacagcttccactctcggatatggtttcctcttttctttgattgcaactggttgtcatgatccctccagtccatcttgggtgcagaaaccctggggattgccaaaggctcctttctgaaccatcttttcaaacatgcgggacattccctgtccaagtgagctgcaaggacaaaatagaaatttgtggatgcaaaatgagattactgatgtggttgctgaaacttataaaactccctcagtgataggggttgtggtggcctgtaaaggggataatgatgacaccttcaagctctccttttataccacacagccggtggagtcaggacttaggttcgaatccagtcaagctatatacatctgtgtgacttgggcagacacttttcctcttttaagtatcagtttcctcacctgtaaaataggagtgataaaacctaccaaacctgtgagatgtccccatgacagagcacccagcacaggccacgtaagggctttcctgatgtaagcttaagcaggacaggctcgggctcaggactgaggcctctggagccaccctcctacaggctgggtggccatggataatgtgcttcacctctctgaagtctcggttttctcacctgtaaattggccgtaataacacctagggtatatttcctagggctattgggagaaccagttagaatatatttttcacataaaatgtcattcaggtaattatggctgtttaaagccttataaacttagatcttgcccttgtagacagaaatgaaacaattgctgtgactgggtctgatatcatagccaaacccctacacaaaacaacagacttatcattcaaacaaatcagtgaaaataattggtcttgtaagttgtcaataccctgtgcaacaaaagcattggtggaatgaccttgagcattaagggggagttgtagggatatcttctagagaaaagatggagttgtcacctcccatgtgctctgctacatcttctctttaacttttccctttgcccaaagcaacatggaccatctgtttaatcaacctccaccacaactccattccccagtaagccaagtcagcaactactcaaatgcctcattctaagatgtgctgatggagtgtggcctgcctcagagggtctctcccttcaaataggtctatattgtctggtttgtttgtgaacagagccaggtaggtgccgtgtggctcagagaggtggctggaagtgaccttccatgactcaattccacaggtttgtttgcaagaacacagacacacgagtggccactgacaatatgtgttccaacattatatacggggtatattttgctcagaaacatgccctgttagttgttgaaaccttttttgcattccctgaaacaaacgacactatggtgtattttcttttggggggcagtaaataaaagtcttttatgttgacaatgataatattatattctacaatctatttgcatttctctatcctgtggattttattgcttagtataaatccccaggctgaggtgcattaagcttcactcagagagaaacaatgcattttatcatagggccggacagctatatgcacaagatgctacctgcagagattggtttttgcccagatgtgcaggagagatgcacagagaggaagaaatgcatacatgtgtgcaggttttggcgtgtgcacaagaagcctggaaggattttctttggatctacagtcaaaatggatttcc

SEQ ID NO: 34942 - DNA, 2300 bp, Homo sapien
accaaccccagtgcccatcatcacttgattttcaggattctcagtcttaatgctatctccacccacctacttctcctaagcaccttatttactcctgtagttatccacagggagtttctaaaagtgaagaagtttttacttcttcatcatcaaaataagtgaggaggagaaaggatacatcctgtaagctttctgtcaagatagtcttattctgaagttaagaccctcctccttttattttcttccttctgttttgattttaaattatccttgcttttataatacaatgaagccagttctttttgcttggttttatacattaatgtcctaatttagaaataaatgttgcttaccctatgttggtctccccgtatttgtattcctcttttaactctttcagtcattctaattatatcaagaagaaagtcttggtttgtgctagactgtctttaacacttctctaacacttaataagaacccattttaacaaaaaagatcaggctgcagaaaacactgcaactggttgcgagcgtatatacatgattaaaatatgccttattttcactgtctttatttttccaatgactttatgagttttgtttgtttgttttgggatggagtctcactctgtcacctggactagagtgcagtggtgcgatctcggctcactgcaacctctgcctcccgggttcaagcgattctcctgcctcagcctcctgagtaggtgaggttacaggtggccaccactacgtccagctaattttttgtatttttagtagagacgaggtttcaccatgttggccaggctggtctcgaactcctgacctcgtgattcacccacctcagcctcccaaagtgctgggattacaggcgagccaccgtgcctggcctgactttacgttttattctatttaacactggtgatataaagatttttaagtagacttaaattttaaaaataagtagatttaaaatatgaaggcaataatatagcttcgtattttacaaagctggttatcattaaaaacttcttcacctttagaaactccctgtagttaaccacaggagacaataaggtgtttaggagaagataataataatatgagtgccataagcacagaatcttaacagtggcccagcaattagtacaatttaggaactactggtttagcccatccctctcaatagaaaacagataaggaaacagagactcagaataaggaagatattcttttctaagatcatacagctggttatcattaagctctgttctcctctgtccctcctcatctaggtaattgcattcgacaacaaattctgcagtgttaaagtgaaggaaattggatataaaatacccaacaattgtgatgtgggctttcaggaaggtgatggttcaagaggctggtgtgtactataggggaggcatagacgcaaagacttgttgtatagcaccttgtgctgaaagcctaaactcctcaatttctcagggcaccaagaaaaatctttgggcctgcctcaaaggttgcagtggcagagattcctctggagtcaagcaaaagacggctcgaatcccagcttctcagcttggcaaaaaaccattttccatgtctcaactcatctctttattcatgctactctttactattatcattcctataaaatgttataggaaaaataatagctaacagttatggagcacttggtatctgccaagcacctctgatgaattatctcacttaaccctcaaactaacactggaaggcagttattatcgttccatacgataggtgaggacatctgcactctgaatagttaatcgcttatctgcatctatacaactaagcaggtgatagaataggattcaaacccaagtggcttcattccagagtctgcacttaacgctaccgctatcctgtgcgactcaaatgcagataagggttgcaaaagcctggcacactgggggtaaggaatgtcagtgctttttccgccaacgtggccgcgcgagtcagttgtaacccggcatccagaaccttctccgtaggggccttgcctgggactacaactcccaggatgccgcaggcggagaagctggccaatcagggggcgcggcttcgccttcaccgtcggctccctgctcctgtcagaacctcggtgacggttggccaggtgggtagtgacggctgctcggtcttgaaggatcctaatctggtttgggagggtgaagaccgctgaaatttccaggctgcccgaggctccaccttccaccacccaacgggtgggcggtgggccgggctggcctc

SEQ ID NO: 34943 - DNA, 2300 bp, Homo sapien
tatgtgagttgaacagtctacctgtttagttagaacagcgggtagccaactttgattctaaaagctagcaatattctcaaggtaattttgtcttctcttgggtcacttacatttctttttgtggaaacattaagaacataattatcttcatcattgcattgtccctacatcagctgttgggaatccattctgcctatgatgatattataagaatctatgaaaaatttgtctcttgagcattcattttgacgttcacattcattaaaacaattgcgaatttttttataaagggatctagtcactttatattatgtaacatgcacatttagaaaaatcactcaaagttgaggttctcttctcaaagttttactggcatgattacagaataatgcctgagcagcccccatggtttcaaacagatgaaaattatttttgaagcccttgtttcttaaaatgcgaactataggaccaatcgcaagggtatttttttgggggagtggggggaatgtgttttgtgttttgatagcagcaaacaatagcttacagtaaattaactgtcagaattctatacttttgaaggccctagcaacagaccacctatcagagccgaaggcagaaacttccccttgccacttccaaacaaacctcggcccccatcccccgcggaggaagaggtaagagagcatgtttttatttttgtttgtttgccttttccctggtaaaagaatcaccagaaactcccattgaatgttcttctgtacttttatcttccctttgttttattttatttatttgaaaaaaaagttaaaggagaagatccagatgaacaatatgttcttttcccttggcgttctttcagacgctttcaatggcaaacatgtgttttgcattaaacagcaagaaaaataatcctgttttttatgtttatgaccttgattcgtcacttaactgctcaataacccatttttttaatcaagcaggttattatgctaaactgaagaaattattgtatctgtatctttcctgaagaggttccatactgtaaggaactcttattcacaggcatttttgcaaccagtgtcatgataaaaagcagttcgcacaaaatatcttctatttagccccagctaaatgactctgaatgcaaattaagaaaacaaatgtttcagacctcctggaattgaggtgttgatttatggaaatgattactcagaggcttttcttttcacttacatctgtaactgtaaaatttattcagtttctaaaaatttacattttcagaattcattaaatgaagagtggtacgtttcttatattacccgaccagaggcagaagctgctcttagaaagataaaccaggtattgtgctatagtttattttaacatagttgtaaatattaatggcagagaagggaactgacctgtcctgagtaccaattacaggctaggaattctgctaggtgctgttgctttctgtaatacctaggagacccattagtgccagcttcacaactaccagcacccatagcagggattcctaggctcgggaatcattaggctggcagaagaatctcaaggcagtcatttggttggcagcatcttaggagattttattaatgaaagagtctgtcttgtcataggaatcacatggtgtcagaaggagactctctttcaaagttccaacatcgtaccagttctatcttcctcttaacacagacgtgccatccatgttgatgtgaaaggaccaatattaaagagatggcagcaactttttgctttttgccctagacgtttctagctagtcctttaatatcataaagtcttaaacatatttcccgtagccagtgccgaaactttaccttagatttatttatcagaaatgggaaagcaaaaatctttcatctttcacacttaaactccacaccagtagttctcagtagtagttgcacatttagatcacccggagaacttttgaaaaatcccgattcctgggtctcaccttgagattctaattattctgggggtgctgtgtcagctctgggagtcttcaaacttcccaggtaattctaatttgaagccaagactgtgaatcactggtccagaagtatgtttgtttagcagagatgttctgacaggctcaattaacttgcaataaaaggaacaaaggaaagtcattattgccaactcatggctatttaaagctatcctgatttggtatgaggagaagggagtagtttaaaggagtccttaccaattaattctattttaatattagatctttacagtattaatattatgta

SEQ ID NO: 34944 - DNA, 2300 bp, Homo sapien
tgatcccaggagttcgaggctatagtaagctataattgtgccactgcgttccaggctgggcaatagagggaggccccatctctaaacataaaacaaaagcaaataaaaaggagaaattaaaataaaataaagtaaaattgcttctacttttaaggatgatctggaatgttccttttcataggtggcatgtgttttgagagatagcgagagagagattgattgatccacgtcaggaatgccctcccttttactccatcctccacggccctgcttaaatcccagttaattccatgacatcttctgtgcttactctacttcaaagtgatttctctctctctttctcttcaaatggctttttattgttcactgctatgctagtgatttgaaagaccaggtgacctctcacccgtgatggagcttttgtacagcagagctgtgctttatacagaatgatcagctacaaagagctcttaggtgcggcccaggcacaatggctcacgcctgtaatcccaacactttggaaggcctaggcgggcagatcacctgaggttgggagttccaggccagcctggccaacagggataaaccccgtctttactaaaaatacaaaattagctgggcgtggtggtgcatgcctgtaatcccagctactcgggaggctgaggaaagagaatcgcttgaacctgggaggcagcggaggttgcagtgagccgagatggcaccattgcactccagcccgggcaacaagagcgaaactccgtctcaataaaaaaaaaaaaaaaaaaagaaagaaagaaagaaagagagaaaagaaaagagttcttaggtgtgaggccctgcaaggagcaaatggcctgggctaccttcactgatgccctcagcaccttctaaggtgaggctaacaccagctcacattgatgagctagtgctgggcctggagcaaaatgtgtatttcatttaagctgcccaccagcttgtgaggcaggtgcattaccgtgacggcggggctcctcagagtgtgtataagaagaaaactgtgcatggccaaagctatgcttgaaaaccctcaggaaggcaccacctcaaggaccaacatagcatcacttagtaaaggcaacagccttggaacagatgactcgtgtgtgtgtgtgtgtgtgtgtgtgtgtgtgtgtggcattagatgaagtagtaacttgtgtttagaggttgccttattgcacaaatatagttgcttttatacactggactcaccctctgccaataagttgttcagttatgagaaatgaacaatgtctgaaactaagaaaacagcaaattctcacctcctatctccagggaatgtgctctttggctagaatatatggcagaatcaatagtgaataaaatatattgtggaaacaatagtgaatggaatatatgacactaccaatagcaattgttaagttttttttctttttaatttttctttttaggtttgtctagttgaatgcatctaagttttatgtgcatatgaagaatcactgttttcctattatacagatttggaaactgagattcccagcttttaactccttgcctaaggttgcatagcacagaaatagtcatatcagaaactgagccctgtctgcacagtgtagcaccttgttcagccctgggtgcctgactcactcactccttgaggaccctctcatgacaactgtaaagaggcagctgaaagaatcccagtctttgatggtgggaggggaaagtggttggaaagcattaaaaaaacatgctccagcagttcactgatgtgggaaattgtctgtatttcaggtcaaccgtcaggatagattttggtctgcaaagccccagctgagcaagaatgcagtgtagacatatgggtgcccagagtttaaaggaaaattactcagactcacattggagtttaagaccccttcattgcctctcctactgggttggggtgactggagccagtggggaattaccaaccctgtggctctctctgcatctcaagcctccagagctgggcttccttgtttacttatttagagcccagcagaggaagtggtaaaggaaactagctgagtcgttttctgagaagagaccatatttgttcgcagaggaagccgttgctttctgggatctggctacgccagaaaagacatcggctccaacaggggtgttccacagggtagctgggagttggaagagccaagaacgcctccgagctctggatttgagcttctctgcccatgggtgaagcgcccatgctcagcttgtgagcttcttcccgggag

SEQ ID NO: 34945 - DNA, 2300 bp, Homo sapien
tctgccctggtggctaagcctgggtttgcctttcccttgccgtagagaaggcttggtaggacaagctctgtgaaaataagccctgttacaccaaataaaatttcacagggaatgttaagaaacactgaattatgaaacatagaatatagcaaacatttaaggaaattaactcatatggggatctcttcccctgggcacaattgttacactggctagaaatcattcttagcagtttaacaggtctcttaaggaccccaactaaacaaaaggtttgttacattggctcaaattattgtgcctatttagtaacaattctggctaatgtgtcccaagggcccactgggtacctgctctatgctataagtttttgacacccgattcaatttaaacctcatcaggatgggacagtatgattccatttcacagctgagaaaactgaggttcagcaagatcttgcccaagtcaaggtcagtattcaaatcaaggtctgtgtgatcccagagtctattaatctctgtgctgtgtataataggatcagcatgggatttcttcatttattgttctgtcctactgatattcacactggccacccctggtatgagccagatttattgaggtttctctggggcttctctcaggtgggtaatggagccaattgcatggcctgccatccatcatttcatggaaaacaggttaagaggacactaaggcagctgtgacacgaggaaatgtcacaaaatgacaacacataccctcatggccaactggcagaagccaaaatgaaaactgtgtggagaacagtggagtgggatgtagcaaaattacagaagttcctatccttgagctagcaaactgacatctggcaatttatcctaaagaagtaatcatggctgtgtgcagtgggtcagctaaaagaatgctcatttctgggttataataatgaaatttcgaaccaatctaaaccatagggaattactgaaataaattctagtacctgcataccatggagcactctgcagccgtttcaaagctgctttgagatgacattcagccacatggaaagctattcataatatgttgcatatatgaaaacggatttaaaaaaccacaaagaggtattaaatgaaacaagcaggaagcctccgcactttgaattcctccataacaaattacaccctaacttagtatataaacaaactgaaacttaggagaatacttttggtaacaaatagctggtttcagccaatcacaaacagctgagtttcagccaatcacggacaaccaattcatcgcaccaggcccaaataagacagatgtctagctgtagccaatcaggtgatttatctgctttgtttccatgttcagcctataaaagctcagtgctcatgctcctgggctcccggaacctcttctggttctgagtgctgtggattcgtgaatcattctttgctcaaataaactctgttaaatttaatttggaaatttaaagttttcctttaacagaggttataaagaattctatgaagatggtactctcattttgacagtgagaaagatttttttacttgaagaaaggaaataccaacattttaagtgtctaatgttcattattccttttcttgcctgtattttatttatgtttccatgatgactctgttttacttttacaggtagaaaaaaatccataactttgttcaaagtaagaaatgttggtcacagacaacttgaagggatttggatggtgcatctatatgaaaccatcttccccccacccacttcttctggctgtctcacagacctcagccttctgctgcagttcagagctccagacagtgctagtgattcactacatcctaaacagggctgtcttagagtcttcctggaaatgcagaaatccccaggccatgcatgccccaaagtgatgatgtcacagggagtctggtttccctgcttgtcactgagcaatcctagggtgctctcaacacatgcgcttctgattctccaacccttgctgcacctacagatccccaagaggaagttgaagagtcacccaatctggaaggattctcacgccctagagagtcagaaaaggaaatgaacatgtgttctgctttcccagggtccatggcaggagggctgcagcggcctcatttattcatttgtgccaggcaccctgttaatcatggagataccacgctgacctgccttcaaggagaccatattctagtaggagagctgagcagcgagatggccatgtgtagatggtgctatatgaaaggtaagcacagcacaccctggaa

SEQ ID NO: 34946 - DNA, 2300 bp, Homo sapien
aataataaccacttatccttcgtggatcagatacagtgttatctcccatatagagcattttctgatcaccctccagcagcaaaaatggatcccttcctcatttctatcccaaatgtgcttttgagatctgatattccctcagaacacctaatatactttgatgcaactacttgactattgagaaggtctccctcatttcaaagcaaacatttggatcaaagagacatcattttattcatctctacatcctcactggaacctgccatatagtagacaccatacattcatacatacgtacattcaccaactcattcatcttcatccatccatccatctacccatccatccattcatctatctactcactaatccatctacctactcacccatccaaccatccatctactctttcatccatctacctacccacttgtccatttaaccatctactcatccatctacccacccacctgtccatccatctaccattttattcatttacctacccatccgtccatccatccatctactcatccatctacccatccacctgtccatctacccactcactcatccgtctactcacccacctgtttatccatccatctacccacccacctatccatccaacaaatatttctgaatgtcctcaatgtcccagccatttctccagactctttggatatagagaagaacaagaaagaagaggcctctgctctcactagccctacattctagtgtctgttgcagggtcagtgaggggtgggtagggggtcacagactacggaaataaacaaagtaggtgagtgagaagtactgtaaagtaaattaacagagcaatatcccagagggtactactttaaaaggaatggtcaggtcaccttacaagaaggtggcctttgtgatgagtcccaaatgataagaaaggaagcagccaaacaaagagagacagaaagtcctgatgtgggaatgagctttgtgtgtttgaggaacagaaaagaacagagtaagcagaggagaggacagagatgaaggcagggaagttagggaaagtgtaagaacttggaaaatacaggaaactcagcaacagccagacctgattttgaatcctttctctagcattcatctctacacgtatgaccttaaccaagtcaccgcacctttcttagcccccatttccccatcatggaatggggacacaagtacctatgtcattgggcttaggggagaaagttcggtaaaatgtctgacacatgatagattttgacaaacattatttcctcttcttttcttgctttaaacatataatgatgctgttaccttaaaagttaggttatgccattagaaggcgcctttgttctttgctcttgttctaccaaaatgagaaaatggcaaaaatcgcagggtgggtctcagttctccattttgttaatatccaagttgatatttcccttttgcgacagtaacaacaacatgcaaaccaaaaactgaaacagcttcagttctgtgccctcaggatccagcgtgggactcgtgagaaccctccagagacagccacatttcgaagcaagtggcacaggctttgcagaaggcacactgggcccctctcaaaactcaagcagcaaagatgatgagagagctgcagacttcggggcgtggaggatgggactaagccgcagagtgccttgtctaacatgttttaggaagcacccttctctttcccgactcacatggggcagctataataattcagcttcacgtggctgaattattttctgttttcacttggttctttttttcttctcctttaagaaaaaaaaagtccaaataggctttgggccacactggactacctagtaagggggatagatgatctagatgatttgagagctggttttctgaaaagccagggagctctggtcttgagaagactcagtagccaggaagctgaggaacacacacacacacacacacacacacacacacacacacaaacacaccccttcctggctccagttccgcaccaccccacacccccaacaccggaagtagatttctcaataggcagggctgggtatgagtcacaggcaattccgttttgtttgggaccatgagacctcccactcctggggccagaaggagttgctgagaaggagctgtggttctgaccttcaggggaattcccacgtctgtatggtggctcgtgaagagcatggttccttttctcagccctcttgaggggcgaggatgctgaggactgaagtcggtggggcttgatgcatgtggtgtgtggatggtgt

SEQ ID NO: 34947 - DNA, 2300 bp, Homo sapien
ttatttcacctctctgaggctcagttactccctctatcaaatgggtagaaaaatctccacctcagtggtctattgtgagcctattgtgctagtaccttaagaagctgttggaagagtcagagaagatattttgtgatctctgacaccccgtactaatgcaaaccgtcaatatttattgttgcagcattgttattttcttgccctccacctgtagccatctgtcacacacaaccccgcagccagcaaaggacctgggttttcacccacaaaccctcgaggacagggcttgtcaatgccttttggttgtggctcatttagggggagcagaagaccccacggccccccttccctgtttgttcccaccttcccttgggaagaatgctaaagtttgtttatgatttccaaataatatgtagcccttaataacttattcagagtatcacgagcaaggagcccttcggttatactcataaatggcagcctgttgcactgtgtatctctcccccagggaagcaggaggggggcctggcatttctggattagccccaggaggacttttcctgcttctgagtggacagaggatcatccttggaaaattgctcttctgagattgaattccagatcctacatccctctgtcaatctgcctgcaaggtctgaagctggtcttagaccctctggtgctatggtgcccattaaacagacactgtagtctcctgttaataagattcaattaggaaaggggtggagaagggcactcaccgcctgagagtgtgtcagggaggcctgagtggctgccttcatttcgcgcctgctggaggcaggagggaggaaggtggtgagctcgctcagcagggaaggccaggctgcacccacctccctgggggctggggaaactcagggtgacctccagagcctcaggtggcagcttactgtatgatcgaggtgatttttaatgtctcagagcagccccagggtcatcagagacagaccaagctgtgccatctggaagggccagcttcgaatctagttctggcccctagggttgcaccagtgacttcaagcctccaagtctcagtttcaggttctttgattcttgggtcaagtgaagggtggagataagctgccttctaccaccacgcctgatacttaggaaagccccaatatctgggattgtttttgttgttttgttgaaaatatatatatatatatatatatttgttttttttttttgagacggggtctcgctctgttcaggctagagtgcagtggcacaatcttgactcactgcaacctccgcctcccaggttcaagcgattctcctgcctcagcctcccaagtagctgggaccacaggcatgcaccactatgcccgactaatttttgtatttttagtagagatggggtttcgccatgttgcccaggatggtctcaaactcctgggcttgagcaatccatctaccttggcatcccaaagtgctgggattatgggcgtgggccactgtgcctgccctttgttgctgatttttaatccttacttccactttacagatgaagaagcagagatctaaaagcatgttttttgcctgcaaatgctgacattcacttgtcttattgctaggaagaaatctctgtactttcgcggtctctgggagggcccctggtgagcagactgtccctggacctggttggaagcagttgtggagctctcactactcccagcttcagctcagttggtccttaaaaagtcagttctctccccttgccataaatccccaccgtctctaactcccatcactaccctaaagcaaagtaggttttaaaaatgccagtaacacaagtgagaaaactgaggtcatttaacgataagtttgggagtaaaaccaaaaacaaaaaaggaaactgaggcccagagaggtgccataacttgctcagggtcacacagcacgtaagtgccaaaggcagggagctgtagctgctccagcgtggatatgccagggactagtgacaagcccaacccctccagcccaactccacccttcctcatgccaacaaaaggagaatcatttcctatttctggcatctttgccagcccacagagacagagagaagaagaaatatttccaaatataccaggctgatctttcgtagtttctcagtcttgctgtctgttgttgtttgaaatctgtttcccacgagactctgggaagatggaggtgcagggcttgggtaacagctgccttcctcagggctgggtacctgctctccgagtctgtgtctccaggctgtgtgctcagacttg

SEQ ID NO: 34948 - DNA, 2300 bp, Homo sapien
ccctggcctggacaagccctgagctggcagttaggagagcagaggttgtgaatctggtgggacccccagcaggtctttctggctcagtgccctcatctgtgagcaggggttccccaggagaccacgacagaggcctggaacccaagttctaatcccacatcctggctgggcaacttcaggcaaatttctaacacaaggtaagcctcaatttctctctggggtaatgatcaggcacctgcttaattcacaggggtttggtgggcatcacgtggacaatgtggttgcacagcagtgggcaatgcaaaggaaaggaagtatgttagtaagtgcccctcccctgttgcacaaaacaggacacatgctgggattgcagaaaagcaataaatgctgcacaggtgaagaaaactattcaaggaccctggccaagtcacaggctacctgtggccctgaggggacagctcatgggttggcattaggggaagcagctctcaaggggcctgtatcctggggattcaactctgtgcctatgtggcattgagcctgtgtgaatgtggtgactgtcatgctgttttgctgtgtgtgcgtctgcatgcctgtgtgtttgtgtgtctctccaccttcgtggggggcaactgtaggtgtattatgagccttgggtctgtctgtgtgtacaatagcaatgtctgtgcggacttaaggacctgcgcccatatgtttgtgggactttctgggcatgcatgcttgtttatgaggccatacatccgggtattctgtgaactgctagcatggtgtgtatctgtgtggcagacagaaaatggctgggtgggattgtagggggcagcttgggcaaaggatcctcagtgtcaatcaaaatgggtctcagtgggaacccaagcagctcagacttgggggaggggaagctcttcctccaccttccagggagcaaaccttgcaattcaacaccacaaggctttgagtccacaggcagggacgcaaactttgcccattgggtgagacgccactcacagaagggaaatggcttcctaaatctaatcattgccccttcaagcactaacaacccgtgcccaggagctgatggctaatgaattattgagctggaaagggagaagaggtagaaccaaggaggaaagaaacagaaaaatgagagagcaggccgggtggggtggctctcgcctgtaatctcagcactttgggaggccaaggcgggtggatcacctgaggtcaggagttcaagcccagccagcccaacatggcgaaaccccgtctctattaaaaaatacaaaaaaatttagctgggcctagtggtgggcgcctgtaatcccagctactccggaggctgaggcaggagaatcgcttgaatctgggaggcagaggttgcagtgagcagagatcgcaccactgcactccagcctgggcaacagagcgagactccgtctcaaaaaaaaaaaaaaaagaaaaagaaaaatgagagtgtaagggcccagaggggctgagggctcctttctcctccccaactccctgtcactagaaggtgggccctgccataggaggattctgcagaaccctcaaggacccgcggagcaggacggcaccttcttcccatgaccacccatttggatgtgtttttcacccctttctgggtggggcagactttccccctccccatgagttcaggcagtgggttaaataagatttcccttgaagtcgaatgaaatcacaatgcaccacacacagggacacacacacacacacacgcacgcacgcacatcacacacacacacacacacacacacacacacacacacacatacacacacacagtctccctggggccaatctactgccccctgaacctcacccatcagccaggtgcctggccccgggtctgtctcttagggttacatgctcccggggctcccgcacataccccggcagatgagggtgcgcaggggtgagggcgcagggctgggcgtcccccgcccccaccgtgcagccctcgcccccgccccgcccctccgtagttgcccgcccgccgccccctccgccgccccctccgccgctccgactctcgccccgagcgctggcagcaggcagcaggcagcaggcgggcgcgctgtggctccgcgccgcgcggtccgggctctgttcattcatgattggtactcggccctccgagacccagcccgagcgcagggaggggagccgagtgtgcggcaggaggggcgggcggacggcggctcccgcaccgcacgcggcgctggctcggcagcctcggccgg

SEQ ID NO: 34949 - DNA, 2300 bp, Homo sapien
acactgaccttaggcctcctgagaccagaggtcacacttggaaatgaggtgtggtgcagaggttgctggggtttctggatccacggagcaagaatgcctgggaatactggagaagaacctagttttcctggaaattcccctcccaggcatttcttcacttgatctgaagaaaatctaagaagaagccaacactagaatgaagcattgtttgaaagtgggagataagacgccttatcatacctactttcacttaagatctggctttccctggccaccaggggtaatcagtctcttaacatatttactggatgtctacatagaagtacaattcaagccccttgcaatgaaaatactaacaatatgattgggaagattaaacacaggatagacagattgacagataatggtgatgaagatagataatagatagatatctggatggaggtttggatagataagcacaaacttgacaagacactacaccatcaggagaaaaagaacaatttgttgagcgtctacaatgtgccaggtcaaggtgccaggtgctttcagatgtgttaccacatctgtcattgctgactccttacagcaatcctgtaaggaagcatcagccccattggtcagataagaaatggagacccaaagaggttaagcaacttgtccaggaccatgcagctagccagcccatgttccttcatctaagtctcactgttcctgggtcagaggaaaccctcccacccccacctcccagctctgaattgtctttattactctggagcctttgttctgtgtgagaatatcttaggctttttgagaaaagccccagatcactgtctattcattgagaacctgaaaccggctcctcagccattcctgctctagccaccagcaaggttcccaagtgaaagtgagtcctctcaggagaaatgaaagcgctgtctctttaggtgcccactccttacccaccagcggagcaatgttttccaggctggccaggctccagaagctcactaaggaagttggcttggggccaaaggcatctatggttcattgtacactgtggccctccccttcctgcccctccatttgctccccttcctttctctctctcccttcccggctcctagactgggtctaggcaggagcttcgccatgatgtcaggagggaaggagatgcctctgggcctcgtaccacagcctcagctctctctctgcccctccatctgagtccctcctggctcccagctccctcagggtgcaaggccaagcctccaaggaatccctccccttacctgcatggctggagccaagagtgagtttggggccactggctatgatgaggggatgacccagagctcagtgagcactgtcgaagcacttctgttaggaggtttggttggccagggaggaagaaggcctccctctctgggatgctcctgaaaggactctgtgggaagttaaagaatcctctgtgtgagagcaggatgggggaaggtggagggttggagaaatccagcccagtgtctctgtgtctccccgcctcctcctcctgggcctctatcctctgtgctcttggcctctatgagtctttttgaaacttcccaggctggaaagcactaggtcctgggatatgaaagtctcttttaacatagaataggccttctgttgatcccaaagatgctcttaaaatacacaacaagaaatcggagttttacacacagtcagcttctcattttatagatgggaagctgaggcctaaggaggtgaagtggccactatagccattccattgcaccagggtggagggctgtccaccaaattcagagcccggcatagtgggtgggggtcacccactttatctgactctcatgggtccttgatctcaggggtcttttctggcagaggtctgggagcatgactgagacatgatctcagaatcaaacccctggaggcagtagctatagcaggagctgacgatctccagaaactcaggaccagacgatctccagacactcaggacaagtcagtgtccccaccaaggatggggctttgagaggctccgcccacctctgtttctgcacagcaggtttagcagctccattcttccccagagagccactccatctgagggtggctgcgtgtccacatacgaggggacagggctgaggatgaggagaaccctggggacccagaagaccgtgccttgcctggaagtcctgcctgtaggcctgaaggacttgccctaacagagcctcaacaactacctggtaaggaaactgctggcccctccaggtgtctgg

SEQ ID NO: 34950 - DNA, 2300 bp, Homo sapien
tcagaccatgagacaccttgcagccattagagagaataaggcggattataggaactgacatggaaggtgtcactgatactgcaaaacagcatgtttcatggtgcactcattaagaggagttgggtcagcttgcttagatgtacttttctgcccctcatgtactacttagccttggaaatattccttatcctctctaatcctcagtattctcacctgtaaaatggggagaatggtagtccctacttcaaagagttgtgaggattctagatatgcgtggcacagttgtaagcatgcattaagtgttcaataaatgtttgctataattaagttaaaaaagtaagccgcaaaaagcatgctattgccccaattttgctttttaatttttttgatatagagatatatatgtatgtaaatatatatgtgtatctgtggataaaacaactgttatcggtagttatttctgaagtatgagacaaaagagaagaaatggggggggacttttttgtttttgttatgtttttttaaatagacttcttttttagagcaattttgggtcatagcaaaattgagccttccctacacataaaaccttctttactgtcaacatcccgcatcagagggacacatttgttttcattgatgaatccatattgacacatcattgggacttatacttttaacttctgacttgttgccatttcaacagtgagcgagtattggttttgaaagtaaaataacattaatgagtggctgaatcatgccctaagctccagaatggccagattctagaaagtggcttgtttcacagaagttgccacagagaaggtaatcaacccagggctgcctgagaatggggcctgagcctgagcacccccattctgctgtcaccagcatgacaggtcacaggctggcctgcctggctaccccctgctccctcagagggacgcctgacagcagctcctgaagctgaggaggccgggcccctgggccatgccccacggatggtcctcacatacacaccagctggaaggcttcaggaaacacagggacaaggtctaggaggtcacgacagcagcaaggatcctcgggtcaactaaggcccaggccccagcctgctctgaaggaagagagtaccgggggggaggcagccagccctggattcaaagtctcccctggcactcactagcatggtgtccttcccatgcacctgtttccttgtcgtaataatatagggattaacccgcccaccacacaaggccactgtgaggatggagtgagctctgtgggacagcacctaactcatgacctcctgacactggaggctctcaggtttttgtttcctgtctacatgactgaccccacaagcctagacctggggataaataaaagaatgtctggcttggtcaaggtgagtgtagagttgagagtgtccttcctggtaaagctgggacaaggacagggcaaggatagccttggctcccagcagatatggcccagaggataaactggctgcatttctggtgctgatgaaccactctccaaacaaggtcccagtcttaatttgggatagatttaaaacataatcctggtccaggcatagtggcccatgcctgtaatcccagcactttgggaggccaaggcagatggatcgcttgagctggttcgagaccagcctgggcaacatgatgaaaccccatctctaccaaaaatacaaaaaaattacccaggtgtggtggtacatgcctgtagtcccagctactcaggaggctaaggttgggagcatcgctggagcctgggaagttgagctgcagtgaaccgagatcatgtccctgcacttcagcctggatgacagagtgaggccctgtttaaaaaaaataaaaaattaaaaaaaaaaaaaacataatcctccaaaatgaagtcattcctggagggaacacagggagaaggagctgtaaccgaaaggtatggaaagaggctgcttcctatgcatgctgagaaaatgctgtaccgaccacccaccagagagagaggctggccaggagcaggtgagcctgttgcacggccttccacttaccttgccccctgtttcccaggtgattcctacttcagccccttggtgtgagcagcttctcaacatgaactacagcctccacttggccttcgtgtgtctgagtctcttcactgagaggtgagctttgctacccccagaatggcctccatctgcgttgctttgcattcgggcatgtggtgggagggggcagctcctcctattcacccacagcaaggcaaaacccggtcca

SEQ ID NO: 34951 - DNA, 2300 bp, Homo sapien
acatgctactacaccaagctaattttttgtatttcttgtagagatgggctttcaccatgttgcccaggctggtctcaaactcctggattcaagcgatccaccctctctggctttccaacgtgctgggattatagtcatgagccatcatgcccagccacattctaggcttttagttgtaagacctagtaaggaccatggcctaggagtaaggtcataactgaagttaaccagaattaaaaagactcaatgatccactagtactcttgtctgcctaccacaagaaaacttagccctccttggagaaacctgttatcatccagagcctctacaaattttcttctacatggtttgaattcaacaagaaatcatgagatatgtaaaaaaaaaaaaaaaaaaaaaaaaaaaaaaaagaaagaaaaaaaagggccaagggccaagcaccaaaaacccaggaagactcagatgattcagaaattggagttaacagataagggctttaaataatacagttaaaatgtttaagaaaataaagacaaagaatttcatcaaagccttggaatctatttttaaaatgggagaggaggaggaaccatgaaaatttcaactttctaaatgaaaattctagaactgaaaatattataactaaaactaagaattcaatagaggggatgtatagcagctcagacacagcagaacagagtttctatggaatggacagcaggcaaataaaaaatacagaatagaaataaggaatatagcaaaaacttataacatacatgtaactggagttccagaatggagaggtagagagagagaaggggacagatgcaatatttaaagaactagtgaccaagatttttcaaaacttgataaaaaagattacattcacacttaaagagctttatgaatcccaagcaggataaatacaacacacacacacacacacacttagcgacatcaagcacaaagtgctgaagacaaaaagaaaaaataaaaaaagagaaaaatgttcaagtacctgaggagggggccaaaagacaggagcaacaattagactgatggctgatttctcaatagaaacaatgacaagcagaagacaatgagaagacatttttaaaatgctgaaagattaaaaaaaaagccaatgtgaaattctatacccagcaaaactatcctttaaaaaatgaaggtgaattaagatgattttatgttaacaaaagctgagagactttgttgttagcagacctgaatacaagaagtgcttaagggagtttccctcttaaatactacagcacagtgctcccaaatggaaatgctgaacttgaagaaaaaacggagaacatcagaaagcagcaactttgacccaattctgctccaataaattctcattgcagtggaatcatttgttgtaaaatataagttcatattaaacaaaatgcagacaaagaatgaggtaaagcttgaattttacaacttaacagcatgtagacatgggcggtttaattttaaccaaaatcaagttaaaaacattgttaagcaacaatggaatttgggccctgggagtcaggggtcaagggcaacagctggcatgtgggagtcaaaggttatggctgtgtgtgtctgtggttcctggctgttaggagacaagaaaatctgtggagatgcaggtgtcgggagccatgggcgatagttgtattttgagggtcaggggtcaagagagcctttggaagacttatgagtcagggtccacggctgacgggtgggtcgtggtagttgtgtcaaagggcagaggttggaggtcatgacccaccaacacacgccggttgaaacttgagcgcaagggacggttgagattcccggaggacacgcccctatcggccccgccccgtgcaccgcctccgtcgccccgccccgtccctcccagccccgccccgtccctcccagccccgcccctccagcgcttcgaatgcggacgcgaagcctggctgaggctgcgaaggacgagcggcgcagggaccccgcgggcgtctggggcttccgcggcgcccgcctctgctccctcccctcgggcgctgggtgccgaccggccggctggccggcgccgcctcctgggaagatggcgctgcacttccaggtcagtgtgctctgcgccgcgggcccgcgctccgccacgctgggaacccggcgggacgcgtctggagaccgagggccgaggacagcggcggaggccgcagggccgtgggccggtgtccccggagtcccagcccctgcctctgcccctagccggggaccgggacact

SEQ ID NO: 34952 - DNA, 2300 bp, Homo sapien
atgagacattcagaaaaattttagccttatccctgagctaaaaaaatagcagtaaaaacttatcactgataagctattaaactattgtgtgaggagacaagtaaggatattgtttccaacacagaatattcagatactgcttctctatcttacagaaattaacagagctaaagttcacaaaagtgaatgaagtccactgttaacactactgatttattaacttacaatagattcatatatttaccacacagtatctgctgatgaataatatggtgaataaccatagactttaaacatcttacatttttcacaagctttgtaaatttgttcagctaagcccttttccgctccatatgttttaccactagtgtgacatatcgtagcagattctacttcagtttatattgaattaatgtgtcctcaacttctttggaaatattctgtcctgtagttctcccacagtcttcatagaggccaattctttagttgcttcacactcagcattgacttctagaataaacagatagtaagtattggtaacattaatggtatgagcattataagaaacatctgtccactcatcaagacttaaggagaacctttccaaatcatttgtcttgttttcaaattgacttttgatgttgttccagtgtcttcagctctttgagaatttgctcccaccagaaactagtaatcttattttctctgcacatataactttggctgctgtaataaaacaatgttgatttaattaactcatcatcggtaaatggctgtgtgattggctaacaaatgagccacttggaaactttggttgcagtctcattttttatatttgtaaagacagtctactatgatgagatatccaattttctattttttctgacttttgatttcctgagttgggaatattgtgatgggaatattggggatattgcttggtctgatattgtcagcatgtattgtattcttttaggacaaccatagtaccattacataaaaagcacattgttttgctatgtaatcaatgaaagaatagtccatactccattgtgccttaaaaattagatatttgaagtccatttttatcttttcttatttcgatatgatagacatgtgctggtaataataaaaggtatgtgtcatgtcatgacaacacccatggctctctaggcactgtagagttgtagctacctcactgtggtttatgatacgctgagcagcagtaggaagcactgagcgccacatgtggtctctgttttagctattcaattctgccatcgtggcatgaaagcagccataggcagtgtgtaaatgaatgagcatggctgtgttttaataaactttatggacaccaaaatacagatttcatatatttttctgtcacaaaatattgttttgatttttttgaacagctgaaaagctgtttaaaattgcaaaaaacattcttaggtcacaacccatgtaaaaacaggcaggatttggtcaagggccatagtttgccagcctctggtctagagaaaaaaagagggagtatctttgcaagaatttctaggaggtggagtgaatacatgaaccaaattttcaagggtgagcatgcgtttagacagtttgagtatagtattaagataattgggggccagagagaatatagtcagacatgggtttcaaggaacacggaggtcagggtggggaagatttggaaaggaacctaaaggctgtcatggtcagagcaaagtcaagaatggaatcagatgaatttgaagagataatcagaggccagatgatgtagggctgtagaccatggtaaaagtactgtattttatttgaacttgctttatttctcctctttgcttattgttatttgagatggctgtctacatctccctcaactaatgatttcttttaagagattgtatgcctgtgtatgtgtatccttttctgtatgtatgtatctcaagttgacatattttatctattgtaaatttgccagtttggaaaaccggaagaatttctgttattgcttagaagaacatctctatcacaatgctttattttaatttcatttatgataataataaataaaattattctttacagacatcctatgctcagctccttgcagcaacatgtctttcaaaacttgtcagccgagtcagtcctttacctgttgagcagaggatggacatcagtaagtggcttattatgctttttaaccaactgcgctttaaaaatctttttcttttaaatatactaaactgttactaggattgcaaattttttatgtctgtcatttttaa

SEQ ID NO: 34953 - DNA, 2300 bp, Homo sapien
acctttcactataacatgatttcctaaatccaggccaagataagatctctttctcagtggaaacaaagtatactcagacttacaagttcaattgagttagtatttaaagttggtttattaaggatgggaagttaaaaatgtaaagataggctgggcgcagtgcctcacacctgtaatcccagcactttgggaggccgaggtgggcggatcacaaggtcaggagatcaagaccatcctggctagcatggtgaaaccccatctctactaaaaaaaaaaaaaaaatacaaaaaattagccaggcgtggtggtgggcacctgtagcgccagcttctggggaggcggagggaggagaatggcgtgaacctgggaggtggagtttgcagtgagccgagatctcaccactacactccagcctgggatggagtgtagactgagatggagcgagactccatctcaaaaaaaaaaaaaaaaaaaaagtgaagatatatactttgatcaagcaaaaagcctaaactggagaattggttaaattaattaagaggaggctgaaatcacagtgcttatttgacgggagtgtctattctgacttttgctactgccaacattcaactaagtcactcaatttttttatgattgcatccttattcaagagttcattttaaacattatggttgatgacctaacgctgaataatacctgtagcacagaatacctggcatatccatcttgggttttatatactttcattttttggttaactctttgttttcttttatacctatttagtatgtcatataaaatgcgtaatttgcatgccttcaaagtaaaatcaagactaagaaattcaaacttattggtgaaataccagcagatacagattgcttgaaatatacaaggtcctatcattagtttcaaatctttttcatatgctgtattggaaatagaggtgttaaatttctacctgttacgggcatgagtttacttttggtttttaatgataatagagcttccatttttttgtcttctgtgctctatatttttagtagaatgtttgtggagcccctctctcaagatgataggtgattcttaaaagtaagactggtctctttttcatagaattttctgccaaaatgtagtttcaaatatttaaacagtaattgaagaaaaaaatattgttagagtacaactatacagctctagatccctaactggatgttcagtaaataaatgctcttgttagacagtgaggccttggaacccaggctattattgctgttggtgatacagtctgaaccaagtgttctgccctatcctttatagataagattttatacccatcacaaatattaattattgcaaatttgctttttcagttataattcaagtttgggatatattcaagcatggtcttctcatcttagtaaattgccagtagtaagatggctagttgtgaatgctatctgtccaaaacatgactttttttccttagaagaagaagcctgtctctgtatttgttagcattcaataaggaatgaagtatagactgtctcaaaggcctaccatgtaccagtatgctggatactttatttactttggtcattataacaactacataaagcaagtatcataccagttttagggatgaggaaatgaaacctcagaataaatgactgtcaataatagctaatgaattatagaccagtgtttcagaccttgagctcttaagtacagaggcacatgaaaattgaattataggcatttacattatttttctaggcataagtaataaagacctggtttcttaaaagattaataaacagtttgttttttatttttaaaatctattttatccattgcagtattttgtacctaaaattaatgattgtcacaaatcacctgctcttatctggtaagctagtgggataaacagctccatgatcactcactgttgtgtagcacagctagtccagatttgatacctccacaaaataatccactgtgggaaaacagagttccaaatggaagtttttgttcctaaaggatgacagaacaaaggaattttccacttaataattcttgtatgtgttgctatgaaacactattgaataacatcatggaatcagaatacttgaactggaagagatcatataatatatagtctagtagtttttctgtttgctccgtggttggggcagggaggggaggaggaggagcttggcaagttatcttctccttccgtgaaacagagcactttaaagtgcttactttctttatcacttactttctcatattggccttcc

SEQ ID NO: 34954 - DNA, 2300 bp, Homo sapien
taaccgccagagtttcacacaggcactgccacagatgttatctcattttgttctcacagccaccctgggggtagctggtgccctttttgttttacaaataaggaaaatgcggttctgggaggggcggttagggacccacactgccagtggcagagcctgaattagaagcaggaggccccctggagccagggcaatggcatctaccccatctgagggtcgttgtcgctggaagggagtgagggagcacttgcccagaccccagacatcctgcagctctcactcctcactgttgggcctccctctccacacccaccaggaaggcttagcaagggccaggaatttgcccaaggtcacacagcgggcaagtgacctaactccagacccaggcctggaggccctgcaaatcctgacgcctttggattgttgggagaagagagaaagaatccccaacctgcacctcctgtctttccccgtcctctgaaactgaccctactggtagacaaatacacctttctctccaacgtactgagcccctgcaaataaaattaaactgccaacaaaataaacaagagtcacaacaataatacatcagccattactctggggggatagagtgggaggtgagccacgctgcccagtgcctactacgtgccaggcccagtgctctgcgctccctcaatatctcactcgcggctcacgaacaacccgcatgcatgcattattttccttttttgcaaacgagaaaaccgaaatctaaatatatagagtcaatttctcaaggtcactcagcgaggaaatggccagtccaaatttgaacacacttctggccaacaacagcacatccgagctctcaccactgtccacaccacaaggagcgggaggaagaacccaggccaggggtgcgacactcaaagagtttgcacctaacgattttagaattcgctggaagaaaatgattccgcttgtctccccaaagctgcagcggaaggtgactacttcgtgtgcggtcctgtccacggtgccctgggccgggtagacagtcactgaggcgcgagcagaacggggagtggttccagcgcccaaagtggactggagccgggaagggctcaccagtcgcgtttcccaaagaaatcccgcaatttgctctaggagctgcccgcgcctttgacattcaggaacccgaagtccctagacccgccgagccgcgagcgggttcccacgcgcgaccacagcccccttccatcctgcaacgaattacgagagtcaggtccccgctccccaccgggcgaccccgcgtccctagcccagccgcagctggcacgcgtgggcacctgcgagtcacgcctcggtccgcctggccggagccagggagtgtctccaaagtggccgcgaggccgcggccgaaacccgggcgggggcgaattctccccacgcgggtcggcgtcatccggggcgcggagaacgctacggtgctcccctcgccccgcgcgcaggcagcgcgaagcctgccccgggtagtgcgcccctttcgttcctccggcggcggtagcgtccaaggggcttctgcggattccgccgggtcgtcccggggttgcaactccattgtacctgaaaggatgcatttggtttggcttttgctcagatgaaaaaaaaaaaaaattggaagaaaacgaaaacccactcagcaaaagacaatttcacaagcggagcgctctacccacccagcgcggtgtctgggaagcggcccggcccggaggagcggggagcgtctgctaattgcagcttcgttagatttcgggtttgggaggctgtggttcgggctctaatatccgccgcccattatccctgctaataaatttgacctattgttcgtttgttaaaatgatgtcaccttggaacagtccctaagctcctatttccatgaattaggcctttattgaaagccgggagccaatgagaggagagaggcttgttgatcgcagccaatggctgcggcaggagaggaattagcagcggaaactccaggttcggttcaagaaagatgacacagagcctgtcgggcccgcgcactcttggcaaagtttcagtgcgacgagaggcgccgggcgctccatggccgcgccgtaacggggacccagccgcctccccgcccagcccagcccagcccttccgcccgcccaggatggaggcgcccgccagcgcgcagaccccgcacccgcacgagcccatcagcttcggcatcgaccagatccttaacagcccggaccaggacagcgcacccgccccgcggggccccgacg

SEQ ID NO: 34955 - DNA, 2300 bp, Homo sapien
ggggggagaggaaaccggcgtccacgaggattgttgaaaatccgagagggcgggctggaagaaggaggagaaggagagtgcgagaggcccgtgtgtgtgcgcgtgtgtgtgtgtgtgtgtgtgcctgtgtgtttggggcgggggtgggtgagaggaaatcaagtgaacgcaggagaccgtacaaaacacggggagagagttggaggggctcacgaaagatggggatggggatggaggagaaaccaaggcgtgggagaccacgatggagagagaagcacaggccagcgagaagggtgaaaggaagaggtacaatctgcgaaggcggggtgggggtgtgtttgggggaggcagaggggggcgggggtagtggatagccttaaaatagggctagtgcgaggctgcggctcggggcgggacaggtgaagggcaggtgtaaggtgggccgggtcaggcctctctcaccgccacttggtcctccggttttggaaccaggtcttgacctgcgcgtccgtcattttgagggacttggcgagcgccgccctctcggcagaggccaggtacttctggcgatggaagcgcttttccagctcgcagatctgcacccgggaaaaggacgtgcgcggcttcttacgcttgggcggcgtccggttctggtaggggtggccgatgcgccgggtcacggtgaagggcgtgagtgcggccgccgctgcggagacacaggagggcccctgaagcccagcccggctccgccaccgttcaggccccatgcggaccccgtggcgccccgtgggacacggagagctccgctatttcgctggtcgcgcgcgtttccagagacaccaagccggtcgggagaccccctcgccccctgtcccttcccccgggcacgggcttattttcctgcaactctccgattaccctccccaccacggctgcccggggccctggggccgaggcctccgccgcgcttgggcctctgaaatggtttccgggagtggagcgcacagggcgcggcgcctctggccccgagagggcggaggcctggagcctggtcgccagctctgctcacctgtgaagcggtctttcacgaagcggcggctgctctccatccaggggaaattgagaccgccaaggctggagaccgtgggcacggagggcatggcgggtagcgcgcttggcagaggcggtggcacggccccgggcagcggcctgtgcgccggcacccggatcacgcctgcgggcgctaggctcaggttcacactgtaagatcccgcgtcctcgaagggcgcgccgaggcccgcaaaggaggcgggcagagacgggtatgtggcgcccggacggcccccggggggccctcccaggtagctggcgccgtcggggccccgcggggcgggtgcgctgtcctggtccgggctgttaaggatctggtcgatgccgaagctgatgggctcgtgcgggtgcggggtctgcgcgctggcgggcgcctccatcctgggcgggcggaagggctgggctgggctgggcggggaggcggctgggtccccgttacggcgcggccatggagcgcccggcgcctctcgtcgcactgaaactttgccaagagtgcgcgggcccgacaggctctgtgtcatctttcttgaaccgaacctggagtttccgctgctaattcctctcctgccgcagccattggctgcgatcaacaagcctctctcctctcattggctcccggctttcaataaaggcctaattcatggaaataggagcttagggactgttccaaggtgacatcattttaacaaacgaacaataggtcaaatttattagcagggataatgggcggcggatattagagcccgaaccacagcctcccaaacccgaaatctaacgaagctgcaattagcagacgctccccgctcctccgggccgggccgcttcccagacaccgcgctgggtgggtagagcgctccgcttgtgaaattgtcttttgctgagtgggttttcgttttcttccaattttttttttttttcatctgagcaaaagccaaaccaaatgcatcctttcaggtacaatggagttgcaaccccgggacgacccggcggaatccgcagaagccccttggacgctaccgccgccggaggaacgaaaggggcgcactacccggggcaggcttcgcgctgcctgcgcgcggggcgaggggagcaccgtagcgttctccgcgccccggatgacgccgacccgcgtggggagaattcgcccccgcccgggtttcggccgcggcctcgcggccactttggagaca

SEQ ID NO: 34956 - DNA, 2300 bp, Homo sapien
ggcacttacaaatatatatacagtacatataaatgcttcttttcttttttcttttttttggttggttggttggtttttttagagacaggctctcactctgtcacccaggctagagagtagtggtgtgaacatgactcacagcagccttgactttccaggcttaagatcttcccacctacctcagcctcctgagtaggtggaactacaggcatgtgctaccacacccggctaattttttctgtttgtttgtagaaacagggtctcactatgttgcccaggctggtcttcaactccaacccctcctgcttcagcctcccaaagtgctgggattacaggcatgagccattgcacctggcattcactgtttacgtaagcagggtcgtattatatatatattgttctccaactttgcttttttacttcatgtggcatagctatctttccaggatataatatataggggaccactgtattctttttagaagttgcacagtattccacaggataaactgatataccattttttaaatacaagttttattttaatcttcattttttaacacattttatcatggaaattttcaaacaagaacaaaaatagaaggaatcctatgatgaacaaccatatacccatcacccagttttaacaattatcatcatgtagtcaatcttatttcatatataccttcccactctcctttctcctccccttttgctggattgtttttttttaaagtctcagataaggccgggcgccatggctcacgcatgtaagtccagcactttgagaggctgaggcgggtggatcacttcaggtcaggagttcgagtccagcctggccaacatggtgaaaccccatctctactaaaaatacaaaaattagctaggcgtggtggggggcgcctgtaatcccagctacttgggaggctgaggcaggacaatcacttgaacccaggaggcaaaggtcacagtgagccaagatcataacactgcactccagcctgtatgacagagcgggacttcggtttcaaaaaaaaaaaaaattaaaataaaaaataaaacagtggccgggtgtggtgactcacgcctgtaatcccagcactttgggaggccaacatggcgaaaccctgtttctactaaatatacaacaattagctggacgcggtggcaggcacctgtaatcccagctacttgggaggctgaggcacgagaattgctggaactcaagaggcagaactcgtgagtcagagatcttgccactgcactgcagcctgggcaagagagcgagaccccgtttaaaaaaaaaaaaaatgctggctgggtgcggtggctcacgcctgaaatcccagcactttggaaggcagagacaggcggatcacccgaggtcaggagtttgagcccagcctggagaacacagcgaaaccccatccctcctaaaatacaaaaattagtcgggcgtggtggcatgcacctgtagtcctcgctactcgggagcccgggaggcggaggttgcatccagcggagatcacgccactgcactccagcctggacaacacagcgagactctgtctccacacacacacaaaaaaaggcataacaaatttaagtgactcaaagctttatgtgacacaggagctctcagaaaggaacagttaaattataacatgtccatattatgcgttagtatgtgtccacaactaacccataatatggacatgttataatttaactgttcattcctctcttgatagacactgaaatcgtctctataattttcctgtaagaaataatgccttggggtgggggtgtcttcctttctgaggctatcatttgtattcctcacttcttaaatttgtttgatatgttgaggcttaaaaaaaaaagattacgggtcttcagaacgccccaatgcccgcggggtgctggggtgcctcggagtttgtcaaggtgtagcttaaaacgttaattcccatgctcgctcccaaatattcgaattaaggcttctgtagttcttacaagtcacccgctttctttcaggaggaatgttaaagattaagagcggcaagaagtcagagtcggcccaccctccgagctctcttagggcgatgtccttgctaatttggagactgattcagtccccttttggcccccaagttacgtaaagataaggactttggagatgttttctcaggaaggacagagctgaaaaacaaagttccgtaagtctggccggtaactacatctttccttcctaacaaagaataagccgcaattcactctctctggcacctgaactttgg

SEQ ID NO: 34957 - DNA, 2300 bp, Homo sapien
tctcagataaggccgggcgccatggctcacgcatgtaagtccagcactttgagaggctgaggcgggtggatcacttcaggtcaggagttcgagtccagcctggccaacatggtgaaaccccatctctactaaaaatacaaaaattagctaggcgtggtggggggcgcctgtaatcccagctacttgggaggctgaggcaggacaatcacttgaacccaggaggcaaaggtcacagtgagccaagatcataacactgcactccagcctgtatgacagagcgggacttcggtttcaaaaaaaaaaaaaattaaaataaaaaataaaacagtggccgggtgtggtgactcacgcctgtaatcccagcactttgggaggccaacatggcgaaaccctgtttctactaaatatacaacaattagctggacgcggtggcaggcacctgtaatcccagctacttgggaggctgaggcacgagaattgctggaactcaagaggcagaactcgtgagtcagagatcttgccactgcactgcagcctgggcaagagagcgagaccccgtttaaaaaaaaaaaaaatgctggctgggtgcggtggctcacgcctgaaatcccagcactttggaaggcagagacaggcggatcacccgaggtcaggagtttgagcccagcctggagaacacagcgaaaccccatccctcctaaaatacaaaaattagtcgggcgtggtggcatgcacctgtagtcctcgctactcgggagcccgggaggcggaggttgcatccagcggagatcacgccactgcactccagcctggacaacacagcgagactctgtctccacacacacacaaaaaaaggcataacaaatttaagtgactcaaagctttatgtgacacaggagctctcagaaaggaacagttaaattataacatgtccatattatgcgttagtatgtgtccacaactaacccataatatggacatgttataatttaactgttcattcctctcttgatagacactgaaatcgtctctataattttcctgtaagaaataatgccttggggtgggggtgtcttcctttctgaggctatcatttgtattcctcacttcttaaatttgtttgatatgttgaggcttaaaaaaaaaagattacgggtcttcagaacgccccaatgcccgcggggtgctggggtgcctcggagtttgtcaaggtgtagcttaaaacgttaattcccatgctcgctcccaaatattcgaattaaggcttctgtagttcttacaagtcacccgctttctttcaggaggaatgttaaagattaagagcggcaagaagtcagagtcggcccaccctccgagctctcttagggcgatgtccttgctaatttggagactgattcagtccccttttggcccccaagttacgtaaagataaggactttggagatgttttctcaggaaggacagagctgaaaaacaaagttccgtaagtctggccggtaactacatctttccttcctaacaaagaataagccgcaattcactctctctggcacctgaactttggggtaacgattaactgcgatccgaagccttcaggcaagtaaaaaattcctgaagtgattacgcctgtttggaggcttgcagggcactaggggatggggaaaggtgaatcgaggtgctctctggctcattcgcagccggctaacccgccatatcttacacagctaagggctgccgacgccattttgcagggtgggctgcgcagactcttggcgggaggccggcgcgcttgagcgggagaggacgtggaagggttggaggtggggagtgcgcgttacgactggaaagcacgcgtgcgcacaggcgacagcagcggaggggtggggccagtgtacgagtgcgcgtgctcggtgggagcccgcggagtacctggaaggaggtgggggcgaggtagaaaggagtggggttgaaaagcgcttgcgcaggacggctacggtacgggggtgggagggcttcggagcacgcgcgcggaggcgggacttgggaagcgctcgcgagatcttcagggtctatatataagcgcggggagcctgcgtcctttccctggtgtgattccgtcctgcgcggttgttctctggagcagcgttcttttatctccgtccgccttctctcctacctaagtgcgtgccgccacccgatggaagattcgatggacatggacatgagccccctgaggccccagaactatcttttcggtaactgctggggggagctggagcgaggccgagcggggcctggtg

SEQ ID NO: 34958 - DNA, 2300 bp, Homo sapien
ttaattaaacgtctgttcacatttaagcatgtatatgtattggtaacggttagatgatagttaaatggaatcatttaaaatttttattctgacagtgttttgaagaattttgcccattcatggagtgagagtagacatatgtattcaaaacattaaggctttaattcctagttattttggatagctgagaattctggtaaatttatatcagtactttttgataactatcggaaagaaccctccttgtcttaaacataatttctgaatatagtttgaggcgtatgtcactttctgttgctttaaagagtggagtgttgatccctgtagcaaacttcggttcttttacttttgtcatttttcttttgtaatagtaagctattcatgtttgtaaccgttctcatttcgaaattgccatttgggaatttaggtaggtaaatcagctgttttaaatagtgggaaacttaacattggacattacatttggtttcagataattgcttcaggttgagatttactaaaccattgagcttgtttatgcagaataacagtacctatcagcgtagttagagatgaaatatggtatgatgagagaatggaattatagtcttttatgggtgtctgtagaggtttctgttcaagaaatctaggaattgatcattctgctttgccctctggtagctaaaatagtgaaaaactagttcaaaagttagacctgacctttttggttacccacacttaagtttcagtgttatttttctccttgttagagttgcttttttcttcatttacaggttgtgaactaaaggccgacaaagattatcactttaaggtggataatgatgaaaatgagcaccagttatctttaagaacggtacttaaactttcaaaataaactacttaaccctacttgatttcagccttttagtttctattcatgtggcttgagactttttttcctttgctgactgcttataaaatactatttcttacacctgggtattgtgtgtacctcactgtctgtacatctttgaagaacttggcatctataccactcatttggtaaccatgtaaattccagtcacactgttcaacttgccttattttcttcagttgaattacaaagcccttgtaaaaggcatcgataatctttcatgtctaccagagactagccttctgctcaacttagaagttgctcaataaatatgttaggtggtctatattgtgtgtatgcatatttatgcatttcttaaattttctgaatatgagaaactgatttgccaagatcacaaaacctgaggacaacattgcacaaatttgttttccagggtaatagtgagaggtttatacttgttttttaaaaaaatcacagtcatgtgcctcattgcaactgctgggtcaacagatggatcgcatatacaatggtggtcccataagattattataccttatttttaatatacctttcctgtttttttttttctttggaggcagtctcgctctgtcacccaggctggagtgcagtggtgtaatctcggctcactgcaacctctgatttccgagttcaagtaattccctgcctcaccctcccgagtagctgggattacaggcatgtgccaccacacctggctaatttttgtgtttttagtagagacgaggttgttaccatgttgtccaggctggtctcaaactcctgacctcatgatctgcccgcctcagcctccctaagtgttgggattacaggcatgagccaccaagcccggccctttcctatgcttagatgcacaaatactgtgtttcggttgcttacagtattcagtacagtaacactgtacaggtttgtagcctaggtgtgtgtagtaggctataccatctaggtttgtataagcacattcttatgattgtacaaagatgaaattgtctaacaacacatttctcagaacctagccctgtggttaagtgacgcatggctgcatataacatttagtgggggggtgtaaaataggtggaactcaaaagttgaagtagtattttttttttgttcacaggtcagtttaggggctggtgcaaaggatgagttgcacattgttgaagcagaggcaatgaattacgaaggcagtccaattaaagtaacactggcaactttgaaaatgtctgtacagccaacggtaagggcacttacatactttggatgttgtgtcaaggtttaattctgttttaaggtaggtttggtgtcatttagttgtgccaaggagatagaaagtggttctttatcttctgtcactggagttcgatggtcaact

SEQ ID NO: 34959 - DNA, 2300 bp, Homo sapien
attagttagcagctaaaacgtttggagttttcattgtgtgccagacactcattgagtactcacaactctgtgagagttgttactgttcttagccatattttgtagaggaggaagcagaatctcaaaccgttgcttgctggaatttataagtaaatgttggtggcagtattcaaatgcagtacttctgactcctgagtttatgctcttactcagaactgttctcttggctggactttttggtcagtctgatttgtttggtaggtgagattggcaaatatactttgagcattgaaaaatactgcaagcattttagatagggtataaataattatatacccattccattcacaagtaataaaaaatagtaacaatatagaaaattggaagcatgattcttagccaggagatacttcaaactagcagatggtaagccaaaaactcctcgactgggtttgtcaatcttcctataaagcaagatcaaagacggcggcaatgactcgggtcatcggtgggagcatttctgtccatttctatttatggttggtcattgcatcctatcttgggatcgattcattttctccagaacttgggaagttacgagtaactctgcaagtccagctctggcaatcagaatgtctaagtaaattcagcttaaaagcttcatgcaggaattttccccctcagcacctggttttgaaaaggttttctgcacttgtgtccgatgttgaaacagaggctatctgtttaaaatagcctcagctttgaaagggaacttaaaatagcttgcaaggaggcctgatatttggaacaattactaatgttttatagtcatggcttcagcaaatagcactgttcgacagtcctacctcagtttatgctccagtggaccatcaaccattgccaacgcaaggaggctttaaccaaatagtccagattcctgagttttgcttgagcctgtcctccagcgtctttctcactgtgacctattttccttagcatcaggctcaagcagagcttggctgacaccagctctagacagtgaggcaggtacgtgacaagaacacctacgttttggggttggtgggaaggacaggagttatgcctctggaaggggcagaggcggtaagaaccagtgtcctgaatggggccctggttaaaggaacgaagctgcctagtatgcaaacggaggcaagtcttagtccggttttgggaggaggccggaagagggcctcagcgtggtcgctgaccagagtcctgctggctgctccccggcgtgcagccgtccgtgctggggttgcagtgacgtctcggggccgcttggtggtagccgtgtgtttccaaagctggctcgcctacgggagagtccagctgggatcccgtgaaccgaccccagagccccggagggggcgaggggtgggaaggagagatgcccgggagcccccttcgcagcggcagggacgtaagaagaggacgggggctcacttaagtgggtagccagtcaagagggtggctgggaaactccacgatcgcagggcgggtaaaagcgacccccattcagtggagccgccccggggctgggtttgacccgcccctctcggctctccactagagcgctggtgagtgagtgcgagtagcgaatgtgggcaggtgaggacgttccgtacctaactgcgttcttggggagcatcgcctgcccaatttgggcaacgtttgcgcggaggagcggtcactgcgctcgggcgcagagctccgacggcttccagcgctcaccagcttcagtctcgcgggtcctgcccctttggagctgccggtcccgtctccgagagtctgagcgcctcccctccaaccccgagccgccaggagaaggaggaggaggcagcgagaggccgcggcaggcaggcgagcaggcagggccgcctttgatgtgggctgggcgcacccaggcgagctgagcgcccgtccggccgcgccccgaggggggagcccccaggccccgcatcctcattgtgccggctcgggcccgggcccgcccccggccccccgccccctcgccgcccgcgcgtagaaaacgccccggccgccgccagtggtgggaggcggcgatgcgcacggccggagagacgcggaggaggagacatgagccggcgggcgcccagacggagcggccgtgacgctttcgcgctgcagccgcgcgccccgaccccggagcgctgacccctggccccacgcagctccgcgcccgggccggagagcgcaactcggcttccagacccgccgcgcatgctgtccccggactgagc

SEQ ID NO: 34960 - DNA, 2300 bp, Homo sapien
cagggaggagaggccctagaagatgaaaagtcattttgaatgagttcccagctgattgcatgtgggccccggctgagcccgggtcagcccacacaattgtaaaatcataataaaccattgttattctaagctactaagtcttcggaggtttgttgtgttgcaacaggtaactgaaatagaggtcatatctaatccctttgttttactaatgaatgtcctaagggccatagtggaacggacctggtgaaattcagatagcatgacagtggtaagaactttccaattctgtgctcttcctattgcttttctttcaattcccttggtgaaaagcaccaggtaaggactatgaaacttcaaagtctacctgcagggaacttatactgtgtcctgaatgcatgcaaattactgtaacttggtccttggtaatggaaagatttctaggtcatccagcctctttgactttataggtgcagagaatgcaaaaacactttgagaaagtgaaaagcagcctctgatatctggaagctggcctggtacaatcagccatgccatgatgttactagaccacagcctggcccttatagctaggctttgtgttttcctgtagaacaaaaacaattccaaagaacatcaacatcagacgaggtcattctgtgaccatgatagatccagacaaatacaagaccactctataatcaggtctaaacacgataaaaagataaaacctgatgattgtccaaaccacaaaaaatgactcaacatccccacttggctaatatgagggagctgctgctgcacttttttttttttttttcgtttttgagacaaggtctggctctatcactcagggtacagtggagtggtgcgatctccattcactgaaacctccacttcctgggctcaagcgatcgtcccacctctgcctcccaagtaactgagatgacaggcgcgcaccaccaggcccggttcatttttgtattttttgtagagaagagtttcgccatgttgcccaggctggtctggaactcctgcgctcaagcaattcgcctgcctcggtttaccaaagtgctgggattacaggcgtgagccactgcgcccggccaggctgctgtttctttatctgcacagctttagcctcaatctagaattcccttcctctagataagatgaactgagatgctcaatcatggaacgaccctctcttcctgacagtatctaatccagtgaagctctcacttccttaaaccctctcccaaatcactaacaactcttaccgagaggccctatcgttcctcaatgtgtgttctcagtcactgcaactagtaataaacccagcttgttcaacgatccgtgtcttcctggtgggatttggttagagggcacggacagacctaagttacacagagttggaggctgagttcactagaaggagtctccgcttgtgtgttccttcttagccactcttttggttagtgtctgtcgtccctccaccagaattaagctccatgagaacaggagccttgtctgtcatgttcagagctgattctcagcgcctagaacggtacgcagcggaagctggatgcttaaaaaataaccattttctgaacgaatgaatgaggggctcgatatacgcacgtcccctttaatctcgcagctcctcgcagatcgtgtgacatacagacagcaccacagcacatttcccaaaaccccgtctttcccgaagaaatctcgaaactctcactcctgggatgcccatcctctcagagcctcttccccaggccgagcttctctcactcgctggccccttcccacacctgagccccaggtctatacaccttcctaacgcacctagaacccacctgtctccaccatctgcccctaccatcagacactgccggacgggccgcgcagctacctaggcgtctagggagcactgcggcatggaccgcgcatgtgcggaaatgggtcgcatacgcaggacctccgacaagtgaggagttgcctcggagtttccgtcccggtctgggcagccttgggctgccaggaagtcaagagaagctagccggaaggacaacccgggcgcacggctttctgggacacgtagtcgtggcgctctcgaggccctgccatgagcaagctcttaactcttcaggtctgcacgtcctacgcccaccgtccagtgctactctcagctcggagttcagcttcgggctgccaagagccagcaacctggtgtcagaggctcggtcccacaacgctctgcgggccgcggcgcctgctgggaggtgtagtccccgatc

SEQ ID NO: 34961 - DNA, 2300 bp, Homo sapien
ttgagcccgggaggcagaggttgcggtgagccaagattgaaccactgcactccagcctgggcaacagagcgagactccatcttaaaaaaacaaaaaagaaagatgcactccgacccacccgccataaggtcttgggagggggtgtgcgagtcaccatgcgtgccctggaagcttcatcagcctcatggtgaattcacctctgtgtgtggacagaggtagagcttggtgctatgttgccaattctcctgcacccttcccttccgcactcccacacttttatttggccagcttccccacatcctgtgttgcccttgtggctcgggcacacgggcccttgtgattcctgcctgctacacacactttcctggcgtgtgtcacattgcagtgtcatgtccccaccagcctgggggctcctcgagggctggggctgggtctcagctcagggtgaggacttaacacgggcacagcctgaggtggtgctgggtactggggctgtgcacagaccagtccccctgaggggtctccctgggccagggctgagtggggctccctacccaaccagccaggccctggtcccctgaggcacccaccctctctctggtgcagttctcccagcaggaggagaagaggcagaagtcggagcggctgcagcaacagcagaaacacgagaaccagatgcgggacatgctggcgcagtgtgagagcaacatgagcgagctgcagcagctgcaggtaccgccctgcctgcccctgcccctgcccccaggctgcctcagtttccccaaggccatcagatctcagggggccagaaactccacagcagggaaggatcttcatcagacacgcccgggatggatggtttccagccctgccatgctgctctagggctctgtgaggttgggcaaatcatatcaccctcctaagccatagctctcacacccctaaaatgggcatggggatgaccattcctgctgtgcaggattggggcaaggacttgtgaatgaagtgacggagctggcagtgggctgctgcagggtttctgagtcatcactgtgttttgggcaaaggtggttggggtgtggccgagccccttgtgggctgcttttgctgtggtaattcctgacctcttcaagcttcctggcccctgggtttgccccatgcctgagggtcctggccccaggagctggtacttgaagcccccttgtggggacggggctgattcgaacctcaggaactgctcaggctgttggacccatcgggcaatttctggagaggtggggaggcatggaggaaacattccaggtgttgaggcctgcccggcacggctctgctgattaccactgtgtgacttttggccaagccattcaccttccgcatccgttttcctatccctgcctcgggtgatccctgcctcagtgtgagcactgagagagcccgtatgaagtgccgagcacagctcctggcaggccacaggcatgcagcgctgctgcgagtattacttctcactcagccaagttctaaactcccagaagcctctagcatgaaacccaaaatgaaaatctcccaaaggattctacttttccaacccagtagggtcgtggtatctggataaaggcacttccccctgctttataagctcctcatgacaagactgattccctgcaagaaatcaacagggacttgtcactgctgcctatgagagagatttacattttgtaaagcagataacttacctcagagaaagaacagcgaggttagaagagtctcacccatgtcagtgaccctcattccttgccacagatctccctgaggaaattatatgtgagacatacagagtatcttagctcgggctgccataacaaaccatgatgctttaattaacagaaacttctttctcacagttctgaaggctggaagtctgagatcagggtgccagcagggtggggttctggtgagggctcccttcctggcttgcggacagctgccttcttgctgtatcctcacagaaagttgcaaatttactatacctccccaccacagagttaataagaactattaacatattctggactattcctccaggcacttcttggtgcatgtgatttacgtatagagtttgaataaatgggatttatagtcaagaagaaataataaatgaacgatgctggtgccctcgtagccacagcgtgaggtgtgtctcagtcttcagggcctgcgtcttctgatttctcacctgttctgcctggaatctgttccagaatgaaaagtgccacctcctggtagagcacgaaacccagaaa

SEQ ID NO: 34962 - DNA, 2300 bp, Homo sapien
tgaaattaaagctaatttaaatttgtaaaaaccctgtgagccaaggaaaacatgtctgtgggctggattctggcccaagctgttgctccgtaatccctggccttacttggggaggcctcttcccagggatagggtggccatcccggtggctccctgtgcctagagaagcaggggctggacttacccatcaggggatggagctggcccacatccttgtgctgtggacggcactgcagcttcctcaaatttaattcagtcctgggtggagcctgaggctggcgcagaccctcaccagggtgaagaaggaaagcccgaagggcagggcaagcggaatcatcacaaccacccccgccatgcatggagcccctggtggctgccgggccctctacagctctgacacagggtaaccaagctccagcttacagacaggaaaactgagatcgatacagtgaagtggctggctgagccgatagatggcagggccaggggtggatttggagtaggagaacctcagtggggcctggctccaggaggaggtagaaagcgctcacacctggcctcattgtctgcatgcaggaggctgatctttgtcctgtgggtattgggagccccgaagggtttcaggcagggactgggtattggggtggaggtgacagaatcagatctgcgtttttgagccatcactctgggtgttgactagaaggtagattggagttgcttccaccagctgccatagctgaggttaaaaaccggtggctggcaagacccaaaggaatacttatagtataaatccattcataccacgtttataagcaggcacagctcatctgtagcacttagagaccataggacagtgactatgtcaagaggtgggagagcattgccactgagaaggacggggcggcaggggatggccctctggggcaaagcaatgtcccctcctgacctggaaagtggctacatggatactcactctattcaccaagttggatgtttatgttttatacacaggaagaatgttctgtttcaccttagcatagcaacatttccagtactttccacccaacaaagactctaaaaaacaaaaatgaagctgaaaacttagtggccacaagggctgaatccagtccccagacaggcttggcttggcctttatatgattttttaaaaaatatgagttagttgccacctaaaaattaagagatgtccattaaaaacctagatttcaaacttgtcttaaaaaattggaaggtttggctgggtgcggtggcacacacctctaatcccagcactttgggaggccgaggcgggcagatcacttgagtccaggagtttgagaccagcctgggtgacatactgaaaccctgtccctactaaaaaatgcaaaaattagctgggtgtggtggcatgcacctgtagtcccagctactcgggaggctcctcgggaggctgaggtgggaggaccactcccaggtgggaacccaggaggtggaggttgcattgagccaagatggcaccactacactccagcctgggtgacagagcaagaccctgtctcaaaaaaatagataaataaataaaataaaaaattaaaattaaaaaactgggaaggtttggccacaggggagccattttcccacattgtcacaattggctggaatggagcggccactgacccctccctgtgggccatgagctggccagctggccacagctgcctcctagcaggaataacagctattacattcagctgagattagagatagtgaggagattgccatgcctcaaaataagtagtaattgtattacggttaggcaatagggagtgctgaagactggctagggagatatctgctctcctttcttggcgctggcccacttcatcttgagggtgtctgactttctccactgcatctctgactcttgccttgaacatacagcagcatggcctttaatatatatatatatatttttctagaccctggagaaccatactcagaactcctctgaggtgagtccgccaagcctcaatgctgacaagcctctcgaggagtcaccttccaccccgctggcacccagccagtctcaggacagtgtgaatgagccctgcagccagccctctggggacagatccctccaaaccaccagtcccccagtcgtggcccctggaaatgagaacggcctggcagtgcctgtgcccctgcggaagtcccgacccgtgtcaatggatgccagaattcaggtagcccaggagaagcaagttgctgagcagggtggggacctcagcccagcagccaaca

SEQ ID NO: 34963 - DNA, 2300 bp, Homo sapien
ctattgaggtataatttacacataaaattcatccatttacaaaaatgaaagtttaaaattcaattatttttggcaaatttaccaaattatgaaattgtcaccattgtgcagttttaggacattttcatcaccccaattagactgtttattgttcatgtacagttaattcccatttcacacccagctccaggcaaccattaatctactttctgtctgtatggatttgccttttccagacatttcatataaatggaaatttatagaacacagggccttttgtgtctggcttctttgacttagtgttattgaatgaatgaacctctccgtttttctttcccttccttcctccctccctcccttccttccttccctccctccctccctctttctctctccttctcttcctttcctttttctttctctctttcttcctttcctttccctttctctttctttctttctctctttctctctttcctttctctctttcttcctttcctttccctttctctttctttctttctctctttctctctttcctttctctctctctttctctcgcttgcttgcttttctggagctctcagagctggtcagagccctccaggcctacagctttcgtggagtcagagccttcatctcctagtatggaagcaaccctcttggtctccccacccgcttcgtacagttggccaaatggtctgaaacaaatgaaagacctgcctttcagcatgttttgggaggttcagacagcgcctgactcaatgagaacggtcagcgacgagcggcgtttccttcttttaaagaccctctacaattccaggcactcctgcagctgtggaaacattccgaacggcttagcaaccaggacaccctctgcgccgaccactaccagcatcgcaggcttcttgagctggctttcccagtggaaaaccatgcttggtgtttgcacactgttcaaaggatgttttcgaacaaagcaccgaggaaggggcgaaaacacctcaacacagccgttctctggggttggagctattgaactgtgacatttgcgaagactcaacttgtttatgacacggtccaaataataacccttgcagactgcccgccccccccccccacccccagcactctccttagattcaggtaaaagcatgttataaccgtctataggacaaacaggcaacagtagcagtgaagtgactcaagtagccaggatcgagaatgaaggtgctcaaagaagactttagtttgatctgtatgtagtgcgctcatcttttttgaaactaggaaattaaaaattagaataaagtttttatttaatatgcaaatacatccgcaaacccatcaggaaacataagagaaatcagtgccaaaggagctctttctcccagccctctaatcctggcaggtttgtggatcgtggacggggagcccctggaaaggaccgcgccgggaagccgggccctgcagggactggccgcggctgcaccggcgttgcccgtcgcacactaggaggcagcaccgcgccgaggaacccgcagcagacgggcagccagcgtgtgtgcctggggcgagtgccctcgcctgccggcgtccccatcggaaaagtgggggcgagggcagcctagcggaatagctgcgggaggattaaatgaacgagtgcaggttcaccttctgggcgctgacaacgatccgtgggctctcgcgaaatgccaagtcgccgtcccgcttgctcccataaaagttttgggagccacgcggcgcggcgggcgggctcctgagtccatgagcggtcccaccgagcggtccccgaagcttccccaaagcccagcccgcggctcgcggagcgtggtgtggggggactacagtttccagagtgccctgcggcgacgggcggagccggggagcgcccgcagccaattagggggtcccggggctctgccggggagcggcgggtggagccgggccggtgggcgggcgcggggacggtcccctggaacgggtccgaggctctcgcaggcagggctgggccgggcaggagctgcgaggccggcacaagggaggcggccctggggacctgacagggcgggggcgggggcgggcacgccgccgcctgcgcggttccgggtgctcccggcgcggcgctgcccagggcacacttgaccgaggtcgggctgcggggaaaggcgggtctggggagaaccccgagagacgcggcgtcctccaactcctcctccttctcctcgcggccgccgaagccacagcccgagcccgagcccgagcccgagccggcgcca

SEQ ID NO: 34964 - DNA, 2300 bp, Homo sapien
ccctcatcatttgggtgcctaccatctgtttaatagacatcgtggaagtcttggtttctgcaatttctagagtgaaattcaggacaaagcaatctctttgcaaatattcggcatgcagcttctcttcttcagggaagtgatgaagtgatgtgtctgccaacgtgtatagttagttgaaaatgatcagacagaaggctttgtgacacagcccctgatgtcagagcaacctctgaaaactcataataacatcgatggcataagctctttttggaatgttcaggaccacaactgaggacaatactaattcttcaggatgagtttaatatagcagatttctatatctcacgacatttctgtgttttaacctaagtgtaggttttgcttgtctactgtctttttatcaaatgaatacagagatctaaatctttgtataatagcttgatctatttctgtgagctagatttccagatgtggaataatcccgagtcaaaggatatgaacatttttaaggctcttgatctgcattgccaaattgctttgcaaaaaagattgaaccaatttacactcccaccagcaatgtatgagaatatatttaaatgcaaatcccaagctgcagagcatctctttcttaggtatttcaacttaaaaaattttttttcgtgctaagcaaaagctgacccaggatgttaaaaaaagaaagtctgatataaaaatggagcagatagttaaaacagcttcttaggcagaaataagctttagaaagtcccaagcaggatgataacaattttaaggcatcatagcacgaagcacaattctaaagggaccattaacaatttggctgagattggaaaagtaaccgccaagaatgttgggcgtggtcaatgtcccaaattctagattcgaaaaggcagggtgtttcactcatttacacttcactttggcctaaggacgatttaagatacccaaaggcaggatcttgataagtagtattgtttgaatcattaatcccgtgaaaatgaaagaaacccacgccccctgaactaaggtcagcgtttatctcttctttccaggcgttccatcaggacgcctcgcctctaatctcagtttggtttgccacaaccactgcctccacccctaataatggggccccatgattttagggaagacgggggtgggcaggcaagaggaagcccagattcggggtaccaacccacggagcgccatacaaattcaaagggcgctgggacctcaacgttcggccaggacactctcccccgagcccccgttatttgggaaaccgccccgtccccgcctgcgagtcttccacgactacttctcggttcccccgtgcgacccgcttccaccagcaagaaggagccgacggccgaggagccaggaactcgatttcgccccttcccactcctcttttctcacttttgttcggctttttcctgctttccctcccttcttccctctcctttcttcttcccgtcctccctctctcctcctcccctcgcctccagtcctccccccgcctgcagtcctccccccacctagccccctgcgtcccctcccccgcctcaccctcgccccgctccgctcgcagccccgcccgcagccaatcagagcgcggcctccggtggccccgcccttctccggcgattccgggcgggccgggccgagcccaggccgtgggtgcggagggcggcgccgcgggccgggggccgatgggtcctggcggacgcgaggcgccggcgcggggctcgcctggactcgggtgtgcggggctgtgagggggcgaggcgggcgctgcggcccgcccgggatgggccagccctggcctggcggggctgagccgaaggcgagggcggcgcgcgggccaggcctgccgggcgggcggcccgggggttgaggtagaagtgggcgcggaggaaggggccgagccaaggcggtgggtggagcggcgaggggggcggaggctgggccgcggcgggcgagcggagcggcgcgcctgtccggagctcggcggtggcgccggaggaggctgcagcggcggcggcggcgggcccggacgagcgtccggaggtggcggacgaggcgccgggggcccccatgggcgggtgtgtgggcgcccagcacgactcctcgggcagcctcaacgagaactcggagggcaccggaggtaggtgagcgccagggggcagcctcggccccccattgttcccggccaggcccggccacctgtcccgacccccgcgggccgcgccgggcccccgcgcccctttgtcatcccctcttcc

SEQ ID NO: 34965 - DNA, 2300 bp, Homo sapien
gctgccccctggcgctcacctacctccggtgccctccgagttctcgttgaggctgcccgaggagtcgtgctgggcgcccacacacccgcccatgggggcccccggcgcctcgtccgccacctccggacgctcgtccgggcccgccgccgccgccgctgcagcctcctccggcgccaccgccgagctccggacaggcgcgccgctccgctcgcccgccgcggcccagcctccgcccccctcgccgctccacccaccgccttggctcggccccttcctccgcgcccacttctacctcaacccccgggccgcccgcccggcaggcctggcccgcgcgccgccctcgccttcggctcagccccgccaggccagggctggcccatcccgggcgggccgcagcgcccgcctcgccccctcacagccccgcacacccgagtccaggcgagccccgcgccggcgcctcgcgtccgccaggacccatcggcccccggcccgcggcgccgccctccgcacccacggcctgggctcggcccggcccgcccggaatcgccggagaagggcggggccaccggaggccgcgctctgattggctgcgggcggggctgcgagcggagcggggcgagggtgaggcgggggaggggacgcagggggctaggtggggggaggactgcaggcggggggaggactggaggcgaggggaggaggagagagggaggacgggaagaagaaaggagagggaagaagggagggaaagcaggaaaaagccgaacaaaagtgagaaaagaggagtgggaaggggcgaaatcgagttcctggctcctcggccgtcggctccttcttgctggtggaagcgggtcgcacgggggaaccgagaagtagtcgtggaagactcgcaggcggggacggggcggtttcccaaataacgggggctcgggggagagtgtcctggccgaacgttgaggtcccagcgccctttgaatttgtatggcgctccgtgggttggtaccccgaatctgggcttcctcttgcctgcccacccccgtcttccctaaaatcatggggccccattattaggggtggaggcagtggttgtggcaaaccaaactgagattagaggcgaggcgtcctgatggaacgcctggaaagaagagataaacgctgaccttagttcagggggcgtgggtttctttcattttcacgggattaatgattcaaacaatactacttatcaagatcctgcctttgggtatcttaaatcgtccttaggccaaagtgaagtgtaaatgagtgaaacaccctgccttttcgaatctagaatttgggacattgaccacgcccaacattcttggcggttacttttccaatctcagccaaattgttaatggtccctttagaattgtgcttcgtgctatgatgccttaaaattgttatcatcctgcttgggactttctaaagcttatttctgcctaagaagctgttttaactatctgctccatttttatatcagactttctttttttaacatcctgggtcagcttttgcttagcacgaaaaaaaattttttaagttgaaatacctaagaaagagatgctctgcagcttgggatttgcatttaaatatattctcatacattgctggtgggagtgtaaattggttcaatcttttttgcaaagcaatttggcaatgcagatcaagagccttaaaaatgttcatatcctttgactcgggattattccacatctggaaatctagctcacagaaatagatcaagctattatacaaagatttagatctctgtattcatttgataaaaagacagtagacaagcaaaacctacacttaggttaaaacacagaaatgtcgtgagatatagaaatctgctatattaaactcatcctgaagaattagtattgtcctcagttgtggtcctgaacattccaaaaagagcttatgccatcgatgttattatgagttttcagaggttgctctgacatcaggggctgtgtcacaaagccttctgtctgatcattttcaactaactatacacgttggcagacacatcacttcatcacttccctgaagaagagaagctgcatgccgaatatttgcaaagagattgctttgtcctgaatttcactctagaaattgcagaaaccaagacttccacgatgtctattaaacagatggtaggcacccaaatgatgagggctctccgatgagcactgaggagttggcactaggaagagagagcaatctcggggagagattctcagcaatagatgttctccaccctgcctttatct

SEQ ID NO: 34966 - DNA, 2300 bp, Homo sapien
ccacccatggtgtggctgggggcaggtctctctgcctctccggaaaaacccaggaagctggctgattcagagagggcctctagcttctgccttcttaggaaggcttggctcctaataaggcaatgcacgatgtggcagggacggaaaagcagaccttcacttctttggacatttccaatgaggcctcaggaccctctggcttgggactgtacttcagaagaatgtgccttacaggaattacatgagtgagggtcctggcaccgaacagatgccaccctcaagctgggtccatgaagacagtttagtaaagggtcaatgtatacgggtgtgggcggggctaaggaagcaccgaggatggcgtagtacccagggcttgcaacagcaagactgtcactgtcctgagcagaaaagtggcttcaggaaccctgagagagaccatgtgagaaagggcacctttggtaaaaacaatcggggaggaggggcttagggattaaatacccagacctccctctctcctcttgccctcaatctcctgccaggcccttccactggccaagccaaacaggaagaccaggacagagagctgtcagtgaaatccacacaggccagcctctggggctggagcaggatggtaaagtctggcaaggaagtcagaggagcaaatggaggggcggatccaaagtgaatcagcccaaatcatccacgtggcctggccgaggctgagagccgtcctaccctggataagcccacccttttccaaaggctgatcctggaccggggtgggaagtagctctgtcgtggcatggagaagagtcgtacggtttgttgaaaagagcccccacttactggctgtgaaaacactggccaggagcctaaacctcccatccatgcattatatattcatttatccattcattcagccaacatctcctgaaagtgactcagtgcccagccagtgctaggaggcactagatgaagaaacgaggagctgccccagccacggcagcttcaacgtgtgagatccacctagagccaggcagtgacgggctccatccaccggctccctgactctggaccttcactgatgtaattcctgtaaggcacattcttctgaagtacagttcccaagtcagagggtcctcaggcctcattggaaatgtccaaatgtctggaggccgtcctctgtaaaaacaccttttcctcctagagtctgcctgaggatgcaaagacagcatttgtgaaaagcaggggccacggggcccagcgagcagttaagtgctccgcaactggaaatcgatggccttgctaacaagcacccagctgcccctcacacatagtcaccacccttttatccccttttgttgcttccatggcaattacattgcacgtatgcgcatttgttgcagtttttctctccctcactccccatgtcccagactgaggctgggggaacctggtcacgggtctcttgctcctcctgaatcaccagggcttggggtggctttaggaacgccagcactcataccatggactgcactgcggaatggcttcacatgcacttaatcccgggcgcagcaccggcaggcaggcggtactactgacacgtgctacaacatggatgagccttgaggacattatgccgagtgaaataagccagacacaaaaagacaaacatggtgcttgtactactaggctcatattatagacgaagagacccaacccagagaggttaagcaacttgccgagggcacagagtggaaaagcggcaaagccgggattcgaacccgggtgtccggctctccaaactggcggtggatggcggctgccggagcgagagtgctggaatgaatcgatacgtcaatcagtgaacgggcgacggggtcagtccagtcccctcccccggcgcggcggctcagcaccgggacaaaggccgggcgggggccggacgtggccggcggggttcgcgcgcggtgggcgggggtcggggccgggccctttaaggggggcgggccggcggcgcggggggcggtgcggggggcggtgcggggggcggtgcggggggcgggccgggggcgggcggcggcggctgggcccggctggagtgcgcgccgagcgaagggcggcggcggtggcggcggcggctcgtgctcggccccggctgcgattgcgctcagctccaggttccctgcccgcggcggcgcgcccccagcgctccctgcaccccgcgccacccgcacccgcgctcggcccgctgcgggcggaggagcggccatgccgccgcggcgcagcatcgtggaggt

SEQ ID NO: 34967 - DNA, 2300 bp, Homo sapien
gtggcctcagtgcttttgggctacacccttgtttacactgacaacaaagtggtattggagtgttatagggtcacggagaagacctttaattatcaattataggttctaaatttaccttggcttttaaaggaatagggtacactggttttttcttaactacttgtatatctctccctttctctttgactttgtctctgtttgactccctctttgtctttctgtctcttctctctctttcccctctctctttttctctcctctctctctgctggtctttccttgcctctgccagccacttaggctgctgttctcccctctccttcctcttcacctagggaagggaccggagggagtggagctgctctttcttcccccaagaagaaagtgggggggttgtgtgaggttcaacccttgaaatcagcagaaggctcaacccctcaaaccagggatgtctcgccttgcctgtcccggaagtctcaacccctcaaaccagggggtgtcttgccttgcctgccctggaaggctcaacccctcaaaccagggggtgtcttgccttcctcgtcctgggaggttgacctgtttccctcctttccccctctgaaggtcctttgcacacttcccacttgtgctgtcctctctggctgctccctaagggagaattaggcccctcttagtgttggtgtgctggtataaatcctacggcaggatccaccctaaaccatatgaggtagctacagaaccacggagaggacccactcactccgtccagcagtaggacttgtaccatccacacacaacaccaccagcagggtggtcattcacgcacacacacatttagccctccagaatttgatcaccaaggaagtattttaccggcttccacggctgctgcttccttggtctatgcacagttgttgctgcagtatgtgaggatcctttaagctaggttgctggccagtgtttgtttttttttttttttccctctgcattgctgagagctcaggttattcctcacactgggtgggtcttgtttctaacccttgaggctgccacaatagggcggggtgcacctcctcacaagaaccagagaccgccccctgaggggaatataatcacgggcgagcccccaaattgttatatataaagtttcggtgccgcaaaaggaatagcactcaaatataacattttctttttaattctcagcaaggcaagttacttcatagaagggtacatccttacagatggagcaatgatgagtgcacacttggacgaggggaaggggttcttatccctgacgcatgtggcccctgctgctgtgtcgttcccctattggctaggattagactgtgcaggttaaactaattctgactggctaatttaaagagaatgacggggtgagtgctttggcgggagtcagggcagagcaggtagcaggtaatcataatgagttagggtagagcaggtgaccagaatgagttagggtgaagcaggtaatcggaacgaattagagtggagcgggtgatcagaatgagttagggtggaggagataatcgaaaaaggttgctttactaggaagttaagtttattttttatttatttatttatttttacaaaagtttattcttaaatgtacaacagctccaagacaacacttaattccagctatacgtggcaaaagatgttatggcagggaatagagaggtttaaatacagatgaaataaagggtcaccatctcctcaggcacaaggaacagcttactttttgccagatttcttaattccacctatggccaagagccccttccccgcggccttcgcttttagctcctcgagtttcttctgctcctctttttgtttctgcttgaaagccttatcttcctcgtccatctccttggcctacttcttgggctgtttcagtggcttcttcttgccaccttcgcggccggacatggcgcctgccgccgcttccccagaagttaagtttaaaagtagaaggcaaagaattgaacacactgacatattaattctttgaaaataaatttaaaactcctaacaaccgccatgtcctcatctttaggatggggataatgacagtccctccctccctcatggggctgcgatgatgaataaataggagattctaggtgaagtccaaatccagcacaagctgggaactctgttaagtggccattaccttttttccttggaggcaagggatctgtgctcccaaaattgatctgtgcagtaggaccaaatagtcctgctatagactatttgagtcagtccctcacgtccccatg

SEQ ID NO: 34968 - DNA, 2300 bp, Homo sapien
gggcaagggaaggggcatcttttcatcctaagaaacaagctgttattgtctgaaccaacagcaagcttggggaagaaaactcatccatgttgagcactagtagtcagggatcttctcgcaaggggcaaaaccccactcaaagtgccctaagcaaaaaaggaaatgtctgggagtatattgggtgagttcaggaatagctggatctaggtactggaaggatatcagcaggatcctacctctctttccaactcaaagctctgcttgcctctgtgttggcatcactctcaggcaggcctttgccacgggttggctcttccagctccaggcttccttcccaatgaatggaatgagttccttctttcctagtagttccagtaaaagttgcagaattgggtctcgggccttacgggggttatgtgccctttcctgaaccaccactattgagaccagagagtggaagttcctgttggcctggcccttatcctatgagggagggcacattagtatcccaaaagaacatcccagggctgtttctgaaagagaagagaatagaggcctggtagacaaagaacagaggcaccacactgggatgcactcttcactcctcagcagaaccctgggagatacctctggtcctctcgttagacgggaaagctaaggtgcaaagcagtgaagaaccatggactagcagggcaggtccaaccttccactgcccctgatggaatctctttgggcctcaggtaccctgcagtccagccctgcgaccacgactccatcagggtccctcagcggctcccaggacgatagtgattcagatatgaccttcagtgtcaaccagtcctcctcggcatctgagtcatccctgggtaaggaaatgcaaaccctggcaggggcaggggctggcggctggcctggctcctccggctgtgccagtggccttccagggactgagcagggtggccgcctttcccccgcatcctctccttccctcagctgtatgctcagctggagggaggagaagtgtctagatagggcattccaaagggtgacgatggtggcattttatcttggtgtttgggagtagaagagtagagaaaggtgcaaaacctgcaaggtaaactcaaattagtatctcccaaaagtattctcccaccggtcccagcaagaagccctgcattctcggggttgccccaacagagcccacctgagagagacattgttaacatatgtcctcttctccctttcggcagtgacggcccccagctccccgctgagccccccggtgtcccccgtgttctccccaccggagccggcaggcatcaagaatggcgagtgcacggtgtgcttcgatggcgaggtggacacggtcatctacacgtgtggacacatgtgcctgtgccacagctgcggcctgcggctcaagcgacaggcccgggcctgctgccccatctgccggcggcccatcaaggacgtcattaagatctacaggccatagcctagcctgcccacgggccttggccggtgcaaggtcacctttctgaaggccccctgggctgggcaaccacatggctgccagggagtccacgggcagcggccatctctccagtggtgggcaaggtgtgacagtcgtggagcgaggcccacagggcctcagcccaggcaggggttgcttctggctccaaagtgctttgcccccaaaaggccgtcccaagagcaagctcaggaactgcctggcagatcaccctgtcccttggtgacctttcaactgggaaacagcgtcctctgtctgtgcaatgcttcttgctggggttgggttgagtgtgagagaaggggaggggagggagggagaacagagagaatgtgtgtgtgagagagagagagagagaatgaacgtgtagcgattttaccaggggtcccggctccgggaggagacgtgcaatccggagccccgacattggcatgactagaagttgttcactttctggggatgggacataagctggttttgaatgtatgaagctgaccctcacagaactccctggggtggtgtagaaaagagatgctcagattttctaaggggaggcaaaaataactcattgtttacagctccaaagcatgaactccttgaggggaaggtgggtgaagaacaattcacttcttcatttcttactgggtcttagagctgggtgtgatgggcaccgaggccaacccctctggattgtgtcatcttttcaccccttcacccccagactgtctaataatacacacatcataccttgtctccgtctctggaggcaagt

SEQ ID NO: 34969 - DNA, 2300 bp, Homo sapien
gcccttttaaaaaaaaaagcactccatgccctgaacttttctagaagaatccaggcagaacatttgcgcaggcgaaaacacacaagctaagcgaggcaaatgcagaagttgccactggtgatacagctcgcacagcgacgacacagggtggccagcgaaatcccctcccccaggaggggaggaaaccgcagaatgttcctgactcggcacccgggcgggtggcgcaatgtttatgtttgtgtacccagcgcgtcgcgtcgctgcagcaggctccgctgtccagggggccgtcactgggactcagggcacggagatcgctgggcggggcgggggtcttcccaagtgttgcgatccaggtcctggcaatccgcccacaatggcccgggattggattttgctttcggcctataacggccgcgacgacagggagcgagggttgtggccggcttctgttccgggttggaggcccccagcccagcgcttagtgggcgctcactgtgtatactgcctatttgtataataaagaaagggatggagaagctcagtctggagccaaggtgacagaaacgtgtcgggcggcccctggggggcgccgtcgagtcgcgctgcgggtcgcccctcacccctccaaacgccaaaccctggaatccactgcggggccttgcgacccctcaccgggatttcagccccctgacctgcctcccttggctccaagtcttccgggggccacaagactaggaatagcattatttcccggtgggagtttgcttgctcacactttcatggcaaatgtagatattttaaagccaccttaaagaaaagtctgggaaacaggaaagcattgccctgaacctctccgccccaactcgctcgagtcggtcttggtagggacgacttttctatcggcagagttgttcatttttctctaaacttcatcttaggcgcctatttgctgcccccaccccagtagtgtggttctgggcaagtcagtcgcttcgcctggggaacctcagtttccccgcctgttagtgatgaggaaatgaggaaaaggggcacaagagtatgcaaaagcacaggaagcccctttcggttcaggtcggcggccgaggggcacggggaaggggactcggggagggagagagggaggagcggcgaggccaaggcaggtggcacgtcgcccgttctcccggccgctcgcatcccggaggtcagcctcagctggcagcgagccctcctcctccccgctgggcctggagcgcggcgcgggtccggtccctggggacgcgccaagagcaggccggacagcagggcgggggccgggccgcgagccagcgcgcggcgagcggacccagctccgaggctgatgacgtctccccctctggctcggcggcgcctggcctggcagggcgggtgacgtcaccgccccgtcacgtgatcaccattcaaacaaacaccccccctccccctgcgcgcgggtctggcccgccccgtcccccagaggccgcatataaacgcgctccccgggccaggctcgctgcgaaggacatttgggctgtgtgtgcgacgcgggtcggaggggcagtcgggggaaccgcgaagaagccgaggagcccggagccccgcgtgacgctcctctctcagtccaaaagcggcttttggttcggcgcagagagacccgggggtctagcttttcctcgaaaagcgccgccctgcccttggccccgagaacagacaaagagcaccgcagggccgatcacgctgggggcgctgaggccggccatggtcatggaagtgggcaccctggacgctggaggcctgcgggcgctgctgggggagcgagcggcgcaatgcctgctgctggactgccgctccttcttcgctttcaacgccggccacatcgccggctctgtcaacgtgcgcttcagcaccatcgtgcggcgccgggccaagggcgccatgggcctggagcacatcgtgcccaacgccgagctccgcggccgcctgctggccggcgcctaccacgccgtggtgttgctggacgagcgcagcgccgccctggacggcgccaagcgcgacggcaccctggccctggcggccggcgcgctctgccgcgaggcgcgcgccgcgcaagtcttcttcctcaaaggtacgccctcggggaagctcggggcgggccgcacacccctgaggttttgcccggtacccctggctctcggctcccgggggatcgccccacctgcagcgcgtgggcgctggagtacatttatctctggaacttgtcattggctttgtttggctct

SEQ ID NO: 34970 - DNA, 2300 bp, Homo sapien
aaagttttcttttcttttttttttttgagacagagtcttgctctgtcaccaggctggagtgcagtggtgtgatcttggctcactgcaacctctgcctcccgggttcagcctcaggctctcgagtaactgggattacaggcgcccaccaccacacccaactaatttttgtatttttagtagagacagggtttcaccatgttggccaggatggtctcgatctcctgacctcatgatccgcccccccacggcctcccgaagtgctgggattacaggtgtgagccacagcgcccagctcttaaaaagttttctttttgaaaaatttcggtaggggaaggtataataaatgctcttggtgagaaaaaaaatgggacaaatcaagtcggtatgcagtgaaaagtcagcagctgtaacattctatgattcaacgcaaaaactatgttgagttcctcagctgaataagtagtataaacaatttctttttcttctatctctccatacagggagggcgttgcccttatctgaggacctctttgctgtcctcgaccaatgttcaaatgaaggtagaagacgcccttttaaaaaaaaaagcactccatgccctgaacttttctagaagaatccaggcagaacatttgcgcaggcgaaaacacacaagctaagcgaggcaaatgcagaagttgccactggtgatacagctcgcacagcgacgacacagggtggccagcgaaatcccctcccccaggaggggaggaaaccgcagaatgttcctgactcggcacccgggcgggtggcgcaatgtttatgtttgtgtacccagcgcgtcgcgtcgctgcagcaggctccgctgtccagggggccgtcactgggactcagggcacggagatcgctgggcggggcgggggtcttcccaagtgttgcgatccaggtcctggcaatccgcccacaatggcccgggattggattttgctttcggcctataacggccgcgacgacagggagcgagggttgtggccggcttctgttccgggttggaggcccccagcccagcgcttagtgggcgctcactgtgtatactgcctatttgtataataaagaaagggatggagaagctcagtctggagccaaggtgacagaaacgtgtcgggcggcccctggggggcgccgtcgagtcgcgctgcgggtcgcccctcacccctccaaacgccaaaccctggaatccactgcggggccttgcgacccctcaccgggatttcagccccctgacctgcctcccttggctccaagtcttccgggggccacaagactaggaatagcattatttcccggtgggagtttgcttgctcacactttcatggcaaatgtagatattttaaagccaccttaaagaaaagtctgggaaacaggaaagcattgccctgaacctctccgccccaactcgctcgagtcggtcttggtagggacgacttttctatcggcagagttgttcatttttctctaaacttcatcttaggcgcctatttgctgcccccaccccagtagtgtggttctgggcaagtcagtcgcttcgcctggggaacctcagtttccccgcctgttagtgatgaggaaatgaggaaaaggggcacaagagtatgcaaaagcacaggaagcccctttcggttcaggtcggcggccgaggggcacggggaaggggactcggggagggagagagggaggagcggcgaggccaaggcaggtggcacgtcgcccgttctcccggccgctcgcatcccggaggtcagcctcagctggcagcgagccctcctcctccccgctgggcctggagcgcggcgcgggtccggtccctggggacgcgccaagagcaggccggacagcagggcgggggccgggccgcgagccagcgcgcggcgagcggacccagctccgaggctgatgacgtctccccctctggctcggcggcgcctggcctggcagggcgggtgacgtcaccgccccgtcacgtgatcaccattcaaacaaacaccccccctccccctgcgcgcgggtctggcccgccccgtcccccagaggccgcatataaacgcgctccccgggccaggctcgctgcgaaggacatttgggctgtgtgtgcgacgcgggtcggaggggcagtcgggggaaccgcgaagaagccgaggagcccggagccccgcgtgacgctcctctctcagtccaaaagcggcttttggttcggcgcagagagacccgggggtctagcttttcctcgaaaagcgccgccctgcccttggccccgagaacag

SEQ ID NO: 34971 - DNA, 2300 bp, Homo sapien
ggttttttttttttttttttgagacagagtctcactctgtcgcacaggctggagggcagtggtgtgatctgggctcactgcaacctctgcctcccaggttcaggcgattctcctgcctcagcctcctgagtagctgggattacaggcgtgtggcaccacgcccggctaatttttgtatttttagtagagacagggtttcaccacatgttggtcaggctggtctcgaactcctgacctcaggtgatccgcccacctcggcctcccaaagtgctgcaattacaggtgtgagccactgtgcccggcaggaacttaggctctttttgtcttgttgctctgctctgtggtggcctccaccttatggtccaggatggtgacgcctacattcctggcagccagatggagaaagggacacagagggtaaagcagacataccaactatcccagatgccccacaagacacttccctttacttctcaatgccacatctagctacaaaggaagctggggaaatgcaactttcactgtgagcacccacatgcccagccaaaagttgggagctctatccccactcgaaaagagcaatgatagtcaaccctgtcttgcatttactctgtgccaggcatttgctgaccttggatatcatcccaaatgcacacttgattcagtaggtctggcctggggacaagagtctgtcctgtgatggccatgtggctggtctgtggaccacagtttgaggagggaggattcgaggtcaaagatccatcattgcatgtttcctcccacacagggccaacgaatggctgtttggaagcagtggctgctcaagatcccttaactctccctgctgtccctaggtttccagttcaggctgagatttccttttctcccccaacagtgtcagaccactgacactgaatgaatgaatgaatgaatgagtgaatgaatgaaaagggaacgcagaggtcaggtcccggcatatgctctaggggaaggctttggttcaccacgtcaccctaccccagaccccgtgctagtgttgtcccttctgaatcctcccggaggaaccagcactgctgttcccctctatttacacagggggaaactgtccattgactctgcttttggaacccgagccctcaccattctcccctgggttttttgaagccctgtcccaccacaaccttggagaaagggccagtgacagaacctcggggaagttcagagtgagtttcccctactcaggtcttgtgtgacctcaactaccatctcctctaatccagcagtcacggaggcagctgctctgtattcctgaggaggaaactgaggctctaagaaggagacaatcggcacagtccacgttggccaagtcacagtgcaggtcccatctgcctctgccacaaccctgcatgttctcgatggacctggttcagagcagatgctctgtgaatgcccactggagtgaacgacaggggcagatggaagcagggacagccactgccagcctcaatagtttcaggtgcctggcactgtgctaagccagtctcctgtttctcagctgatccccaggaaaaccccctcaagtaggtgtcatcgtcctctttgtgcagatatgcaaaaggggcggggcggggggggggcgctctgagaagcccagtggctttcccagagagacacggcaggggcagaggtgagtccaccttaacagcctaggatggccgacctcttcccttcccccacagtattaggccctcactcagagctagacgctgtgcacggccaaagtctgtatcaccccgccccccgcccccaactcaatcacagttcagtgaaactgtttacaaatgcaaaaaactgggctcggagaagcagagaatttgtccgagggcatccaaagagatggagaaggaaatctaagtgggaggcttgaaggaatgagtactggagtctttgggggactcccttcccttccgacagcctcgactctccgccccttccctgcctgcccgcgggcccctttaaccgggtggcggaaggggcggccgggcgggcggcgcccaatgggctgcgcggagcgtcacttcccggcagcgggaggcgagtggcgagtggcgagtggcgagtgtcaggggggcggccggcgggggcggggcggccggaggaggcgttggcagcgggctcggacccacgcggcgccgcggcccgcctggcctgcagcgctcccacccccggcggcggcacgatgccctttgacttcaggaggtgagtgtggcgaccccggccagtcgggagttccctcagcg

SEQ ID NO: 34972 - DNA, 2300 bp, Homo sapien
ctagaaatacaaaaaaattagctgggcatggtggtgcatacttgtagtcctagctactcgagaggctgaggcaggagaatcgcttgaacccgggaggtggaggttgtagtgagctgagatcacgccactgcactctagcttgggccacagagggaaactccatctcaaaacacaaacaaacaaacacctcaacggttcttctcttactacacacaatgacaataaatattttgtagtcttttttttttttttttttttttggagtcttgctctgtcacccagcccagagtgcaatggcatgatctcagctcactgcaacctccacctgcctccagggttcaaacgattctcatgcctcagactcagtagctgggattacaggcacgtaccaccacacctggctgatttttgtattttcagtagagacggggtttcaccctgttggccaggctgggtctcaaactcttggcctcaagtgattacaggcaagagaaggataaataccacatttaggagagtatttctcctgggatgggatggagatgggtcaaaatggaaagtgcagacagaagaggaatataggggctgtctttttttttttaaatgctggttgcaatctactactttgattttttaactcactagtcatcgtcatctgcagttggtaaaaacattgttgtagagggttaaagcatgaaccatattaacatgtccccccccctttttttttgagcacctattatatgctgggcacagtgctgaacactgtctcattttgtcctaaccacgttttgcgtatcaggccactgagtctcagagagggacatcacttaagcccggctcacacagcaagtaagagcaaattaagattccagcctgggtcagcctgacttattttcatgtccttgaggccttggagcagttcccttgtgtatctgctgcaaagccttgctcaacgctcttcccagaggaagtgatcaaatgaaggaatcaaatatcaaattgctatagaaagaaattctttttttttttttttttttttttgagacagtctcactctgtcacccaggctggagtgcaatggcacgatctcggctcacggcaccctctactttctgggttcaagcaattctcttgcctcagtttcccaagtagctgggattacaggcgcccgccactatgcctggctaatattttgtatttttagtagagactgggtttcaccatgttggccaggctggtctcgaactcttgacctcaggtgatccacccgccttggcctcccaaagtgctgggattataggcgtgagccaccgcacctggcctatagaaagaaattctaaaacagtctctttaatattaacataagccagtgcaaagggttcccaaatgtggctgatgacttggttttctttctttctaaatgtttaaggaatttttaaattgaggtattgcagattgtaaagtgttcttatcttaagtatacagctcaatggcttttttacctgatacccccatgtggccacccccagatcaaggtgcacaccactttcagtaccccagaaagctcctgcatatgcctcttcccagccagcacccccaccacggggtgacctatctcctgacttccctccccttgctttagtcttgcctgttcttcaggtcacacacgtggaatcatatgatctgatctgtgtgtgttggacttctttcatcccatgtcccatctgtgggattcattcatgtggtcggatcagtgcttcattcttttttattgttatagtacctgattggggtacttttgagcttattttttatttcatagactattttggacatatagaatcatatagaatcacacccacctcccatcctgagaagcaaaccttaagcccctatattcctcttctgtctgcactttccattttgacccatctccatcccatcccaggagaaatactctcctaaatgtggtatttatccttcccatgcaagttggtaaatttgtactacctatgtacaatttcttaacagatcctttgagtgagtataaactctctttttcttatttggtattgccgagtccaattaaattttaatttaaatgttccaagtgtttctgggattcagaacctcagctccatgctctagaggtcaagacagttggagcaaagtccagaaggaaaggccaactggggagaggcaggaggagagcagagtggggagagaagcggagggaggtgggtgtgggagggagatgctcacagccctcagcagccatgatctggtgggggcccctg

SEQ ID NO: 34973 - DNA, 2300 bp, Homo sapien
gggagttctgctgaggactccctcctccactcaggctcattccactgaagtttgtgagcacacgctctgtgctgaggctcagggagccctcgtcctgggggtgttgacgggagtgggagaggcttgtgggacagacgcaactggacccctaagcacccctgtaccctgcaggcacctgggccctggtgggaggggacacacctgaagattatgaaaaaggactaggatgcctgcatcacatgtccactgagggccaccggcccctcagcttttcaccgattcccatcccatccaggcagtgcaatgccttggaaagagcatgggctctgggccccctgtccctgggctcagatcctgcctctgcctcctcttggtcctatgatcttggccagccagctgtgctcctctgagcctggtttcatcgacgtgaagggagaatagtacccttattaaacactggatcaactccttgagcatcgatattaataataatgataaaaaccatggacatttattgagcacttactgtttactaagaccacacttagcattgctcttgttctcatttgatcttctcagcaaccccatagcaacccctatgattgtccccattttacatctggggaaactgatggatgggaagccccttgcccaagtcaatcagccaagaggtggcagagccaggattcgaaccctggtagcctaggctttgaaccctggtagcctaggcttcgaaccctggtagcctaggcttcccctgcactgctgtattttctttaccaagaagggtgtggaatcggccctcaagagagagatgagtctcacacatacacacacacacacacacacattgactcacactaacatacacacactcactcactctcctgccctggggcagccaacagcttgacctggcagtcatccagcagccctgtgaagtagacggaatctttatccttattttcctctttttctctcctttcctctctccctccttcctttcctttcttattttcttattttagtgaggtatgtgtaacttacatacagcaaagcatacaaatattaaggtagaggcctgatgaattttcacctgtgtttacacacgtaaccatcactctgatgaagacataatacattctgtcaccaaagaagggtcccttgagcccctcccagtcagtagcccccaccactattattctgacttccattgccatagattaattttgctgattttcgaaccgattgaaagcttttccagttttacagatgaggaaactgaggctcagagaggtgaagcagtgtgtcctaggtctcccagctcctaagtggcagagccaggaggtgagcccacaccggtctgccactgcccccataggccttcccactgcccacactggtgacaggggagtcaggcccatggaagtcctcaaaccacaatgaatccacaaaaaacatttccttttcttccaggtgggttgatttctggcagcccgttggccttttaaaatcagttcagccctagccaatgaagttagttagccttggcaggcccctgccatggggtggttgtgggtgagctcgtggcgctggctggggtggcaggaagccagcagccctggaacatttgccttggacacgaaggcgaaggcggctttattgacctcatcaggcagcccaggtgattgaattgtgtttatctcacagcctggggccctccaggaaggagcctgggagcagccagttctggccttacataaccagcctggccagagcgcctcaggccgtccctgcccagcaccgcagcccccttgttctgggtggccctctagccctgcggagcctgttctctgcttattctggttaggaagacagggacccacgcctgggagaggcttcttggggccttgtgggtgagctcaccttggcgccacacctgggattcactttgctcttggctgaggtcacctccagagggttgccagtggatgacatcatcccacaatccctcagtgctgtgcggaggcccagcctcgccaggtgggaaaggtgagttgcttcaaggaagagtctcaggcagcttcctggctgggaagggaagcccaggctctccttagttgactgtgtgttaatcacccagcaatttcattactcaacagctctccagagttgcacattacagctggggtagaaattgggtgctgaaggccaggcagagcatttggctgtagggaggccgatcctcctcgggcctgttaccggcgggtctttgttcttagacctggggttcttggcct

SEQ ID NO: 34974 - DNA, 2300 bp, Homo sapien
aagtataaaggcctcgtgcagcctccttacactgcaaccacggtgaccttcattcagttccccaaagcagccatgccctccccaacctccaggcctttgcacatgctgccaggatgatgcctacgcatcccccagacctcaatcacacctcagagaggtcttcccagccccttctccccaaaggtcagtggccctgtagtccctgtcatggccccctgcagctttctgtcaagtactaatcagcgttgggggtggcagcatatttaggggctgagtgatgtctggttcttgtgtctataagcttgaagaaggtagagacagcatctgtctgattcattgctgcttctggctcctgacaggtagtaggtactcaaaaaagtatttgttgagcaaatttggattgctaacagatgccaacactgtgctgctgacagcaaggtgacatggctgtctgtggagccacctgcccctaaatatggccgatgcggtcgacagaataatgaccccctgccccctgtgatgtctaggtccctgtccctgatgtgtgtggccgtgttaccttgcattcaaaaggaactttgcaaatgtgattacattaaggatctcgagatggggagaggatcctgggttagccaggtggactggatgaaatcacaagagttcctgtaagagagaggtggaggccaggcacagtggctcacgcctgtaatcccagcactttgggaggctgaggcgggggcggggggggggggagagaggggagggggggaggggggagggggggggtggatcatgaggtcaggagttcgggaccagccttgccaatatggtgaaaccccatctctactaaaaatacaaaaattagctggagtggtggcacgcacctgtagtcacagctactcgggaggctgaggcagaataattgcttggacctgggagatggaggttggagtgagccgagatcgcgccactgcactccagcctgggtaacagagtgagactctgtctcaaaaaataaaaaaagagagaggtggaggtcagagaagggggaagctgctggctttggaactgggagaaggggccacaagcctaggcagcgcctagaagctgaaaaaggcaagaaaatgcattctcccaagaacacagcccgttttagacttctgacctccaaaagcataagacaataaatgtgtgttggtttaagccattcccgttgtgataatttgttacagcagccacaggaaattaatacagccgtcaagtcgtttctcagaaccggttctgcccctacggatgggcatcagggaattcctggcttcccggctgggggaaggggacctcaagagaggaggctgtaaggtcctctgtgcctgctggcgccaggccctgatcccttataagacccctatttctcattttagtgttcaaaccaccttattcgtagtgggtggtgttatccccacttaacaggtgtgttcacagaggtgagcataggaagtgccagaaccagaatttgaacttgaatctgtctgaaagatatgctcttaccaccgtgctatctgaccccaccccttctctttcctgagccccagccctcccctcttttttttttttttttttgagacggagtttcactcttgttgcccaggctggagtgcagtggcgcaatctcggctcactgcaacctcagcctcctgggttcgtgattttcagcctcccaagtagctgggatttcaggcatgcgccaccacgcccagctaattttgtatttttagtagagatgaggtttcaccatgttggtcaggctagtcttgaactcctgacctcaggtgacccacccaccttgacctcccaaagtgctgggataacaggcatgagcctctgcgcccagcccagccctcccgtcctgagaggtaaggctgcacttgaagagtgcagcctagacccgtgcctgagggcacaggaggtgcaggctctgcccaggtggagtctgggttatctaagttgtggtcaccaagtgaagtgatccccggctgtcccccgcagctgagatctttgccgccatctcaacaaaggttcctatacttgtctttcccctagtgtgaacgagctctatgtcgatgacccagacaaggacagcggtggcaagatcgacgtcagtctgaacatcagtttacccaatctgcactgcgagtgtgagtactccacgcagcccctccctccagcaggacacctccttagggcaaatgtgtgtgtgcagaaatggcaagatctccaggacaagccaagccaacatatgg

SEQ ID NO: 34975 - DNA, 2300 bp, Homo sapien
cgagatggtccagggcacaagggctcgcttggcagctgagagggcccagagcacttgcctgaaatgggagccggcaggtggggtgtgtggggtgcgagagacccgtggtagactgaggaaggtggagactgaaggtctggttggtgactcagagcacccatctgcaatgaggaagatggacccaggaggcaagactataggcagggaggtgagggaagggcccagaccgaggcaggtggaggggagaggagcagcggtctcgcattgccacgtgcaggggcaaaacagaaggacacagaaactacagtcccaagtttagtcattagtggggtggaaatctgatttttttaaaaaaatgtacagaacttagcttagggcccatccatccattcattttctgtccatccatctagtcaacaaatatttacaaagtacctaccgtgtccaggccttgcataccttggtgaggacaaacatggtccctgcccacctggagcttccagtctaggggggaagacagatgttgatcaaataatggtacaggccaggtgcggtggctcactcctgtaatcccagcactttgggaggctgaagcgggcgaactgcttgaggtcagaagtttgagaccagccttgccaacatggtgaaactctgtctctactaaaaatacaaaaattagccgggcgtggtggcaggcacctgtgatcccagctactcaggaggctgaggcaggagaatcacttgaacctgggaggtggagattgcagtgagctggtatcatgccactgcactccagcctgggagaaagagtaagactcctcccaaaaaaagaaaaaataaaaataaaaataaatggtacaaataaatgtgagataaagccatgtcacatgacaatggaagagaacattctagccttcttgtctctgtaaccaccgttctcatgggttagaaatgaagccttcacacggtcagtctcaagacagcaaatagacaaacttccttttccttgttgagaaattgcagttccttccagttgttgaggaattgcttgttgagaacatgcaggtgtgttaagtgctcagtaaacatcagccgcctgagaccaggatcagggattatgccaccccgctgctgcccactgctcctggagtggccacagaatcatgtccccacgtacctctccgatgtctcctccttccttctattcaaacacctcactctccttcctcctgggggccacgtgggcctgtctccatacttaagcctttgtacatgctgcttgccagtttaacttcccactttcctccagatcttggtgtcaatgtcatttcctccaggaaggcctccagggtgtctagctcgataacccctgttaaccatgcccatggtagcatgctccatttaccaggtatgccttgtccttctttagatgttccttgaggccaacctggtttcccattgtcctcagagaaaaggtgagatgtggttttcagccctactctacagcagcccaccccactgcccggaggagggttttcttcacatctgctatacgttctctgcagcagacatgatggggggcccacagctctggggcatccctgcctggactcctctatgggcctttcagaggaccctgggatctcaggagaaactttctgggacccagaatccatgttcacttgaattttctgtgtgacttcatggaaagagtccagcttagtgtcagacagacctgatttcagagtttagcttagccacttaccagccgggcaagttttggtgtctttccaagccttgatttgctcttctgtaaaatgggcccaataatacatcattaggggcatgaaatgaaattatatgaaggggccaggatggagcagcacatagtaggggctagagatgggaaacaagcttgtgcctactatgtgccaggcccctgctgcctcttgctccccacaaatccgctggagcccccttttacacattggtagggttcctagaccaggtggtacctggccatcccccacaaccagggccaggcctggaggtggaggtgtcctggggaccatcccctcactgcatttttccacaggtccagaacatccacggagctttcaatgctctcgggggagcagacagactcacctccaaccgtatgtatccctgctgggaacagccttctgctccaagatgcccagtacagcaggcagggagggggagggcagagaggtgggggtgcctgtccagcacccactccaaggcagggaggctgctgctcacactccattcccacagct

SEQ ID NO: 34976 - DNA, 2300 bp, Homo sapien
gagatcccctagggcagaatctaaggagaaactttcctatatcaaattgtatcttgtattgtggtactgaattgtttaactggtcctgaatgatataactggaatgaaaccagcttgtcatgtatatgtatacacataatatgggctgtcatatatatatatgtgtgtgtgtgtgtgtgtatataagtatacacacacatacatatatatgggctgctggttttaagaatgcagattctgggccccactccagtggcgggatagggatgaaacaagattggccatacgctggtaattgctgaagttgggaaatgggtacgtgggagtccattatacaattccctatgttttaggtttgaatttttctgtaagaagattttgcgggtaggggaggaggagtgagcttgaagggaatgtgggctggcctagaccaggttggagccagcagtctctaggaatggtcagctcacaaggaatccacatgggtgtaattaactgcagtgtctccagtgggcatttggcaaattgtatcaaaggccttaaaaatggtcattgcctttgagtcatcaattgtactcataggagagtaagctaaggaaataattaagagagtgtacaaaaatctaggaaaataatgttcattaggtcattgtttataaaattgaaaatgaggaaccacgtcagtgtccagccatagggggttgactgagcatggtaactgcccaagatgagcgaggtgtgtcaggaccttactggcagtcaggcagcaaagatttattgagcacctactatatgctgggcattgggctaggttctggggatagagagatgaataaaacaaactctgcagagcttatgttctgtgtcttagacctgaaaagttgatcatgatgttcagttcttagaaaaagatggctgggcgcggtggctaacgcctgtaatcccagcactttgggaggccaagtcgggtggatcacgaggtcaggagttcaagaccagcctggccaagatggtgaaacccccatctctactaaaaatacaaaaaattagccaggcgtggtggcaggcgcctgtagtcccagctactcaggaggctgaggaaggagaatcacttgaacccagagggtggaggttgcagtgagccgagatcgtgccactgcactccagcctgggtgacagagtgaaactccgtttcaaaaaaaaaaaaaaagatacggtatggtcctattttaggaaaatacaaatatatgtataaacatgtctggcagtttatatgtgagactgtgaaccatagttttctgaggatggtgaatttatggtgattttttgttttgtccttggtgatcacctgtgttttgtacaatttttttttttttgagatggagtctcgctctgttgcccaggctggagtgcagtggcagctcactgcaacctccacctcccgggttcaagcgattctcctgcctcagcctccctagtagccgggactacaggtgtgtgccaccaggcttggctaatttttgtatttttagtagagatggggtttcaccatgttggccaggttggtcttgaactcctcacctcaagtgatcctcccacctcggcctccctaagtgctgggattacaggcgtgagccaccacatccggccttgtacaaattttaacaagaaatattacaggggtgattttgataaggcattcactttttcattccttcaagtttttaacctagggcaatgggcgtttggacaccactatcaagcgtggtcttgggctcttgttttaaaaatgcaaattctgagctccacccttgacccatttggcgggatgctcctggaaagaggtccaggtgtctttttattccaaatgattcgactgcttctgacatctgagaaccattacagggttgaacagagggatgttggagtcttcatggactgggctctgcggctgcaggacttttctcgggttttcagaggaacctactcaaaacaattcaagaagcacttcctttgcttactgagatatggctttggcaggaaggggcagggagggagtgtcagggcagtgaatgctgtctgcattcccagccttcttacagaagaggactgactcgactctgcgaccaggcttagaacccacaggcctaaatttctgtgttattttagctctgtagtccgtgacccgagattgtggaaggcccatgagcttcctgtaagcatcccagaaggcccaggagagttcatacctttcctgagtgatatttggcagctctgggccagcattctatcagcccagc

SEQ ID NO: 34977 - DNA, 2300 bp, Homo sapien
ttctggttgataggctcttttctttttaatactgaaacctagtttgttttaaaagtaaaactattcagacaatgtcagaggatgtacaatgaaatgggatctttctcaaatcctgccttcctccccagaagctaaagctgcccgtggttccttgggcatctttccagataattctcctatatatttacatggatacagagtgtctcctcctcccccaatccatggacacatgtgtatcctgtcccatgacttggttcttttccctgttggagaatagctgctcctagcacccacactttttttttttttttttttgagacagagtcttgctctatcgcccaggctggagtgcagtggcatgaccttagctcactgcaacctccgcctcccaggttcaagcgattctcctgcctcagcctcctgagtagctgggattacaggcacctgccaccacgcctggctaatttttgaatttttagtagagacggggtttcaccatcttgggcaggctggtctcgaactcctgactgcagatgatccacccacctcggcctcccaaagtgctgggattacaggcgtgagccaccacgcctggccaacactcactctttcatggttgctctattgatggacatttgggttgtttccagaattttaatgatgtgcacagtgcaggaggaaagatcctgatggatagagtctcccaattcccggtatccaaggggagaagatgaagagcagttggttggtggtaaaactggggaatgagccccctgccgtgcccagggaatttaggcttaggattgaaatgacatagagctgtcagcgggcagtgcccgtccccctgcttcattctgctgtgtccttcccgcagccctggcctcccacgactacatcctgaagattgtgcccacggtttatgaggacaagagtggcaagcagcggtactcctaccagtacacggtggccaacaaggtgcgcgggcggtggctgggccgagctgtgtgcggcggcgccctctgctgacggagagcagagatgacaggcggctgcaccgacgcactttcttctgattcctttctggaggcctttcctgggggttagcttgggccaggcgctgtccctgggtaaaattgaaaagcccagtccctgccatgtggcagtctcagagtcaaggagaacagatctaaccaggagatagggtgtgatgcgtttgacaaagagcaggtagtctctgtcctacaaaggtcctggggttgcaggtctcaaacagccctgcatctggtccgagtccttcagacacagacccctgggtgctcaacacagacagacactcctgctctcagggcacaggcactttacccaaactcatgaggctactgagtcacaccaagatggctgttgattaatttgctgttgattgacaggggtgtccccaggaccccaacactcaaagtcatggagaagacgccaggccttagtgggcagcagagcatggtcagagtctgcagagtgggatgacccagcaattagtggtctcaagacaagacagccttgggcttccctgggggtatcccaccaatgggacatgaatacttgaaacctgttggttgaaatgcccctgctagaccctggcggatgggtttttcccacttaccaccaggactgtcctttttcttctgttccaaggctgcccaaaccccttataagtgatacctgtttagctcagttaattataacaacagtaggaggcatagctgtcactcattgagtacttcctgggggctagacatgctaagctctcttcttccgtcttctcaatcatcatgacagctctgatgttgagactgttattgagcccattttgttgatttgaccattgaggcactgagaggtggttgtagagctataaagtggctgagtggggattagaacaggttttccttgggctccagagcctggcttcttgatcacctcacgcctcggtctgaggaaggggctgtgagtctgcccacctgcgagctgctctctgtccaatgacttagtccctctgttctgactcaccctaaattgatgttcccgggagcccctgtttcttttattcactgtttcacagggggcatctcattgtaaccctcacatgctcatagcagctaacagatggaaaagcacagatgcaagctcaggaccacgctgcagttcaaattccagctcagtcattcactagctattgaccccggacatgtcacatagccactgtgtgcctcagtttactcattcataaaatggagatgatactt

SEQ ID NO: 34978 - DNA, 2300 bp, Homo sapien
acaaagcaaaaagccttccctgctctgcttgatcatggatactccttgatgatcttgggttctcaagatctgtctttacatggctttccttcaccagtgaggctctgaacttcttgggagcactcctccccagatctctttaatcaagacctgtacctggctccatgtaggtaccaaataaattgatgagcaaatgaatgaatgtatgagtaaataagtgggtgaatgacaataaatggatatgtgatagagaaatgagtgaataaacagaaccagtgagtgagtgagtgaatgaatgagtgaatgaatgaatgaactccttggggcagggcatgggtttgactaacacctaaggactattctaagaagaacctctgacctttactgtgtgtgcgccgttatgccagcgtctgctcctgggttgccgataggtaatgacttcctttcttaggactgccccccaacctccttattcttggagcctgggcacacgcacagctgggtggcccttcagctgatactgccttaactgctttaactctgcctgctgtgctgtccaggcttctgcaaatagcccaggtgtggccatcctccagaggcctccaacattaactgtgaagggcccggaataaaacctagtattagtaggccaggcgcagtggctcacgcctgtaatcccagtactttgggaggccgaggcgggagaatcacctgaggtcgggagttcaagaccagcctgaccaacatggagaaaccccgtctctactaaaaatacaaaattagccgggcgtggtggcgcatacctgtaatcccagatactggggaggctgaggcaggagaatcgcttgaacttgggaggcggaggttgcggtgagccgagatggtgccactgcactgcagcccagggaacaagagcgaaactctatctcaaaaaaaaaaaaaaaaaaaatctagtattagtaaacgcaggtgtttaacaatgtcaccactacatgtcagggaacactgataaactaagagagagcacgggacctgcctgggtgtggctgctgtacttgcaagacatcttccctctctgagtttcagcatgccggcatttggcactaagttgtcgttcaacatatatggaatgaatgaacgaaagggagagttggagttaataacaccttgcatagaataaaccccgtcggttcttaacccgaagagagtcgagacccagagcccttttccttccctgccgccacggtgcccacggagggggcgtggttgatctccctcacagctccgtcgggaccagagacccggggaccttttacacccagggtccgcgcaaagtgtcggcctagccagtggttgggtggcgcccgggcctccaggcagtcttccaggggtcggcgaacgaaacgcggagctcgggagcgacccggcggggccaggcacgggcagaagggccaagagggccacaggtgggcgcggagcggccggagtgggcggggactggatgagaggggcggggtctaggagagaggggcggggcggcggccacaaacccgcaggcacgccgccggccgccgtttagtcccagagatagaaaaaagtagaggtaggagggcgcggcggctcacgcctgtaatcccagcactttggaaggccgaggcgggcggatcacgaggtcaggaaatcgagaccatcctggctaacagggtgaaaccccgtctctactaaaaatacaaaaaattagccgggcgtggtggggggcgcctgtagtcccagctactcgggaggctgaggcaggagaatggcgtgaacccgggaggcggagcttgcagtgagccgagctcgcgccactgcactccagtctgggcgacagagcgagactccgtctcaaaaaaaaaaaaaagaacaccagtaagcctctaccgcaggccctacacaagcaggcccttgtactcactggcatcgccctcccggggccgccaggaatgaggcactgagatcccaccccaagccgctgggggcgccattcgacttcgctcctacggaaatggggcttcgatgtctttctgcgcttgcgcggcacggaaactcacttccggccctgcgcactcagggtctgaggcagctagtagccgggtgagtggaggctggagttttctcggacagtgaactctaccgccccgtgagaccctgccctatgtgtcgcgggaacacatgtcaccccacagctctctttgagtgacctcccgaccacccattcctgcctaaccctagcattccttcctcagcctcaaggtcccagt

SEQ ID NO: 34979 - DNA, 2300 bp, Homo sapien
aaattttccagctctctttgaaaatccaagaatctaacaatgggcctgcatttcccccaggcatcaatgggctaaaggtagatgattatatcttatatgtgaggcttgagctttccagtttgccattttctatccctacctatcccctataagtatttgcaattcccccattctagaacatgtctgatgggaaggatccaggagagagggggttgaaactgctgatcatacctctgaactactctttccactcttcctgtcacacttccggcttaactccacattttttcctccttaacatatccccaaaccttcaaagagtcccagtgtctcagatgatacaccaagcctcatcaccttatgtcatttcattctctaagacaatagctcttaactgagtgagggaagagttgattttgccccccagggagcatttggcaatatctggaaatatttttgcttgtcacaactgtgaagggagggagtgccactggcatctagtggggagaggccagggacgctgctaaacattctacaatgcacaggacagcccccaccccccaccccccacaacaattatccagtccaacatatcaatagagctgaggctaggaaaccctgctctaaaacgtgatctccatgagaacaagggcctcgtcaatcttgtcctagaacaatctctggtaagtgctccataaatattcctttgaggaatgaatctagcccctgcttatttcactcatatccaactcccttccctcctctcatgcattctaagctccaatcacagagaacagagggcttgtacgttctcacatgggccagtcttttagaaattatgaaagagtgactcgctgcatctttaccagttctcctgccaaatccaatgctatcacatggccagctcccacaaatctctgtccatcaatcccactacacccaaatacactaaaacactactctcactgcagcaccttcccctacagtctggttcaacaagccaccctgggcaacaacacttggcaaactagcagccagaaggttaaatcaaaagtatttttggtggggcacggtggctcacacttgtaatcccagtgctttgggaggctgaggtgggaggatcacttgaggccaggagttcagagaccagcctgggcaacatagcaagaccctatctctacaaaacaaacaaaaaagcaggtttttgcttggttgacatactgttttattaaattttactattactattaaataattaaatgctctaaagcaacgcaggcactctctggtggctctgaaccctatctctggcctaacacatctgaagggtcacactactttccagagtcctgaggcatgtgagtctgtgactgctccacgcatgacgttcttaggcaacggtgtccgagcgccactagcgccggagggagacgtacctggacctcgtcgtccttgcggatgggcatggagcggacattgtacttctgccgcagctccttggagagcggggatgacatgatcttcctgcgcacgtgtgagggggcattgaagtgacgtttgcggtttttactgcggtccgaggtaacgaagggattgaacttcatggtgaccctctacaaagggcggagagagacggaatgaaggggcgctcagtgggttacaggggcctgttctcgacccaagacactcctcatcccccaacaaaggctctacaggggaggtagcctctgaaaaggcaactgagggaggacagagagatgcgactagtctgactatcacataaagtgaggcgtgtgtggaggtcgcatgcccgtctaaaggggtcgtgggggagagggtagcactgggaccttgaggctgaggaaggaatgctagggttaggcaggaatgggtggtcgggaggtcactcaaagagagctgtggggtgacatgtgttcccgcgacacatagggcagggtctcacggggcggtagagttcactgtccgagaaaactccagcctccactcacccggctactagctgcctcagaccctgagtgcgcagggccggaagtgagtttccgtgccgcgcaagcgcagaaagacatcgaagccccatttccgtaggagcgaagtcgaatggcgcccccagcggcttggggtgggatctcagtgcctcattcctggcggccccgggagggcgatgccagtgagtacaagggcctgcttgtgtagggcctgcggtagaggcttactggtgttcttttttttttttttgagacggagtctcgctctgtcgcccagactggagtgcagtggcg

SEQ ID NO: 34980 - DNA, 2300 bp, Homo sapien
gtcttggagaaggcggtgtttgggctagaacttaaggaccataggatttctgctggggctaagttttggggaagcattatgagcacaaaggagacaaactagttttctacattgctgatcaggttaaaggcttagaatcatgtccgaaaagttggtacagatgttgaagattattggtccagtttcccgtttaatacaggaatccattctacttgatgaaagaaatcaggagttaatgcaatgtggctactgcaaggaaaccatggtccctggtaaagcacattgcatttaaagacctgctttctatcttgctttcacctgtaagctttatcatcaagctcctcaacctctctgagaactggcttccttgtctattccaagcttggcgcatactataactaacatatgtgaaaattctcagcaagcgttctaagccctgtttatcagctcagcacggtggcttatgccagtaatcccggcactttgggaggctgaggtggaggatcccttcaggccaggagtttaagacccaccggggcaacatagcgaggctctgtctctacaaaacattttaaaaattagctggtgtggtggtgcacacctgtagtcccagctcctcaggaggctgaggcagaaggatggcttgagcccgggagttccaggcagcagtgagctatggagcaccactgcactccagcctgggtgacagagcaaggccctgtctcaaaaaacaaacaaacaaacaaaactgttttacctttctttttctttctttctttttttttttttttttgaggcagagtttcactctgtcgccaaggctggagtgcagtggtgcgatctcagctcattataacctctgcctcccagggattcaagcggttcttgttcctcagcctcctgagtggctgggactacaggtgcatacctggccaatttttgtatttttagtagagatgggatttcaccatgttgcccaggctagtcttgaactactgacctcaggtgatctgcccgcctcggcctcccaaagtgctgggattacaggtgtgagccaccatgcctggcctgtttttcttcttaccattctggctaatttctacttgtctttcaaggctcagcaaggacgagttgggtagaaagccttgcagggtcgtccacttactttcacactgcattgagtcgcctgtttgcaaggtcatctgctccccagaatgtgaactccctcaggggtgcctgattgacttctgtaactccagagcctggcacagcacacaagataaatagtggtgcgctagttaagagctctggccttgaaaatcagataatcaggggttgaatcctggccctgccacttactatgtgactttgggcaagatccttatcctcttccctgggcctcagtttcttcaactgcaaagtggggataataattacaattacctcataggctgaagtgaggagttcaacacgggctcatgcacttttttttttttcttttgagacagagtgttgttctgttgcccaggctggagtgcagtggcgcaatctcggctcactgcaacctccacctcccgagttcaattgattctcctgcctcagcctcctgagtagctgggaccacaggcgcgcaccaccacacccagctaatttttgtatttttagtagagacagggttacaccatgttggccaggctggtctcgaactcctgacctcaagtgatccgcctgcctcagcctgccaaagtgctgggattacaggcgtgagccaccgcacccggcctggggctcatgaacttaaagatcatggcccagtgccaggcacacgggaattcagaatagtaagggacaactattgttaagttctctatgtctgttgcataagtagatgaggctgtagataactacactctttgtctaaaagggccaagttctcatcagaacactttgctgagccccgggtgaccgaatccctagctctggggtgagcgacatgcctccaaggagctgcagccaggagacagccaggcgaaggcggggctctgcctctgggctccccgaggggcggaggccggcgcgcgggtcacgtgggggcgcgggaggcggggcttgcacacgctggtcacgcggtcagctattgacacttcctggtgggatccgagtgaggcgacggggtaggggttggcgctcaggcggcgaccatggcgtatcacggcctcactgtgcctctcattgtgatgagcgtgttctggggcttcgtcggcttcttggtgccttggttcatccctaagggtcctaac

SEQ ID NO: 34981 - DNA, 2300 bp, Homo sapien
tggagcaggatatagtcattaacaaaccttgatggaaaggtctcctttagccaaaacctcatcctttccaagacgacggaagagggaaatgtgggaatccaatgtaactcactagtaaacaccttcagtgggcggagcctcacgctaggagataaacctggctgccccctgaccccaaggaactgcccagtagaggagatgaacgtgcccgtgtccagatagcagtgtaacaatggaaggtctaaccatctgctggagctttttcaaatatagtgttacaagagaggatggtctgtcatgtatgccggggagatttgatgcatgaatctcatgtgaacgagtcggggtaacctgcctcaaacttcccagctagttttcctctttttcaattttaaattccagctgatgtggaaaattagaatgtggtatgtgttagatttaaaaaaattataatcctggtactcactttgcagtaggggaaatactcattccttcattgggcatggaggccctactatgtggttggtattgtggcggctacagaggagagatttatgcttttagtttcctgttaggtatctacatatagttatctattcattttgtgtacagaagtattattttagtggctgttaacctgctaaagtctaaagttatctgtacttgctatttagtctacagtacatcttccaaatgatgcccttaaacaatttaataattcaactattgattgagtgcttactatatgccaggcactatgataagtgctttatatgaattatttcacttagttctcacatcaaccccagaaggtactaacagaggaggaaattgagcttcacagaggttaatttgtgttgctttacacgtggtgaaacaaggattcaaatccagactattcattcaaccagtatgtaatgactgtctatgtgccgggcatggaagttacaggataaacactgcccagtccctgctctcctgatgattatgatctgtgggtctttttgattccaaagtccatggttttgacaatgacactatactacttctctaaatctgtgcaaaagggagtcacattttcaaaggcgattcctcctaacagaaacctgggcaggtgtctttattcccgtcttcctttccctgtgcttactaaaatcaaatttctgttgtgtgttcagatcaattccgtgcctttaagatgtataaaaagcatctggaagaataggctgtgataaaagacaagggctccagccctagctagctcacttactagctgcctgacctcgggcaagtaacttaactcctctcagtcttaattttcctgtctgaaaaatggatatattactactgcatgtgcttgcagggaaaactaattgagatgataagcccaccatatagcactcgttcaataaagggacgctgttgttattaagaggatcagtaagtgcaagaaaacgaccatgtgtcacggaggtttgtttgtctaggcgcttctgtagtagtggcattctggttgtacagtcgtatacgggtctctctcttcaaaggtgcacgcagtctgattgatccctgtgcctcggaatccgtgctaaataaatattgagtcggtgaatgaatgaacgaacgacaaaaggcaaggtttgtctctcacttaattaagacgttcagatggggagaaggtccatcacccatgacatcgatacaatccccctactaatcaagttagccacttcaagtttcagtgaacttaaactacaaaatgggcaaaaggacacctcatgcctcacagcgcagttctgagatctgataaaacgctagatttgaagcctttgtaaaaaggaacatcctctcccatcctgggcgtgctgccgggtatcgcagacggcccacgcccacactgcagaggccggcaccgagcccccgctccgccctctcttcctggtttttcccggcaacccgcccctccggcgacacgtgacaggggtgcccggccggactcagcccctgattggccgggctgtggaacgcctcgcgattggcccgaggccggcgggcccccgcctccctcctcctcctcgccgcggcccacgtgaggggggcgagtcacgcgatttccgggaacccgtcaggaaggacataaacaaaacaaacccgaggcagcatggagaggggccgtggcccctgcagcggaaccggacccagtccctgagccgcccctacacccacaggtgagcgccgccacccgctgctcggaacccccaggggcctgggctgggggaagagcggaacggggggcggag

SEQ ID NO: 34982 - DNA, 2300 bp, Homo sapien
aattgtctacttaatataggttggttttatggtatgtgaaattatacttcagtaaagctgttaaaacatacacagacaggccgggcgcagtggtcatgcctgtaatcccagcactttgggaggctgaggcaggtggatcacaaggtcaggagttcaagaccagcctgaccaagatggtgaaacctcatctctactaaaaatacaaaaaaattagctgggcatggtggcacgtgcctgtaatctcagcaattcaggaggctgaggcagagaatttcttaaatctggaggaggaggttgcagtgagccaagatcgcgccactgcactccagtctgggtgacagagtgagactccatctcaaaaaaaaaaaaaacaaaaaaaaaaacccatacacagacaacacacacacacacacacacaccccaaaaattaaagaaaaaaaataactctggaagactcaaaacgtcctcattttctttctgtgcctccaccttccaaaccttttaccaaaacgtaactaacaggttcttttccatgcatatgtaaacatatgtatatagtttttttgtatatactttttaattggataatatagataacagttttctgtaacttgctcttttaaaaataaaaatatatggtgggcagtctttcatatttgtacattagagctatgctgcattcatttcaatggctgcagagtcttaactgatatttgaaattgacatctccagtggcacatgcctgtaatcccagcaatttgggagggcaaggtgggcagatcacttgaggtcaggagtttgagaccagcctggtcaacatggtaaagccctgtctctactttaaaaaaaaaaaaaaagaaaaaaaaatcatctctaaaattcgtgaggagtattttactctgcctgcccaagtgttgttataaggtcttgcaaaagatcttaccattctgtggttgaattccaactctctttggattgctctttgcctctatatttaagttcccactaaaaagatatcctcttctgtaatgagggtgtctttattattttcattgttaatattttaaattcttctctctcacttatcacattgtttgctttttagttgaagtgtctccccctgcccccaccctaccaccactaaggagatcccaaaatccttctaagataaggaaatgtaaacttttttcaggcagaatgtttatggtaaactcaagagcccttgatatttggatcatacctgagcctctcaagggacacactttccgtcttttttaaatttaatttttaattgatttttgtttgttttattttcattctactttttcttgcctaaggaaatgatgacattatatgaaatgataaagcgtcctgtcagtagcctttatgttaaaacagaccaaaagtcaagtattgatttatcagtttgacatatggaggtgaatatttccttctgaaatatgatgtgcaatttcttttttaaaacctttctcaggatagagagatgaactaccaacagaatcctagagacaactttctttctttggaggactgcaaagacattgaaaatctggagtctttcacagatgtcctggataatgagggtgctttaacctcaaactgggaacagtgggatacatactgtgaagacctaacgaaatataccaaactaaccagctgtgacatctggggaacaaaagaagtggattacttgggtcttgatgacttttctagtccttaccaagatgaagaggttataagtaaaactccaactttagctcaacttaatagtgaggactcacagtctgtttctgattccctttattaccccgattcacttttcagtgtcaaacaaaatcccttaccctcttcattccctggtaaaaagatcacaagcagagcagctgctcctgtgtgttcttctaagactctgcaggctgaggtccctttgtcagactgtgtccaaaaagcaagtaaacccacttcaagcacacaaatcatggtgaagaccaacatgtatcataatgaaaaggtgaactttcatgttgaatgtaaagactatgtaaaaaaggcaaaggtaaagatcaacccagtgcaacagagccggcccttgttgagccagattcacacagatgcagcaaaggagaacacctgctactgtggtgcagtggcaaagagacaagagaaaaaagggatggagcctcttcaaggtcatgccactcccgctttgccttttaaagaaacccaggaactattactaagtcccctgccccaggaaggtcctgggtcacttgcagcag

SEQ ID NO: 34983 - DNA, 2300 bp, Homo sapien
agttcctggcacataggaagtgctcccaaaatgtgggctagtagtagaataacagcagctaacgggcattgagatcttactatatgccacattagcacactgtgcttggtgcttttcatgtattttctcatttaattctccaacctgtgaagtaggcgcaattgattatcaccagttagcttccgaggagacagaggcacaggcatgcgaagtgtgtggtggacaggatttgagcccaggcagatgccaagcctgtgatacactgcctctctattaggtgcagtggggtgatgaataccttacgagagggtgtgtagagggctgtagggacacagacaagcacatagccccgcttacaacaggtggggaccatattgattttttggggaaaagatggctttcagtagaggctgtgccactttctttctttcttttttctttttttttttttttttttgagatggagtcttgctctgtcgcccaggctggagtagtacagtggggcgatctcggctcactgcaagctccacctcctgggttcacatcattctcctgcctcagcctcccaagtagcggggactacaggcgtccgccaccacgcccggctaatttttatatttttagtagagacggggtttcaccgtgttagccaggatgatctcgatctcttgacctcgtgatccacccgcctcggcctcccaaagtgctgggattacaggcatgagccaccgtgcccggcctaggctttgccactttcaagataggtaatcttgcaacagggttgattgttttttgttttaatttactctaagccctactcctgatctgtgataatagtgtagtacaatttcaagggtggttgtgaggattaagagagatgaacatggtcgggcacagtggctcacgcctgtaatcccagcactttgggaggccgaggcgggtggatcacgaggtcagttcgagaccaacctgaccaatatggtgaaccccgtgtctatgaaaaatacaaaaattagctgggcatggtggcacgcacctgtaatcccagctactcaggaggctgaggcaggagaattgcttgaacctgggaggtagagtttgcagtgagccaagattgtgccattgcactccagcctgggcaacagagcgagactccgccacaaaaaaaaaaaaaaaaaaagagagagagatgaacattcaagtcctaagcctttaggtcctcacaatctatgcttgctgaagtgacccgaacaaatgcagatggagtggggtcgagtgggggaaacgctttctagggagagggaacaccacattctaaggctacacatccagaaggagcttgagcaatccaggaagggcgcagggtgcggtggctgatggccggggtggctgatggccttgaggaccagctaagaaacttggattatttactaacaaaaataaaagagccaccatttgttgagggtttgctctgacatttccatcaaaactaccttagcaaggtagatttaataaatccagttgtatacaaaagggaaacacgagaagccatagaagggctgcatacaggtaggtgacttgatcaatttcgtgttttacaaagatcccttagatcatgtgttggagtgataggaggtactctaccgacctgccttgaactccatactttaaaaaatatatgacgtttatcatttcctcttttactccacaatttatactcactgtagaaaatattaaaaatataagaaagtttgaagaaacaaaaaattattactggtactttccagagacatctcaattgatacttttcttccagtctttttttttctatgtaaaaaatatatagttattagaatgcctgacagaaggaagatggaaagagaccactgtgaagcgttcttgatattccctcttcccttcctctccatgttattagggccataccaagaggagaggctgatttccctacacgtgtcagggaaagtcccaactctgcgcagtgaccctcgcttgccattttcgccggtctctagggggcgctgccccgagactgggtggggagggaaagaaggtggtgcgaaaacgcgtttgaacttgggtcctgccgctgcccgtagccggcgtccccaacatggcggctccccaagacgtccacgtccggatctgtaaccaagagattgtcaaatttgacctggaggtgaaggcgcttattcaggtactgatcccgggacccctgccgggctccagcagccctaacccaagctctgctggtctgtgagcttggcagtgtcactcccgaa

SEQ ID NO: 34984 - DNA, 2300 bp, Homo sapien
atatatatatatattttaatagagatggattttttgctctatgttgcttgagctggtcttaaactcctgggctcaagcaatcctcctgcctcagcctctgaaagtgctggggttacaggcatgagcccagactattgtgttgctttcagacagaattgggattcagcttctaattgtttccaagttcagaatctagatcagaatcagaggatgaagaccacttgtgggtctgggggctgctgagaggaaacacgtatggagctgactatggaggggtcatgtttcaaggctgccatctgggcatccaaggatcctgcatgcagctcatgggtagaggggcccacagcagcccctcaaagtgaatagggatggcacaggcccagggctggaactcaggagttggaaggatgactgcatctgcacacttaaaaagatgctgtccatctgtatcctggaatcctgtgtaggccctctccctgaggacaggaacagggttggctccttggcctctgtttagcctcatgagtagttcagtaaaagtcctgcaaacttgtcattatctggagacattcctgccggctcctcttcatgcccctctacttgaagcactaggcagttgctttatattgttcatgattcttcttcagttattcaaatttgagataattgcattcttttagggaactctggatctcctggtcactccaagggttgattactgttctgatggtttttctggtttcttggtttcttcttccttctttatttcctgagggtttctagtaatttcagtctgatgtcttacgttctccatttttattcctgagttttctcctggaattcttctcactgcagccacaggacctaatgttgggttggcagagaactagcacttactctgccctagtgggacctaggagagtcaggaggtacctgagtgtggaaacatgcctgctcctctagacttctggaggtctcttagaagtagcagtttgaatagtggagatgtttcccctgctgtaccttcagtgagggtgaggtgggtgtcatggatctgcccatctgtattagtctgttttcatgcagctgataaagacatacgtgagactgggaagaaaaagaagtttaatggacttctgacatggctggggaggcctcacaatcatggcagaaggcaaagaggagcaagtcacgtcttatatggatggcagcaggcaaagagagagcttgtgcagggaaactcctgtttttaaaaccatcagatctcatgagactcattcactatcatgagaaaagtgcaggaaagacccacctctgtaattcaatcatctcccaccaggtacctcccatgacatattgtgagagttacaattcaagatgagatttgggtggggacacagccaaaccatatcaccatccctggatgggtcttgtggcacctggtcttgtggtattggggttttgtattaggcctttcttgcattgctgtaaagaaatacctgaggctgggtaatttatttaaaaaaatgggtttaattggcttaaggttctgcaggctgtatgggaagcatagcagtatctgcttctggggaggcttcaggaagcttccagtcatggcagaaggcaaagggagcaggcatgtcacatgacaaaagcaggagcaagagagagattgagtgagagctcacttaccactaaggggatgacttatgccattcattagggatccacccccatgatccaaacacctcccaccaggccccacctccaacactggggattaccattcaacatgagatttgggcagggacaaatattcagactatatcaggtctaaagacttgagcttttttggccagcacagtggctcacgcctgtaatcccagcactttgggaggccaaggcgagtggatcgcctgaggccaggagttcaagaccagcctagtcaacatggtcaacctccatctctactaaaagtataaaaattagctgggtatggtgacccgtgcctgtaatcccagctgtttgggtggctgaggcatgagaattgcttgaacctgggagttggaggttgcattgagccaagattgtgccactgcactccagcctgggtgacggagcaagaccctgtctcaaaaaaaaaaaaaaaaaagacttgtgcttttcatataacatggcccccaaagcccaccagcaactctgttgttgcttaacagaggaagacagtctgttctaaagctggtagaaaagctggccagttggacccctgagaaacagtatgtctgtgtcctgtgtttgcc

SEQ ID NO: 34985 - DNA, 2300 bp, Homo sapien
cccccccccgcccgcgctcgaaaacaatcttcaaaggcaaggcgggcccccaagctaggttaatttacagccataacggtaacgtggccaaaagtccaggcgaggaagggccgcaaggccgctgacatgcagctccgtccaaggagaatttgggttgggaggtgaagaggtggggggacgaggtttcctgggccttgaacgccccacatttaagaaaaggcatcctccacagactagactaacaattccagacccccagtagtccctggctcagaaactcgaggcgtgatttcggcgtggcagcccaggcctgttactgacggctggcgcctagaagccggggtcagggcgttgcgcgcctcctgggctgccctgcggggctcacctctctccccagcatggaggccccaggtcctgggagtgtggctttgatgagggacaggaaaagtcccaacatcaggccaatgcttgacttcacttgcgtcggcgtctcagacggcacactgtcgggtttgagcacccaagatgtacgttctggacagacactattttgtccccatacatggagcgtttcctccgcaccttgggcgcgcctgcgggagctgtgtctttaggtagtttttggccctgcgccgcctttattctactccaagcgcctcttgccaacccgcactccgcaaagagccaagccctccacatccccattctcagcaagtccacgcgtcccgcccagcttcccgcccgcggttccctgtaccagctagggccgtgagaagccaacgcttttccactgacaaatcctgtcatccccagctctagaaggcgtccttaacctgggcccgctctgcctgcccggactcctgaattgtaagcaaaataaaactcctctctgcagtgttctggggaatggagaagaccccaagctttcatcagacctcccaaggagtgcggggacccagagaaatgaggccacccgggcaggatctggccatgtagctggcgctcctgaaactctggcagatttgtctgacttctgtgccctactctactgaccctgggctaaaaatgatcatgatcaccccacttgccctgcccttcccccacgcgcctgaccgagccgcaggggtgccccactggaagtccggcccagaggcctcagagaaatcctggcctagctgggctcagaggagccccgcctccctgagagctaaacctgggctaggaccctgaaacctcgaggttggcagaagcctgagggccttgctgccaggcagggagggcacgggaaggagggaggtgggatcgatggcctccaaacaggggaaacaaggtggctggtagctggggcactccacaagacaggtgtctcctgggaagctgagcttaccagctgggattcctgatttatttcattattaaggggagaggcatttccctgggagggtactggcagtgactgatgccccctggagttgtgctgtgcataacactactgtaggaggcagcaactcctaccccacctggccatcactcaccttgcccttactttcgttgactcgcccagaagcacccagagcctgcggcatgactgaccctgtaggccaagccaaaccaaacccccgaattgtccagaatctcgccctgctgctatccccaaagccagccctgtcctccaggcttctcttcctattcagactctccctcatcccaccaccttcagtaataaagccttcctcaaatcactctcctccccaccgcttcccaccccatccttctctctcccatgctggtttgggtgctgaggaatatttcttcaaacccacacccatccagccctgcccagaggcctgactctgcatgcctctggtaggcttttcaggctcacattagggagcaaacgcaggctgcaggagcaaaaggagacccttccaaatgcgtcgtggcccctttaaaaaagctgggcagggctttttttttttttttttttttttttttttttttttttttttgccgtatgactatattaggtgacacgaaactgctcatcgctcctgtcatcgaggcccctggcccaatggcaggctgagtccccctcctctggcctggtcccgcctctcctgccccttgtgctcagcgctacctgctgcccggacacatccagagctggccgacgggtgcgcgggcgggcggcggcaccatgcagggaagctgccaggggccgtgggcagcgccgctttctgccgcccacctggcgctgtgagactggcgctgccaccatgttccccagccctgctctcacg

SEQ ID NO: 34986 - DNA, 2300 bp, Homo sapien
aggcctctagttctccgcccccaggtcctccccttgcagcagaactctggcatatccctggcctttcctgagtctgaatccctcatcagagtggcagtgcagcttgctgggaggcaggaacacagcagctcagcacctatgttttggggccccatggctggattcaaatactagcttactattagctgtgtaaattactagctatgtaactacgggcaagtcatttttctggccctcagttttgccacctgtaaaataaagataatagtttctatgtcataggatgtcgagagggttgcatgatctcggtggctagcacataaaaatcactcagtgatgatagccgctgtatcaatattgttgtgattattattattaggctttggggatgaaaagatgtcttcagcaaaacatctcaaaatccacaaatttaagagagatgactcacaacctgaaattccattttgtcactcctttatctctctgctttctcgtctcttcggcaccttcttgcaaaattgcccgagcatctgccctgtgtggatgagcagcatggaaatggacagccagaaatcagacaaggaaatggaaaaagctatagccacagacagcagctggaaaatcagactgggatgcaagtgttggcatctgattgaatgggtgaatgcctatggagctctaaaacaggcctgggttagaattctgcctctgccacttatgatctgtgtgacttttggcaagaggtttaacctctctgagccccatttcagctgtaaaatggggagaataatacctaactcatagggcttggaaaggattaaatgagataatgtatgtgttcttggcagaaaatagatgcccaataaatgtcagctccccttcccgggagatgagtgccaagccaagcagtggagtgggttacctttaccaaacacaaggataaagtcaagggtcttgttccaagcacagcccagtgaccacttacattataagcactgaggtctttgtattaggactgaggtccttacaatgagcctctagctagcaactccgtagctaggatctggggagctgcctttaacaagaacacacggattgcctagttcatccctagtcctggggttctgtggttcatgagacctagtgctcacccaatgaggtgcccatggccctatttcttttttcttttcttttctttttttttattatactttaagttttagggtacatgtgcacaacgtgcaggtttgttacatatgtatacatgtgccatgttggtgtgctgcacccattaactcttcatttaacattaggtatctctcctaatgctatccctcccccctcccccatggccctacttcttggctcctcacccccccccccacccacaaggagggggccagctgtattcattcccacttcaccaaggcagctgatggaggagagggacagagagtgtgttggtcgagagcaatccctctgaacctttcagacactccctgtcctaacctatccttgcagatgaggattcagacatcccagagaccatgaacctccagaggcctgggagcatccaggtctcaatggccacactgacatccttcagcttggcacctgagcccacttgcccaccccgacatcctttgtacctggcaggtgcctcagcagacagcaagctcctccaggatctcagccttcagagttggccaaggcaggagcatttggaaccaggacaggcttgatttggtggctgccccagggacaggcatcctggacttggctacccagaagaccacatctgccagggcaagttcgagcactctggctgggattttagggcttcccacgaagcgtcctcctccccagactgctctgattcactcacccagcaccaggagcaaatcctgtacacacaccacatcccttcctacatccaggcctttgttcacgttgtcccctgaacctagaatgccgagatcctaatctccctactcagttaccgcctgatttctcagaccggctcaagccccacctactccaggaagccctcctggcccccttatctgatagcctgtagtagctactgtctagctcacaactcgaaacctctgatcatgttctgtagagtacacccgctcaactgatccaatgcaaccaatacagtattggaagctttctacgaacaaggcacccagagagggctcggaggaagatgacagtgccaacgggcacagggagaatcgtgagcttactgcaccttcccagcaggcagagtgagcccgtaggacaagagccccctt

SEQ ID NO: 34987 - DNA, 2300 bp, Homo sapien
cattaccgcagagggcgcgggcggggcgcggggcgggggtgggggatcgagagctggtaccggggctcacctgttctccaggaggagggtggggacggggggaggggcgagtgcgcgccaacgccgggtgcgtgccctggggcgcttgggcgcggcgctcgtgtccccgccctcccccagccctgcgagccccccgagctgcgccgtggggtgacgggaccgagagcagttcctgtccccggccccggcgcgggggagacgtgagcgtgcacacgtacacacacagcaggggaagaggcgctccaagcggcgcccaactttctccttccctccacgggccgggtgagaaagtagccgggggctatcccgacccggcggttcttggggagggggccgaacaagaaaagggaggagatggagataacttccccggatttagcttttttgtctttgtttttgttctcaccacttccatcggatgactggagagtaaaagggaacccggagcggggtggcgagcagcgctttgagaaaatgcaggagtgtgtttggagacgcgtaaagttgcctttcaagctctggcctccgggcacgcgatgctccgcggcgggctgactcagggctgccttgggcctccctgccaccctcctggaaatgatgcaagtcctgactgtcacctggatccctgcagcccagcctggaatgcgtctggattaggggaaagacgagaaacgacactccaggtgttgcacggcccaccaaagcgggaagatagggcagttgctcagaccaaatactgtatctagtgcttctgctcctatcttcaatcgtggggttctttttaatgcaaagtgtcacaaggccaggaattcccatgtgtgctcagttggcccacagcatcattgtgcctaggaaactgcttcaatttatcaagtcctctgggctgggaatctcactgaattccaaacggcggaaagaggaaactttcccaacccgatgtgggtgtgacgcgagccaggggccccagggacactgtcccagagcacaccgtccccctttaacagcaactggagcttggattcgctcttatattgtacagtcctttcgaccattgccctggagcacccgcacacgcgcacgcatctccggccgcgctcacacacactcatacacacgcacgcaaacgcgtggccgccgccaggtcggcaactttgtccggcgctcccagcggcgctcggcttcctcctgtagtagttgagcgcaggccccgcctcccggccgtgttgtcaaaagggccggggtctcggattggtccagccgccgggacaacacctgctcgactccttcattcaagtgacaccagagcttccagggatatttgaggcaccatccctgccattgccgggcactcgcggcgctgctaacggcctggtcacatgctctccggagagctacgggagggcgctgggtaacctctatccgagccgcggccgcgaggaggagggaaaaggcgagcaaaaaggaagagtgggaggaggaggggaagcggcgaaggaggaagaggaggaggaggaagaggggagcacaaaggatccaggtctcccgacgggaggttaataccaagaaccatgtgtgccgagcggctgggccagttcatgaccctggctttggtgttggccacctttgacccggcgcgggggaccgacgccaccaacccacccgagggtccccaagacaggagctcccagcagaaaggccgcctgtccctgcagaatacaggtaagtgcatgtgcccccgcagccgggagctactgggagaggacaccgtgcacccacgcggcgcgccccaggcgtttcgccgggagccaggcgcccacccagggccacgcaaactcttgggatggcacgggacgtgcaaagggaagcgcgaggcaaggcgaggtccgcgccgggctccgagggcccggaatctgcacgtgctagcagggtgatgaaatggctggggcaggacttgttgctgtcctccccagggtcgaggggaaatgaagcagcgtctgacgctgccagcgccagcccccgcccccgaatcccgggtccggtgcaaagcgcgcttcatcccggccggcacgcgggaggcccagagggtccccggagctgggctgcgccctgcgcccggagaacttctcttcctggcctgccggcctcagtaagggtgccgcgtcttccccctcctcaaaagatgcccgacatcccagaactttgccggcgagacaaatggcattgcgaactttccccctggg

SEQ ID NO: 34988 - DNA, 2300 bp, Homo sapien
ttaatgtcaatattgctcatgttctctcctacaaaagaggccacatagaaagaaagtctacccagctgtacccataagcaggagtgggaccaaatggctacttgttctcaggaaattcagagccttaaagagttagttaggagaggccagaatgccgctgtgtcgtttgtttgctttgtttttaaggatctacaggaggtagttttccataaactaggaagctaagttaactatgcaaacacaagcagggtgggcaatgtgaactggccgttttaatgtatttgtacccgcacgtccttgcacaaaagatccaaggctgcgcggagtaattgctattagaatagtgggcatggtccctaccgccgcaggttcggaccttcaaagtgacaatttatggatgctccctggcgctccagcgcaggggaagcccactctgaagacgccctccccaccccctcctctccttccttccgactcaggagagctcgacacgccggatagctgcggccagccgtggccatcctggccccccgcctccgccttccccactcccgcgtgcagccgggacacgggaaaggaaagctttggaagtcaagcgccggccaaaagatgacctgcccgcgtgtctcctcgccccctcccccagccgtgtcacatggcggccccaaccaggcgggcagtgcgccccgccgcggagacccagggccgcgtcgcctgggcagtgggtgatgaaacttcccaggcgcattaccgcagagggcgcgggcggggcgcggggcgggggtgggggatcgagagctggtaccggggctcacctgttctccaggaggagggtggggacggggggaggggcgagtgcgcgccaacgccgggtgcgtgccctggggcgcttgggcgcggcgctcgtgtccccgccctcccccagccctgcgagccccccgagctgcgccgtggggtgacgggaccgagagcagttcctgtccccggccccggcgcgggggagacgtgagcgtgcacacgtacacacacagcaggggaagaggcgctccaagcggcgcccaactttctccttccctccacgggccgggtgagaaagtagccgggggctatcccgacccggcggttcttggggagggggccgaacaagaaaagggaggagatggagataacttccccggatttagcttttttgtctttgtttttgttctcaccacttccatcggatgactggagagtaaaagggaacccggagcggggtggcgagcagcgctttgagaaaatgcaggagtgtgtttggagacgcgtaaagttgcctttcaagctctggcctccgggcacgcgatgctccgcggcgggctgactcagggctgccttgggcctccctgccaccctcctggaaatgatgcaagtcctgactgtcacctggatccctgcagcccagcctggaatgcgtctggattaggggaaagacgagaaacgacactccaggtgttgcacggcccaccaaagcgggaagatagggcagttgctcagaccaaatactgtatctagtgcttctgctcctatcttcaatcgtggggttctttttaatgcaaagtgtcacaaggccaggaattcccatgtgtgctcagttggcccacagcatcattgtgcctaggaaactgcttcaatttatcaagtcctctgggctgggaatctcactgaattccaaacggcggaaagaggaaactttcccaacccgatgtgggtgtgacgcgagccaggggccccagggacactgtcccagagcacaccgtccccctttaacagcaactggagcttggattcgctcttatattgtacagtcctttcgaccattgccctggagcacccgcacacgcgcacgcatctccggccgcgctcacacacactcatacacacgcacgcaaacgcgtggccgccgccaggtcggcaactttgtccggcgctcccagcggcgctcggcttcctcctgtagtagttgagcgcaggccccgcctcccggccgtgttgtcaaaagggccggggtctcggattggtccagccgccgggacaacacctgctcgactccttcattcaagtgacaccagagcttccagggatatttgaggcaccatccctgccattgccgggcactcgcggcgctgctaacggcctggtcacatgctctccggagagctacgggagggcgctgggtaacctctatccgagccgcggccgcgaggaggagggaaaaggcgagcaaaaaggaagagtgggaggaggaggggaagcggcgaagg

SEQ ID NO: 34989 - DNA, 2300 bp, Homo sapien
ctcccccatccttcatggtctaacccaaatatcccctcccccaaaacctgccactcagtgttgaccgcatgtaactagcaaagtggatttagacaggaaaacatgggctccaggcgtcaaccacagaaggccctggatgacacaaggtaggtcatgtctgcctcttcctggctgtgtatgcgttaaattgaggaggagggcccatccagacaggtgctgctgaacctcaggacagcagctggtccatccaggagacctcccaggcctcagttcccatctagggagggccctaggtctggagggacaccaaaggcatgagtgtggtgtgtggtgcggtgtcatgttagctatataatagtaataatgattattattactgtcccctgccccaccctcatcagccacagtctgccaaacttggcctcagttataaagctaaaggaatcagccagagagagggggagtcaatcacaacaaagtcaccagtctgagcccccatcccacttctacccctgcggcctagactggccatttcagcaaactgcctagtgattctgcaagggaattttcacagccttggcgggtcggactcagatgggcattcttatctggatgctttggacttggctaagtggcccagagataaacccttaagaactagtgcctgtgcttacgccacctccaattctagctactatgtgttcttttggttctaaaggggcagttggctcaggtgaaaaccaggaatgtcccttggaaggcaggagcaaacagcctcaggacgaactttgaaactatgtaggtcctctgagggcagccccaggggccccatggtagcaaaaggtaggcctagccaaaggctgggcaaagcaggagcagggagagctccatccccctggccatcgctccaggtatcctgggaggcctctgcccagcacactaagtgtctgcatctggcaaaagagggcttgctcctgccccatggagctctctcctatttctgcttctcaaaaaaaaacaggtgaccagatgccttcttaatgtcaatattgctcatgttctctcctacaaaagaggccacatagaaagaaagtctacccagctgtacccataagcaggagtgggaccaaatggctacttgttctcaggaaattcagagccttaaagagttagttaggagaggccagaatgccgctgtgtcgtttgtttgctttgtttttaaggatctacaggaggtagttttccataaactaggaagctaagttaactatgcaaacacaagcagggtgggcaatgtgaactggccgttttaatgtatttgtacccgcacgtccttgcacaaaagatccaaggctgcgcggagtaattgctattagaatagtgggcatggtccctaccgccgcaggttcggaccttcaaagtgacaatttatggatgctccctggcgctccagcgcaggggaagcccactctgaagacgccctccccaccccctcctctccttccttccgactcaggagagctcgacacgccggatagctgcggccagccgtggccatcctggccccccgcctccgccttccccactcccgcgtgcagccgggacacgggaaaggaaagctttggaagtcaagcgccggccaaaagatgacctgcccgcgtgtctcctcgccccctcccccagccgtgtcacatggcggccccaaccaggcgggcagtgcgccccgccgcggagacccagggccgcgtcgcctgggcagtgggtgatgaaacttcccaggcgcattaccgcagagggcgcgggcggggcgcggggcgggggtgggggatcgagagctggtaccggggctcacctgttctccaggaggagggtggggacggggggaggggcgagtgcgcgccaacgccgggtgcgtgccctggggcgcttgggcgcggcgctcgtgtccccgccctcccccagccctgcgagccccccgagctgcgccgtggggtgacgggaccgagagcagttcctgtccccggccccggcgcgggggagacgtgagcgtgcacacgtacacacacagcaggggaagaggcgctccaagcggcgcccaactttctccttccctccacgggccgggtgagaaagtagccgggggctatcccgacccggcggttcttggggagggggccgaacaagaaaagggaggagatggagataacttccccggatttagcttttttgtctttgtttttgttctcaccacttccatcggatgactggagagtaaaagggaacccggagcggggtggcga

SEQ ID NO: 34990 - DNA, 2300 bp, Homo sapien
ccaaacattaattttgttaccaaacacagtggaacaaaccaaagtgtttttttccagaaaaaaaaaaaaaaaatagtagaccagcttgaacctgagctgaacccgtatattttctaaaactactgaacaggaacaaaaatcagatgccaaaatgttctgcaaatgaaaccagcctttcactctatccaacttcttgatttggaaagcaaatcaggcaggcgcagagggaagaggagcatttgacttccctcgagtggagtgtgtaatcctgttctaaggaacaccgtgtgaaggttggagactggcttctgttcaatgtggtgggaaaaaatgttatttttattttaaccttccataaagatgaatcagaaaatttcagagcatttagttcctgtggtgttgatgaaagcatttcaaggattgatccattataataatacatcctgaaactatcagctgaaaggacagggccttgggtcctggccccactgcctgagtggccttaggcatcttagaggggctggggtcaccaacaatcaaggtcaggtgtggctctcgacagcctgacttggttgggcatggagtgtccacatgggtatcatcttttagaaagtttgattcacacaaaaataaaggcaaccagacttcgtgccccaagaagagaggggctgagccggctggacttgccttcctgatctcattctcccagctgctacacaagcgacactcagagtcccagagcaggaaccagaaagcctatctgcagagagtctctcaccctagctccaaacatatgcggaccacgccaatcccagggcctgaagaaagaatgcagtgtggacaataaggagctgatagaaaagaggtcgggtgaaaagccacaaccatcagcagtccacaccttcaaagcatgagccagtgaaaaagattgttccattggccaaagaccaaatacatctgttttaaagactaagggcaatcaaaatgttaacggtagggacttctggggcatgggaatgcagaggtaggggcaggggagaggacttctgctttctatgttacacttgtatctcccgtttggctccttcataaggaggatctgtgcattgcatttataatgtttaaaataaaaggctaaaatgcaacatacatacacggctaggcatatgtcaaaggcagaaaccacaaaggaatgatgatggatttgactgcataaaattaaaaaacttctgaatataaaaaaggaaattaccttaaactatattaggagaagaagttgtttataatataaaagatagtagatatttattatccttaacatataaaaaacacttagggaaaaaccacactccaatagaaaaatgagcaaaagatgtaaataagcaattcatgaaagaagacacacaaatagacaataaacatgaaaacattcattcacactaataattcaggaaacccaactaaaagtcaaataacatttttgcctatcaaaccagcaaatatgcttaaaattttttaagcacttgttgataggaggccagacaggaaaacaacctcatacactgttctaggagggtaaattggtaaagccttttgggaaggcaatattgcaaaatctactaataacttctaaaatatgcataaactttgtcatagcaattccatttttaagcatttatccctaatgaaaatcatcatggctaaagatacatgcatttaggtgttcagtgaagcattgtttatacaagcaaaaagttggaaatagcctcactgtctaaacaatgaaggactgacttaatatattatggcactacgcacagggaataactatgcagctattaaaatgttgatagacaaaaaaaatgaaacaacatggaaattttcatgatatattgttaaggggaaaaagctaattacaaatggcatgtataatataaaaccacttttataaataaatatagatatatatctgcttttaatttttaaatatctgattacaggcaatttttatgttttcctcttgtaattaaaatgttttatttgttaataaaaaatgcccggtgcagaaatgcatccaaggggaggaggagccaagatggccgaataggaacagctccggtctacagctcccagcgtgagcgacgcagaagacgggtgatttctgcatttccatctgaggtaccgggttcatctcactagggagtgccagacagtgggcgcaggccagtgtgtgtgcgcaccgtgcgcgagccgaagcagggcgaggcattgcctcacctgggaagcgcaaggggtcaggg

SEQ ID NO: 34991 - DNA, 2300 bp, Homo sapien
tgtggagaaagatcacactggccgtgatgtggagggtggacccgagtgggacagaggaggaggtggggaggtcagggcattccaagtgatttaaaaagcacattaaaaaatgcatttccctagttaggggtccatttacccgaagaggtatctgggattgttctgctcccagctgtgtctggtagagtggaattcgtcccaaagttgctgttatatatcacaccaaatgtctcccttgcaaaggtgcagcgccagtagaaggcctcaggcaggcttggttgcaaacaacagaaaccacttgtattgagtttaagcagaaatgggatttatcactggctacttgggggccccagcatcttttgaatgacctgggaactgggctctagaatatggcccaaacgtgccacctactgcagagcagctccaggaaacaacacggcagcctgccctgagtagggcaactgcaaaggggcttccaatgtcgcctccccgccagggtggagcccatgggaccttgcttcgtcctggagcccctggctctgaatctgagtctggtgcaggtacatctgtatggtgagtttggtcacatgcctgcaccctcctgtctgagaaatagagtttctggctcctctagacagtcagggactgaggaggcaggagctccccaaagaaaagatgtttgaagcactggacaagaagaaagcgggacgaatgttcattacaggtaaataaaggtaaattactttaaagctcagaccgtcaggtatcccaaggagagacggcatgcgtgtgagtgtcatgtgtgtgagtatcatgcatgtgagtggttccatccttaggaagaaaaacatgggaggaacctgcagtgtgcagcctctgtccagacccacctgctgaggggcccaggcaccccaaagtataccctaaatatgatcagatccagggagcattgtgactgagttttcaggttagcctctgtgcaacctgacttcccatgggcagggtggagtgctgggagcattgattcaattcttcccttgagcactcttcacccccatctctctccagaaatgtaccgagagtctaactgctctatactctgggaggaacacgaacatgattccacctcagttccaagctttctgagaaccatcctgggaaccagcaagcatgacaactctccaccttctgcatcagtcacttgcaaggaggccagtgggcacagttcatgctactgagtgagatggcgcccagaggccaaggccaagggcagggctgcattttctggttcttttatatttgtagcaagatactcttagtggaagagcccaatatctgggcttgcctaaaagtctccttagctagatcattcaatttatgagctttccatcttgttgcagtgttgcttaatttctgcctctccataacaagaatcacctttcttccagtctctaatgcattgttctcactttcctataaaccctcaccaacattctcctcccactactggcttctccagtgccctttaggctttctctgacactttcttcaaagtcctttcagcttctgccctctgctcagttccaaagacgctcccacattggtaggtttatgttccatcagcaccccacttctggtactaagctttatatcagctatctactgttaggcaacagccaaaacttagtgacttaaaacagacacaaacatatattatctttcacagtctctgtgagtcgggaattcaggaacagcttagctgggtgttctggctccaggtctctcatgaggttgcagtctagatatgagctgggacagtggtcatctgaaggctggaatgaggctggaggatccacttccaaggtggctgactcagatggttggcaagttggtgccggctgcggcaaaggccttgttttctctccaggtggacctctccacaaggctacttgagcagcctcacaacatggtagctgcttccccagggcaagtgatccaagagcaaaggttgaagtcacaatgcccttatgacttagccttggatgtgacacaccatcacttctgcagtattctactggtaacactgaccagctctgattcagtttgagaaaagaggacacaaaagcatgaataacaggaggtaagtttcactgagggcctgtggatcatctgggagctgtctaccaccaatagtcaaaagaaaaaattaggtataaatatatgcatacgtgtgtgtatatatatatgtatgtataattttaaaaatatatatttattataaaagtaattaatattatttg

SEQ ID NO: 34992 - DNA, 2300 bp, Homo sapien
gattatggctacacataatcctacccacgcactctgtgatgctatcccacagctttaggaaacagacaggaatttatacattctctttgagctaagaactatcgtgctaagagctggagacacagtgatgaacaagtcgtggtccccattctaaatattacaccctatcaggggactcaggtggccaatttgtctgtaaatcattcacttccaattataataattgctacaaaaaatgaggctttgagtttctgtagcatggaggaaatatctcattggatctaggggtcagaagaattttccctgaggaaggagagtaagatgtggggtgccaaaaatggagaagggactagtcagagtgatcaagggcttgcagaagaaagaacctggggctgaggcagcctgaactgggcttctcctggggttaaaggtgagtgatcagtgtagagtcaaccagtaggaacagacattaggtaatctcaaggatggtgagctattaagagagaatgtttgtcattaactgacccattgtgaatgattgagctggtgttagaggatgagtataatccaacacctgaatgtttcttttgagggttaatttaaactctcttggacaggtgtggtggctcacacctgtaatcccagcactttgggaggctgaggcgggtagatcacttgaggtcaggaattcaagaccagcctggccaacatggtgaaacccccatctctactaaaaatactaaaattagccaggtatggtggcatgcgcctgtaatcccagctactcgggaggctgaggcaggagaattgcttgaacccaggaggtggaggctgcagtgagccaagattgcaccactgcactccagcctgggcgatagagtgagactctgtctcaaaaaaaaaaaagaaaaaaaaattaaactgtcttgagtactaaatattggtgtggagaacatcctggatctttgccaattctgcatcttcgcaggagccaaggatattgcagaatttgctatttacatcccctctgctgcttgtgtaagatgaggaaacaacaatagcagacataattgctgaggttgggagggggagctgagctaacaataggcaaaagatgaagggaagagaggataatggtggcagctataggattccaatggtgaattgtggctacttaaaaaaatcaggatataaagccttacctattgtgggataccaactagctctcaggatacctcaggctaaaatgcaagatttagatcctcaaaacctgggttcaaatcctacttttctacctctaggtatgtgattaggttaacaaactttcttctgcctccatttctacgtctgtaaatagcaataatagtagtatgtatctgcttttttaaattatcgtgaagaagtgcgtggaaagtgcatagcatcacgcctgacacttttcaattattcaatattggcttatgattgacaatatttaatatttgggaggaaatccacacacatataagacagacttaaggaaaacttttattttcttcttcacacttttccgttattttccaattttctaaaatgagtatgcattgctattaaaaccaaaaggagggaaactcacaaatttctgaacaatagaagtttgactgttccactgtttccggaatttcccggaacatgttgttcaagaaggacgtgggagtgcatgctgaagcacagattgctaggtctcgacccgtaaatactggataaaaatctttaagaaataattctggtaatctatacttttaatcagctccacagatgactgttataatcgggcactgctgggacgtgttgattgaatgggaagtgagcagagagtgggcggggaaggcctggcggggaaggcctggcgggttgcagcgatcacgaggcctgcgcctacagttcccatattaccccgcgaaatcgcgacgagcaagcacgaaccctgccgggagttgtagtttctctcggctaggccgctgcctataaagaacgccggagatggccacagaaaacttcccgccccacaatgcaaaggtcaacgttgacgccatctggggtgcgcctggaatcgagcaggccgtttctgccgcgtccaccacaacctctgctgtatcagagggggccttcgccgccgccgcccccaccaccgcccctgccgccatcgccacctccgccgctgccgccttggggccctcctccttcaccgcccccttcaccacctctacacgttctaggccttctgtcctggagaagaagctatagtcgttctcccttgt

SEQ ID NO: 34993 - DNA, 2300 bp, Homo sapien
cttgccaaagcatttccaaatagcttacctcatttcattcctacaacccaggctttcccaaaggttccttttggcaaggagccttcctgagcctcaggaaggtgaatacctggcctgaggtcccatcctcgggaggggtggggccacccttgagcaactgagtgtccccagggccctgggttgccagaatggcatagacttcttccagccccctctgtccagggacaagtttggtttgcttccccagagaattatcaatgcttgctaccttctcttctctctcctgtctttcattcaacttattaataatatcaatgagtatcaatatcaatgaatatcaatatcacctactagatgccaggcacatcactggccactagggctgcagctcatctctgtctccataagcttgcattccaggggaggtgcaaacacagcctgatgtggtgagtgggctgatggcagaagttcgggaaacattaggggtgcatgggtatggcccccaagggtccaggaaggcttctttccccaaggaggaggtgatgcctgaactgagactagcagatttgtaggaataaattaagcgacagttggggagggtgtccctggccgaggcccagaggtcagcaagccaggccatcgggaaaactcaccccacccacctatccactctgggactcaaccctgcacagtcagtgcctctggaagccaccgactgttgtcggaagggagctccttccagtaccatcgaagggctggctgctgctggagcttctctgggcccttccagcttccctgctgcctggcctacctcctccatctccagggaagcaggattcattctaggcctgatttattagcctcatcctggagtcatcccagatgctgtcgctggtctcatttactgacctgcctgagggtggaggaaggaaattcattaggcctgcagagcccatggccaggcccatctgtctgggcatctgcctcccctcccctcccctcccctctgttctgctctcttcttcctttctctcccctcccctcttattctccccccgccccacaaaggaaggaagctctgtgcctgagtcttcgctcgggattaccaaggcagtgacactacagagccaggtccccaggggaggatcctgaccaaggaggaagggaggcacagaggtctggagaaactcctgtgcagcctccagcactgcaccctgaggctcccccagcctcctgccagatccaggaaacacacattctccatctggggatttggaaagctctctcccgggtacagcagacctgcctgtttttatgcaaaaggtgtcttcctgggcaagttgtaagaaaataagatctcctgaaatagattgctacctttaaaacagaaggcaagaggcagcctcggaggcattttcattcccgacacagggccagcaaggcgatgtgagggaacagagggctcaatgctttttattttcatatgttttaaggatataaaaatatatataaacttataattagcatatctaacccttgatcacacaagataaaattgctttgaataaagctaaaataggtacttacgtttctagaagcagatcaatttaaagaaaagcgtaaggagagttgcagaagagagttacagaggagagttacagaagatacacagtggttgacaaagacactagagtttaggacacattactctgaaagagtaggtcagcgaacgcattgccaaggttaaacttcttgtgagatgaagcaaaccttgatttcagcagcgcatctcacggagggaagctgcaaccccgggtaccttgccaagccggcacctgctcccctcagcctgcagaacagaagccatccaaaacagatcgcatgtgtgcagtgaccccggaggtttaaacaaacatggcctcaggcctcagtaaatgtttagccttagtgactggctggcaggggggtgaggcctgaggccctctgtccctgacagctggcactgtgggggcaggctggggcggtgagggtggggagtgagggcctgggtcaagctcctcgccctgtgctcatcttttctgacctaaggagaggctgacattcttggaggctgaaagaacacatggagagcagtgtttttccagcttctgtgttggtaagagcctggagtctctctctctgtctctctctctctctctctctctctctctatcacacacacacacacacacacacacacacacacacagagcaatcactgcacccagccacctctatatacatgtacacaaagccacaca

SEQ ID NO: 34994 - DNA, 2300 bp, Homo sapien
aggggtggggggtgggtgacgggtggaaggggtggcagtgggttggggggctgtcactcagggaagacttcattgttgctggtttgttcattcacgttttcaggattcattcactgatgtctcctatctacaatgtctgctcctgaaagagcccacggtccagcacaggtctggaagacataaaccatcacaatatagtgtgagaaacaagcacgagaggtacacagggccgtggacgcttataagagagaattcagaagatgctgttggtggcttttgaactgattcctagaaataaataggaatttaccaaaggagaagagtggaaaggacatgtaaaaaggcattgagagtgtgtttggagggggaagaggcactaagatataccacccattaggtagaaaggcttgaataccagactaacaagtttggcctttatcttcgaaataatgggcaaccatagaagaaatcggagcatgtgagggtcaagataaaattttagttttggaattttccctctggtattgcgtgtaaggtgtactagatcgggatgatacgggggcatagccacagacgcctcagctgcatctctgcacctgggagactgcaccagatgcgagcctagcagaatgggagagtgggaggtgcgggtgagcgaatggaaggttaagggagagtccctcgtgaggtctacattctgggcaagggcaaacgcagttctaggcaccgcacagctgctggcaagacccgcctccccttccagatccctctggggcggagctcgggccagagcacgtgatgcttggagcaccacctttactgtgggcacccttctcattcatccgcggtttcacgggccgccacttcgatctccaacaccttgaccgtatgccttcgtgagcgaggaatccgttctccttgacacgtccctattgctcctcctgcaaagcccagttagggaagagaaatatcaaaggagtcccttgcccacacaaaagatggcgacctgctgcgctcactctgggtgggggaagcgggttccaggcgccgggcctcactaggcgaggcgcagacggaagaggcgtctctggaggtaacttttcgaccttcctgggagtagctctgaagcgagggggcgtggcctcgcctgagttctaacagatgattggtcttccggcaggtaggtggggaatgagtgctacccccacccctccctcttcgaaccggaagtgtctctgggtctttccagctggttgtcatttcactcggctcggtcctgaggagaaggactcagccgcggctgcgggacccgggcaccgggaggcggtggcggcggcggcggcggcagcagcggcgacagcagaggaggaagaggaggaagaaggaaagaaaaagaagaaccaggaggagtcctcaacaacgacagcggggactgcgggaccagggtaaagcggcgacggcggcgacggcccagcaaccgtgaggagaaacaaaagccttctaaattatagtttaaaaaaaaattctgggggaaaagagagagaaagccgaggggggaggcccttctcctttaaaataactacggtagtgggtttttcctttttttcctcttttttccctctctgcggagaatcgaactgagggaactgaacaaaccgcccctgggtcccatgagggaaaaaaaccccggagccgcagagaggggaagaggcagaaaccgcaggaccttccaggtcgccccctcggtccccgcacccccaggccgcccgctcaccctcgtcgagtctcgctaatccctcctgatcgcgacccccgcaagagggagaaacgggtgtttccaacccctttcatgggggagaggaagccgcggggagcccaggaacagcgaccgcagcaagatctgcacccggagcctcaggaacagccccagaggccaaaactgcaccctgcgaaagagcagaaaacaggaccaggaacagcagaaacctccctgcaatcatctttccattagtcaatgctgatttcctctcccgaaaccaggaattcacttcccaccccagataacctaatataatctatatatataaatatataatatataatgttcttaaattattcctgatttttttttaaccaagctgccaagaaaagaacgtattcccctcttagtcctattctaatttttatgtgagtgaatctaaactgctgaggaaaaccatatgtgattgttaaattatatatatctatatttttactccgcgcaaggcttattcttctacatccatagatgcttgagaagc

SEQ ID NO: 34995 - DNA, 2300 bp, Homo sapien
atcagagcttttcttagagagaaaatgaatcaataaccagactttattttagcaggagtgtaattggaacaaaatattcagctgtttctttggcagttttctaaattgtagccttaatcttgtcatagataattatgaatacctggtagctggtgatgtagtaattattaactataatacctttcttgcctgacatgagaatcagggtcagttttttccctatttagatgagaataaataatatatagatataaatatatttcattgcagaaactattgaatgttttctgaagtaactatataactaaacaaatttcttttgacactataaggtagtgattcactgaaaaccagctattgaattacagttttctcactggttggttgcattttaaacctggaaactctctgaaccttgtaggtctgaacagcctgaattgatggacttggcaattcctcttaaacctctgcaaattttggcctacctttcatcagtaaggactatctagtgagagaaatgatctaaatgttttcttcatccccatttatttttgaacactgtgaaactgttcatctcagagtgactctttatgcctttcacccgtttgtttattttccaatgttaacattgaagatgtagataattaaaccattcctaaaaatagatccaggcaaagatcatttgtctttcttgctaccagaatatctttattctggcaagagtcattgatgtttttgaattaatgagcagcaagttaggttgatatgaactagataaagggaatttcataggtggttgaacgtcagatgctccactaaatgtatatactttgagggtatgattatatgtgtttaggaaatttataaggggtaagaatctagcattgaatctagttttcccaacaacctcacaagatgagttctgttattatccccattttacagatgcagaaattgaatatgagaaatatataataacttagccaagggtacacagctggtcagagtacaaattctaagttaaaaaaaaaaacaaacccaaggattgaaaatatgtatacatacatgtgtgcacgtacacatgtgctacagctagagggttactttagaaatatttctgcaaaggctgaaacagattatagaatcattgcactgttcccaaatacgatgttagccctagcagaattatctgttttaattagtaattgactgagagggaggggaagtttgctaagagaaccctatgtcattcctttcctaaggattcaggtgcagtgcatcttaaaatatgtgggtatatttagttttcgacttctaaaaacgatttttttttttttttgcctatcaaaaagctgttggcatttgctttaaagggtttcagttgttaaaaccaaagatcaattactgtgctttagtggtcaagtaaaaaggctgtttaagacattgacaatcccatgaagtctatttttaaaaagttgcctttgatattcctttgaacataaatttaaagaaaatttaatgcaaagataagttttatgaattattcttatattgctaatttaaaaattgtaagttaacattcagtacattttaactggattaagatttggctcagaactaaatacacctttttttcttattttgctactatatgctgacacagtgaatttatgtggcctcacagtttggttcccattctcagcttactgacttttgttaagattgctttaggaaaaatgaaaagttcagacaatgaataaaatatacatatatgcacattaatattttttcctattgggctaatagagtgtgtgttatgtgtgaaatctttttgaacagtttctttggagattaagttgatttatgaaataatagttagactaagattgatactaaaatatattgttagaaactaactcttcccttagaactgctgtcttttatattgattatgggaaaaggatggtcagtgtacctgactttcaaatatggtaagattcaaaagtaaattgttaattctgctcctcatccccaccatttgtagctctgtgtgtgtgtgtgtgtgtgtgtgtgtgtgtgtgtgtgtgagagagagagagagagagcacacgcacacatgtatgaggagagagctagcagtggggtgatttgaaagtcacaagagaaataaatgatttgaaaaaaatctctatgacaagaaactcctaattgggttttgaaaaagtctaaagaagtaagtaaactgaccactgtgattcttacttaaatggatacagttctttttgctttttaaaaaccaa

SEQ ID NO: 34996 - DNA, 2300 bp, Homo sapien
gcccagggggagtgcagtggtgtgatcagggctcattgcagccttgacctccacagctgaagcgatcctctctcctcggcctcccaaagtactggtattacaggcacctggccattgatgacatctgaaatcaaaaaaacaggaaaaggatggtgattgggtgaggtcatgaggtgcttctgcagtgcaccatttcttaaccttggtggatcttacacaagtatattcactgtgtaaaaattcagccatctacatagtgatgatttgtgcaggtttctgcatataatttaataacaagtgtttaagaaagtatgtctctgtcactgcctattactttggggaagtaacttcacattttggagccccagttcctctgccataaaatgctacatgaatttaaagagatggtcgggttgggcgcagtggctcacgcctctaatctcagcattttgggaggccaaggctggcagattgcttgagcccaggaggtcaagaccagcttgaccaacatagcaaaaccttctttctactaaaaatgcaaaaattagccaggccaaaaattagctgggcgtggtggtgcacgcctgcagtctccggaggttgaggcaagcgaatcgcttaaacctgggaggcagaaattgcagtcagctgagattgcatcactggactccagccctggagaaagagcaagactgacaaaagaaaaaaaaaaaagggttagtggaaacctatttgtaaagtttcaatgtaaagaaattacaatgtgcacctcacagtttacgtcctgaatggataactatctctcactgtgtgccagatgctgaatatatgccttattttgatttatcctcacaactcagttctcctgagttaacatttgaagacaatggaggctcagagaaggaaaggggctgggtgtggtggctcacgcctgtaatcccagcactttgggaggctggcggatcacctgaggttaggaattcaagaccagcctggccaacatggtgaaacctggcctctactaaaaatacaaaaataagcggggtgtggtggcacatcctcgtaatcccagctactcaggaggctgaggcaggagaatcgcttgaatctgggtcgtggaggttacagtgagccgagatcgcaccattgcactccagcctgagtgacagagcgagactccgtctcaaaaaaaagaaagaaaaagagagagagagggaaaagggcttgcccaaataacccagctggccagtgcctaaccagcttgggcctcagacccctgtccccctacccctgtgtctcttggggatcacagctccatcactaccacctgccaggccaagggcatactggaaccttccggcagccaagggctctgtgttctcccccaggctcccagcgtcacgtggctgatgctccaggctgctcaagtcccgtgtgggttcctcactctgaaatcctcccgcacccaagcatgggggcgtctccctagtagtgacctggtccctttctcccaccctcttcttggagtagctcatttcttctgaggggtctgcacctcgtcatcgtccccaacccaacacccgccctcttcccacttccctccatctcccctgggcctctcacctcccagcagcgtgcccttcccctactcctgcagcccacgcagtgaccggctgcctcgctcctcaagcccagctttctccctccagccccccagcagtggtctggccctaacttccctgccccaccctgcatggtggtccccgccacccccacgtggtgatccggccttaaccccgtcaccccatccctactgggtggtcctgccctaaccccaccacccccatccctgcgaggtggtccggccgtaaccccctccccccatccccacgcggtggtctggccctaaccctgtcaccgcatccctaggggggtggtccggccctaaacccgtccccctcatcgcggtgccatggtccggccctaaccctttgtcccccccatccccacagggtggtctggtcctaaccccccccaatcctcacgcggtggtctggccctaactccctccccccaatccccgcagggtggtctggccctaaccgctcccgcatccctcgcctgcacagtgggcagtctggcgcctgtggcgtcgtgtttgctgagggcccggctgccgttgactgaggctgcgatggcggcggcaggccggggtcgggagcaggactcggcgcgcttcgtctatgtgacgcgcttcggctcgcatcagtgcagtggcgtcctgcaactgggcggccgtg

SEQ ID NO: 34997 - DNA, 2300 bp, Homo sapien
tttttttttttgagacagagtctcgctctgtcgcccaggctggagtgcagtggcatgatctcagctcactgcaacctgtgcctcacaggttcaagtgattctcctgcctcagcctcccaagtagttaggattacaggcatgcgccaccatgcctggctaatttttgtatttttagtagagacgggatttcaccatgttggtcaggctggtctcgaactcctgaccttgtgatccacctgccttggcctcccaaagtgctgggattacaggcatgagccactgctcccggctgccaatttttaaatcagatttttgttttttggctgttgtttgagtttcttatatattctgggtattaacccctggtcagatgcatagtttgcagatattttcttccattttgtaggttgtctctttagtctgttaattatttcctttgctgtgcagaagcttggcttgaaattattaaaagtgtgatttctatgtgtgaatcaatcacaagacatgtcaaaaggaatttctttttcctctggaggaaaaagattaaacacaagggttcacaattgactccacgtggttatccacattgtgttgtcacaatgattgcacctgaaaactcatctaggtctttggaaagaagagaatggaggactaacatttactgggacactcccatattatgtatctgcctacttctattaatatagccctgtgcagctcagatgtgctagcttttgttgtctcagaaaatgtctctctctctgtctctccacacacgtgtcccccccccccacacgtttcattactgaacaatatatataatacttacgttttctcctgaccttttagctagcagagtgtatgctcagcacatgagcactaactagggtgacctaacaatttatcacataaactagaatacttttgaaagcaaaaggggaccctatgacaaatgccaagacagctgggcctcatgaagtgcatcataagcagcactgcagctgggaatgaacaaccatcagtgacttgaaccacagcttggtgaagacagtggcaacagccttgacctcagaggatttgaagagaatctgtgagcaatccccggggatgaaataatgcagccattcagaaccttgtccctgagcagtaaggggtttccttgagcacaatctcttctcatatttacaatcgctctcctgagcaataaggggtttccttgagcacaatctcttctcatatttacaatcgctctgcaagagagatattattattcttacgccagagaaaaggaaatggaggtttaaagaataaatgcaaaatgtccaaaatccatacagccagaatttggtagagcagacactaggactttgccctgtctgattccaggcaccaacttggaagccatgcaatgtcctgggctggatacaaattttggtggccaccgatcagggttcaaattccagctctggttaccgtggctgccctgtatgatcacagtgcaatgttgagtgtagtagctcatgtgaatacagtgcttgccatagtccctgctctgtactacatgcattccctatgctatcccatttcatgctttgtactaaccccatcatgtgtgtactattagaaacaccattttgcaaatgagggagatagtctgaaagaggctggaaaagtgcccactgcatgaaagatacacaataaatatatttcccttctgtcctgaccacagggtcagagcacagtagaggtcttgaaccattctgtgttttatgatattgttctggaaggtcttaggaggcaatgccctctcctaatgaatgtgcctgcttttccagtttttccaaaggctcaaggattacttgttatatggtgcatattaattatttttttggtgtggccaaaatccttcccactttcttgaaaccattttgtcccgtgcagtggttgtggccatgcataagaaacagcaggtggtgccagatgacagatggtgtgggagcgcgttccccggtaggagggggcgcgagcgagcaagcaggcaggcagctgccaggagctcttccctgctcgctcacgcctgctctcagaagctccgatccagacacacgcgaggcgctgtcctttcagcaccacaagctcgggctgaggagggaggactcctggccgtcctcctcctcttcaaattggcttgaatctgctctgaccccccacgagtgcagcacagtaagtaggcatttgtttttgctataaccactccccaatatcctccaacccctttcacccccacaacaaccctgttt

SEQ ID NO: 34998 - DNA, 2300 bp, Homo sapien
gagttccagtggtattgatttttgtttcgaatttctcaggaatgagcctgtgtgccttatagctgacagatattaacaaggagttttcaggaataattataaaacattggctgcgtttagcctaactgaaagttgaacccttttgtacactttggcagctgagggctaaacgaatttcagatttgcttccaaaatatatagcctgcaccttgccttgtacatctagaaggtacagaagttaatctggatttacctgtactgtatttgagatgcatatcaaatcaactatcaccaggtatgactcaaggggaaaacgcatacatctccaggtagttttcatagtttttttttttttaacttttttgagcctccagttggttaagaagaaatgtgcatattctttatagtgagagagaaactcagaagttttagaagactgtgtttaggacttacttactcttttactttttcaggaccatctttaatcaaactgaattaactggcctgtgcagactgtctttatcctctaagattcaggtaatacttttttccagttctctccggccagcacagtttcacttcagggaaaggtttggggtgaagcaaacagtgcctcagagaggtacattgggaagggtacataagggtctgtaggtctaggggtcaagtttctaatactcctgaactgggaggtagcctccaagccttggtcatttaaataattaaaaacaatgtctctcccttccaatgctctagggaatgtttagcaagcatctgctgtaggcgaggtcctgaactgggtgacttcctatttacctcgtcagtcgcaggataatcgttcagatataggaaaagacagccgcagcctgaaaaaagtcttttgaagctaaccttctaggtcaggcattttgaggaccagcggagagatccgaggcctctaatcctcgaagctcgctctccccttccccaggctgagacagtcatcactgaggctttggaaaggaattaccgagggtataatttggggtggggtggagacatctatgtttttataaaaaaccaggtgccatgaataaaaatgtgcttcccaaaatgatatgtaggcctggggtgtgcaaacttggaagccggtatttctgagacttgcaaacgagagggaggcactagatattggcgacttttcctcctcccccccacccccattaccctccgaggcaaacactggcattcaaacacgcacgacaaacacaggctcaaacaaactcatgaatgcacacttgcactgtcttgagaaaaaggtcggatccggatcgcgctcagaaaggaggttcaggagacaagtacagagatttcaactttctaaaagtgcgctggatttgctttctagtgagagagatggggacaactgatttaaattcttcactccgaaccatttgggagagaggcactcctgaccacttctcgggctccttccggcccctcttttccaggggaaagagttgtaataataacagtgggcgcttttgagcgctggctagtggcgagttactcttctaagtgcatacatttctttcacagggatactggcctgtgagtttcagcaccgactttctggaactgtaaagtaagccaattttgacgcatagtaggggcttcgtaaatgtttctgcaatgctgtttgcgaatcttgaacttattctggcggtagagggagagtgggatgggcgcagggtcccttttaaagaagggtcaaaagagagaagaaatgggactcggcgaacttccgctttaaataatcgctcttaattaggtctcgggcttttcagtttcggcgtgattataacccttcagggatcgcctaataacaactctgctgactgctcctgtaattaactcctaatttatttcaaacaggaaaaaaaaaaaaaaaaaaaaaaaggagggggggcagccccttcgggaagagccaatcaggggcgagcgtctctggcgtcagcgccaggcccggcgcggattggcggcgcgcgtctcccacttcccctcggaggaaaggctcagctcccagcgcgcccctcccgtctccgcagcaaaaaagtttgagtcgccgctgccgggttgccagcggagtcgcgcgtcgggagctacgtagggcagagaagtcatggcttctccgtccaaaggcaatgacttgttttcgcccgacgaggagggcccagcagtggtggccggaccaggcccggggcctgggggcgccgagggggccgcggaggagcgccgcgtcaaggtctccagcctgccct

SEQ ID NO: 34999 - DNA, 2300 bp, Homo sapien
tgctttccagccatagcagcctccttgctcttccctgaacatggcaagcatttattgtcttcaagagtttatgcttactgttttcactgtctgggatccacgatcttttgtatttaccttttttaccacttcctctgctggggtctgagtttgagtaccacccccacctccagagtcctttcctaaggaatctcttatttctaaagcatcagcatctttcactctctatcttcttgctttatttttacttttcttcatagcactgagctcaactgaaattactatatgcacacacacacacacacacacacacacacacttgtttgtctattttttgtcttccttcctttctggaaggtatgctccaagaggaggagaacactgtctgtgtttggcaccactataagctctgtgcttagaagacacaggtttgataaatacttgctgagagaacattggtaagtgagtatgagatgctgttggtgttttgttagtattgttgttgctattttcagcattctattctgtgctatgctttttctttccagaaccaaactttcattggtcttccgtttcacaaatccttctgagattctcttttcagaaatcaacagttttatacctgcagcctcttcactgaatctctgcctcatctacctctgtaggcgagccttggctgtctcctgaaggcaccactttcccagccgccccatgaatggaactgctagtgctcctttaccctcatttcacatgtggggaacgaatggtgctgggcattttctcaaccaccttccacttctggattatttctcttcaacctcacatgaaactcctgctcctctggcctcacacagccccttatccctcctcactgctgatcctcaacttatctgcccatcattcccctccctcactaaagactcagcttcctggttctccttcttcctctcccttcctctccccaagccctgctggtatcaaggtgacctcgctatccatgtgggcacccacccatcagacactctggttatatctctgatgtcttctttgcccatgatatttacctcttcttctcttcattcattcatttccatgatgactctctgggctctgcataacctaaagccctttcactgaggaaatattaaacctaagcatggtactttcttttattttttaaatgcatttctattctaagttgacatataataattatacatatttgtggggtacatagtgatgtttcaatacataaaatgtacagtgatcagatcagggtcattggcatatccatcatttcaaacatttatctttctttgggcaggcattgttctttctgaatacaatctcttatctttccaagactctcagttcgtttctttcaccacatctgaccttcagcatcaaagaggccccaagtcccaccacttcttgactagctcctcctcatccctctctcctggttctatatctgtctccatcaacttggaccttaaaatttatgacttttacacccctcttaccaatggtctcaactcactaaacccactgtgcctctgccacttatgccagccatgttccaacctcccttcaaccctgatgtttggattcttcatgctcacatcctggctcttaaaacctgggggagaaaatctcaccacctcgcagactggtgccactacaaagccaaggtcttcaggctcacccagagcatcagtgctttcagaaactactctgtttcctgagtactctgtctcccactctctagaacatctatttcaaatttctccacacttctcaaatctcctactccaccacctcccactcactgtaggcagataacctcatctcctactgcacaggaaaaaaaaatagaaagcttacataggaactcttgcaaatttctgataccagaaccgccaagttaacgcatctgtatccatcctccctccctcctgtgacagtgaagggggacccctcccttacctgtgctctggattttctcctctcctataacttttaactctccctctcttattgattctgcagtatctgggttaaatctttaaagtctccctgatgacaaacaaaattcccctttaactctccaaactcccatgagctgtaacctagcttccctatgcagcaaagttcttgaacaaggtgcttaccatcctatcctcattccctcacccctctctcctccctggacccactgtgcccaacatctgcgcccttgtacctgcaaaggctcatctcactatggggaccaacaacctcgctcacaagtgttaaactcc

SEQ ID NO: 35000 - DNA, 2300 bp, Homo sapien
tgtctctaaataaacaaacaaccaaagtacagtttgtgctggcgaactaaatggaattattactttggtttagggttttttttttttttcccagagaaaattcttgcttctgatatggtgcatggctgttgtggagattggactgttagtttttttttttttttttttttgagacggggtctcgctctgtcgcccaggctggggtgcagtggcgcgatctcggctcactgcaagctccgtctaccgggttcacgccattctcctgcctcagcctcccgagtagctgggactacaggtgcctgccaccacgcccggctaattttgttttgtatttttgccgttttagccaggatggtctcgatctcctgacctcatgatccgccctcctcggcctcccaaagtgctgggattacaggcgtgagccaccgcgcttggcctggactgttggtttgttaatgggtcccaggggttcctgcctatggagggctgacggggtcctaggtttggtgccaagccctctggaaacaccgtctcagttaatagttatgacaatcctgttatgtcctcaccgtttcacagaggaagaacccgagctcagagaggagagagtgcacatgcagccgacagtggcagggcaggaccaggaagtcaggcagtgtgacttgggggatccatgcttattctcctcccacctttcggaaggcacaggaaggcaccacagtgtcgcaatttatgcacaattagtgcaaagtctcacctgtgagcttgcctggggcaaccaggggaggctgggggctccttctccaccaggccccgctgcctccatatgactcttccctgtattttagccctgtaggtaattttccagtttgtgggctcctgtaccacatgcggtgagttaaaagaacaggtgggcagcggcgcggctcccgcgtgagctgtgtgactttgagcaggccccactacctttccgagccgcatttccacctgggcgaagcgggttgagccggcctggcggggaaagattcttttaacgggggaacaacgtaaggcgtgcaccggggaacacggatgctgctgagtcaatgcccgctctgccgttctctttgagagtaaggcttgcgtctcgcctgctctagcgccccaggtttgaacgcagtgggcgcgcaggaggaaacatagattcacgaatgcaatgccagcaaagtaaaatttttcacccttgtccgtttttcagggtgtttcaagcggaggagtcctgagtggagaagattccgcttccctgttttcaggttctggcagtcatggaccgggaagagcgagtcggggcgcgggtccctggcggtcgctggaacccttgtgagtgaggttggtgcccgcgagggcacagcgggcgctcgggaagtcgcagccgccggcagagggcgccccgggcacacggagcgcgcggcgctggggttggggcgctcgggaggtgcggggcaccggctggagtccggcgttgaccgcagccgggacgcgcccgccacctgggcggggaaggagtgagtcccctcggggcgcagcggcgcgcgctggcccggatcccagctgcgccgcgccctccctgcgagcggtgagtacaggcgcccacgggcatctccaaccctagttaggggacacttggagacaacgcaggtcggacgtccgccggccgttctaggagttggtgtgcggggaatggggggtgctcccgctcgcttagggctttgggtccggctaggggttgaccccaagaggcgctggatgtcggggctgagctttgctttcaggggactcaagcttacttgaggttctgacattggatttgcctcgcgggccctgcgcgtgctgcgcggggatccggagactggcgaggtaaccagggagggcaagcactcaccggggcgtcctccgcccacctcgcccgcagaaccatccagggggaccacgtgcggctgtcgcccgcaactctgcctgtcaagcgaggaccgcccccagggcaggggaggggacgcgcgggcggggtgggctgtgccccgcgggaaccccgccggcctgtgcgcttgctggtgccagctcggctcgctgcctcgcattgccacaggctcctgagaggtcgcgggcagtgcctgcggggaggcgcggggccctgctctgtagggctgaaggccgcccgaggttcgccaaggctctgggctctcgaaaggaagccaagaaaagaagctgcccaggtgaccagtcctgggagtgctctctcccaaggaagctccgagcgccca

SEQ ID NO: 35001 - DNA, 2300 bp, Homo sapien
atgaaggtttgccagtttcaagccttggcctcaagaggccttgagtgcatcaactctctcctttctctgcctttgccatgtgaacatttccaggccagcctgctggaggaatgagacatggagcggagccatccctacccagttatcccagctgaggccccagacacatatgagagagcactgccaagatcagcaatgccactgatggcccaaaggtgaccatagacacatgagcaagctctgcagagcccagctcaggtcagcagaacctcccagccaacccatacactcaagaaaaaaactaaatgtttactgttgcatagtcccaaggttttgcagttgtcttatagcattactgtggcaacagacaactgacacatttgtatctactaaacctctccacatgcccattctgcaggcaactagtcaatcccttctgtgtgttctcatggcacttagttatacaatatattccacattctactgttgcaagttttctattgaattgttaccatttatttcaaacaagtatttacatgtctatctccttgctcacaagctctttggagaaactggttttgttctgtttttttaataattgttagttttcttttgtgtgtgtgagagagacagagacagggtctcactctatcacctaggttggagtgcagtggcacaatctcagccgactgcaacctccacatcccaggctccagcaatcctgctacctcagcctcctgagtagctgggaccatacgccaccatgcccaggtaattttttgtatttctggtagagatggggttttaccatgttgtccaggcttaaacttcttagctcaggtgatccacccactccggcctcccaaagtgctaagattataggcatgagccacagtgcccagccaagaaggggcgatcttttatatatctttttgagcccagcacttggcacagggtatggtacagagaaaaagctagttaaacattcataggaatttggaggatgaggaatagcactcaaaatatctgtgacatattgcttaagttttagaagttttgtttttcacgtttggatcattaatccacctggagttgagtttcatgtattatacaagtagggatttggctatcccagtactgtttaatgaatatctaacctttgtcccctgacctgtgatgccaactcacagcaggtttctacatgtgcaggtttctacatggatggcaactctatttggctccgcgaggctctttgttgaccccggagcaaacacaccacctttgttatttaccattgttttataacaagttttgtatctgcaggacaagtcactctgccttgctcttttcttaaaagcttgtttggctgtttctggctctttatttttttcatgtacattttgcagtccgcttgtgcagttataacacacactccaccaagcacactagtgttgtcgaatttttttttattgtcataggtcatttgggagagaatttacatctttaaaaatggaatcttcctatgcaatttatgatgtaattcaccatttattagatttcatttgccctttaaatatgcccaggttacccacctggtccaaaataccatgattcctctcctggataaccacagcatctggctaaacagcctctctgcctccacatcccctcccacgcagtctgttctccataaagaagacagagtgcgccgttgttgttgttgttgtttaagacataaatcaggtcgtggcactaaagtcctaaaatcgccttgtagcgccagtcttgccaagctccacactttaattgggtaaatgactgcgtgaacggatgctggctacgccaaggccctgggaataaagaaatgataaagaagcagtcccttaagggaaacccaaatggaacatagtggccccagcccgcgcagagccccacaccaccgtgaggatgggcttggagttcctcttggacccggggcgcggtcgctaagccagaagcggagtcgcgggcgcggggcggggcctggacccgggcctggacccggagggcgggtccctgggcctcgtagctcccgggcccggacgcgcgctcacaggcgcgcgcgaggacgcgctccggggacgcgcgaggacgccgtggcgggagaagcgtttccggtggcggcggaggctgcactgagcgggacctgcgagcagcgcgggcggcagcccgggggaagcggtgagtcgcgggcggcaggcccagccaggtgggtggggaaacgcgcagggggcccggcggaggcgcgcaggcttgggcag

SEQ ID NO: 35002 - DNA, 2300 bp, Homo sapien
tggacttgcaatgttgtgtccaaaagtttcctaatctgaaactctgcacctgggctggaaatccaggccagctttctatgtcaagagtgggatgtttcactcttcacgttatgatttcaggtagcaaagtttctgaccctctgtgatgacagagaacaagatttctcagtgagataagaaacagtggtcacaaaaaaagagaactgttaggacaccgtatagctgcattctgaccttggggaaataggcttcccgttagctttgtagctgggcttctctgtgtttgttaccccagcctgctctaggaatagcaggcctgatttttaccttctcactagattcctcacatctgcagacctaacatgctcagttttgatcctgtggtccatgatatgtgttcattggagattttgagaaagtatacaagaatgcccagcattcacatccgacatcttaatgtacctccgaacctgtaaagcactaagaaagtaacttaaggaaaagtgacctgaaaggagaattaaaattaaaactggtattagaaatgtagggaagggaaacaggtataagtaagccatggtttgaagcctttatagtgcttaaaatcctttggcctgctaatatcatgcaaagagagctagtctgaggaaatcactagctgtaaggacaaagatgcatagacagggataagcattatatgtcatggtgaaaaaccaaaaaccacttaaacattaaaggtgtagttatatatccaaaatgaacagcggccacaaggatgctcatgaaataagtgcaaaaaaaacaagatcttaaaatatatagtatgatatcaactaattttttaaattgtataataacatgtatagaaaatgtctataaggaaatgtaccaaaacagtaacgatgatttcagagtgcctggattatgggagattttgtttctttattctctattttctgtaataagcttgtatttttcggaataccacagtgagcatctattacaacaatacagggcagttctaaaataaacatgtattactcagagaaagaaattaattacttttggaaaaaaagtaatggctctttagccagaaaataaaaattgtatgaggataattacatgctgcagagttactcctattcatgggactgtgcaactgtgtttttcctgctatgttcctggtagctggaagaacttaatttttaatttttgattggtggtttatgtgctaaacaaggctgaatgaatctgcgtcttttttagttgtgtaatttttagcatttaaacctttttttaatcattagtcatttctcctagtaggaataacagctttagtaggcgtttgacgttggttgtttcactcagaaaaatgggttcaaacttcggaccttgttactgtttttatttatttttaaacttttttttttttttagaggcatggtcttgctttgtcacccaggctggagtgcagcggcatgatgatagctcactacagctccaactcttgggctcaagcgatccccacaccccactgccacctcagcctcctgagtagctgcaactataggcgtgcaccaccatgcccggataagtttttaaaattttttgtagagatggggtcttgccgtgttgtccaggctggtctcaaacgcctgggctcaagggatcttccctcctcgacctcccaaagtgctgggaacataggtgtgagctgccgcacccatcctaaaacttttcgtacctttattttctccagagtaattctaggtatccaacaagtaaatattaaaatactatgtacttataaagagaaatatgtaggaaactattgaaatttagttaagatcaattgagatttatagacaaacttagctttgaatttagatggcctttttgccatttatagcaaaattatctttataaataggaagagtatgtacatatttactcaaaaatttaaggtgactgtaaagtttctaaatacgtagtgacattgtaagccttacacgaacttgcctttttgactctttgcagtccgggaccatgtctggagaactaccaccaaacattaacatcaaggaacctcgatgggatcaaagcactttcattggacgagccaatcatttcttcactgtaactgaccccaggaacattctgttaaccaacgaacaactcgagagtgcgagaaaaatagtacatgattacaggtaacattaattattgttttttggtttaatgtataaatagatcatcatgttaggctgctatctttaaaccttcacttagtgattttacaa

SEQ ID NO: 35003 - DNA, 2300 bp, Homo sapien
aacaaattgccaccaacttgagcctcacagttatggaggctcaaggtctgatatcaaggtgtcaacagggccatgctccctctaagaatccttccttggggcttccaaggttctagaggctctaggaatgttttgatgcaccttggcttatgggtacattgctgtcatctctgcctccttcattacttggccttcttctgtgtctgattgcacatggccttcctataaggacaccattcattggatttagggaccactctaatccagtatgccgtttggcatttgaactaattgcatctgcaaagatcccatttccaaatagggtcacattctgaggttgcaggtgagacatgaattttgggggagacactgttcaacccagtatagattatatagaagaatatctgaagacagagagaaatgtttacagtatattactgagtaaagaaggtggttataaagcagcaggtctggtgtgatgcctttaagtaaacacatcacatttagcttctagaggagagactgaaaatacatgcatgaaaacattaccagtggagatgagtaggtaaagacttgagtgattttaattgctctaatggattcctgttttttctcaatttttgacaatgaatacgtgcttctttgataaagagaagaagtaaagaatgaggcacctaatttttttttcatcaagagtcttctgaggctgggcatggtggcccacgcctgtaatccagccctttggaggccatggcaggcagatcgcctaagcccaagagttcagaaccagcctgggcaacatggtgaaatcctgtgtctacaaaaaatgcaaaaaaattaaccaggcatggtggcgcatgcctatagtcctagctactcaggaaactgaggtgggaggatcacttgagctcagcagttcaaggctgcggtgagctgagatcatgccattgcactccagcctgggtgacagagtgagaccctgtctttaaaaaaaaaaaaaaaaaaattcttcctgaactagcttttcattctataggtataaaaatgaattaatatccttgattaccataacttttgtctaattgtttaaagtattttagagtttacaaattcaaaatacattataaaatatgtcacttgaagaatatttcaaaattgaatgctttcctattccctatatataatttcttttctggcttttccaaactacagataatttgagatgaatagatttgattttttttttttttttttttttttttgagagggtctttctctgcccaggctggagtacagtggtatgatgactgctcactgcagcctcaacctcccgggctcaagtgatcctcttgcctcagcctcccaggtagctgggaccacaggcatatgccacaatgcctgactagtttttatttatttttatttttttatagagacagagtctcaccatgttgctaaggctggttttgaactcctgggctcaagcaatcctcctgcctcagcctcccaaagtgctgagattacaggcataagccaccgcgcccagcctgaaatgttcattttaagtgtttattgtcctgtatgttttgaaatttttactgactatatgtaacaaatttgtcactccatctaggcacaagtgttttaggtgagcataaatttttttttttgagacagagtctcgctttgtcaccaggctggagtgcaatggtgcgatcttggctcactgtaacctctgcctcccagattcaagcaattctcttgccttagcctcctgagtagctgggattacaggcgggtgccaccgcacccggctaatttttgtatctttagtagagacgggtttcaccatcttggccaggatgatctctatctcttgaccttgtgatccacctgcctcagcctcccaaagtgctgggattacagacgtaagccaccacacccagccagagcataaacttttaaaaccttgtagccacttgtctctaggacactggggagatatttgaaatgagcaattgccatattatttgttgttttcttaggcaaggaattgttcctcctggtcttacagaaaatgaattgtggagagcaaagtacatctatgattcagcttttcatcctgacactggtgagaagatgattttgataggaagaatgtcagcccaggttcccatgaacatgaccatcacaggttgtatgatgacgttttacaggtatgttatgaatatgtagcaacagtgtgtttaccattacagaagctcaaagtatatttttgtatgtaaataattttgttgaaa

SEQ ID NO: 35004 - DNA, 2300 bp, Homo sapien
tacaggtaaggtctcaatccttcctcagttgtatgctggtgagataaagtaggcaataagcatataagcaaatgaaaaacaaaataggccaggcgtggtggctcacacctgtaatcccagcactttgggaggctgaggcaggtggatcacaaggttaggagtttgagatcagcctggccaatatgctgaaaccccatctgtactaaaaatacaaaaattagctgggcgtggtggtgggcgcctgtagtcccagctactcgggaggctgaggcaggagatttgcttgaacctgggaagcagaggttgcagtgagctgagatcacactgctgcactccagcctggcgacagagcaagactccatctcaaaaaataaataaataaataaataaataaataaataaataaataaataaataaaataaaggaaaaatgaaaacaaaataattttagacagtgataaatgtgttaattacaataaaaggggcttctgtgaaaaacactataggcaagaaggtgattcctttagataagttggttaggggtgggttcactggagaggtgatgctcaagcagctatgggaacagaggagagctttcctggcagaagaaacaacctgtgcaaatggcctgtggtatggtgtgcttggcctattccaggaacggggaggaagccactgtggttgaggtgcagagagagaggtaaagagtggtgagtgatgagatcagacaggtggctcttgcaaaccacgtggggtggggcctcttagcagtgacaaggaacttggattttacctgaactacagcaagaagtcacaggaggtctggaagcagggaagtagaaaggcacgatccaatttacacttttcagagattctctgagctgctttgtgaattgcaggtgagcaagagaggcatccagaagaccagttcggaggctcttgtcattccaagatgacaatgacttggatgcacgtgcaataatagcctccccagaaggtgtgaactgagacctaggggaccatggcccctcatcctctgcatcgcagcccctggcacagggctggtccatggtgacagaatggcttgaggtggtgcatcaatcagcagtggcatgtgtctgaaacgcatgctagctgaaccctcctcgctttcaccatcctttgccaagcttccacagaaatccccctccacacaccaggctccccaagcaaaccggggcagcccagctgaccgcctgcctcccctgcactgggctgctgtccaggcctggcgaaaatctctcaccatcctgcccacccaggctccctccacggagatctgtgtggttagcacagtggccttgatatcttgatatttaggagacggcttttcccatctgagcctccattttctcatctggaaggtgggtgttattctccctacccccaaaaccccttttcccaaagcccacttccttacttttctctctcttcatccgttccttcaaccaaaacaaagccactgtagggtttttgaagtttcctgattttttttttttttttgtgattaataacccctggactaattaatttctgcatttgtgtttctagatttcagattccagaattattcaagcttttccctcaaaactagctatttcccccttctagcctgactctagctgggtcctgggcgcccaatgtgagggatgtcacctgacctcctgggtctagcgcccacccggggcaggtcctccagctgtggccactcagccaatatctgcacaggtggcggttgcccggtcaagggcgggctcacaatctgcggggcggggagagggaaggagccagggagaaaagggagagaaagagggggcagtgtggcagaaaggaagaggaaggggcaagtgtcagagtcggcgagatgaggagggagggtgtaggagaaaggaaaatagaaagtgggtgagaccgtgggagagggagactgggggagaaaatgtgggcgtgtgcgcgctgagagagagagagagagagagagacttggagagggaaggaagggaaggagcgttgagagcaaggaggagcgagttgggggcggagacgaggaagtgggtgcgaggcgcggggcgcaggccgtgcgcgcgccgcccgctgcatccctgcccggagcgcagccggcgcgggcgcgggaccgaggcgaaccgggtgcggagccaatacccgcggcagcagcaccaggtaacgcggccgccgcctccccgcggggcctcggctcggggtggggtcccaggcgggcttggggacccggcgtgggctgg

SEQ ID NO: 35005 - DNA, 2300 bp, Homo sapien
tccccaacatgtagcactgtatcaagaacagcgtcagtatttacaagctgtgtgaccttgttcaagtctgtctgcctcttttggcctcagttgatttggcataaaatggggagaataatgcttaccagataaggttgtcagaaatatcaagtgagatagtgaatttgaaattactttaaatgatgtgtaggagtgaattgctatgcttctgccatctggggtgaaaaggggctatggtccaggtttgtcactttatctatgccacatatctaggtaaaggggctctctcctttctctccttccctatctcatggagtatcagtttgatcctctttccttaaacattcgtagatgatttgtgcctaatagaagactttaaaatgacctgcaaagtggctcaagcctttccaaggagaaagggactattggtgcattggtgtaagttcagtttctctcagaatgctaaccactgagaacactgcagtaagcttgacagacaggatccttgctctggttgcgtttgaattctagttgagggaaagtgaatgatacacaggtaaacatataaataaaataatttcagagagtaataagtactacaaaaaaaaagaagaaaagaaaaaatgcaacaggtaatgttatagagtgattgggggaggaagcattaggtaggtggccagagaaggcctctttgacaaggtgacatttgggctgaaattcaaatgacaagtattcagccatataaagatcaagatgatgagggtcccaagcaaataaaacagcaaataaaattaaaaaaaaaaactttaaaaataccttggtacaaaatggaggccattgtaggaggaattactgagacggggagagtgggtcatgaggaggcaggagggttgggcacggatgttgtacgcggagcttcgcagtctgtgattcaaaaaatagaaatcaggctgggtgcggtggctcatgcctgtaatcccagcactttgggaggctgaggcgggcggatcacgaggtcaggagattgagacaatcctggctaacatggtgaaacctcatctctactaaaaatacaaaatattagccgggtgtgatggcacgcgcctgtagtccccgctactctggaggctgaggcaggagaatcactcgaacccgggaggcagaggttgcagtgagctgagatcacgccttgcactccagcctgggcgacagagcaagactccgtttcaaaaaaaaaaaaaaaaagaaagaaaagaaatcaaatgagcaattacatgaagaaaaggaagttattttgccctctgcttctcatgtgtacattcattcagcagatataactcaacctctattgtgtgccagtcaccatgctaggagatgaagatacagagaaacataaaatatggaactagtttttattagcctggcaactgaggatagaggtgcatgagtaacacaatatgatgagaagtgtagtggagggttgtaaaggctgagggatcctagaggaggcggtgactgactgtgccttaggggccaggaaaatttgcatggaaaatgaggatgctttcacttgcagataaagcataagtagtaaggaagggagaaagtctcagccaaagggaagggcaggtgctaaggccctggggtgagcctgttcagagtaagtggtcctctgtcatgatgggcacatagcttgtcttgctagtgaaggatctcgtcaaaaagttagtttagagagctttctctgggacatggtaaaagacaacctggaatgaagtactagcggcagtcaggccagtgagtggggttggcaacagagcaggtaggtagacctgcatttggttgctggtcacagaaatggagagtgagagatatttctaagtcaggatgccctagtggcagacccccaagtcctcgaacttcagggcagaactgcctgggtgggaactctcccatgtctccttgatttcactgccacctctgctggcgtcctctctcatctccgccgccagcccccgcctcctttctcgggaagcttgggtctccctgggagcgggtctgcccttagggggaggcctctgggctctgtgccctgcagctcggcaggcattcgaggcggacagaaacggggcttggcgccccccgcgtgcacgtgtgctagcccaggcaggagggagcgcctcggcggaggagtcaaggaagagggggagggagaaacgcgccagaacctcggcccgggcgccctcgtcggccgcggaggagctgcagcctccaacaggttcgtagaacgcgcgctcgct

SEQ ID NO: 35006 - DNA, 2300 bp, Homo sapien
ccccacacagggcagtctatcctatggctggacagctcctatggagagccagttcttcctctcagagcttctgcctgcttcctttacctttcccccattgccctaattctatcgccagcaatagaaaaagcaatagtactactcttccgctacaacagttattcatccattcaagcacttccttagcatctactttgccaggcacgttactaagcgggggaattataaattaagcaggaattgccagcccttaaagggttaatgccccctccgtgttctttcttccaggtgaaagatcctcaaatccttcaacctgccctcatttgacctgatttccaggtgcccaccaccaaactagccccttctcgagcttgacatactcacgtttgtcaaagtccatcttaaagtgtggtgtccataactgagctcagtattttccttaagcctcaactagatttgtagcccagctcagttgatgtccatgtcaaaagcaataccagttgtggaaaaactccaattgtaaccagagtgctgccagccaggtcccatttactgagaatattcttgaagcacatgaagaaagaggggacggggaggactgtgcacttgaaatgacatgatgtcagatctccctgcccagaattcccctcaggcattagtggaaagtctaagtcactctaatcaaagagcctccctgccactgccatccccctcttagtatctgccctaggaaagggaagaaaaataaagaataagcattctatgctgatggcccaacacagtgctaaacatggaactcagccctaaaggaggggccttccttacacaagcctgtaaggggagaacagacatagacttcagaaggtgattctccaggtgacgaggatgggttcaccaatggcctctgactggtgggggggtctcctgctttaaggcctctgctgtgatcgtgtgtgaagggataagttctccctcactggaacaaaatcacatttctgcagctcttgttgccccttccttggaaggaagccatccccttagaaggagaagccatctccactctgacataccttgatggatgtgaaactcctgcagatctttcacaggccttgtgcaaggcccctcctctccgaagccattttcctacacatcgggctggagtaattgggagccgaaagatggcaggcagaataaaaaggctcattaggtgagagtaataaaacaaaacaaaacaaaacaaaaatgagtgcaaggggaagaggaaaggctgggggtgggagcagatgttgtcctgcctcttggaagtccttttactttcttgggcataggaggaaaagaaatggccttctagaataaattttgccagaggagtccttattcttcacaggatatcagatctcaaagggattggcgagtggcttgcctaaggtccactgcagttttgcatcagtcttctctttctgggtgcgcagtggaggttcctgacccactgcgagggtcttgcccacacgctccatcagtgtttcctgagtgctcctgtggctggacactgtgctggggggctgcaaagatgacctggccaaggtccagtcctggagctgctcacaggcaagaggcaaaccaacaggtggaacgggggtcgctgaggcaagggcttgtctgggagtggcaggagccgcaagaagtgcaaccactctgcctggagaaaccaaggagggctttcccaaggaggtgaactttgagctttgctttaaagaacccttcctccaccccttgcccccaccactcctcaggagcagcaagcttgtgggcctggagctgtggccaggatgtctggttgcagggaggcggcaggggcgtctgcgagggggaggagaacagtgtaaggtggaggagagaggggaggggagcgagaaaagagggggaggaatggagggagaaggagacgggagggagggagagagggagagaaggaggggacgaggggggagggagggagagaaagagagagaggagagagagagagagagagagacagagagagagagagagagagagagagagagagagagagagagagagagagagatttgaatttcccatctggaaggggagcggtagaacgtcagggcccggctgaggggcgtgattggagggcgccttcggcagccgcccgcggcagaagccgcggctccagctcgcctggcggaattgcacgcggcggcgggagctggaatagcagaaggaaccacctcgtggagtcgggccggagccctgcagtggctcagacggttgcaggg

SEQ ID NO: 35007 - DNA, 2300 bp, Homo sapien
tggaagatcatctgatccaggagagagacgtgtcagaatcacccagcaagttagggatgaggctgcaactaaagcccgggtgccctgcctaccaatttggaacatctcaaattagagccctgcatctcccactgccacctggtaattccttgagctctatgtaaacacagagtaggaacccaagagtttctgaaatcacttgattattaaattgttcatttcctgttcttagaaatgaagttttttcacaatgtattaaatcgaacgaaaacatcttgactgagctgagcaacctgcaaactcagaattcggggttaggagggtgggttctcttgcatttctgagaaagcatggaaagcctgttcctttttggcttgttccacaaatatgtagtcggcaacggctgacattttatgagttcctgcaacaccccaggcacttgaccggtatcattcattctccttcaaacgtccattcaagggcaaccttaatactcccccattttgcagggagcaaactgaagcttgcccagggacccccagccagtaagtatagctgcctggattttgaaccaggtgtgtctgatgccaaagcccctgggctgttttgtgttttgctttttttttttttttttcctacacatcatgactttctcttcccaaaacaacctatcagatgagatggtctgatcacgtagataagctcttgggccccatatcatgaaataatctcagtctaccgatatgacttctcatcttgagagaaatgaagaaaatctatcaaagaacaaccagtgaccctgaactcagccaggctgcaatatccagccttgaacccaacaaggttgcaacatctgccaccctttcccaggaaccctttttcttccttgcaaggctgtgtgggacaaaaggccttggggagcaggcctggcctcagcttaccatgaagctacttcacactttggatagctcacggatgtcccctctacacttgaaaagagatctgtgtctgttaaagaacagtggaactgaatggttaaaatacaaagaaaatctcaagttagagcactagggttcagcttctcagggatgtagggggaagatggtaaggaggccaagggggaaggctcttcctcccccaccacctccactggaagagttccacttttacatattttgcatattgagaatcccattaagattttatttggagaacccttctgaggcaaaaacataataaaaaatataataaaaactgaaagccggtgatttaggaagaggagtagggtgctaatgtctgccgagtgcctgcaaggcccgtgctaggtagtttaaaagccctaagcccccagaagattataatgtctccaacactcccacgtgaaattcaaaataaaaatcgatattaagctataaaacataaaaattacacgtacattacaataaaaataacgtattttccatttgtctaatttcaaaagtcaggatctgtttatccaagctggctgttctcatttgctcagctgcctccgattggctggggcagtaacaccggctggtcttttgatgggctgatccagtggcccaggctgggccccctccaatctccgccggagccggggaaaggtggcattgccatttctctcttagagaggaggaaactggggactcgagcaggttagggccttgctgaaggtcccatggcaaataaggaaatgacggtggcgttggaaaccagatctgcctgactccaagttccaggctctttccaatgctcctggcttcaatcaaatctgaacaatagggtcaagatgaaggctttaaaatagggaccaaaccgctttcaaaaagctatttggcagcacctacgtgtctgcccagtaaatcgctctcttccatctcctttctcctccagcagggcattgggtcttgacctcagagcgatgggtgcctggtgtctgaaccagggtgaggctgctgtctgcctagctcccccgccctgcctgtgcagaggcctctcccatctgactcccaattctcttctgcaggttgtcacatcttcccaagccaggccagccaggagcgctgcatgcaaattctgccgtgggctaaggcacgctaaccagagccggcggcatggacttcgtcatgaagcaggcccttggaggtgaggtccagcgcccctccgcgtgtcctcagccggtcccacccttgtgggaggtggcctcggcccacccggcccctctctccccagccctgacccctagctgaccccgccctctccttcccaccccttcctcg

SEQ ID NO: 35008 - DNA, 2300 bp, Homo sapien
tcccaagccaggccagccaggagcgctgcatgcaaattctgccgtgggctaaggcacgctaaccagagccggcggcatggacttcgtcatgaagcaggcccttggaggtgaggtccagcgcccctccgcgtgtcctcagccggtcccacccttgtgggaggtggcctcggcccacccggcccctctctccccagccctgacccctagctgaccccgccctctccttcccaccccttcctcgtaggggccacaaaggacatggggaagatgctggggggagaggaggagaaggaccccgacgcgcagaaaaaggaggaggagcggcaggaggcgctgcggcagcaggaggaggagcgtaaggccaagcacgcgcgcatggaggcggagcgggagaaggtccggcagcagatccgagataaggtcagctccgcccgcccgcccgtcctggggagggccacaagcgggtaaaaccggtccagctaaagcccctgctggggctcccctggatcccagctctcaccttcgccctagttctgagcctcactcttctcatcagcaaaacgggtatcacaaggtcacctccctcaagggatccttttggggattaaataagagaatgcgcgtagtaggtactccaagagggtggaccctacggtccaccatttcgtactgcagatctttgggaccaaaaatgagtgcagttctgaatttgggaatgttcgaaaaataccacagtgtcctaagcactttgtgctgtcagctgtcactcccagcgggtctggggctgccaccctactccagacagtccagtgcatgtctgttagtgcgtgcaataaataaaggctagaagtagtcttccattggttcaagtcagattcgtcaccaaaatttggctcaaaatatatgggcaaacgccatgtgttcagatctttgggggtttcaacacagcaggaagttctgatgggcaggtgttaattttaaaggaaaccccacgtatggtctctcccactgaggaccaggcaccatcctacagggaagacacccttatccccactttactaatgacaggactgaggcttgggaggcactcctggccacctcagccagtgctgcatgatcatgagactcctgctgtctccttgcccaccccgcttcatgcgcgtctctgccctccccctccccagtatgggctgaagaagaaggaggagaaggaagcagaggagaaagcagccctggagcagccctgcgaggggagcctgacccggcccaagaaggccatccctgcgggctgcggggacgaggaggaggaggaagaggagagcatcctggacacggtgctcaaatacctgcccgggccgctgcaggacatgttcaagaagtaaccaggcctcctgccccagcctactccacctgttactacttctttttggttctttcttttctttttattaggttaagtctcaattctgaaggggaaaacctcagttggcctctgcccctcttccctggccaggggcttctccccctcagctctccctcacacctcccttcatcccagggtatccacctgcaccccactcccaagtagcttgaaaaagggaggacagtctttccccagcaggggtcaggggggcccctcaggaagcctaaggtcgtgctagtgtggtgacccccatacattcctccctgctccccactgccaggaggaccactgtccccagccagccaaagtaatgacacattccagccctgcccagcatgctgacctttggcctctaaccctcagtgggcccccaggtcagggcaggggcactgagtggcctggctctgaggaagggagtcaggggaagcctgtcccgggaaggcccaggctgagaggccctggctctggccaggctgggatctgggtgggaggctggggctcttcttcttccatctccttggtgacacccagcccaggggcacccccttccccagcccccacctggagagacatggcccctgccaagctggtcccttcaaatggatcctttgtggactttagctcatttgtggaggaaccccaggtagggacgccccttgttcctcacccccaccccacttaggtcctgggcccccactgccaggctgggcccagcttgctcagtcaaggggctgccaggcccccagaaaacacttggagccatcgggtagcgatggtctatgccatggggaacacctccattggtgtggccaagctgcccccattcctatccacccctctccccaccccgtcctgtccatgcgcttccagggcccca

SEQ ID NO: 35009 - DNA, 2300 bp, Homo sapien
tttatcacccatttgtagagctaaggccatttaactttcaggaacactaaactggaaactattcagccaatatttatacagatttactaacagtttacatgtttgggatggttagtgatgcagagccataagttgttgaattttaagacatccggcaagaggcataagtcgttcaattttaagacatctagcatttcactcttttacgacttacaagaagcagacctgcttgtgaaaacatgcccacctgaccagcagcgtcagtgacagagtcaccgggtacaacttgcccgctgtcagggaccactggggcaccatagatctaccaagaacaagttgataaatttacatttcctgttaccttcctgataaggttactggaatacaggtcagggaatggtgcagatgcagcaaggaatctgtccagtcatctcgggatgtccttgaggaccaaaggaaatctgggctggcacaggttgatttgtagctggtcatcaactgtacccccaagggggattacagtcagcttcgagaatagctgctctcctgaagtatcacggttgagttcaggttgagggtgatcaggcctgtgattgtttattgaacgtttatgatgggctgtgtctcctccaaaatgacggccaaagtgctttgctcaacacataggaggccctctcacgctctgttgggttgaccacaaattgaactcatctggctaggactgtacaagggagagggataaaccagaccactgtaccttggacctactgtacgggtaaaaactggttcaaggaggttagagaacttgtccagggtcaaacggtctgtatatgagtttgaagcccatgttcctttcatcccagctgtttaagtttagcctagtctagatgtggcttaacagtaacacagatgtaaaggcttagggtcttaggagtttgaccatcaacatgggattcacctggttctttgtgggaaagatgtcacactgctgatgggcagaagccaggggacagagaagctttagcttggagacctggaaacaacacattcaggggaagagggttcatttattcagccagtcactcaacccctctcctgtgccaggcctgactggaacactgagggtacagaggtgaaggtcccacagcctggtgtgcagatggtgacaattcatgtgagtggtttcattaaaaagcaagacagatcccacctctcccttgcctagaacactccattggctctcactccaccttcctcagatctgatcttcccaggctgctttctcagcatttaggtcttaatttagaagcagtcctctctaacctgaatgttaatgtagcctccctttgccccattgctggatctcttcccaccgactttaattttattcagcgtgcttatcatgggaagctactcctgtttgcttcctttgtggctgtctccccaggtaaactgccagatgttctagcaattttgcctgacatgttcattgccgtaccccacatctccagcaccgtgcctggtagtactcagcaggtgttcaataaatagccattaagtaaacgaatgcacgagaaaggagttaccaatctgggcagaatgacaagcaggcggttagtccttgcttggtggggatgtgggaggggaggaggcaagaaggtgggatctcagcgtggtaggtgctgtaatccccagttcacagggtgggaagcaggttgtgtttccttgctccagtgactcagctgtgaggcagagaagcaggatctatacatttgtgtgcagcttcaaagcccaggtcttccaggaggtcaatttttcttgatcctggctatatactggaaccacctgatgttcattctccatgccaagcaagctccccaggggattctaacaggatggagaatcaccatcctaggccctggtgcttctctgatctgtggaaaggtgagtgttgtcacagaaatggcacaacagtgcctgggagtggagggagaaggcttcctgaagaaggcactggggtttgtcttagaagggtgggtaggaatctgctgggcagctcttggagaaggtttgaggcagaggggctggtgtctgcaaaggcgtggagacatgcaccatcctggtctggtgtggacaaggagcagggcagcggggcaggcagggtgaggatggactccttgaacagtcttgcactgaggagagtgttgactgacatatttggactcttctaccttgtctgtcatggtctaacgcatgtcttttctgggtgtggtttcttttctttttttttttttttcttt

SEQ ID NO: 35010 - DNA, 2300 bp, Homo sapien
ggcagggacttgtaaatcctcagtgtatgcagcaaaaaaaaaaaaaaaaaaaaaaaaaaaatacaaaatacagggaaaatgtaggaaaaatatctaaatatatatatatatatgaagattcctgaaaaagaggggtaaggaagaaaactagacaccaaatagtttcctactccaagattttagagacttcagtggtattcttggagtctgaaaagctttgtagtttccaagaatttctggttgcaatggggtagggaaaagattggggaaagatagggaccttatttcctacggtccttctgagagccatatgctttatatgtgtactcatttagtacctaggaccttctgacactttcttatgttgctggtggaagtataaattattaaacctcttcataggtgttttggcaatatatatccaaataaaaaagtgcagatgtgcacaatgaaggttgtatagggatattcactgcaatattgttctaatattgttctaaaagcaaattcatgaagggatcagttgaatattatatattcatataaagactgccaccattgagaagaatgagacgtctgcattttctgacaagaaatgatttcctatacatatttaccataggaagcaagttgtgtaaggaatgctacctttttggcagtgtgttgggagaggttatgcacacacctatctaccttgcccaggtgcttacttacactgtctctggaaggccacacaagaaatttaactttttcagaagagaagtttggggacacaggatggagggaagcttttcaatctattcccttttatacattttacatttgttaccaagtgcacgtgttgccttttaaaaattgggtttttaaacacatttaccactactactcaccaccaaaaccttcccccctcagctcttctccagggccttgactggcgctggcagctcaccaccccttttttctccagcaagaagccactggtttaagggagatatgagaggtggggtggatacgcaggtggacatttacttttcactctatatcttttatttttatatttacaatcatgtgcatgtaatactgttacaggaaaagggtcccaatccagaccccaggagtgggttcttggatctcactcaggaaagaattcagggcaagtccgcagtgcaaagtgaaagcaagtttattaagaaagtaaagggaataaaagaatggccactccatagacagagcagccccgagggccgctggttgcgcatttttatggtttttcctgatgatatgctaaacaagtggtggattattcatgcctcccttttttagaccgtatagggtaacttcctgacattgccatggcatttacaaactgtcctggcactggtgggagtgtagaggtgaggatgaccagaggtcactctcatcgccattttggttttggtgggttttggccggttcctttactgcaacctgttttatcatcaaggtctttatgacctgtattttgtgctgacctcctatttcatcctgtgattagaatgccttaacagtctgggaatgcagcccagtaggtttaagcctcattttacccagttcctatttaagatagagttgctctggttcacacgcctctgccattaccttttaaaaacaaaaaatccatttttatttaaaaaaaaaaaacaaaacctccagaccccttcttaacacctcttccctcactccacacccgctagcccttttcatgggacaagctcaccagctggtccttctccagcaaaaagaccagagctttctgctcttaagggaggggactagggattacggaacaaccccagaagaaaggtgatgagttaactgtttagaaggttagtgttggttcttttattcgattaaacaggaatacacatatatctaccaaagaataggtaagggagaaataagaacactaaaaaaactcggaatcgttaagtgtgaagcatatttggagttaaaagaaccaaatattactaagtaagcagacgcgggcacgcgctgcataccgggatttgtagtcccttccggggcggggtacagcgcgcctgcgcagaggggccgtcgctcttccgggcgcatgcgtgcggcagcggcgccaggactgactgcgccgtggaggctgctgcagtgttgtgagttggaagctggggagctcggcatggcggtccccgctgcagccatggggccctcggcgttgggccagagcggccccggctcgatggccccgtggtgctcagtgagcagcggcccgtcgcgctacgtgcttg

SEQ ID NO: 35011 - DNA, 2300 bp, Homo sapien
ttggatcgcggattgggggttggatcgcggattgggagttggatcgcggattgggggttggatcgcggattgggggttggatcgcggattggggtttggatcgcggattggaggttggatcgcggattgggggttggataggggatttggagttggattggggatttggggctgggtgtggggcgagggggagtgaaaaggtgacacggagctgccgcggctcaggagccagtggttgggggtctgagaagaactcaccaccttgaagaagttcttcggctttgggagccgcaggggccggcggtccggggctccctaggccacgtctacaggggttcggggtaccgaatcggaagatccacagggcgctgtcaagggcgaagccgcggaagtggagcgctgcctggagcgcaggagcagagacctggaagccggggacaggcagcacaggcagtggggtgggggctcagcccagggtgggagggggtccccaggcccggcttccccgcagcccctgggatggggcctcggagggcaccctcagaggggtggtgccaaacggagcctcagctgctctgcatcccccataattccccagctggagcgcttggtggagaatgtgagtgatttaactcaccaagctaagcatacacagtgttatttttaacctacacgtttaaaacatggtgttatacacattataggaggtgcctaatgagagaactcattcctctatcaaaaaataccgtgagtcggccgggcgcggtggctcaggcctgtaatcctagcactttgggaggccgaggcgggcggatcaccaggtcaagagatcgagaccatcctggctaacacggtgaaaccccgtctctactaaaaatacaaaaaaaaaaaaaaaagattagccgggcgtggtggcgggcgcctgtagtcccagctactcgggaggctgaggcaggagaatggcgtgaacccgggaggcgcagcttgcagtgagccgagatggtgccactgcactccagccttggcaacagagtgagactccatctccaaaaagaaaaacaaacaaacaaacaaaaaaccgtgagtcattttcagtagcgaaaagctctcacctaaaactgtccgttttacatccgtatccacctgtgtagatcggttctttactgaaggttcttagaaggaaacttggaagtgggaggtgggttctgtgttcctgaatgggaagacacatttttctcaaaatgtgagctctttctgtgattatcaattttacataagccgaatgaaaaaatcaaggttttaacatttttgcatgacacctactgtcttttactattgtaatgacatttgtaaaaattttagggctgggcgcggtggctcacgcctgtaatccccgcactttgggaggccgaggtgggcggatcacgaggtcaggagattgagattgagaccatcctggcaaacacggtgaaaccctgtctgtactaaaaatacaaaaaaaaaaaaaaaaaatagccgggcgtggtggtgggcgcccatagtcccagctactccggaggctgaggcaggagaatgctgtgaacccgggagggggagcttgcagtgagccgccatccagaagtgctgggattacaggtgtgagccaccgcgcccggcctgaaaagtgcatcttcattttacagggaattctttcaaatcaaataatcaaaaactgtaaaagggggcaaagtacttttttgcagatctacaagtttcttatgtaaataggaaaaaaagcctttgcttttctggtataagaatttaaattaaaagaggaatgaaactgttttctatccacaatgtgtgaggatgttttttatactgctgcctgaagtttaagttgctgattactttttaaatagataatttggtggtaagtactatattttaaaaatgcgtatgcccgttacccttcaattccattatactaaaatacccttgggaaatagagatacatgcactttgtttttcacagcacttattttaaaaagaacccatagaatggatcttataagtaaatttcagttgcatccataggatgcaataatatgtgaccatcaaaggtgacaatagatatagaagtacgttgatgtgcgaagatgtattttgttttagccagcgaggaaaaaagaatcagtttgattatacatttaccaaacattaagaatttaatatggtaacttttatttcagtattaaaatagcaattttatttattacttttttatatacagaattcgacaccaaattttggaacttaaa

SEQ ID NO: 35012 - DNA, 2300 bp, Homo sapien
gaagatccatatgtataacaagtccaatttgttacaatgtgactatagagaaaacataaatattatataggattttcaggatcataattaagtaaatgattttttttttcagataatactgtttgagattataaatcagctacaactaccttcttaaataactcttaattccaaactaaagaagttaaatataagaaactaatttacatgtatgtatatatgtatatatacatgcaatttacacatctttttaaacttttcttttccttcaaaactaccttaatcttacatcttaatttttttaaaccaagagtaggaccaccatgagaaatgagaaattcactatcagaagtcttacctggattgtaagttttaagaatcttctttttaagttccaaaatttggtgtcgaattctgtatataaaaaagtaataaataaaattgctattttaatactgaaataaaagttaccatattaaattcttaatgtttggtaaatgtataatcaaactgattcttttttcctcgctggctaaaacaaaatacatcttcgcacatcaacgtacttctatatctattgtcacctttgatggtcacatattattgcatcctatggatgcaactgaaatttacttataagatccattctatgggttctttttaaaataagtgctgtgaaaaacaaagtgcatgtatctctatttcccaagggtattttagtataatggaattgaagggtaacgggcatacgcatttttaaaatatagtacttaccaccaaattatctatttaaaaagtaatcagcaacttaaacttcaggcagcagtataaaaaacatcctcacacattgtggatagaaaacagtttcattcctcttttaatttaaattcttataccagaaaagcaaaggctttttttcctatttacataagaaacttgtagatctgcaaaaaagtactttgcccccttttacagtttttgattatttgatttgaaagaattccctgtaaaatgaagatgcacttttcaggccgggcgcggtggctcacacctgtaatcccagcacttctggatggcggctcactgcaagctccccctcccgggttcacagcattctcctgcctcagcctccggagtagctgggactatgggcgcccaccaccacgcccggctattttttttttttttttttgtatttttagtacagacagggtttcaccgtgtttgccaggatggtctcaatctcaatctcctgacctcgtgatccgcccacctcggcctcccaaagtgcggggattacaggcgtgagccaccgcgcccagccctaaaatttttacaaatgtcattacaatagtaaaagacagtaggtgtcatgcaaaaatgttaaaaccttgattttttcattcggcttatgtaaaattgataatcacagaaagagctcacattttgagaaaaatgtgtcttcccattcaggaacacagaacccacctcccacttccaagtttccttctaagaaccttcagtaaagaaccgatctacacaggtggatacggatgtaaaacggacagttttaggtgagagcttttcgctactgaaaatgactcacggttttttgtttgtttgtttgtttttctttttggagatggagtctcactctgttgccaaggctggagtgcagtggcaccatctcggctcactgcaagctgcgcctcccgggttcacgccattctcctgcctcagcctcccgagtagctgggactacaggcgcccgccaccacgcccggctaatcttttttttttttttttgtatttttagtagagacggggtttcaccgtgttagccaggatggtctcgatctcttgacctggtgatccgcccgcctcggcctcccaaagtgctaggattacaggcctgagccaccgcgcccggccgactcacggtattttttgatagaggaatgagttctctcattaggcacctcctataatgtgtataacaccatgttttaaacgtgtaggttaaaaataacactgtgtatgcttagcttggtgagttaaatcactcacattctccaccaagcgctccagctggggaattatgggggatgcagagcagctgaggctccgtttggcaccacccctctgagggtgccctccgaggccccatcccaggggctgcggggaagccgggcctggggaccccctcccaccctgggctgagcccccaccccactgcctgtgctgcctgtccccggcttccaggtctctgctcctgcgctccaggcagcgctccacttccg

SEQ ID NO: 35013 - DNA, 2300 bp, Homo sapien
gataatatcctgcagagtgttttccaacttggttccattctccccgtcactttcaggtacaccaatcagacatagatttggtcttttcacatagtcccatatttcttggaggctttgtttgtttctttttattcttttttctctaaacttctcttctcgcttcatttcattcatttgatcttccatcactgataccctttcttccagttgatcgaattggctactgaggcttgtgcatttgtcacatagttctcatgccatggttttcagctccatcaggtcatttaaggacttctctgcattggttattctagttagccattcatttaatcttttttcaaggtttttaacttctttgccattggtttgaacttcctcctttagctcggagaagtttgatcatctgaatccttcttctctactcgtcaaagtcatcctccatccagctttgtcctgttactggtgaggagctgcgttcctttggaggaggagaggcactctgatttttagaattttgagtttttctgctctgtttttccccatctttgtggttttatctacccttggtctttgatgatggtgacatacagatggggttttggtgtggatgtcctttctctgtttgttagttatccttctaacagccaggaccctcagctgcaggtctgttggagtttgctggaggtccactccagaccttgtttgcctgggtgtcagcagtggaggctgcagaacagcgaatattgaggaacagcaaatgatgctgcctgattgttcctctggaagttttgtctcagaggagtagctggccatgtgaggtgtcagtctgcccctactgggtggtgcctcccagttaggctactcgggggtcagggacccacttgaggaggcagtctgtccgttctcagatctcaaactgtgtgctgggagaaccactactctcttcaaagctgtcagacagggacatttaagtctgcagaggtttctgctgccttttgtttggctatgccctgcccccagaggtggagtctacagaggcaggcaggcctccttgagctgcggtgggctccacccagttagagcttcccagccactttgtttacctactcaagcctgggcaatggcgggcgcccctaccccagcctcgctgcagccttgcagtttgatctcagactgctgtgctagcaatgagcgaggctccatgggcgtaggaccctccgagccaggtgcaggatataatctcctggtgtgccgttggctaagaccattggaaaagcgcagtattagggtgggagtgacctgattttccaggtgctgtctgtcatccctttccttggctaggggagggaattccctgaccctttgcacttcccgggtgaggcaatgccttgccctgcttcggctcacactcagtgcgctgcacccactgtcctgcacccactgtcctacaatccccaatgagatgaacctggtacctcagttggaaatgcagaaatcattcgtattctgcatcgctcatgctgggagctgcagactggagttgttcctattcggccatcttggctccaccccctattaatgcagtttttgtgcctcattaatgacccatttgatttaatagttcttaaaacttgtgatgaatcaacagtgatggaaagttgtactgaatcatatctttttttattactatgaattatattgttagagattggctttaaaattgaagttacactaatgcattttaaatgtaatttggagctagtttagaattgttgaagctaggactctctggtgactcaggaatagtagaaattggtggggaaggcatttcacatcaagcctggaatctccctttattctcaatgtattagcttttcttatctttaccctgaaattttcactatcaaatatatttgagaggcaaatctttttcctcctttaatgtttgtttcatacacatagaataatactgtgtgtctgagattcagtttttgaaatgaaacatggagtctaagtgaccccttgtcgatgtgacaatggactggtctagatcacagcagttgggccccatattgtgacatggatgcttgcgaaaattctactgtgacctgttgctgaggtgatctgatgatataggtcttgcctttcattttaactgccattctggcaactgaacgttggcagtaaacgcagcttagttgtctcagaggactcacaatgggatgtgcttatagttgttgcctcgaaggtatgtatgttcatttccatcttctgactgcaatttcttcagataagccagt

SEQ ID NO: 35014 - DNA, 2300 bp, Homo sapien
ctcttttcttcctacctgccagcattcaaatggccacttctattaagtgatggaattcaagaatgtatttatttattaatcctgatattgtttcactcatccctcagtttaacatttagggtacaaagtagtcacctagaggtgccactcaatatacagcactgtgtttagaaattgagggagccatgaaatatttagcctctgctctctgagacctcagccaggtgcaaagaagagatgcagaaccacatttcagattgtgttgtgtacaaccagcagcaccaaaatgtgcctgggaatcatgggggtcagaaatttacctctgaggcaggtatggctgaagctttacgaaaagagatggggcccgtgccaggccttagacgtgcgagaaggagggcgtgtcaggaagcagaaacagtatcagcaaaggcgctgctgggaggcatgtgggcagtgtttggggaacggccaggggctttctgtgtcaggtttacagcatctgtgggaggctgcgttggtaaataagcccagagaagtaggctggggctacttacattaaaagtatgcatggcttgaaggccagctgagtggtataaatagaaactacaaatagtatcacatttattgaggacagcttgtgctgccaaaagagtttttaaaatttttttggattgtgtaattggtggataaagaattattgacctaaatgtatctgatcttagagtgttttagtatgctagattattggaggtgaaatggctaagtcaaaggtgatgagtgtttttgagactcttaatgttaattgcaaaattaacctctaaaaaggtaggccgggcgcactggctcacgcctgtaatcccagcactttgggaggccgaggcgggcggatcacgaggtcaggagattgagaccatcctggctaacacggtgaaaccccgtctctactaaaaatacaaaaagttagcccgatgtggtggcaggtgcctgtggtcccagctactcaggaggctgaggcaggagaatggtgtgaacccaggaggtggagcttgcagtgagccgagatcacgccactgcactccagcctaggtgacagagtgagactccacctcggaaaaaaaaaaaaaaagccagtgccaacttagaccatgactgagagctcttggtttatcttatccttgccgagctgggtgttacaacattgaagccttctgcagtgtcctccctccctttttctctctttctctctctctcctccctttcttccttttacttctcttatgataggctcgtctgtacttttttgatagaggtaaccatttgccacaccattttctgaagggcctgctctcttccccattcatttgtgatggcacatttatcctaccctaagctttgataacgtgtcaggatctttctgtcctgtcctctcaaagaggttaaatatttttttataatgacttataattgactgaagttataacagttttctcatgtcaagtataaaacaggccaggcgaggtggctcacacctgtaatcccagcactttggtaggccaaggtgggtggaatgcttgagtccaggagtttaagaccagcctggacaacatgggacaaccccatttctacaaaaaaaaatacaaaaattatccaggcgaggtggtgcacacgtgtagtcccagttactcgggaggctgaggtgggaggatggcttgaacctgggaggtgaagattgcagtgagctgagatcacaccactgcattcagtctggataatagaacaagactctatctcaaaaaaaaattgtatactttattgactcatttatgtctgatgggtatttttgattacaaattgtttagtcactactttaaagcctgctttatttttttcttaattttattgactcatttatgtcttagtcttttttattacaaattatttattgttcagtcactaccttagagcctgttttattttttcttaattttattgactcatttatatctcagccctttttattacaaattatttattgtttagtcactgccttagagcctgttttattttttcttaattttattaaaggatgatattgatgatgaaatgtcttacgatgatcatttagaggtttattttgaacaactggcaattccaggaatgatggaataaagcatacgaagtagaaggactggaacctccagaaaaagtactttaagttacctacaggtgatcctagtcaggtatgttacagtcttaatggcttttcagaaatttgacagaaaatcactattgatctcact

SEQ ID NO: 35015 - DNA, 2300 bp, Homo sapien
ttctgaagggcctgctctcttccccattcatttgtgatggcacatttatcctaccctaagctttgataacgtgtcaggatctttctgtcctgtcctctcaaagaggttaaatatttttttataatgacttataattgactgaagttataacagttttctcatgtcaagtataaaacaggccaggcgaggtggctcacacctgtaatcccagcactttggtaggccaaggtgggtggaatgcttgagtccaggagtttaagaccagcctggacaacatgggacaaccccatttctacaaaaaaaaatacaaaaattatccaggcgaggtggtgcacacgtgtagtcccagttactcgggaggctgaggtgggaggatggcttgaacctgggaggtgaagattgcagtgagctgagatcacaccactgcattcagtctggataatagaacaagactctatctcaaaaaaaaattgtatactttattgactcatttatgtctgatgggtatttttgattacaaattgtttagtcactactttaaagcctgctttatttttttcttaattttattgactcatttatgtcttagtcttttttattacaaattatttattgttcagtcactaccttagagcctgttttattttttcttaattttattgactcatttatatctcagccctttttattacaaattatttattgtttagtcactgccttagagcctgttttattttttcttaattttattaaaggatgatattgatgatgaaatgtcttacgatgatcatttagaggtttattttgaacaactggcaattccaggaatgatggaataaagcatacgaagtagaaggactggaacctccagaaaaagtactttaagttacctacaggtgatcctagtcaggtatgttacagtcttaatggcttttcagaaatttgacagaaaatcactattgatctcactggatgtttacatgaattttaagcctttggttttcttttaactctgttttttacaggtatgaattgataagaaatgcctgcaccttccctccttcctatctttcccttgcctacagaaaattaaaaggcaaaacaatagacatctgcatattcttcattcagatcaaccagtggctagcatttgccaccttttgcagtttctttctctttccataagtactttcttctctgaatcatttgaaagtaagttgcaaagagcatggtgttttaccccaacacttcagcatttatctcttgtgaataatgacatgttctatgtaattacagttctaccatctaactataatacagtaatttgatgtacagcccatattcagatttacctaattgtctccaaaatgttctttatttttgttttagatccacagtttaatcaaagattaaccttgcctttggttgtcacatctctctattcttttactttggagtagttctttcaatacatgaaacattttgaaaaatctaggctctttgttttgtggagtgacccataatctagatatatctggttgcttttttcttctgactagaatagattgagcattttggcaagaatacagattaaacagtgttctcatgaatggatccagattaaacagggaataatgcctaattcagattaggcagtgttgcgtacttaccacctcacaccaggagatgtttgcgtctgtttgtcccacgattgctgatgctatgtttaataattttggttgagatagtgtcaactggacatctccttgtgagggtagcttttcccttttgttattagtcatctgtggaatgagacatcaaagcactgtgaacatcttactccccggcaaacttcacgagctggtttcagcgtcattgctgaaggctcttggaaacattgcttacacccgtggttccaatggtgatttttctcattccttttacattgattacctgcctccttgagtgaggtagatgttgtctgctccccatgttttcccttcaaatgtttaattttaatttaaatgattaatacagctaagttattctttcaacaggcaaatgaaaacagtagcctaaagtgtcagtttcaaccagaaaataacagctctgatttctcatggctcatactcgtctgaaacgactcaggtagaggctgaggaaggccgtgttgtttgtctacctgggactagtaagtatagaaatagaattcctttgttcttaaattctacctttgactttacttttaaaatataatttctttggtacgatttagctcatgcctataatcctagcatttt

SEQ ID NO: 35016 - DNA, 2300 bp, Homo sapien
taaagtcacaataaacgcaccaggaataacacacttgcagcacattcacaaggtacagaagaagacacactgaagtctgcgtttcctcctttccctcttctgcagcctgccagctcctgcctctggaagaaatggctgtttagtttttgtacatttttccagatttattaattgaacaatcatatagcgctgacaccgtgacaaagctttctgagggctttgcctaccaatgtgaaagagccatttagttttcattccctgtaaacactcaggtggcagcaggaaggaaagccgtttgctctttttaactattccctataaatgagctgcgtttttaaaagtagctttacaatgctgttcctccagtgagatggttttatttttttactgtattctgtattttttaaaacaatttcttccccaatttgcattggagatgtgaatctgttttccagtttttccttaagtctcaccactgtctctttctctgtctcatgcatatatatatatatatatatgcatatacatgtatatgtatgtatgtatatatgcaagtatatgtatattatgtgtaaacaaacacacatttttctgttcagttaacaattacaattctccatttagacaggtaatattacttactccttcccaaatcctgtctgtcaccttctcaattaggtaatccctgaaaaattggcaaggtctgtattaatgcagtttttatacctcatcagtgcccatttgatttgatagttcttaaagcttgtgatgaatctgtggtgatggaaattttcactgagccatttcatatcttaatgggtatccactttgtcttaaacatggtaactctctcgtttttattctctaattttcagttgttgtgtcttttggggaccttgtcagttgccttccaagtgctaattctcatgacgagataagaatggctatgactgggtgttgattgatgagtcgaacacattgaatcctggagtttgaggttatcagaactccccacttagaaaatcatcctttatattttagaaaatcatcattgtatgttgaacatacaatgcttcttttttcttcatctccaggtgagtgaatagacaatctttcatgtatactttcacagagaaatctctcaagaactcagagagattcggaaattagtaagtctgcaacttagttacatacagagaaaaacagtagataatatagataggtgataagatattttatacaattactatgagttatattcttagagatcgacttttaaaaattgaatttaggctgggcccagtggctccctcctgtaatcccagcattttgggaagccaaggtgggtggatcacctgaggtcaagagttcaagaccagcttggccaacacggtgaaaccccatctctactaaacgtacaaaaattagctgggcgtgttggtgcatgcctgtagttccagctactcgggaggctgaggcagcagaatcacttgaatccggggggcggaggttgcagtgagccaagatcgcaccactggactccagcctgggtgacagagcgagactctggtctcaaaaaaaaaaaaaaaaaaaaaattgaatttatactaaggcattttaaactttcatctggaataaatttaaaattgttgaatatggaaattgctgatgactcaggaatagtaagagggatggggatagtatttcaagtcaaggaaggaacctcattttattctgaatgtgttagttttgaccctcttcaccctgaagttttcactatcaaatatatttggaaggcaggtcttctttcctcatttaacgtttatttcatacacagagaatagtactgtgggtgtgggattcagattttgattttgaaatgaactctgagtggccccttgtccttgtgaaagtgcactggtctagagagcggcagttggaccccagagtgtggcacgtgttcctgtgttcatttgaacattctctgatgacctgtcgctgaggtcctgtgatgatgcgtatcctgtcttccaccccaactgccactgtgtttcaactgtcgctggctgtgtttcaactgccgctgtgttggaactgccagctagactgctcaccaaaatgggaggcagcctctgctgctgtggtgaaggtgaaggtaggttcatttccatcttctcactgcagtttcttcagatgggccacttgtacttaaatgttttcctgatttatgtatttttcccccacctccagtttgtctagagatttacaaattggttttagagttttatgactcagtttgt

SEQ ID NO: 35017 - DNA, 2300 bp, Homo sapien
tgctttttgtgatccgtgttcaaaatctgcattgccaacattgcagctccagtgtaagcttgttattcaaataaatattttatttttaaacttgcttctgtactgtatggctgggtacaatggctcatgcctgtaatcccagcattttgggaggctgaggcgggtggatcacctgaggtcaggagtttgagaccagcctggccaacatggtgaaactccgtctctactaaaagtagagtataagtagtgtataagccccgggtcctaggctctgggtataagccccacgttttttctgggtataagacttgtgtttcctaggctctgggtataagctccatgtcctaggctctgagtacaagcccagtgtcctaggctcagtgtataagacccgggtcctaaactctggatataagccttgtgtcctcggctctgggtataagccttgtgatttagtctttgggtataagctccatatcccaggctctgggtataagctttgtttcctaggctctgggtataagccccacgtccttggctctgtgtataagccccaagtccttggctctgtgtataagccccaagtcctaggctctgggtataagccccgggtcctaggctctgggtataagctttgtttcctaggctctgggtataagccccaagtcctaggctctgggtgtaagccccgggtcctaggctgtgggtgtaagccccaagtcctaggctctgggtgtgagccccgggtcctaggcactgggtataagccccaggtcgtaggctcaccccaggatcccccagcacaggtccagtggcttcccattattagaggtgaatgtgatcctgggcatcatttatttgggggaaaattggattctttggggctccagttcctctctgctgctggctctcctaggctgccagtcccacatcccacttcccctgtgtagaagggggaaggccaccccctccacactccccccatgaggctgaaagtggccaaattctcccatagaaaaagtttgctactgctttgaataaacagaaattgatcatcccagccttaaagaaagttacatttgtctcaatggagttttcttgggaaacctcccagagaacagtagggagctgaaacttacgagctagagctctgggcctgatagtgagaggcctgcccctcacccctccctcagccctccggagtgcctcagctacctggtgtctgttgaccaacgcctttgcctccctgctctctaactcctgtttttccacaactggttacatttcttcttggccaggcctccaggacccccaccctctgcactgccctggatgctgacgaaggctgtccttccccctccctaaccagctcctcccctcctcccacctttggccatgcagaggcccagctacactgtgcctctgcctctgagaaatggctgggggtgcgctgcgggggagcctgaagctggggtagggatggggggttggggagagggcgttgttctcagagtcttctgggtcgcaaccccagcaaccccagcagtaccagatcttgcatccccacctggtttccttgcccgctgtgcagtggaaagggcgcacctgtttgaaaggagcggctgtgcttgcagaggtgcgctgacccaggatactggtggcctttccagcacccgcctgtctggcagctaccgccccacgctcctatccctgcctagtggcgccccgctgctaccgcgtcctgttctgacctctgccagcccgcgccccgctcccctccgcgtcctgctcctgcccgcgttctgtacctgcccgcgccccgctcctacgcgtgcgccgctcctatccgtgccccgctcctagctaagcccggcccgtgcccactcccacccgccgccttgcgctgccccttccggctcctcgccagcagccggcacccgcctagcccaacagtgacagagcagggcgcgcagccgctgagtgctctggagtccctgccccgaggtgccacgcccacgtcggcctcacccgggcaggcatggggcggtcgggcttagcgccgcaccccgccggccagagccactgtctctccagacgcggccccagcgcccactggggatggcaaagacgacatccggtgcgccgaggctgctcacaaaagtaagtcttgctggctgcaggcgcccgcatcggccagtgcaaaggtggcccagagtgccaagcggcggagccgaggctttgagaagcacctttctgcttgcgctgggcagcgggctgcgtgtgactggccacctggcctc

SEQ ID NO: 35018 - DNA, 2300 bp, Homo sapien
ccctaaatgtttaatagctttagatgaagacaacttaatgaatcctttcacaagggtgacttcacccattggaccagaatgtctgaaatctgctgggcataaactccccgtccaccagaccagtggttctcacagtgtggtccccagactagcagcatccacatcacctgggcacttgttagaaatgcaaatttcagggccccacccccaaaattctttttctcaatcagaaaatctgatgtgtgattgttagttcattctcgaattgctataaagaaatacctgagactgagtaatttataaagaaaaggggtttaattggctcacggttgtgcaagcagtacaggaagcatagtagcatctgcttctggggaggtctcaggaaccttactatcaagacggaaggcgaagggggagtggacatcacatggggaaaggggcgaggtgggaggtgccacacacttttaaacaaccagatctcaagagaactcgttatcacaaggaccgtaccaaagggatggtactaaaccattcataagaaaccacccccatgatccaatcacctcccaccagtccccacctctaatatcggggattacaattcaacatgagacttgggtggggacgcagatccaaaccataccagcaacccagcaatctgtattttgttgagttttttgtttttgtttttttgagatggagccttgctctgtcccccaggctggagtgcaatggcacgatctcggctcactgcaacctccgcctcccagattcaagcaattctcctgcctcagcttcccaagtagctgggattacaggcgcctgccaccatgcccagctaatttttgtatttttagtagagacgaggtgggccaggctggtctcgaactcctgacctcaagtgatccacccgcctcggcctcccagagtgctgagattacaggcgtgagccgccgcacccggccgcaatctgtcttaacaaacactctaggggattctgatgctcaccaaagtgtgaaaaacactgcattagacagtgcttggagagcacctgataaccattcctttaggaacaaattcccctcctattaaacacattattctttggatctgttaacatattttgcaaaacttctggagcctgagcagcaggattttgtcaataccccacatttagtgtaccaataggtcctatcttgattttaatggtcctgccctaaaaccaaccaaccagccaactacccaccgattcctctactggggacaacctttttcacctttataacttctgcttattcacaacatctaattattcatggcctctgctacttcatggcttcttttgtgcaccttttcagcttctgatcctgataccaactgaacaactgtctacgtcaaacttgtttaactccctgtttaacattaagagattttttttttcgcaactcttttcctttaggtcatcagctatcattagtgtattttatgtatggcccaacacaattcttcttcctggggaagccaaaagattggacacccctgctctaaatctcagtttaaactcctgagagacacatattgttggtgaaatcgcaaactggtacaatttaggagggtaatttggcatcatttatcaaaactacaaaaacatggcctttgccccaataagtccgcttttaggcatttatcctacagatacacatgggcgtgtgcaccaaaaagtggggtctctctctctcccttagctcggccagaagccaggtcacctaccctcggtcactcgggggccaggacctctctccctgcccctcagtcaaggccctctcagtccgggaggcgcttcacacctgggcagggtgggactgggcgcgcctcacttcacgctttcgtcggttggaagcaggtggggaagtccccgcggcctcggcgtctcgcacgcctggccccaacacctgccgaagccggctgcgactccatttttctttttttttttcctcctgggaaacggaggacccgcgccgccacgaagcacagcgaccccggccctgaccccagccgcccgccgccggtgggcggggcttggcggcccggcggggcggggctcggggcggggccggcgtggcggtggcccgggttgtagccgccgccgctgccgccgccccgccgccgccacctcagaagcaggaaccgaagtcgtcgccgccgccgccactgcctgggtcttcggtcggggcccgcagccatggaggatttcatcgtgatctcggacgacagcggctctgagagctccgggggcgccc

SEQ ID NO: 35019 - DNA, 2300 bp, Homo sapien
aaagggctaatatccagaatctacaaagaacttaaacaaatttacaagaaaaaatcaaccctatcaaaaagtgggcgaaatatatgaacagatacttctcaaaagaagacatttatgcagccaacagacacatgaaaaaatgctcatcatcactggctatcggagaaatgcatatcaaaaccacaatgagataccatatcacaccagttagaatggcaatcattaaaaagtcaggaaacgacaggtgcttgagaggatgtgaagaaataggaacacttttacactgttggtgggactgtaaactagttcaaccattgtggaagacagtgtggcgattcctcaaggatctagaactagaaataccatttgacccagccatcccattactgggtatatacccaaaggattataaatcatgctgctgtaaagacacatgcacacgtatgtttattgtggtactattcacaatagcaaagacttggaaccaacccaaatatccatcaatgatacactggattaagaaaatgtggcacatatacaccatggaatactatgcagccataaaaaatgatgagttcatgtcctttgtagggacatggatgaagctggaaatcatcattctcagtaaactatcgcaaggacagaaaaccaaacactgcatgttctcactcataggtgggaattgaacaatgagaacacttggacacaggaagggcaacatcaacacaccggggcctgtagtggggtgggtggctacgggagggatagcattaggagatatatctaatgtaaatgacgacttaatggttgcagcacaccaacatcgcacatgtacacatatgtaacaaacctgcatgttgtgcacatgtaccctagaacttaaaatataataattttttaaaaagttaaaaataaataaaaataaaatgtaagcaaacacttaaaaaaataaaataaattgaaagaataaaaaaagaaaaaaaaaatcctaaggaatcgacaaaaaaaagtttactcaaactagtgaacttagcaaggttgcaggatacagtatcaatatacataaatcaagtatatttatattagcaatggacaattggaaaatgaaataaaaatacatttctattttcaatatcattaaattcttgaggatagagagagaggtttgcataggttcagtggagacatgatagaggaaggggttagtttaaccagcggggagaagtgatctggaaggatcacttctgtggtgtctgtgctgtgtcttgaaagacaagaaactccaaacaatcaaagggatgatagtcattccaggtaaaatgaaaaaagcaaacattcctaggccctaggtgatccaccgcgcctagccggtgatgggttttaaatagtccaggcacagtggctcgtgcctgtaatcccagcactttgggaggccaaagccggggaatcacctgaggtcaggagttcgagaccagcctggccaacatggtgaaacctcatctctactaaaaatacagaaattagtctggtgtggtggtgtacatctgtaatcccagctacttgggaggctgaggcaggagaatcacgtgaacccaggaggcagagtttgcagtgagccaagattgtaccactgcactccagcctaggctaacagagcgagactccatctcaagaatgaatgaatgaataaataaataaataaataaataaataaataaatgggagagacctggtgatgttgcattttagcagttggctatgggagaggagttgagttcagacctttgatggcctttcagctatttatgttcagttcttgccattgagagccaagccaccaaaggtggtgatactatatggctgcttcctaagaatgaggcattagatttcaccaagcaatccctattccaggatgccaacttctcacttgacccactcagaattctgtattctgctttggtgctgttaacaatggtgaccatctattaagagaaatagcatggtagctgtgatagcagcaatagtattgctagcctcagggccctaaagtaccagtggcagtagtatccaagtaagtgagaagacagaaggtagagcaatatttttccaggctcatggtacagaggttgattacaatacctctgtactgtatcattaggctttgtgaatagcctgatcagtttgccaaggaatggaagtggagatcggaagttttcattaatttacttacttagggctcagacttacactattggttttattacccttgttatattatctttcatatctgtttctaggtt

SEQ ID NO: 35020 - DNA, 2300 bp, Homo sapien
agcagatgagtggttgccttggcctaatgattggaaagggaactgtaagtgcccatgagggatcttgtggggtaatggaaatgttctaaaaagtagattatggtaatgtttgcacaactcagtaggtttactacaaatcattgaattgtacttttaaaatggctgaattttatggtatgctaataaagttgttttatttatttatttttgagacagggtctcttgctctgtcacccaggctggagtgcagtggcatgatcatagctcattgcagccatgacctcttgaactcaagtgatcctcctgcctcagcctcctaagtagctaggactacaggcacatgctatcacgcctggataatttttttatttttatttttgtagagatgggggtctcactatgtttccggggctggtcttgtttcctggcctcaaatgatcctcccacctcagcctcccagagttctgagatcacaggcatgaatgactatgcccagcccacattatttaaaaaaaaaaagagagaaagaattatttggggaaaataggtattctcaagattcagcactattcttgagttgaaagagatataattacaggtagttaaaggaggggagaaaaaaacaaaactctagaaaaacaaaaaaacttcacaagaaaggaatgattttcttagtatactatatggatttactaaaagtagttagtaaacgtattagtaaatacttttaacagaatcctgacactgtaaacactatgtagttataacatttagaatcaatttatatacaaagcataggagacaattttattagccttgacgatgtaaaacggaaagtatagaagataaagtttgggagatgaaaagggacaggacctctgaaaatagcagggctggtgtaacatccttatcttccaaaatggggagtcaagagatactgtctatagatgatggaaatacacttcttttaggaagagaagaggtgggggattggcctaagtaaattcttatctagcatagcagaaagcaatagataatgtctacagttgataaatcaagaaatcataataaaagcctatttctttagagatgtttatggtgacttctagaagaatgagttaaaaattattctaggatactggagaacacaagtagtggtggagagtggagtcagtagaagactttctttttatcaaaaatctagcacaaggccaggcgcagcggctcacgcctataatcccaacactttgggagaccgatgcaggtggatcacctgaggtcaggtgttcaagaccagcctcaccattatggtgcaaccctgtctctactaaaaatacaaaaattagccaggcctggtggcaggcacctataatcccagctacttgggaggctgaggctggagaattgcttgagcctgggaggcagaggttacagtgagccaagatcgcgccactgcattccagcctgggtgacagaccaaagactccatctcaaaaaaaaaaaaaaaaaaaaaaaatctagcacaggtacatgattttttaaaaaagcatttgcatcagttatcaaggattagagaaaaataaacacctttggaagacaaagatattgtcacctcctcccaaaaaagaaagaaatgatatgtattcagaatggtcacttagtttcctactgactgaatcatatcctggtccattagtttatgttctgagaaaatatacctattctctggagttcggaggtttccacatagtccagaaatagtttggtaccttctggttctttaaagtttgaagcctaagctcccagcacttgtctggtagtaaagggaaaccaacaaattgtgcatgcttgcctactatgtgacaggtacttaacactgtctttggtaaggttagaattatccccgtgtaaactagaaggacagtaagtcctagagggcttaaataaaggacagagctaggtctaaaacaaacagcaacaaaaactgaatgctgcgtgcctccaaagcccatgctctttaactgtttgtcagttaggatcatttcacctgtaacagaatacccaactcaggcttggcccaacagtcaagttgagccaagccaacagacttggctcaatcagctcgcatgactggaagttcatcagtagagtggacatcatggcggtttgatctagcagcacaggagtcattaaagaaccagtttctctttctctgttttgccatctgtagttttgggtatatcctgaggttgataggttcagtgagagggagagattgacttcccatggctgcctcttaa

SEQ ID NO: 35021 - DNA, 2300 bp, Homo sapien
tgtgagccgagattgcgccactgcattccagcctgggcaacagagcgagaccttgtctcaaaaaaaaaaaaaaaaaaaatgtttacagtctattatttgtggaaaagaaataggtgctctcacataggtgctatgcaccaagaccatgacagcttcagacattggtaccacaaatatcagggataaagttttttttttttttgagatggagtctcactctgtagcccaggctggagtgcagtagtgtgatctcaggcctcccaaagtgctgggattacaggcatgagccaccacacccagccagaaataaatttttcaaaagaatcaatgccggaagaaataagatgtagctaaaacatcactatctgggaggagaggagcatatatatgtagtcaaagggaaagggggacaaatcagaaggaataggggctgggacccagagccaggggtacagaggaatcgcgaactaaaaggaggtgaagagttgagacaatataaagggaaagaggtagccctgctgggccctgagagccacaggcggtctctcaacccatgtaccctacagccagccgtacatggcgtcacccctctggagagccaaaagaacccgactgctgtactcaggtcgtttctcctgttcttcctcctcgtgctacacacgtggaagccttggcagtcactgggggtacctaggacaaggcagactgcagcctccgtctcccaggttcaagagattctcctgcctcagtctccagaatagctgggattacaggcacctgtcactacgcctggctgatttttgtattttagtagagacggggtttcgccgtgttggccaggatggtctcgaacgcctcagcctctgaaagtgttgggattacaggcctgaaccaccgtgcccagccagaaaaagttgttttaatcaaatagtaacttccaggaaagtcttaagttttcatgtatttgtggctaagaaataaatgagatgatcccaccttatgatctacataagggtgcaaagtgctatttcttccttttctgactgagaggtgatatacatcccttcctgtggtggataaagagcaaggtgccagctttgcttccacagaggttaaaaaatatggcatattttaaaagctccaaattaacaaaggaacacctttaacacacacacgcacgcacacatatacacacaattatactgcaatgtaattgtgctgttgataagctaattatagaattcatcaaagactttaattcttagtgcactcaagcaccctggtctggaaacagcgcttaagtttcaagtcgcatgagcaaggcctctcagttctgccagtacggctggaagcctcaaatgctgaaatctaaatgtgacattcaccctgcaccaccaatcatagctctcctgagatgagttttgatggcgagctttggactggggtagaaacgtggatagatttttgcaaattctgctgtaacttcgttgcttcgccttctttgtgaacccttcagggataagagaagtcttccttcaggatgtgactgacacctcagctggcgcctctaagcctcactctcctttatgtaaaagagaaatgatattaggatcgccttccctaggggaggcaggtgaggtcggttcccttttttggttcagctactagtacgaaccctgcctaaccccgctgttttgggagacagtccgtgctcactgcaccgcttgctaatcgaagtgacttctcatctctcccagtctcagcttcacctccgtgaagtgggaaaaacaggatgacaagtgctcgcacttggcagccctttttgagccttgagggcttgggtttgtgggtgtcattttactatgctacctccgtcttcccttagcttgtcacggacccaggcacagcacacgcgctgaggaagtggtggtgaagtgtggcgtttcctctcggggctggcggattccacactcggagctgcggctccacaactcgctgggcggcgaagggcatggggagggggcgggtctcgcgatcgtggacaacaactcccagcatgccctgtgctccgctgggccaagtctcgcgcgagatcccgcggtctccggaggctttatctgcagtgctgcctgcccgctgggtggtactgctacctagtgggtcttggggaccttcgaaatcgccgccgctctcacaatggcttgggtccagactgcgccacagcctctcgggagacgtgggccctcggaacctttttagtgccggactccgggccgcaggcagtcccgcggcagcaggat

SEQ ID NO: 35022 - DNA, 2300 bp, Homo sapien
cctgtggctctcagggcccagcagggctacctctttccctttatattgtctcaactcttcacctccttttagttcgcgattcctctgtacccctggctctgggtcccagcccctattccttctgatttgtccccctttccctttgactacatatatatgctcctctcctcccagatagtgatgttttagctacatcttatttcttccggcattgattcttttgaaaaatttatttctggctgggtgtggtggctcatgcctgtaatcccagcactttgggaggcctgagatcacactactgcactccagcctgggctacagagtgagactccatctcaaaaaaaaaaaaaactttatccctgatatttgtggtaccaatgtctgaagctgtcatggtcttggtgcatagcacctatgtgagagcacctatttcttttccacaaataatagactgtaaacattttttttttttttttttttgagacaaggtctcgctctgttgcccaggctggaatgcagtggcgcaatctcggctcacagtaacctctgcctcccagtttcaagcgattctcctgcctcagtctaccaagtagctgggactacaggcgcctgccaccacgcccggctccacgcccggctaattttttggattttcagtagagatggggtttcaccgtgttagccaggatggtctcgatctcctgacctcgtgatccggccggctgcctcggcctcccaaagtgctgggatcacaggcgtgagccaccgcaccagccaaacttttaatcttagcaattttgtgggttttcccctctaagtgggtgtatttttgaggaggagctaatttttttttctttttttttttttttgagacggattcttgctctgtcacccaggctggagggcagtggcgcaatctcagcacactgcaacctcctcctcctgggttcaagcgattctcctgccttagcctcctgagtaggtgggattacaggcacgtgccaccacgcccggctaatttttgtagagatggggtttcaccatgttaggcaggctattctcgaactcctgacctcaggtgatccgcctgcctcggcctcccaaagtgctgggattacaggcatgagccaccacacccggccagaaataaatttttcaaaagaatcaatgccggaagaaataagatgtagctaaaacatcactatctgggaggagaggagcatatatatgtagtcaaagggaaagggggacaaatcagaaggaataggggctgggacccagagccaggggtacagaggaatcgcaaactaaaaggaggtgaagagttgagacaatataaaggggaagaggtagccctgctgggccctgagagccacaggcggtctctcgacccatgtaccctacagccagccgtacatggcgtcacccctctggagagccaaaagaacccgactgctgtactcaggtcgtttctcctgttcttcctcctcgtgctacacacgtggaagccttggcagtcactgggggtacctaggacaaggcagtcagccctaaacattctgaagtcctgacactgcttaattcagcctgaccaggaccccagcaaaacccctgtggtccgggaggcagcgaaagaaggctagaggtggcggggagccacggacctgggttctattcctgcctctgccaccccactgccgtgtgatatcgggcgtcttgcttcaatttcctcccgaggtcttgagggatgaccgggagacagatcgcttgggtttgaacgcaggctacaccaaagcactacgatgcggcgttgggcgggttacttaactcctgggcctcggttttcccttctgcgtggtatcattgtaaggggtaacggagaaaagccgtgagctaacccctggtggatgctagcaagcaccgccgtctcccgtcctccccaggcacagcctctccttcctccaccctgcacctggcagggggaccggaggtccccgcgcgccggccagcgccccaccacccacgccgccgggtcccgggcggcctgccgtgacagcggcagtgcattgtggggcttgtagtgcgggactgggtctgggtgggtgggcgcggccgcagcagtcgcagcggggccatcttcggcgggcgagtgggctcggcctgtgcaacccgcacctgcgtccctcgcccggcccgatggcgccgcggccgctgggccccttggtgctggcgctgggcggcgccgcggcggtgctgggctcggtgctcttcatcctctggaagacctacttcggccgcgg

SEQ ID NO: 35023 - DNA, 2300 bp, Homo sapien
aaaaaccttagacaactttaacgaagtttaaaaagtatgttctgtttttgagcagaaaaaagattcgtgaactggttagtacttagcaccaaaagcagttcagaatgctcagccccacaatgtgtgtaggctacatttatagccagagaaacgaaaataacttaggttgcctgattggctgcagtctggcatttgccttacctgaacatgttttagcagccttcagccgacgattgactgaaggtttggctgctgtgattggctaaaattcggctacttgttagaagaacatacttttaggttaggttacgagttgtttacacgttaagttacaattcactgtgtacagaggcagctttaggccagacttaattcagcttcacagtgtccctcattttgctcagccccttaattttgagagattgaccaaaatcccacgcactgacactaccttctgtcactatttgacctcattatggaactcacagtttacaatgttaaatcagttagcggattctgtatgtcttcatgtttctgttactctaaccgtaatgagaccatttgaggtacaaaggatgactgcattggtgtacttaagactacaacacatcagtggggaccttaggatggctatcaggagtgtaataccaagaaactggaatgcatcccttaatatgagtctccacaaaccaaactgattggaatcaaacaactcaagttcagacgataaaaatagttcaacagcgtgcaagctctgctgctcatagcctgttcagggtataatggcaattaaggacatagttcactatgaagtaccttaattgtaaagtgtttgattttttagttagcttttggtaacacaagtcatggtgattgggatacccactaaaagaaacatgaagattagaaaaccttgaacagctaagcttgctgtctaccattcaggatgcctgcaaaccaaccactagctgctcctgcaaacacattatgtgttccttttccctgagaaatatccttgatgtgtttggtggcagtatctacagaagcggcagccaccaccgccttttgaagctctccatagtagtagaatcaggaaagataagcacagcgttcagttttgttcagcaccatacacaagctcctagctgggcaaaggaaatctaaagctgcatgaagttccattacgtgtttttgttgaacacaggtggcctcatccatccatccatccatccatccatccatccctccatccgtccacccgtccacccgtccacccatccacccacccacccatccatccacccacccacccacccatccacccatccatccatccatccactcatccacccatccacccatccatccatccatccatccatccttccatccatccacccatccacccatccatccatccacccatccatccatccatccatccatccatccatccatccatccatccatcatccacccatccatccatccatccatccatctgtggcttctacctgtgcgaatctctgtgctacaaaattcttttcaatttagcattaactttaatttccatacagttggcacctcactgccgccaaaagtgagtccgcaggaactccactggaatatttgctcaggggaaactaactaatcatctgtttcaaggttggtattcattttagtctttgacctctgattatggggactttcagggaaagctgtttgcaaggtgagcatgaatcaggtgaaacagcaagatctgaagtcaggacagagtaagcaaattatccacagacctaatatgtaccctctgaagctggaaagtgggggccacctggtagcatttgagcaggggtcacttatgttcccccataagtctgcacagctcctaaacaaggtccagtgggcaacttatttttatgtggtccctttatagcatgctgtaagggtgcataaccacagccagtgagaaggaaccctactggatttaacccagtgacattatataagcaatcgcttggagccacataggtagttcccaggtcctgaatatgtggtgcctgaaagcataggtgtaggcagtgttccttgcataggcattacctggacaggtttttttccatattggcacttattaattgaaaaggtcagggtaccacttccaatgagtgtagggaagcaagcagtagtggtgtttagaatatcaaggttagctgctggatgcggtggctcacgcctgtaatcccagcactctgggaggctgaggtggacggatcacgaggtcaggagatcgagacaat

SEQ ID NO: 35024 - DNA, 2300 bp, Homo sapien
agccagccaggacacagtcctaactctgtgaactttgaaccagctcacttctcccctctgaaacttggtttctccatctgcaaaatgaggacatcttagggcccttcccagcttcccacagtgcaggacagtgacctaaaggaatatatggaccacacccaccattcagcacatagggcttccgtacaagctctttaggcctctcctctatgtccacctccatggccttcacctgcagagaacagagcccttgagaccagaaggatctttgatgagggaaagttatagactcctgcttatcccaacacaactactaacccataagaatccctgcccacggttaggtagaagtaggtaacaatgagaactaatgccctggaggctttttctctctctctctctttttttttttctttttctttttgagacagagtctcattctgttgcccaggttcaaatgcagtggcacaatcttggttgactgcaacctccccccgggttcaagtgatctcctgcctcagcctctcaagtagctgggattacaatcatgcgccaccatgcccagctaaattttgtgtttttagtagagatggggttttgccatgttggccaggccggtctcaaactcctggcctcaagtaatccgtctgtgccttttacccccaacacaatcttggtgacaaggactttgtgttttgttctctattaaatccccagggtgcttaggatgtgacatgttctcaataagtagttaacctaatgaatgggcttcgcgaatgaatttgttccattgccttaggcaagtttctttttattctttcatgccagaggaaaatggcactaccatttcttgaataaatgtgaggctacagccacacagttagatagtccctaaggcaaggagtgttatacccattttatagataggcaggcagagaaagatgaattgcttgcttttcttttgggaacctggattcttttaatagttgttgaagcctccagggggccaggcggatcacttgaggcccagcctggccaacatagcgaaaccctgcctctactaaaaccacaaaaatcagccgggtatggtggcacacgcttataatcccagctatttgggacgctgaggtgggatatagcttgaacccgggaaggagactgcagtcagggaagcctagggaagcctcagaccaaggatgattgaataacaaagaaaaggtgtaagtaaagatctccaactcttagggagtactaattaggaaagttaagggtagaaaaagataaattaaggaaaataccgttgagatgctaatgggttaatttcagagaaaaaagactgagtagagggggtatggggaatgtgtgctggggagggagtgtgacgaaggtcgtaaagagacccttgctcaacgtcagttgagcgttctgactgtggggaggtcgaaaactcggaagggcctgagggaaggaatgggcagtaccacgttctgacacctaggtcagtatggcgggggaagagtaaagaagacaaggaccgagaccctgccatgtcagtacctttctcttacggaggggcaccgccctgttggggtccacagccaaccccatctcggccaggttctgccgtaccgatttagcgtggtcccaggcatgtcggatgtgggagctaccggcaaagagagacatcgcggatccgtcatctcgcggaccgtcccggccgaggcccacggccacccggaaccccagccccctcaccattcgatccgcggcgctgccttccgtcgagcattccggttcagacgctttcggttgacactgtaaccaaacttctgcctccgggttttgcccttggccttgggcatcgcgctgaccaccgcaccagcagctcaaacacgctgcctctgtctctcagacctcgtgtaacaaactccttccggaaggcgtgcacaaggctttgcgggcatttggggaaatgtagtccttttgtagcactaccgtgctgagcactacgactcccaggatgcaacgagcatttgcgcctgcgtacaaggctcaatttattcgtttccccgcccctttcatgaccttcaccgggaggctgaggtcggagtcccgattttctcctgctgctgtggcccggacatggcgactcccggccctgtgattccggaggtcccctttgaaccatcgaagcctccagtcattgaggggctgagccccactgtttacaggaatccagagagtttcaaggaaaagttcgttcgcaagacccgcgagaacccggtggtacccataggtaa

SEQ ID NO: 35025 - DNA, 2300 bp, Homo sapien
aaacactatgtacacaaatctctggagagcttcgggactgtgttcttcccactgtaccagactgcttctctgagcctgtttcctcttctatactgtgtcaagaaccagatggtctaggctgggcgtggtggctcacgtctgtaatcccagcactttgggaggccgaggttgggggattacctgaggtcaggagttcaagaccagcctggccaacatggtgaaaccatgttgttttagtattctactaaaaatacgaaatacaaaaattagccgggcgtggtggcacacacctgtaatcccagctactcgggaggctgaggcaggaaaattgcttgagcccgggaggcggaggttgcagtgagccgagattctgccactgcactccagcctggctgacacagtgagactcgtctcaaaaaaagaactagatggtctagatcagtggagccccatagactctagggaggtgggagcagggtgaggaggttatgcggagtggagggcagaaccctctgcctctgacccgactatgggaggcctcatctgaaggaaggttgtcctactgaaagtctgaaaaactgctggctagaccagtatttttcaaatggcattactctaggcccactgaactagaatctcaaggagtgaccttgagattctttttttttttttttttttttgagatggagttttgctcttgttgcccaggctgaagtgcaatggcgcgatctcagctcaccacaacctccgcctcccgggttcaagtgattctcctgcctcagcctcgcgagtagctgggattacaggcacgcaacaccacgcccagctaattttgtatttttagtagagatggggtttctccatgttggtcaggctggtcttgaactcttgacctcaggtgatccgctcgcttcggcctcccagagtgctgggattacaggtgtgagccactgcgcctggccaaatctctgctttcaaagtgccctgggtggctgttactaggaaagttcgggaatcactagactacacgatttctaagcaccactccaaagtccgtttcctccaaaatcaaagaccaaaaaccatggggatgatactgaattaaatacaagtggatttttagagtttattaagcaggggagtggaggggagatgtggcacaaatagaagtatgtaacattcaaacaacagcatctaggatttttgaaaaaactttcggttacagttacacaaagggtcacttcctccccagcgacacatgggcctctcaaaggagaggagggagtaagtcccacggtagggccagtggttgctccctgggttttggaatcatttctgcggagctttcaaggccagaccctgggcttagggtcgagacttcatagcagtgacagccagacccagcaagatggctgcgaccgtgaaaccctgggcggcgatccgggtgcgcatcatgagctgagagcgctggctgttgccccggtggaaggagtagaggccgtaggtgagggcggccgccgtggccaggcaacctgaggaggggacaaagcaactgggaaacagcaggtcgggccccgcaggtcattccccgctttgggtctcgcttccccaaagccaagatctctggatcacagcggagggagggcggcgagggtaggtcgagtcgaggtcttcctagttacagagtcctcccaatcttaggccccaaatcccgccccctaaacccgctgctcccgctccaatcagtttcgcccctcaccgccccgccccctcgtctcttctctagtccgctctccttccgctccccgctagcgctctggtccttctctacttccttccctccgacatcactgtcctctccttgtgcagttcctaccgcacccacttacctatgggtaccaccgggttctcgcgggtcttgcgaacgaacttttccttgaaactctctggattcctgtaaacagtggggctcagcccctcaatgactggaggcttcgatggttcaaaggggacctccggaatcacagggccgggagtcgccatgtccgggccacagcagcaggagaaaatcgggactccgacctcagcctcccggtgaaggtcatgaaaggggcggggaaacgaataaattgagccttgtacgcaggcgcaaatgctcgttgcatcctgggagtcgtagtgctcagcacggtagtgctacaaaaggactacatttccccaaatgcccgcaaagccttgtgcacgccttccggaaggagtttgttacacgaggtctgagagacagaggcagcgtgtttgag

SEQ ID NO: 35026 - DNA, 2300 bp, Homo sapien
ctgacctcacaatccgcccaccttggcctcccaaagtgctgggattacaggcgtgggccaccttgcccaacactgcaaactgtgttatcagcaaggtctttatgacttgtattttgtgctgacctcctatctcatcctgtgatttagaatgccctaaccgtctgggaatgcagcccagtaggtttcagcctcattttacccagatcctgtttacgacggacttgctctgattcacacacctctgacacaatcatagctcactgcaaccttgacttcccgggctcaggtgattccctcacctcggcctcctgagtaactgggactacgggcaccataccaccatgtctggctaattttttgtagttttagtagtgatggggttttgccacgttgtccagactggtctcaaactcctgggctcaatctatccacccacttccacctcccaaagtgctgggattacaggtatgagccatggcacctggctaataagctcttatctgcagaaaaccctaaatattccacacacaaaaaatgttagagctaataaatgaattcagcaaagcagcaggatacaaagccaatgcacaaaaatcagttaaatttctatgcattaacaatacgcaatcaaaaaagaagataaaacttccacttacaataacatcaaaaaggccaggtgtgttggctcatgcctgtaatcccagctctttggaagtctgaggatgagaggatcacttgagcccaggagttgaagctgtagtgaactataatcgtaccactacactctagcctgggcaagagtaagatcctgtctcaaaacaaaaaacaaacaaacaacaacaacaaaaccatgcaaatggacagcaataaataaatacattaatttaattaaataaaacaataaaaacccccccaaaaacagtaacatcaaaaggtgctcaagttgttaccaattaaactgaaagttccagctgggcttggtagctcacacatgtaatcccagtgttttgggagaccaaggcaggaggatcccctgaggccagcagttcaagaccagcccagttaatatagcgaggccctgtctctaaataaaaaaattaaaaagaaaaaaaaaaaaacacctggaaggtcccttcaccccaactccacttccacccccaacttggcggcacatctttcctttcgctcttccagtccatatttcatagttgcctttcaagtcccacattagaaatagcagacagcccaaatcccatggtgtttctttgcatcgtctccctataccccgtgtttaaatgtcacagcgcctcacacacagtgctttgacaggccatttgccatctgttggtctcaccggattgtaatctccgcatggccatggctggattttataaaacgttgctgtcctggtgcttggcaaagcgcaggcagggaggaggcattcagagcctgttcacagagggcagcgggcagcgtggagagtggtaggctgcctgggtaaaccaggtctgcctttctcaggctggttcatacctaaaggacatttaaggggcctagctggccatccaaactctggtcgtatgaactgaagcctcctcaagggagatacacaaaaaaatacacaaaacaacacggcctagtgggaaaggacctggacttgcatgaaaaggtgcggggcagcctttcccagcctcaattttcctcttcttacagaggcggaggctcatagaatgaggtgcatgacatcccaacctaggagaagaaacttctgcagaatgaatcaggagccaggtctgcgctcccgaggccagaggtggcctcctgtcgcagctctgtgcacggtacggccactctgtgccctgcgtttcgcctccaggccgggcgggagcagtgcctagcccaggtgtcctcgacgcgagcagctgggcgccgctgcggagggagggaagcgccgcgccggtcccgggcccagcgctgcgcccagtcctgaggcgccctcctgcggccgctgctcggcgacctcccggccctgcggccccgcccccgcggtgacgtcaccgcattccggctccgctcctcccgccgcggcgcccgcaccgcagtgacagccagccgggcccggtggcggagaggaagtgcggtccgcgccaagcccgtccccgccgacgccggctcccccgcggctcgggtgacagcgtcgcggccgccggacgcagcgcggggcaggcgcgggcagagccgagcgcagcggaggctccggcggaggcgcggggaaaatggctgatgactttggcttcttc

SEQ ID NO: 35027 - DNA, 2300 bp, Homo sapien
ttacccaggctggaatgcagtggtgtgatcacagcatacaacagccttgaactcatggcctcaagtggtcctctcacctcagcctcccgagtagctgggactacaggcatttgccaccatgcctgctggcaagtatatatcttaagtgagaattacacaattcctgaggacatctgactttgccaaccctcatttagtttatctgaacccaacgttattggtgagattgaacaacactgagtttcctttgagctttgagctgctgtaataaattctctatagagtagcagctatctgcttccgattttaccttcgggggtttttacttaattgacatattatttatttatttatttatttttgagacggagtctcactccgtcgcccaggctggagtacagtggggcaatctcagttcactgcaacctccgcctcccagattcaagcgattctcctgcctcagcctcccgagtagctaggactacaggcgtgcgccaccaaccctggctaatttttgtatttttagtagagacagggtttcgccatgttggccaggccagtttcgaactcctgacctcaagtgatccgcccgcctcggccacccaaagcgctgggattacaggcgtgagccacagagcccggccgacaccatttttaaacggaaagatttcatatgcagatccaaatttgcagggtttttgttttgttttgttttgtttttccaattagcactttttgggggttgtgttttagggcgtaccatgtgctgtttttccaggacgtcgtggtttgtgcagacctggtaagacctgataagtcctgaaagaagtagccaaaatttcatgtactcttcacagaaccagctctcaaagccttttctgtctcaccggatcaaccctgcaaggggacgagggtggggcgcaggcggccgagagccttgctgagaatcacacaggtggtcagtggaaaagcgtgtaccagacccaggcctctctggaaggtgggcagaggaggcgttcggcgggagaggtggaaatgaaaacgggaaatctaaagagaggtggcggactagaaggggcaagggacgtgcagaggaagatagagattgaggggtggtgatagggtagtgtaagcagcagaagggaagggcaggggactgcctcgaggagaaggggcggcggcagcacgtcaggggcttttggggaatctcattcaacaaatggcaaaatggagcccaagtggtttgcccaaggatgtccagcagttggcaaggtggcaactagaacccgcgtctcctaatcccggtccagggatctttcttcgcctgtcacagagacaaggggccagtgcagcgctagtgcggagagacaaggctccaggcacggaaaagcagatgccgggccggggttccagcgccgcagtcacggcggtggacggcaagctgtgcggacgactgggggcgccatgaatggtcgaggatccggggagccgagtccagatcttcctgcaagtgaccccgaagcggcaatggaacggtggccgaagtctgcccacagcttccgcttcgaaggcggcgtcggaaatgccgcgccagtatccagagcccttcggaacctcccgagagatggtcaggagcttttggaaactttaggtcaggggccagcgaccaaaaggctggtatttcggaacggctgcgtctcccgagaaacctccaagagtatctgaggttgccggaaaatggttagagagcagccgaaatcagccgaatgccattcgggatgctccggagcttctcgaggcacattcgggccctctcggctctgcaagactgcactggaatcttaggtctcctttcgtcgcctaatcttagcagatcctttcgtcgcctaaatggtaagagcgacttgtaccgacagtccctcggcaatttccggaagtgttcgggataggcccgagcgtggcgccctctggcggcggccagaggtggcggggggcggggggaggttagtgggccagcgcgcgcagacgcagttgcgcgccggcggccgttcagaccggatgtggttgtggctgaggtcagttccggcgggtgacggtgcggacgggtcaggagcgtagaggcggcggcaaaatggcggcgcctgaggagcgggatctaacccaggagcagacagagaagctgctgcagtttcaggtagcagcgagtactcggtgcagcagatgcctccgtgggatggggagtaggcccctagaggagttcagaaccctcctcagattgggttcagatccttctcagacca

SEQ ID NO: 35028 - DNA, 2300 bp, Homo sapien
cacgttccagggaggcattattggccctgctttacaggtaggtaaactgaggcccggggaaagggccacactgggtgactagcagagctagattcccacggggctttctctgccccgggggcctgggagtagaggcacagtctggtctgcactgaggtaggccgccgtggagaagggaagggagccggcagctggatgtggcaggatgatttctcctgagagtagccctcgcggtcagcttccttttcatactttcccggcgttctctccacccacaggtgcaccagggacctgtccctctgtcctacacggtcaccacagtgacgacccaaggcttccccttgcctacaggccagcacatccctggctgcagtgcccagcagctcccagcatgctccgtgatgttcagtgggcagcattaccccctctgctgcctcccgcccccggtgagtgagtgtttctagctcctcctccaccagctgcaagccccaggcacaggccagcggctcagcgggcccagggcagccctgaactgggctgagctatccagccatccaggctgtcagagcgcctgcctggcctccccaggaaagcatacgcgtgttcacatttggtaatagagtgtttcaaggttcaggaaccttccagtacccctgtacctgcctcacagcttggcagaggcccaggagttgaggctgtgggccttaacagtggagtgtcctgcctgggtggcctaggacagggatgggccttccacagggtttcttatacagaccctggagctgctgggtgtgtgcccggtgggggccttttgctgggtggcatggcgtagacctggcccagagcccaggagaacgttctcagccccctgccccctctcttggcagcttatccaggcgtgcaccatgcagcagctgcctgtgccctatcaggcctacccccacctcatctccagtgaccactacatcctgcaccccccaccaccggccccacccccccagcccacccacatggcgcccctggggcagtttgtgtctctgcagacccagcaccctcggatggtgagtcggcatgggtccgatgctggagggagatggcgtggggggaggcagggtgaggacagcctcgtctcactgacttgctgacccggcgctggttcttccagcccctccagcggctcgacaacgacgtggacctgcgtggggaccagccctccctgggcagcttcacctactccacctctgcgcctggcccagccctttccccgtcggtgcccctgcactacctgccccacgatccgctgcaccaggagctgtcctttggtgtggtgagtgccaccccgacccccacctgggctccagggcagctgggaggcagacccgctgggccgacctgcatctgggctcccaggcagctgggaggcaggcccaccgggctgacttgcacgtgggctccggggcggctgggaggcaggcctgctgggctgacttgcacctgggctccggggcggctgggaggcaggcccaccgggctgacttgcacgtgggctccggggcggctgggaggcaggcccaccgggctgacttgcacctgggctccggggcggctgggaggcaggcccaccgggctgacttgcacctgggctccggggcggctgggaggcaggcctgctgggctgacctgcacctggcccctcttgcagccatattctcacatgatgccacggagactgagcacccagagataccgcctgcagcagccactgcccccgccgcccccacccccacccccaccaccctactaccccagcttcctgccctacttcctgtaagtatccgcacatccgccccaggtccctgatgccctgttctcctggaacctccagtggttagacctaaacacagctccaggggccccagggcctctgaagccacctggcgttccccccttaacctgacaggcacgccagctgggctcccttccccgctgcaacgttctgggctctgtttgcaaggagggagtcaggagagcggctctgtgtgccccactcctgaccttgaccctgggcccccacacttgtctctctctagctcgatgctgccaatgtcaccaacagcaatggggcccaccatcagcctggacctggacgtggatgatgtggagatggagaactatgaggtcccatggagccccatgctgggaggtggggtttgggagacctgcagccctgggcgccgctgaccccgtctcctgcccgcatgcaggccctcctgaacctggccgagcggctgggagatgcc

SEQ ID NO: 35029 - DNA, 2300 bp, Homo sapien
agacagggtttcaccatgttggtcaggctggtctcaaactcctgaccttgtgatctgcccgcctggatctcccaaagtgctgggattacaggcgtgagccaccgtgcccggccatggggagggttttcaaattgcttttatgtggtggggaaaacaaaaggttgaaggagacattggaggtaaaggaacagttgatgataaggaactgggtaaagacataaccttgtatagccacacttattctcatgcacatgtaatttttaactgtgatggatagagtttggcgttccagggagcatcgatagcactgcatcatgaccttgctcttgtgttgcttagagatctgccgacagccggctcagttccatcttcagtcattgtgttgcacagtgatacgatcattgctggtctaaacattgccataaacatgtctgttccccaagctgaaagggggtttctgattctaagggaacaaaaggttttctggcttaaaagacttaagacatagtctttataatagctttctttaaaaatttcagtgggttataatgcatagggtttttaaaaaagagctaatgtgcaatatatacaatagtctatcctactgacccaacttctcccttccagttctccctaaggacaattgttaatcagtttcctgtatacccttccagaaatatatgcagatgtggcatatgtccaattaaagaaacctgatacatactgttagaactgttcagcatcttggtttcaatttttatataaaatttaggattacgaaatataccaaagcagcatagaaaatgagccccccatccccctgccccatggcccaccacacaggttaacagatgttaacattttgcattggcgccttgtttatggctgtcttggagatagccccgtgtcgcctccagctgcctctttgtggtaactgcccaagagtcgttattgattatatgcatgcacccaatattcattattcgacctgttccagctcttggatatttagcaaattactgattttctgcttatataattgtggtggaggtaataccccattttgtataaattttgcccgggtgggtgggcttcgaggcaaaggagaacgaggctcggctttggattaggttcacactcctgctccgccacacttctagttgtgtgatctggagtaagggaaggccctcactttccccatctgtaaaatgaactggctatagtaatccctccgtctcatagctgctgagaggaatagaaaactaaagtatagacgcttcactgggcttagttcccagtttccctggctagggaggtctccgcggggacaccaaactctcaagcccagcctagcagctagagcgcccagcgcctgcacttttgctttaaactacaacctgttccccgcctctcttcctccaccgccacgctgggggcgtggcggttaaatgtctctgtgacgtcagcgcgagcagggccaatctccttgcccggcagacgttagctcgtttgcatgggtggtccgccattggtctgttgggcaatctgggccgtaccagctttttaaagacgccgtgtagtataaacaaggagaagtggggcggccgggccatgatgtcagcgcggtgctgcagctcttgggggtgacgtcatctccgggaaggtggccggcccagggttgttagagccagcataaccacttgggccgctctcgccccgtcagaggtcagacccattgcacttcagtatctcaggcggcaccctgtccccgaggaggggaccatgacacagtaagtccgtactgccggttctcctggcgggacccatttcttcggcagggaaactgagcctcagaggcgcgagtagttagcgagtttgcatagcaagttcgagttgcagccgatcggttttgcccaccctggggtctccccatctttatgtcaggatatgcggccccgccccttgcttttgactatggctgcggtccctttaagtgcgaaggtgggggcgaggaggaggttaaaaaaattcaagatggtggcccactagtcacgtgcgtggtcgcggcgagtgattggctctcagggcggagctcccggcgcggggcggggcccctgcgggcttgcagcgggctactgtttgccggagcctcccggcgcgcccccgcgagccccctcccgtctggcgcgcgaccccgccgcttcgaatgttgtgaatcaaatgtggggtttgttacattccgctgccgccgcggacagttcttaaagggccagccgccggctgccgcgcagacccagctg

SEQ ID NO: 35030 - DNA, 2300 bp, Homo sapien
gatggatgctggactcaatggatctcaattcccttttttctttgcctggggggaagctcagaacctgattcatgacccatctctacaattacccagaacttgaaggcaaatatatatatatatataatttgtttattttttgagagagaagctcttgttgtctaggctggagtgcagtagctattcataggcacagtctcactactgatcagcacctgaagtttgacctgctctgtttctgacctgggctggttcagcctttctgaggcaacctagtggtcctctgctccttggggttcaccatattagtgctgaatttagtgtggacaccccatcagcatagtgccctacagcacagaaatcctggcctcaagccatcctactgctgcagcctcccaagtagctgggactacaggtgcacagcagtgcccccagctcaagacaagtattttatggcctcaattcaggcgtagattacccttatttttctcacttgacttcccttcatctgggtttcttctttttatgctggtggcgtataaattttgttactatgttttacatttggagagttgggaagcaaactattaaaatgcctgactatagcaactgcctgatatacagtcaacacaacccttaacaacggggacaccttctgggaaatgtgtcatcaggcaatttcgtcattgtgtgaacatcacacagtgacttacacaaacctaggcggtaccacctactacacacccagtctctataccaccgcctgtgctcctgggctgctaacctatgcagcctgggactgtaccgcacgctgcaggcaactgtaacacaggggtaagtatttgtgcatgtaaacacagaaagggtgccatgaaagatgatattatactcttatgggaccgctattatatgtgtggttcgttgttgaccaaaacacagatatatggtgcatgactatatatctattgtgaattagacatgtcctctgcccacaagaagagggccacccaatggtgacgactcagtggtgtgccttaagaaagttgtgcccagggtcccctttctgtgtcaactgtgatggctgggccaaagtgaggataagaaggacttgtggctgagccccttcgggaggccaccacatcgggcagcgcttaaagccagcctgggggccgagctccgtggctcatccctgtaatcccagcattttggaaggccgaggcaggcggatcgcctgaggttaggagttcgagaccagcctggccaacatggtgaaaccctgtttctactaaaaatacaaaaaaaattagccgggtgtggaggcccacgcctgtaatcccagttactcgagaggctgaggtaggagaattgcttgaacccaggaagcagagattgcagtgagccaagattgtgccacttcactccagcctgggtgacagagcaagactctgactcaaaaataaataaataattaaaaaaaaaaggcaacttgggagtggatgaagcccctggggacgggcagatgccttttgagggtctcaatgcggggtgagatcagtgtcaacaggctcgaaagtgggttgtccaggctcagctagcccccagtcctccacgagaacctcacaggggctggtctggccacacagtgtttgattgttacactgttttaccacttccctctcctgactcaatcccccacttgtccacagatcccctgtcactgaagactcgtagcagggaggggacgggggctctggcatcaccttctgactgtcaccgtccccgcctccagcctgccccagtgttgggccttgttcccaggtcctctgggctcagggtcggccaggccccttctcctgtggtgtgggcctccagccccaggagcgccaggagctctggcgccttggtcccttcctcctgtccggcgcccccagctgtactctgcctcattaggagtcgacccctcctgggaggtgtggtctctggcagggttaatgattgctcagtggaggtggagatggtgccaaagtctgctggccacatagctgcaggccgcagagggtgcccacctgtgtgccagcgcctgtccggcgcctgcctgccgcctccgtggcgaaggggacacaggtagggactatccagctcatcgggggtctctgggccagagaaatgtgggggttggggggatccctagagccaaggcaagcttgggggtctttaaaagtctcccctgaagctgggcaggggaagtcacacgctagatggggcagagccgggtcaggtcccagcctgctgtgaggcct

SEQ ID NO: 35031 - DNA, 2300 bp, Homo sapien
tactcgggaggctgaggcaggagaatcacttgaacaatggaggcagaggttgcagtgagccgagatggcaccactgcactccagcctgggtgacagagtgagactctgtctcaaaaccaaacaaacaaaaaaggctgcggttatggctggtggaacaggggctcagttcgtcagcagctgtgaactggatgagctgtaattgctttaatttggcttttctcgaggccagtgcttatttagctgctagagaaaaagaaaaaaaaaaccctcatggcagttagaacagagtttcttctgtagggctgcctggcttcaccctggcctggcatggcctcaggtcctgtttataatttggcatcttattgccacggaatgtctattctttcagtcctgcgaactctattttaacattaacgctggtcggttattgtgtgtcgcctgtaaaagagaagggtataatgaggcatgattgacctcccatcccgccatggctggaaactaagttttgaaagtttttctggggtctcctgggccacaagtggggccgtttagtcagtgggaggcataggattttatttttagtttacagtagcaaatgtgttcctttgtttgctttcaagcttgtttaattcatttttggaaaagttaacatattcaatcagcacaaaagagtatacagtaaaaaactgggcacagtggcacacgtctgtaatcccagctactcaggagttcaagcccagaagttcaaggccagcctgggcaacatagtgaaacactgtctcaaaagaaaaaagtatacagtaaaaagccctgtcttacagaaagattatagagtagcacagtgaacatagagcatacagacaactttctagacagacagcaagaaacaaaacgtgtgggggcccatcctgctctcctgctttctgtggagtgacacatcagttgtctttggggattcttttttttttgagacggagtctcactctgtctcccaggctggaatgcgatggcgtgatctcatctcactgcaacttccgcctcccggattcaagcaattctcctgcctcagactcccgagtagctgggattacaggcacccaccaccatgcccggctaacgttttttgtattttgttagagacagggtttcaccatgttggtcgggctggtcttgaactcctgacctcaggtgatccgcccgcctcggcctcccgaagtgctgggattacaggcgtgagccaccacgcccagccttgtctttgggcattgaaagggccttgatgtttcaggtctctctgtgacagtgaatcaaagtcccccttttctccttttccctaacaagggacggcttgcaacataagatgatcaaaaagactggcccagcagggttttctaaggtctctgtctggctatcaatcaacaagaggatcccagagtatgcagccctccctagacccacctgactggggaacccttctgctgtggcgcatctcagagggccagggttccacggagcacagtttgggaaaggctgcaaagacagccactagatgtatcagcaggtgaacgaaggaccctgcccacccatagtctctggatggtcctggacaaattatggtccctctccagggtcttgattgtgaaggatactattagtttgaacacttctaacaggcaggtatagatggtgcagtggttgagagaatgaactctggactccaaaagacctgtgttccaagcatggtcttgtcattgactccccgtggcctcaggcaagccccttcgtatcttggtgccttagcagccacctcacagttgtgggaataacacagctgcacatctagtgccttggagcatttcctggtgcatggcaggtcctggattcaggttcagacatcgtggtcacccctaccccacctggcctcccccttggttcccctgaccctagagcatctggaaaatggacagagggtgatagaggccctgggggagaactactaagcagcagtggtgggtgggctcaggtcagacccaggcagatgggagtctgccaaaaggagggaggcctgagtccaggagccattccctgacctcttcccttaggtccctgcggatgtgatggcccagctatggctgtcctgcttcctccttcctgccctcgtggtgtctggtaggtgtctcccctccccagccacgcagccctaacctagagacccttggcaggaccctccagaaaggagggggatccctcatcagcaaacaccagctcctatgggccagccctgtgcttggctaagctgg

SEQ ID NO: 35032 - DNA, 2300 bp, Homo sapien
gtcatatgacattaccaagattttagtatttttaaaatttatttaaattacataaatatattatttatatcatatgagggcttttttgtttacatataaatatattggttatattttaattgtaaattaaatgttttttttttttttgagacggagtctcgctctgtcgcccaggctggagtgcagtggcgcgatctcggctcactgcaagctccgcctcctgggttgacgccattctcctgcctcagcctcccgagtagctgggactacaggcgccagccaccacgcccggctaatttttgtatttttagtagagacggggtttcactgtgttagccaggatggtcttgatctcctgaccttgtgatccgcccgcctcggcttcccagagtgctgggattacaggcgtgagccaccacgcccggcctaaatgtattattaatgtatataaatattgattagaaaagtgccaaatacctctccaccccagggctccagaggcaaaatcactctcaactgctttggctgaatatgttgcaactacactcttatttcccactttgggaggccgaggtgggcagatcacctgaggtcaggggttcaagaccaccctggccaacatggagaaacccccatctctactaaaaatacaaaaattagctgggcatggtggtacacgcttgtaattccaactactcaggaggctgaggcacaagaatcgcttgaacccgggaggtggaggttgtattgagccgagattgcaccacctcactccagcctgagtgatagcacgagactccgtctcaaaaaaaaaaaaattacagataaaacgaaagtccccttggaaaatcctttccagctcactcccactgaagtgttgaccgttactgtatgctttgacacttctcagcgctgaggtacatgcctccatgtacttcttggtgcattttttgaaacccagtggaatccagctgtctatattgtcttgaaagctgccttgcccactcagcgattgagcttagagctctctctgggtcttacaaatccccaatttttgtaacgtctatatctatggtgggaactgcccttaagctggttccctctggtgtccacatagttgttcacagctttatactatggcaaacaaagcgaacgtgcacattcccgtgataggacaggcacttttttccaactttttattttatctttttgagttaggatcttactcttgcccaggctggagtgcagtggtgcaatcacagctcacatcagcctccacctcctggactcaagcaatcctcttaactcagcctccagcgtagctgggactacaggcgctcaccaaccatactcagctaattttaaaattttttgtagagacagagtctcaccatattgcccaggctggtcttgaactcctgggctcaagcgatcctcccatcttggcctcccaaagtacacaggcatgagccactgcgcctggctggctggcatattttatatttaaaaaattaactgctggcgtggtggtgcacgcctgtaatcccagcactttgggacgccaaggcgggcagatcacctgaggtcgggagttcaagagcagcctgaccaacatggtaaaaccccatctttactaaataccaaaaactaactgggtgtggtggtgcatgtctgtaatcccagctactcaggaggctgaggcaggagaattgcttgaacctgggaggcggaggttgcattgagatgagatcacgccattgtactccagcctgggtaacaagaatgaaactctgtctaaaaaaaaaaaaaaattaactaatgatgcctgcaacttactttcaaatggttcagaaaacaacatatggagagaacctggtctctacaaaaaaaaaaaaaaaaaaaaaaaaaaaaaaagcccccaaaaacatatggagagaaagagagaccaaacagtaggttgatctggatgaaggacaccagctctttgtacgatacttgcaacttttctggtgttttaaatcctattttctggggtcccctgggctttctcacttgcaggtgcagagggagatgctggtgattgtggaagatagaaacgacaacgcacccgttttccagaacaccgctttctccaccagcatcaacgaggtgacacctgccttaatgtggttgtggggcagggggcatcccaaagtgcttctcagagtaggaagagccagagacagtcagtggggcattcagagttgggaaaaacctctcctagcaggggcagcttcaagaaccaaagccagggggatgta

SEQ ID NO: 35033 - DNA, 2300 bp, Homo sapien
gtggctggcgaggtctcctggcattgggcggccatgatttgggtagtcctgggaactgggggaggctgagcagtgttgggacaagtggtctgagggtgtgaggtgggagggtgctctttttttttttttttgagatggaatttcgctctgtcacccaggctggagtgcaatggcccaatcttggcccactgcaacctctgcctcccaggtggaagggattctcctgcctcagcctcccaagtagctgtgattacaggtgtgcaccacctcgcccagctaatttttgtgtttttagtagagatggagtttcaccatgttggccaggttggtcttgaactcctgacctcaagtgatccacctaccttggcctcccaaagtgctgggattgcaggcgtgagccaccgcgcccagccatgggaggcactcttaagtggaggctgcagtgagaggtgggtaacacggtggcgctggaggatgagtaactctggagggtgtatggtgttaggtgatactgaggggttggaaatgttgcgtggaggacagtgtcgggtggggttaggttggccagaagggtggcactggccagtggggtgacgtagggtgtgagtggtgtttggtgttgctgtgggggctgggggtgggggatgtgaagggtgggtgggagggacagctgacaggagtgaggggtgtgtgtccaggctccagcccaggtctgggacccacagtgcctagggagctgtcttctacagagcctgcatttgcagggactggtgaccagcccagcctcctgcaccctctctcgcagtcttttgagagcccccttccatgggacctcatcgggcggggcatccagagatagaagcctggggactgggggaagatgcaggtgggcagagcagggggacaggtccctgctagacagcccacctttacagggcagcaatggcaccttcctgttgtcgctggggggccccgatgcagaagccttcagcgtctccccggagcgggcagtgggctcagcctccgttcaggtgctggtgagagtatccgcgctggtggactacgagaggcagacggcgatggcggtgcaggtgagggctgctccggggtgccaggggcagaagccgaggggcacttgggccccacagctgctgcctcctcccctgcccccaggttgtggccacagactccgtcagccagaacttctccgtcgccatggtgaccatccaccttagagacattaatgaccacaggcccacgtttccccagagcttgtacgtcctcacggtgccagagcacagcgccaccggctctgtggtcaccgacagcatccacgtgagtgatgtggacacagtggggctgtggggtcccagcaagcgggcgtgcatgtgtgagtgtgagagtgtgtgtgtgtgtatgtgtgagatgggggtggccatgagtgaatctgagtgtgctggggattctccctttgtgtgaggaagcacgacagctctgtccccacgagctgcatgggtggcggtgcgtgcatcgcctccacacagcaccctgccatgtctctgcctcacaggccacggacccagacacgggcgcgtggggccaaattacctacagcctgctcccaggaaatgggtaagggctcagggtgggccgtaggcaggtgggtgagcagggcccaggcccacctctctgcctctctgcagagatagaatagctggggaagaccgaaggcactcagttacatttcaatttcagataaacaaggaatgactttttgaaataatgaatatgttgcatatactgcatgggatatgctgaaatatttgttgttgtatatctgaaattcacactgaaatgggcatcctgtgtctctatttgctgaacctggcccctctgagcagggcagacctcttccaagtggatcccgtctcagggacggtgacggtgaggaacggtgagctgctggaccgggagagccaggccgtgtactacctgacgctgcaggccacagacggcgggaacctgtcctcctccaccacactgcagatccacctgctggacatcaacgacaatgcacccgtggttagcggctcctacaacatcttcgtccaggaggaggagggcaatgtctccgtgaccatccaggtgtgagcctgcctggacctggtgggtaaggctgggggaggggaccaagcctgctctgtgggcatgctggccctgggtaaagtcggggctccgctgtgtggctctgagacagtcactcagagtctctgtttcctcccaggaaatgaagaaaatta

SEQ ID NO: 35034 - DNA, 2300 bp, Homo sapien
tgttggcgtgcctcagggttggcctagggcccttgtgtctccctacctggtgtgtacctgatgtgtacgtcctcccatgtgccgacacccctcccatgacctccggcaccagctggaggtggatgggctcccttgtctgccttcagctttggccacggcagaactcagttctggactcaaatgtatcagcacggccatcctataaacccctctttccccccagagctcataaattatctgtccttcatccacctggctccccaaggcagaatctcagagagacagcagagttctctctcccctccacccacatccacctcatggtcaaggcctattgattttacccctagataggtatccaatctgactcttcctctccatccctacaaatgccgccgtggttcaggcatcatcatcgctcacctgaacacctgccatagcctcctcactcctgcctagtctctgctcctgtccacccttgtcctgtcccagggggacctttttcgatcacaggttggttcttgccacttttcacatctgtgaacttctccaagccttaatttcatctgtgtcatggagccagtaatgtttactttgaagggctgtagggagaaaaaaatgaaatgatgaatgtggaataagggtttgtaagctctgaagcgaaatggccttgtgggcagtgaatgagcaattttcaggaccggaaatgtgaggaagcagccctggtgtggtgctgtccgtggttctgaaaccggtccgacacgctgaggttttctccttgcctggcgtgctgcctggagacgccagtcccacggattttcttcatttatcacatagaattttaaatatatatatatatatatatatatatatatatatatatatatatatatatatatatatattttaaaggatcacggtgacttacggttcaccaagtaagagaggggagtaaaatgtaagaataagaagtgaggtttcaaagttagactgcatgggtttgtaatcccagctccactactaactagatgtgtgaccacaaacaagttacttatctgcttctcttttcttatctgaaaaatggagatataatacattaatattaacttgctcctaagcgattggaaattgaaattagataaaacctgtaaacagaatcttagcgccgtgtctggccctacataagcatcattgccaatggttgttaccattgattaatagatggtggtggcttcatagtaccggtgcgagagggttttgtcacatctagagcaattacggaattattttttctcctctgggaagtcaaggggaagggaactccttctctgcagggaaatgtggagggggtgggcagcgagtctctgtgtccttggtgattcagataccactggaaacccctgaacacctactttgcccttccaagaccaccgtgaggtgcataatgttagtcccgttttacagatcgagaaactgaagtgcagagaggtgaaatgatttgctcgagggtatccagggggaggggggagggcgggcgggcccccggggaggccgcagccagggactggaaggcatctctcccgcaccactacctccggcgtccccgccactcgctggagcgtgggcagcggcgagacaaagggccgggggcggggaagaggaggccggaagtgcggccgggggtggggggggcggaggcgggaaatttcctcgctggcggagccgggagatcgcgccgacctgggtccccatccaggcgcctcgagtcctcaggccggcgactgccccctctgagccccagttccctccttggtcaagccaggcgagggctttcgaggggctggtctaagatctgctagacggcgcgccccgccctcagcaagctcgcagcaaaggggcagcctctccggccctcagtctccctgtctgtgaagtgggaacccgctcgaggacggcgcggaacccgggagcccagcggccgcagttagggttggccagcgaggggcgcccctccctcgctccctccggccgcggtttccccgcggtcaccgccccctcgcggttccgaggcggccgggcggctactgcgcatgcccggggcggggcgcggggcgggagcgcggagccggcgctggggacggcggcgccgagtctgcgggtcctcccgccagcccggccggaggcagccgaggccgctcgggcggcggcggcggcggcggcgggagccggagcgcatctcgcccaggagccggagcagcggcactgcctggtaagcgccgcgcccacacccgctgtctttc

SEQ ID NO: 35035 - DNA, 2300 bp, Homo sapien
gaccctgggcaagttatccaaccctggcctttcttctgataccagccagtggttgcaaggaaagtggacggggaagagagctggcaaaggtaaaaccacaagagttgtgatgcaggtggacctggaacgcaactcaactcggccttggaggtgctggagggaggcgccacaaggggaggggtggggcttcagaatctataaagctccgttcaaaccccagcttcagcatttaccagctgctgaccttgggcaaggtacttagatctctgggaagcccagtttcccttacctgtagaatgggccgaagcattacatgaggaaatggatgttatgacattttacccagtacttggcatacagaaagtgttcaacaccagataactattaataatggtaaaaaagataagaaaaaggaggctgtctgctttcatcactgcactggtccctggcctttcagctggagccccccacctcatcagcccgccccgtgtccccatttccggatacagacccaggcttctatgggctggctatgtcccctatgacccctgctgacctcgccccatctgctgactcatattctcctgcccagaacccccctccccgggacccggccccagctccacactgtcgggggacccccagccctgcagccccagaaaccccgccccttacccaccgacgtagaggacgccctccttggtcttctccgccgcctcggtgaccccctgcttggttttctccgcggctgccacaacgccctccttggccatggacaggcccttcatgaacacgtccatcctggcggcctggggagggcgatacacgggcaccggtgcactggccccgcactctcaccccagcccctcccgcgggacgcagatgcccccctactcccgagaccgcggcgcccttctggaccctgagccccctcccgctttccccccatcccaccccactccccagtgcgaagcctcagggccgcggagagtcctagcgtccttgaaacctggggacgcgggaggggccactgcctcggttatccgggccctgcaaactgcagccccgtcgaaccggagtgctgggttcggcgcgaatatccaggacccgcctgtacacgcacggcacagtcacacggtcatgcacacaaacatacaccacggacaagctcacgtgcacacacaggacacgcagacgctccaacgcgcacgaataccccgacccacatgggcgcggacacacgtccccacagccgcccgggcagctgcaaacaccggagcatactcacatactccggggtgcacactgacgcgcatcccccgggtctccctccattttccatccccttccccagctccctcctgtcgccccagtcccctctccatcctcatcccgttccccatccccggcgcgcggccgcctcacctggatgcggggccggggctggggatggagcggcggctgcggcgggcggacgcgggggctccgctaggccaggccggggtggaccaggggccggaggggggatagggccgggatcaggcgctcgggtcgcgggtcctgagcaggagcgcagcagtgcccgggtctcgggtgcgtagccagccaccgctcgttcctcgcgccctgcgagctcgcgcgctccggctccggctccggctccggcgctgcggcagctctgagctcagcgcccccgctggcggccgcgccgccccttcggcctgactgacagggggcggggagggtgacagcgcgtagccgatgagcctcccggggcgggcccgggacgcgcccctgggggccccggccgtaagactcgcgtagtctgttgggagttgagggagggggacaacgcggcgtgtgaagagtggggaagaaatcacgcgactggatttggagttctgctgggctcgaatctcagctgtgctttttattaaccgtgggaccttgagctactcggctctcctttctgaatgacagtttcctcctctgtaaaacaggaatggttaattcaacgaatgtttactgagcgcttagtccagtggtgcaggtttaaggctggaggcagcggaaaaggaaaacaaggttcctggtctcgggaagcttaccatgggggtgtctgtacgcgtgtgtgttcgtgcgctcagtggtggaagacaggacagaaaataaacggatcaacatccaaagcaacaaggtcattacagcttgtaagttgtgaaggtaacggtgatgtaacacggggactagaggaggggtgcttgagacagggtgctcagggaaggcctctaccagcaggt

SEQ ID NO: 35036 - DNA, 2300 bp, Homo sapien
aaggcaatggaatgtgaaacttccttccctgaaccctctcagtcccgtttcctaggtgcaactccctttaacagttttctcagaaattattacagaggtgtggccaggtgaggtggctcatgcctataatcccagcactttgggaggcctaggtgggccgatcacttgtggtcaggagttcgagaccagcctggccaacatggtgaaaacctgtctctactaaaaatacaaaaattagctgggcgtggtggcacatgcctgtaatcccagctacttgggaggctgaggcaggagaattgcttgaaccctggaggtggaggttgcagtgacccaagattgcaccactgcactccagcctgggtgacagagggagactccatctcaaaaaaacaagaaagaaaaaagaattgtatatctagccataaatatgtgtatgtttgtatataaggtgtctgtgtataatgtatatagtatgtgataagtatgtatatgttagtatataatatatatttgacacatagaaaattataagtacttatacataaaatataattccctttgtatcaaaattggctcattccacacattccagtttggcaccttgcttctcacacttaccaccacatcttggcacactcccatgtcagcacacatgggtctagctcatctttgccaaccatagtgtggcattgcactgggtggatgtgccacagttagctagccagtcctgtacagatgatcatttagatcattttcagttttttgctacaaaaaaacatgctacagtgaacatccttgcacaggtatctttgtgtgcatgtatggctagagtcgcacgggatcaattcctggaaggggagctgttggctccaaaggcgcatgcatttatgcttggtaaacattgccagattgccttccaaaatgtctgcgccaatttgcagttctaccagcggcctgtgaatgttttttgtttggttggttgggttttttcctttttttttttttttgcagtctggctgctggtggccccctcgcctaattacctgtcacttacacaccctgcatttctggccacagtgcctttgcccatgctgtacccacagcctaaaattctctttctccctagcctgctcgatgaaatagtccccttcctgtcaggccacagttcagttgtcacctcttttttatgtcctttcctgactcccctaagttgtcagagtccctttcctctgggatactacagcttcttgggcataattctatcatagaaccaactgagggcctactgtgtgcctggcattctgtgatcattttgacagtccccaccgtaagcacacaaaaaagtggttttgttctccacctccctccatcctggctctccagctgcgctgtcttttgtcagcacagtcctgccttggagcctttgcacttgcactctctatggatcttgtcctcacccatcgtggtgtcatggtgcctctctggagtctctgctacaattcacctgctggtagaggccttccctgagcaccctgtctcaagcacccctcctctagtccccgtgttacatcaccgttaccttcacaacttacaagctgtaatgaccttgttgctttggatgttgatccgtttattttctgtcctgtcttccaccactgagcgcacgaacacacacgcgtacagacacccccatggtaagcttcccgagaccaggaaccttgttttccttttccgctgcctccagccttaaacctgcaccactggactaagcgctcagtaaacattcgttgaattaaccattcctgttttacagaggaggaaactgtcattcagaaaggagagccgagtagctcaaggtcccacggttaataaaaagcacagctgagattcgagcccagcagaactccaaatccagtcgcgtgatttcttccccactcttcacacgccgcgttgtccccctccctcaactcccaacagactacgcgagtcttacggccggggcccccaggggcgcgtcccgggcccgccccgggaggctcatcggctacgcgctgtcaccctccccgccccctgtcagtcaggccgaaggggcggcgcggccgccagcgggggcgctgagctcagagctgccgcagcgccggagccggagccggagccggagcgcgcgagctcgcagggcgcgaggaacgagcggtggctggctacgcacccgagacccgggcactgctgcgctcctgctcaggacccgcgacccgagcgcctgatcccggccctatcccccctccggcccctggtccacc

SEQ ID NO: 35037 - DNA, 2300 bp, Homo sapien
gtgggtctcatggtggcagtggtctcaaggatggcaggccagtccctatgtcccagccggtgatctcacaaccccctacttcgggtccagctgctgtgtctgatcggggagagctttgaggaacacagcagagaggtatgtggggccgtcgtcaacatccgcaccaagggggacaagatcgctgtgtggacgagggaggcggaaaaccaggcgggcgtgctgcacgttgggtgaggagggtctctggcacagggtggggacttgggtctctgctagagggaaggtgggtggagggggcttggcctgcatgggagacctctgaaagtctccatagcctccctcccttctgccttgcccacctgtatggaaggtctggcgttcagatttctaactttctcttacggcagtgcagctctccttttgcattaagggggtcatattttgggtttccacatgggtaagacacaacaggtgtggctgtggccagaatgagggtaggagtctggtggcctaagttatctctaggaccctctgatgactacctgtgtctcttttcctctgtgtcccccgcacctgcaggcgtgtatacaaagagcgcctgggcctctccccaaagaccatcattgggtaccaggcccatgcagacacagccaccaagagcaactccctagccaagaacaagtttgtggtgtgaggggggccttggcacccctcctatgtaatgggacagccgccactgagcctcattactttgggggatggggcgggactggggatcagacagcctagttcttacctgtcctcaagtgaacaggaatgcaaacactctttaacatgagttggggcctgagccttaggggctagatgggggtagtggtggcagtctgaggacctagcttgtcctggggccacaggacagcagcagggtggaaaaaactcctgagggtggggtgagtcatggcggggaaggagggctctatggtaggcggagaaacccatagtccagcgtttactgtttccacccaggaaggaggtgaggtggcctgagagacagactcttccatgggtggtgggctcaagggcacagacattctggagggtgaacgccatcatttgtacagagggatacgtgggttgctgaggactgagagagccttgcaaggccgctccccttctccccagctgtgaccagggctgtctgggccttgcctgcctcagggccagactgaagtggaggtggagggatgctgggctaggcctcaccaaggttctggtagaagtggtggaagtggataaacttgataataaaagcttaagcatctttctgttcctgttttaaataaatacttctgaacaaagttggaattatttttaagagggcttcaaactggagtaagattcaggttcccccaaactttgatctgcctctgtcctgtcttacaggggctcatgtgagatcactgggtaccaaggagcctgaccgggaccctggccagtatggaggacagggggtgtggctggggaaactcagccaccaagggggcttgagccaggttccggggggcatatgcccctggcagggcgcagccggcgtggcaccaaggcccaggccctcgtttggcctgagtttgagtcaggataagtagagctggatttccgctgggtgaaggtgagcctgatgcgactccacaatgacaaaacgtcctgcacgtgttaaaaactcaatccggaccagcttccccattcgcctgccagagcagcagttaaccttcccctgggatgggctccaacagcaggctggggattgggatggcgctggtacccagcaggggaagcaaggcttctacaccccggcggcctccggcgccatcagccggcgtcccgggcgggtctgcaggacgctgggaaacgcggcggcggcctgcgcgggggcggggcctggccgaaggcggggctgcgaggaggtccgaatcaggctgtgggggcggagctcgggaagcggagccaggtccagaggcggggctcaggcgggactgagttgatctatgggggcggagccaggtcaggaggcgggactccaaagggactgagggctgtgggggcggggcccggtccagaggcggggacagcagggctccgggcaaggaggtctggatgctgagggcggtccctgaggggcgggcggggcccgaccggcgctctgtgtggccgaggccatgaagccgcagccgcccggctaggccccgggcggctctagcccagggcggcccgcggggcgctgggcctggctcccggctccg

SEQ ID NO: 35038 - DNA, 2300 bp, Homo sapien
tgtgtgtgtgtgtgtgtgtgtgtgtgtgtgtgtatttttagtagagatggtgtttcgccatgttggccaggctggtctcaaacccctgacctcaagcgatccacccacctcagcctcccaaagtgctgggattacggtgtgacccaccacacccggccatccctttagacagagcatacactattataatgtcatcttataccccagccctcaatcctcttccttcatcctcagccaccagcctccagtgcccaatccccagtgggccccaagggcagatcctgccactgactctcctctcccacccacctctttcctgcagaggctgaagaggggtgttatggtgccaacaggagcagcctgggcacacactgctcctacacacacacacacacacacacacacacacacacacgagacatgtgagttgatcaggccctgacaccgtgtacattcaaactgccccgaaagcaaagttcccaaaccagaaggtggtgaacactttcccctgggctcacatgaagtctaaaaaattattttttactagttaaaaattttaaatcagaatatttcacatacgacggcttctgttgaaaatttggaagatgcggctatactgtgccccggtcccctcccccgacaaccagcacctggagcagaaaaggcagctgccccttgagatgggatccttgtgcctgtccccagcactgccctttgcctccctggcgatggagcccagcgtctgtatggttgcctctggagctttagctggtgttttttatagtagacttaagaggaaagcaaaacatttttcataacccttctctatcaaaagtgggaaacaaaagacagaccgagagagggcctcgtgtctcaagaaatataggagagctcatatctctttgtggaagcaagaccatcccttacatcgcctagcctgcagcgccaatttatattatcgaccggccccgtaggcgtttgagtttgcgaccctgccctcaccctgctcattcccctcccgacccagactaggaccctctctttttccgatcactccccccaggcacaccgcacgcggctgtcatttcctttctccttcaaggcagccctctgtttattttaacccgattagggaatgggggtggggcacaggagactccagcagcggtcactgctggaggctccaggagacgacgtgacttgaccaaggtcacagagctggaaggtgaagtcgcctggaccctacccccggtctccctagctgccaaagcccagctcgttcctttacacccacgtcgcgggcgccgtgcgctctcggggctcaaacaccgcgcgcccagtcgggtgtgctgcgcctgaaggttgttttccttcggcgaacggcgccgaggggttagggaaaccttgggtcatggtgtgaggcgcgcccctggaatccaccagcctgcgaggctgggactgcgggtgtccccgagtctggcctgccagctctggtggccagggcacctctgcgcgcgggccagggccccggggctctcccgcagtcccctaaccaagccgcgggctggcagcgtaccgcggcgcccggacgaccccggagcgcggccgcgaggaaagggcgggggagaggactgcagcggaacctgcccggggcacccctgccctgggcggctctccgcaggctggcgccgcgccggggtcgccgcagccccgggcccctcccgggccacctgtgcgcagactggcgggcccgcgagagcccggatccggagcaccgatccactccgggtttcagactcctgcccctgtccctggagaccccgcggggcggtgggaggcctccacgcccaccaccccaagcccctccctgggggagcctcaggcatcgcccagagggattcccggtgctgggggtggcccgcgcgcgctgcgcggggcggcccggcccctccttccttcccccgcccctcccagccgccgccccgctccgtcgctccagtccgggttttgcggcgcccaccggcccgctctccggctgcgggctccgcggcgcggctggctcggtgcgcggcgcggctggcgctgcgctccgccccggctgcattgctgcgctcccgtgcccaagggagccacgcgccgcgtgcgcccggcagccggccgcccggaggcagcgcagtccgctggcatgggccccgggggcgccccgagctggggctccgggctgaggcgctaaagccgccctcccgcccgcggggccccgcgcccggcccgcccgcctgcccgcccgcggccatggccgt

SEQ ID NO: 35039 - DNA, 2300 bp, Homo sapien
tgccaagtgaccatggcgagcacacaggtgactgtacacttgatgagcccagtgtctcagctggaggctctggggtaagggaccccctcgggcctcaggttccccgtcaataaggtgtcttggtcccaccccccagcgtcgcctgcattccgccacttcctgagcctacgacagaccccagcagaggtggttcagggtggggtgggtctgggtctgatgaccttcattttcacgacatgtgaactgcaagtgtgaccccgcttatgaatgcgggcttggtgtccataacagagctgcggaacatgcggggggcagttgccagtgggagggcacacaagggaaaaagccaagctggggagaggccggagtctggcaggtgggcaggaggcaggcagggaggccagagagtgagaggaggggcaggcgcccagggagggccggcgacccagcagcggacaaactgtccggctatgtcccaaatgccctccacacccatctgcccctgagctcacaaagacacagctgttgcacccctcagctcagccagcctccctctgccatccctaaggcacctgccagctctgtgcctcagtttccttgttggctctcaccccctatgagattgctgtgaggatgaccgagctgagggggtgcagccctttgctgtggaacacgcagaaccgtgggggtaccaacagcagcctacgctccctgagcactgtgctgagtgcctcacgcctgtttcatttcatcctcacaacagccttaagaactgggcaccacgccccattttgcaggtgaggaaacaggttcaggatggggtggatggacctgcctgaagttgcagaggcccctgaaccctcggtccgagcctgccctccagggcgcctgcaggagctggtgcacacacctcctgccgtgaaaccagggtcctggtgaagggcggactcccaccctggggagagggtccctgcgcaagcaggagcgaaaggggcagtgggccaggcgtatgtgcccctcggtgggtagggtgggcccaggcctcccagtctgaagccctgggtgggttttggatcacccgtggggagggtggaggagcccagaggccatccatgtgaggggcctgtggacatccccacaggcagctgtcatctccatctcacagatagcaagccactcgctccccaaggtcaccactaagatgagcagaatagatggtctggaaacccagggtttccctctatgcccaggggctgcaattgtgaatgcgcattggtggggggatcactgcagccccagggaggctgaggacctgttcaaagggcagctgggggttgtgggagctgagggtgacccccaccccatcctctcaggggacctgctggttgggcagggatcagactactctgggggttttacctctgccagtgcctccaagccaattacctgtgtaattagcaacaaatgacttgtgggatggttgtggttttcagttaaaattagaaggaaacccacatattcaggtctccttgaaggaggtggcccaggtatctcagattcccagacagactcccggctctcgccttgcccgtgcccaccccgcatgttatttctgagcacctactatgtgcagggccagggatggggccaaccaggaagcagggccccagaggcggccactggccagggctgctccctccctcgccccaggcagctcacctgcctggccagggaccttctcaccttggccagccttgccctggacctcccgggcaggggcctgcctggccagatccctggacttctaggaaggcagtcgccaggccacctcggtgctgggactccgcccaggtctcatttcacctcaccacggtcttcaggatggcatgggctgctccttccctgcttgtacagaggaggacatggaggcccgggtgggggatggtcattggcctgagattgcccagctgggacatggcagagcctggactcactctcctcccatctgccccaacccacggtggaatcgtttgctgagccgctgcctctaccctgcccagtctggcccctggctcaccttccccctctgccctgccgcaggtgcccagcagagtgccaccgtggccaacccagtgcctggtgccaacccggacctgcttccccacttcctggtggagcccgaggatgtgtacatcgtcaagaacaagccagtgctgcttgtgtgcaaggccgtgcccgccacgcagatcttcttcaagtgcaacggggagtgggtgcgccaggtggaccacgtgatcgag

SEQ ID NO: 35040 - DNA, 2300 bp, Homo sapien
cttcccatctgcccacactcgccccaacaccacagcttcccatctgcccacactcgccccaacaccacagcttcccatctgcccacactcgccccagcaccacagcttcccatctgtccacactcaccaacaccacagcttcccatctgcccacactcaccaacaccacagcttcacatctgcccacactcaccccacaccacagcttcccatctgcccacactcaccccacaccacagcctcacatctgcccacactcgccccacaccacagcttcccatctgcccacactcgccccacaccacagcttcccatctgcccacactcaccaacaccacagcttcacatctgcccacacctgccccaacaccacagcttcccatctgcccacactcgcccaacaccacagcttcacatctgcccacactcaccaacaccacagcttcccatctgtccacgctcaccaacaccacagcttcacatctgcccacactcaccaacaccacagcttcccatctgcccacactcgccccaacaccacagcttcccatctgcccacactcgcccaacaccacagcttcccatctgcccacactcgcccaacaccacagcttcccatctgcccacactcgccccaacaccacagcttcccatctgcccacactcgcccaacaccacagcttcccatctgcccacactcgccccaacaccacagcttcccatctgtccacgctcaccaacaccacagcttcccatctgcccacactcaccaacaccacagcttcacatctgcccacactcaccccacaccacagcttcccatctgcccacactcaccccacaccacagcttcacatctgcccacactcaccaacaccacagcttcccatctgcccacacctgccccaacaccacagcttcccatctgcccacactcgccccaacaccacagcttcccatctgcccacactcaccaacaccacagcttcccatctgcccacacctgccccaacaccacagcttcccatctgcccacactcacccaacaccacagcttcccatctgcccacactcacccaacaccacagcttcccatctgcccacacctgccccaacaccacagtttcccatctgcccacactcacccaacaccacagcttcccatctgcccacactcaccaacaccacagcttcacatctgcccacactcaccccacaccacagcttcccatctgcccacactcacccaacaccacagcttcccatctgcccacactcaccaacaccacagcttcccatctgcccacactcgcccaacaccacagcttcccatctgcctggtcccccaagtgcacatacaggtcctgtgggaatgccgggcttgtgagggctgttaattacaaggccataactaacaattaaagatctctgttggatttttttttttcctctagaacataccctcccccattctttcaattaaaaacctaattatctgtgtcaattcctttctgatggacatttcttccatttatgcaaaacccttctaaaatcaatatagcttcctccaagcagtcaatcaccccctccccagacctgccccaggccttggggaggcagacagagagaagggcccccaaacccctgctcctggtctaggcactgacctggaaccacacaggaggcagaccctgtgctctggggatcccaggagttcacccccagcccaagctgcccttgtcccagaagagcaggcagcaggttcaacctagcagccaggcaccaggttatccgctctggggaagtagctcttcccctcctgcatcctccaggcagcagactcagctgggatctcaagcccacgaggaatgtgatttgctcagagtcacacagcacagtaatggcaaatacagggctgggatgcacacgcacggactccatgctccctgccacaagcgtctgctccctagctagtgcagatgccccggggtgcagacctcatcctcctggggtgcagaccactgacctctccttcccagactcctacacccctgcccccaccaaggccatgctgtctcccgcagctgcttctggccctgaggacgtggccctctatgtgggcctcatcgccgtggccgtctgcctggtcctgctgctgcttgtcctcatcctcgtttattgccggaagaaggaggggctggactcagatgtggctgactcgtccattctcacctcaggcttccagcccgtcagcatcaagcccagcaaagcaggtgaggggccccgtgcccccagcactc

SEQ ID NO: 35041 - DNA, 2300 bp, Homo sapien
tgggagggctcttcaatttaacaaaaattaattgatacttgttccttgccagataaagaactgaggtctgaggctgcacgggtgaataagaaacattctctgggagcccatagtacaatggggaagaagaacacataaacagatgcctttaataaacagatataaatgcagtgatacaagaacatgcatcataatacggaaccaataagcagaccacactcagctggggtcggccaggaggagcttttcagagaagggctcctcattgtcgttgatgattataatttaagggatgaggaaaaatgaggtgaaaaggtgggagaggccaaagggagggtcattccagacaagtcagtgcaaacaaagacacaacagaagtagctcgatgtgtgtaggagagctgcaaggcacattcacggtataaagggtgtggaacaaattgggggagcttattgaggatctctgtgcctggcatgggcactgtgagtggtgagaagcctgtgagcaagcgcagagggaaggcctgacctcccagcccatcggcagtgctctggttgtgcccacctctcccccagcaaactgcctttcctcattccttagctccatctctacagttggagattggcactaaggggctatgagggaacctcgtgaggacttgtccttccctttgttggtcagtggccatctggtgtctgaagagaaccgctggcagctgcagtgcctctgctacagccaggctgtcccagctgctcacagacctcaagctcagccatccttctccctccactggccttgacccagactttccctggcattctgactagggaaccaggacccctgctcctggggtctggacacagaccttccagaaacgcagatgaagagccctggccatgcttgtcaggggcatatcctcaccctggctcaagaaatggcaggctatctgcatgaatcacagctgggcctttcatagtcagttccacattctcctctcccaactgaacaaagttgaaagggactgggatcccaggctaggcaggatgctgtgttgtttgtgacagccactctaccctctgccaccccatcccccacttccctgcctttcacagcctatatgcctggttggtacccagtaaacttcacagcaggactgatgtttggcatgtttcctggcctcttcatgccactactgatagaggagccactatctctggtctccatcctgatgtcatgtggaggcctactatctgtggatagagttactgctgacaaggcagcctgaagctttaaagtgtatccatgccttcaacaaagattgttgcaggctgtctagtattctacattggtgccccaaggttctgtgcctttgaggagaaattcccacagaaaaacagcttgttcgccaatagctccacagcagcctaacactccccttcttccagtagagaagacctaagatgtgaacctactctccctgcgcaggctacagactaaaggctagactccgcagtctgcctgtcacctcctctcccactatatattcctaccttggtgtaccctcttcaggcgcctggagctgcacctcattgctgtgtgtgtgtgatttgtggttgtgcacatgctctccactttgtcaaggaccacttttgtcagcatactgctgttctttcttcaagactcagcttcttcagctagccctgcccactctcggcagagtcagtcccttccgcttgtgctcccacattgcctcttgctcaaaagtacttaccataacctttccaggctaggcgcctccagctccttctaggggcgagccaccacctcagaactcactatatttgcaaaataaacagccctcagcattgtagagggaatggcccaaaatcttagacccagttcaacgctccacttcgcggtaatcatcttgctcaagttttcaccacagccttgcctagcctgggctactcttagggcaggcttggaaggaagtgcagcttcctgaattagctgatgtttggtaagtggtggtggaggaaaagggtggggcttgaggatattataactcgggtcacccctgagtgttgcttttggtcattggggtgcctcatattgccagacaagagctcagacctgaggagagtgactagcttctctgtgtcccaggtaagcacttcggtctaattactgcctgctccttccacagctgtcttgtcctcatccctcctgtttggctcacaccaggggaagtggacactggaaagattaagccagctggttctctttctttgtttttgaga

SEQ ID NO: 35042 - DNA, 2300 bp, Homo sapien
tcaaaagccctggactttttttttttttttttttttttttgagacagtcttgctctgtcacccaggctggagtacagtggcgtgatctcggctcactgcaacttaccctgcctcccaggttcgagcaattctcttgcctcagcctcccgagtagctgggattacaggtgcacaccaccacgcccggctaatttttttaatttttagtagagacggggtttcactgtattggccaggctgatcatgaattcctgacctcaagtgatccgtccacctcggcttcccaaagtgttgggattacaggcgtgagccatcatgcttggccagccgtggactattgagattgtgggagggctcttcaatttaacaaaaattaattgatacttgttccttgccagataaagaactgaggtctgaggctgcacgggtgaataagaaacattctctgggagcccatagtacaatggggaagaagaacacataaacagatgcctttaataaacagatataaatgcagtgatacaagaacatgcatcataatacggaaccaataagcagaccacactcagctggggtcggccaggaggagcttttcagagaagggctcctcattgtcgttgatgattataatttaagggatgaggaaaaatgaggtgaaaaggtgggagaggccaaagggagggtcattccagacaagtcagtgcaaacaaagacacaacagaagtagctcgatgtgtgtaggagagctgcaaggcacattcacggtataaagggtgtggaacaaattgggggagcttattgaggatctctgtgcctggcatgggcactgtgagtggtgagaagcctgtgagcaagcgcagagggaaggcctgacctcccagcccatcggcagtgctctggttgtgcccacctctcccccagcaaactgcctttcctcattccttagctccatctctacagttggagattggcactaaggggctatgagggaacctcgtgaggacttgtccttccctttgttggtcagtggccatctggtgtctgaagagaaccgctggcagctgcagtgcctctgctacagccaggctgtcccagctgctcacagacctcaagctcagccatccttctccctccactggccttgacccagactttccctggcattctgactagggaaccaggacccctgctcctggggtctggacacagaccttccagaaacgcagatgaagagccctggccatgcttgtcaggggcatatcctcaccctggctcaagaaatggcaggctatctgcatgaatcacagctgggcctttcatagtcagttccacattctcctctcccaactgaacaaagttgaaagggactgggatcccaggctaggcaggatgctgtgttgtttgtgacagccactctaccctctgccaccccatcccccacttccctgcctttcacagcctatatgcctggttggtacccagtaaacttcacagcaggactgatgtttggcatgtttcctggcctcttcatgccactactgatagaggagccactatctctggtctccatcctgatgtcatgtggaggcctactatctgtggatagagttactgctgacaaggcagcctgaagctttaaagtgtatccatgccttcaacaaagattgttgcaggctgtctagtattctacattggtgccccaaggttctgtgcctttgaggagaaattcccacagaaaaacagcttgttcgccaatagctccacagcagcctaacactccccttcttccagtagagaagacctaagatgtgaacctactctccctgcgcaggctacagactaaaggctagactccgcagtctgcctgtcacctcctctcccactatatattcctaccttggtgtaccctcttcaggcgcctggagctgcacctcattgctgtgtgtgtgtgatttgtggttgtgcacatgctctccactttgtcaaggaccacttttgtcagcatactgctgttctttcttcaagactcagcttcttcagctagccctgcccactctcggcagagtcagtcccttccgcttgtgctcccacattgcctcttgctcaaaagtacttaccataacctttccaggctaggcgcctccagctccttctaggggcgagccaccacctcagaactcactatatttgcaaaataaacagccctcagcattgtagagggaatggcccaaaatcttagacccagttcaacgctccacttcgcggtaatcatcttgctcaagttttcaccacagccttgcc

SEQ ID NO: 35043 - DNA, 2300 bp, Homo sapien
ttttctgatctccccactcctcaattcaattcaatcaacattttttgagtgtttgctttaggacaggcccattgctacttgtgaggattacatggatcatgtcttcatagagctcacaagtcttatagaagagatatagactcatagagcaaagaattgtagtatactgtgggagatcgaatgtcccagcagctgaggaaggatgcaggagaaatgaactgaggttcaaggaagcagtggaagaaatggttcaggtgggttttggaggatcagttggaggtaggtggcatgggggagatagggcaaaggcattccagaatgtaaatgttacagaaaagtattaagaataatgtgcctgtagttccacgttcgattaccctactgttaacattttcttacgtttatttttaggtctctctctctcttttttttttttttgagacagagtctcactctgtcacccaggctggagtgcagtggtgtgatctcggctcactgcaacctctgcctcccaggttcaagcgattttcctgcctcagcctcccgaatagctgggattactggcatgtaccaccacgccaagctaatttttgtatttttagtggagatggggtttcaccatgttggtcaggctagtctctaactcctgacctcaagtgatctgcctaccttggccccccaaagtgctgggattacaggcgtgatccaccacgcctggccaggtctttctttttaatagaaatcatgacagatctatctgaagtcctgtttgcttctccccacattttccgctactccttctttcacccctttaccattaccatggtatccatctagttcatcttatatacttttacacacatagattttctgtaaacagtatatactgttctaatttacctatttttaaatttatataaatcatttcacagtgtacatatttgttggcatgtcgctatttcaataacttaagtagttgtgacctagcaaatgttgacacatataggattcctttgttttatttgttgtagtatatcactgtagggacatttggtgttttatttatgcgagacttattggacatttctgctgttcacattttccgccaggaagctggcctccttgaacatgtcttgtgcacacctgtaggagtgtctgtatttttcttttctttctttccctttttttttttttttttttttgagacggagtctcgctctgttgcccaggctggagtgcagtggcagtgacctgggctcactgcatcctccgcctcccggattcaagcgattctcctgcctcaggctcctgagtagctgttattacacgcacgcgccaccacgcctggctaatttttgtattttagtacagaaggggtttctctatgttgaccaggctggtctcgaactcccgacctcaggtaatccgcccgcctctgcctcccaaagcgctgggattacaggcgtgagccatcgcacccggcatttccgtatttttctagacgtgaaattgctgggtcataaaatggacattttaaatttcatcacacggaattgtcctcaaaagtggccgttctatacattttgccccacagctatctctgagtctgttgttactccttgctttcccccaaagcgcaagcaactgagaccgcgcaaggtgcgagccggctcacgggcggtcagcgcctcccgcgcagttggtacgtcccggatggctcccccgcggcgggggttggttaagtctccgcgcgctgcgcctgcgcccgccccgagagcgtgtctctggcatcggacgcgcgcgcccctccccctccccccgcgctcccaacgtgtggcggctcgcgacccccggcaacccggagaaggtctacagagcggcctgcgccagcgagtgagtacccgccgcctgcgcacagctccgcccacccctccctgcctccttttcttcctcagcgggtccgcggcccgctactctccgggaggggcgcttcccgacgccaaggtaggcctctcccgacgccggggcggcccttcctgatgccggggtgtgtctctcgcgacgcgggggtgggctccggacgccggggctggccttgccgaagtcgggggtgggtccctccggacgccgaagtgggctcgggatgcggggctgggaccctcccgattccggggcggattccggacgccgggaccggccattactggtgccgggttgggcttctccagatgccggggctgggtccttcccaaggttgaggtgggttcgggacgcgggttgggtctcccctgacgccacgc

SEQ ID NO: 35044 - DNA, 2300 bp, Homo sapien
tgagaacttgagatagtacccaagaaggaagccatagagtttttatcacccactcttggaaatgacatgccatcatttctgccttattctattgtttagaagtgagttattaagcatagcccacacacaagaagagagattacacaagagtgtggttgccagcctgtgggatctagggccatcttacaggctgcctgccataggctgtctgtcctcaggtttgcagaatggctgccaccaccaatgcatcaatagtcttccctgaagtaagatgccctaaaaggatctttttggccctgcactgaaaccttttctgatctccccactcctcaattcaattcaatcaacattttttgagtgtttgctttaggacaggcccattgctacttgtgaggattacatggatcatgtcttcatagagctcacaagtcttatagaagagatatagactcatagagcaaagaattgtagtatactgtgggagatcgaatgtcccagcagctgaggaaggatgcaggagaaatgaactgaggttcaaggaagcagtggaagaaatggttcaggtgggttttggaggatcagttggaggtaggtggcatgggggagatagggcaaaggcattccagaatgtaaatgttacagaaaagtattaagaataatgtgcctgtagttccacgttcgattaccctactgttaacattttcttacgtttatttttaggtctctctctctcttttttttttttttgagacagagtctcactctgtcacccaggctggagtgcagtggtgtgatctcggctcactgcaacctctgcctcccaggttcaagcgattttcctgcctcagcctcccgaatagctgggattactggcatgtaccaccacgccaagctaatttttgtatttttagtggagatggggtttcaccatgttggtcaggctagtctctaactcctgacctcaagtgatctgcctaccttggccccccaaagtgctgggattacaggcgtgatccaccacgcctggccaggtctttctttttaatagaaatcatgacagatctatctgaagtcctgtttgcttctccccacattttccgctactccttctttcacccctttaccattaccatggtatccatctagttcatcttatatacttttacacacatagattttctgtaaacagtatatactgttctaatttacctatttttaaatttatataaatcatttcacagtgtacatatttgttggcatgtcgctatttcaataacttaagtagttgtgacctagcaaatgttgacacatataggattcctttgttttatttgttgtagtatatcactgtagggacatttggtgttttatttatgcgagacttattggacatttctgctgttcacattttccgccaggaagctggcctccttgaacatgtcttgtgcacacctgtaggagtgtctgtatttttcttttctttctttccctttttttttttttttttttttgagacggagtctcgctctgttgcccaggctggagtgcagtggcagtgacctgggctcactgcatcctccgcctcccggattcaagcgattctcctgcctcaggctcctgagtagctgttattacacgcacgcgccaccacgcctggctaatttttgtattttagtacagaaggggtttctctatgttgaccaggctggtctcgaactcccgacctcaggtaatccgcccgcctctgcctcccaaagcgctgggattacaggcgtgagccatcgcacccggcatttccgtatttttctagacgtgaaattgctgggtcataaaatggacattttaaatttcatcacacggaattgtcctcaaaagtggccgttctatacattttgccccacagctatctctgagtctgttgttactccttgctttcccccaaagcgcaagcaactgagaccgcgcaaggtgcgagccggctcacgggcggtcagcgcctcccgcgcagttggtacgtcccggatggctcccccgcggcgggggttggttaagtctccgcgcgctgcgcctgcgcccgccccgagagcgtgtctctggcatcggacgcgcgcgcccctccccctccccccgcgctcccaacgtgtggcggctcgcgacccccggcaacccggagaaggtctacagagcggcctgcgccagcgagtgagtacccgccgcctgcgcacagctccgcccacccctccctgcctccttttcttcctcagcgggtccgcggcccgctactctccgggaggggcgct

SEQ ID NO: 35045 - DNA, 2300 bp, Homo sapien
aatttttttgtatttttagtagaaacggagtttcaccatgttagccaggatggtcttgatcttctgacctcgtgatccacctgcctcggcctcccaaagtgctggattacaggcatgagccactgcgccaggcctactgttaactttcttattgtactctcctccactacaataaaaaatactttactacagcttccctgtcttgttcaccactatatttccatgctcaaaatatcatctagctcatagtaaattctccataagtatttgaaaaaatgaggttgaaataagctagtaatattaaaagcttcattcattaaacaaatgttttgtatatacctaggagggtccaggttctatttcaaagtgctggagattcaggtgcaatgacaagagacaaaaggctacgcaaggtggcatgtgcctgtaatctcagcattttgggagcccgaggcaggcagattatgagatcaggagtttgagatcagcctagctaacatagtgaaaccccgtctctaccaaaaatataaaaattagctgggtgccgtggcatgtgcctgtaatcccagctactcaggaggctgaggctggagaattgcttgaacccgggagacggaagctgcagtgagccgagatcgcgtcactgcactccaacctggcgacagagcaaaactctgcctcaaaaacaatttaaaaaaagaaagaaaagaaaagagacaaaaatccctgccttcctggggcttgccttctagtcgggagacagacaataagcaagataaaaggtaaaatataaaagaaataaagcaggaaagaaggacatgaagtgtgtgtggaaaagtaacattttagatgggatagccagacaaggtattttagatagagtagccagagaaggaagtgggagactgagccatgaagatatatgagagaaattcaccccaggaggcctggataactgggacaggaattaaggagttggggactgagtaacacatcaggatcagggaggttaagggaagtcagattgtacagggccttgttggtcgaagtaaggactttggctttttttttttttagtcggagtttcgctcttgttgcccaggctggggtgcaatggcgccagctcggctcacagcaacctctgcctcccgggttcaagccattctcctggctcagcctccgagtagatgggattacaggcatgtgccaccacacccgtctaattttgtatttttagtagagacggggtttctccatgttggtcaggctggtctcgaactccggacctcaggtgatccgcccccccttagcctcccaaagtgctgggattacaggcgtgagccaccgcgcctggccggactttggcttttactaagagtgagatgggaagctgttggaggatttgagaacctaagcgtcatgatctgacttgtcataagaggattcctggaactgctgtgctgggaatgccagtgaggttgctactacaataacctaggcaagagatggtggctcccaaagacacgggaaggagcagctctggggttggaagataaaatttggggtctgacagctacattggagaagcctattagccattcgagtgaactgtggaagaggcaactggatgtatacaggtccggagtctcggggaagatcagagctgggagctggcacttggaactcaacaaatagtatgtattattagcagtaatatggaaccttagctgtactactacttactagtagcgagctcttgagttaaccatttttaggttctgggcctcagtttccctgtgaatgaaatggcgaaaacactcccacataacgggaccttgagaacgaaatgaaaagtatcaagggctgaccgtgagcaaggtgagagccatgagccaaaaccacacgagcctctccgggaggggggggtcactgctgcggaatcagcgacaggtttccgaatccacggcacacgctctgaggtaccagaggtagcaaagcaaaataagcgcggggtcccgcacggcagcgcgggtgcagcgcccaaacctcgcgagatttgttggctgggccaagtaccacccaccaaatctcgcgatacctaggcgcctgagaggctctctaccggtgagggtttgcggggaagatggagtatcccgcgccggccacggtgcaggccgcggacggcggagcggccgggccttacagcagctcggagttgctggagggccaggagccggacggggtgcgctttgaccgcgagagggcgcgccgcctgtgggaagccgtgtccggtgcccagc

SEQ ID NO: 35046 - DNA, 2300 bp, Homo sapien
cctcagcctccctagtagctgagattacaggcacatgccaccatgcctggctaatttttttgtatttttagtagagctggggtttcaccatcttgccaggttggtcttgaactcctgacctcgtgatccacccacctaagcctcccaaagtgctgagattacaggcgtgagccaccgtgcccagcctaatatatatttttaatagagacgagatctcactatgttgcccaggctggcctcgaactcctgagttcaagcgatcctcccgattcagcctcccacagtgctgggattataggcatgagccaccatgcctggcctcaattattttctgatttatctttgggaggagaccattctttcgcttaagaagaaaaagaaaaaaacaattttaagtctctttaatgggccttacagttatgcaaagatatgccactatccctttgggagtgagggtggaaagaactagacttgcctgcgtaacaatgagaaaggaagttgcttcttaagacagggtctacactagctagaggggacaaccaggacctgagcctcagacagggtctcgctccatagcctgttgcccaggctacagtgcagtggagcgatcacggctcactgctgcctcgacttcctgggctcaagcaatcctctggcctcagcctcccaagtagctgggaccacaggtgcacccagcccatttcccttcctctcaaggtgccttaagagaaggagaaggcttgagattcaggtgagggatgggcagagatcagaggctgcctggcctcctggtttggccacagtctagatgctcaggagagaagtgcttacaggtgaggcaaacatgagccaggtgggcacggagctatctgggagcacctactgtatgccagacacttgaactctaatggtgaggtctgaggacacagttcctctactgaaaaatagagacagggcaactatgttgccagggctggcctcacactcctgaattcaagctgtcctcctacctcagtctcctagtaactagaactacaggcacccgtcattgtgcccggccattccacagctatttacataattaactgttcagttacaattctggcaagcgtgctgaagaaataacaggtcctaaataattacagctagtattacaaagcaagcgctgcatgccaggcttacacatactgctaacatgtctactttttgcaacaacctcttgtgggtgagactatcatttgcctgttttactgaaaggacagtgaagactgaggccttgtgtgatggtgctgagagctgggcctatgacgtccagccctgtagtctgtgctctgaaccacttcaccctgtttctttctccatcctcacagtagagacgtcatctaagaggagcttgcaagtccagagggcttcctgaaggaagtgagctgagaataatatgaaattaaccagaccaagggccattccaggaagagagaatggtacgtgaaactgcccaggagtagcagggtgggagccaggaggcgtgggtcatggcaatctatgtataaagagctatgggaatctataggaaaatttaagggagtggctgacacagtcagatttgtgttgtaagtatcactccgcaggttgcgcagggaacaaatgagggagcagaaggaaggggttctcctatccgctgcacggcactgcgcagaagacaggggagccaggcattccctgaagggtgaaaagcaaggagtagagctgggtagtagactagaatttaggagcctggcctggggcctgggtggggcgaaagaggcggagcctgaatggggtgtgtataggggggttgcgtgtaggggtgtgtgtataggctggggcggggtcccgggagtgggctgactgggtcgggggcggggctctccaggtgggcggggatcttggccacccctggccacacctctctccggctcgagctggtctaggcggggcgggcccgagggggtgtggcaggaggtgggcgggcccgggtggggggggggggggcgtggaaggaggggcgggcccgagcaggagggggcgggcccgaggggcggggtgggacaggaggtgggccgctcgcggccacgccgccgtcgcgggtacattcctcgctcccggccgaggagcgctcgggctgtctgcggaccctgccgcgtgcaggggtcgcggccggctggagctgggagtgaggcggcggaggagccaggtgaggaggagccaggtgagcaggaccctgtgctgggcgcggagtcacgcaggctcgaggtgagccg

SEQ ID NO: 35047 - DNA, 2300 bp, Homo sapien
gaggccccgaaaagttcagtcacttagtgcccgggggcctccagcgcgagtgcgggaggctgaaggagaacccaggactgtctgatgcctaaggcaggccctccattcccacgtggggggtggtcggtcagcggtcagcagccatgggtgactcgactaaggactctgatatcagggcagcctggggtaggaataaactccccgggcctccccacccactcccagcccaagctgtgtacccaaagagctgccctccctgccaagccgagcttggtagggagttttaccaaggaggatccgactggattcgagagttgaggtgggccagagacagcagtatctgagtcaggtagagaagagcaatgaggggcacagagggatgggcaagagagcacatgtgcccagttttgaaagccaatggcttcagcgctcctgaaggggcagacggtgtgaccaaagagataggcagcggcagagagggagccctaggatgttgagctggatcctgctgggcacaggtagccattaagggcttgcaagctggggggcatgacatggcagacttgcaggtttttttgtttgtttttttattttattttatttttttattttgttttttttgagacggagtctcactctgtcgcccaggctggagtgcagtggcgcgatctcggctcactgcaagctccgcctcccgggttcgcgccattctcctgcctcagcctcccgagtagctgggactacaggcgcccgccaccgcgcccggctaattttttgtatttttagtagagacggggtttcaccgtgttagccaggatgttctcgatctcctgacctcgtgatccgcccacctcggcctcccaaagtgctgggattacaggtgtgaaccatcgcgcccagccgacttgtagttttttaaaactctgctggaagatgaaggttgaagagccgagggagaggatgtttccagaggcccatgcaagagatggccatgacctgccttgagaaggggcaggggaagccagatggactggaagtggagtggcagtgaccaaggaggaggaggtgtgataggcttcccacgcagggtagatccagagacaccagtgccacccataggcccctaggactgcagtggtcaccgattcctttgtcccagctgagactcagttctgagtgttctattttggggaacagaggcgtccttggtagcatttggaagaggatagccagctggggtgtgtgtacatcacagcctgacagtaacagcatccgaaccagaggtgactggctaagggcagacccagggcaacaggttaaccgttctagggccgggcacagggaggagaacattccaacactctgcgtgccgacgcacgttctctcttttatcctcaaaacagtcctatgaggatagtaagccagagagagacagagacaaggaattacaagttggtgagagtcaggatttgaacttggctctggcagatggaaaattagggtctgtattctttacaaaaccgtgtgtgcctcagatggagttggtgcataacaagcagaggtatccagggtcgcggtcctgcttgccacggaaggggccgccttgtcagttgtgaccacccagccctggaaatgtcagtaatgctgtaaggagtggggatcggatcagatgccatccagatgctgaagtttgaccttgtgtcatttttcactttcttttttggctcttctgcaatcaattcatttatttagcaaaaaagaaattatgtgtgccgagagcatgcagaagatatgtctccgttctctgcttccctccaaaaaagaatcccaaaactgctttctgtgaacgtgtgccagggtcccagcaggactcagggagagcaggaagcccagcccagaccccttgcacaacctaccgtggggaggccttaggctctggctactacagagctggttccagtctgcactgccacagcctggccagggacttggacacatctgctggccacttcctgtctcagtttccttatctgcaaaataagggaaaagcccccacaaaggtgcacgtgtagcaggagctcttttccctccctattttaggaaggcagttggtgggaagtccagcttgggtccctgagagctgtgagaaggagatgcggctgctgctggccctgttgggggtcctgctgagtgtgcctgggcctccagtcttgtccctggaggcctctgaggaagtggagcttggtatggcttctgaggtgggagagggtggcaggggtgggaagagtgggcaccaggag

SEQ ID NO: 35048 - DNA, 2300 bp, Homo sapien
ataactaagtctgagtgtaggctgctaacacttagacctttaccttacagaatcttcgcagccagtgctgtgcattggaagttgcagatggggaaactgaggctcaggactgttaagtgactagttcaaggcaggtctcaggccctcaggatggttagtggcaaagtaaaggactgggaggagcattgatgaattggggcaattggcagaggagtaactgtcagtcaaaatgattggctcaaattattaggtgtgaagaaggaaccagtcagagcttgcctgttgagtcgaattgcccagatgggattagcagggtgagtgaccctagcagaacaaagagctggcccttgtaggtatagactcgacttttctctggttggtcccaacacatagacaactaccaacctgactttgcacctgagaatcttcagggtacctcagactcttcaacagaaggagcctccctgaggtcacagccctctcatcagtcccgttccagtgggcactttccctctaacaaagcccacttgctgtcttggcagggtctgcatccggcacttgcagacatgtgctaagggcctgttgacttgggagcctccatcactggactgtgggccttggagagcaaaagggtaagagcatctcgagctccacgcctgctgggccagtcgctggctgaaggcaggggaaggatggagtttagctggccagcactaatgtcacacagggcaacgccaaaaatggcctttctcccaggtgggctcaaagttaacagaaggcagtgagtaaacagtccactggggcaataactatgcacatttactaagccatgggaagaatagtagtcacgtggccctcgagggcggtgccctcagcttgagatggagttaactccaaatctaatcacagaaggctttctggaggaggcggaatttttatggcggccggatccggctttctctgaacagcgagaaggcgcttagcgccctagggaccaggtaactcctgaggtgagcttcttggtggggatcaagcccagggggcgacggagtccgggctgggggaagggcccgaggggctggagtcgcaagttcaggcccagcttgggctccctgtcccgcccttccgctgtcttgggggattggacgccacgcggtcgtgctagattcggtgctgcgggcccggtgcaggatgcaggccgtgaggccccaggccgagggctgcgccagcgggcttgtcccggccagccgggcggtcccgtgtcccggcgcagctccgctggggtccagatgcccggccctcaggggcgaggcgcgcactccccggggaaccgggctgcggagcaggcggcccgctctgggcggcggtggcacgagagggccatctgcctgggtgccgagaactgcagcgtccgcggtgcgaggcgcggcccgtcccgtcccggcccccagcccggcgcgcacgcacatacccacgccggccggcgcccgctgcccgagcccccgtgccaggcccagaccttgactaggcgcgggaggcggtgcagggactagaggaccccctcccccggcgttcccctcgccccgcccgaggctgcgaggacccctgggctcgggggtggtgagggagcttcgtcccggctgggcccgggctggggactcggcctccctgggcgggggccgcacggctgcaggccgaggtgcggacgcgctgtcaggctgcagcccggctcggtgccgggggtgggctcagcgctggggtcgcctggcttcgttcccccgcggaggccacggccgggcgagcagtgccggggcgggtaacccgacccggctccccagagccgctcaccccgcacggcccggcaaggggagggagagggatggggggagggggaagggaaggggtggtgggtgaggggctgtgggcaccgcagggccgagtccccggcccgtctgcgctgctgtagggcggctgcccgcggcacccgggacgatccagcctctgcctcgcgggcgtcgagcctgagacaggagggagccctggggctgcacaggcttggctcagggaggcagacccgagctgctgcctccattttgtttcctgctcagcttggtctgtggtggtggtggtggtggtggtgtgggtttggggtgcggccgggtagggggttcgcctgcggccgcgtctgctcggggcctgaggcctcgaagaccccagcccaagcccccaggtgagccctgcggcaggaggggggttgccttggcctcgggccgaacccagcgggctgagggcaggtgccc

SEQ ID NO: 35049 - DNA, 2300 bp, Homo sapien
agaaggcagtgagtaaacagtccactggggcaataactatgcacatttactaagccatgggaagaatagtagtcacgtggccctcgagggcggtgccctcagcttgagatggagttaactccaaatctaatcacagaaggctttctggaggaggcggaatttttatggcggccggatccggctttctctgaacagcgagaaggcgcttagcgccctagggaccaggtaactcctgaggtgagcttcttggtggggatcaagcccagggggcgacggagtccgggctgggggaagggcccgaggggctggagtcgcaagttcaggcccagcttgggctccctgtcccgcccttccgctgtcttgggggattggacgccacgcggtcgtgctagattcggtgctgcgggcccggtgcaggatgcaggccgtgaggccccaggccgagggctgcgccagcgggcttgtcccggccagccgggcggtcccgtgtcccggcgcagctccgctggggtccagatgcccggccctcaggggcgaggcgcgcactccccggggaaccgggctgcggagcaggcggcccgctctgggcggcggtggcacgagagggccatctgcctgggtgccgagaactgcagcgtccgcggtgcgaggcgcggcccgtcccgtcccggcccccagcccggcgcgcacgcacatacccacgccggccggcgcccgctgcccgagcccccgtgccaggcccagaccttgactaggcgcgggaggcggtgcagggactagaggaccccctcccccggcgttcccctcgccccgcccgaggctgcgaggacccctgggctcgggggtggtgagggagcttcgtcccggctgggcccgggctggggactcggcctccctgggcgggggccgcacggctgcaggccgaggtgcggacgcgctgtcaggctgcagcccggctcggtgccgggggtgggctcagcgctggggtcgcctggcttcgttcccccgcggaggccacggccgggcgagcagtgccggggcgggtaacccgacccggctccccagagccgctcaccccgcacggcccggcaaggggagggagagggatggggggagggggaagggaaggggtggtgggtgaggggctgtgggcaccgcagggccgagtccccggcccgtctgcgctgctgtagggcggctgcccgcggcacccgggacgatccagcctctgcctcgcgggcgtcgagcctgagacaggagggagccctggggctgcacaggcttggctcagggaggcagacccgagctgctgcctccattttgtttcctgctcagcttggtctgtggtggtggtggtggtggtggtgtgggtttggggtgcggccgggtagggggttcgcctgcggccgcgtctgctcggggcctgaggcctcgaagaccccagcccaagcccccaggtgagccctgcggcaggaggggggttgccttggcctcgggccgaacccagcgggctgagggcaggtgcccagtggatggggagcctgggctgtaacctaagatggaggccgggactgacgcgggcccgagcagggctggcgggacgatcggacaggcctcagccgcgccaggtgccgcctgggttggggttcgagacgcgtagggtgcgggagccgtgtgcggcccgaggccagcgccgtgccccgaggtaggtgaggggatcggaatgccacccacgacgcccgcaggccccgacactccaaggaggcgcgcgaggcccctggggagcccgcctcaggccccgcccgggcagccgggccggcccgtaggccccggccgcgagcgggcgcgcagggggaggggagggggcggcagcggcagctccgctgattgggcggcgctctcacaagcccgacttcacccgccctgaaccccgaagagtgagagaagggaacgcgcgcgctcggtgggggaaggggtgcgcgcgcactcggggcccagccgcacgcgggccggcgcgaggcgctcggtcgcacgcgcggccgcgggggcgcgcgcggtgggggtgtgaggaggaggaggcggcggcggaataggccggggcaggtcgcgctcgctgccttctcccctgaagagagacgcggggggaggggggtgcggcgagcggccccgctctctccccaccgctccgctcgcaccccagtgtaatgagggtcaccccctccccccagctggcccgggagggggcgcggggcacggtaactagtgcgctggggtgggcggcgggcaggcgcgaggagaag

SEQ ID NO: 35050 - DNA, 2300 bp, Homo sapien
ggccccaggccgagggctgcgccagcgggcttgtcccggccagccgggcggtcccgtgtcccggcgcagctccgctggggtccagatgcccggccctcaggggcgaggcgcgcactccccggggaaccgggctgcggagcaggcggcccgctctgggcggcggtggcacgagagggccatctgcctgggtgccgagaactgcagcgtccgcggtgcgaggcgcggcccgtcccgtcccggcccccagcccggcgcgcacgcacatacccacgccggccggcgcccgctgcccgagcccccgtgccaggcccagaccttgactaggcgcgggaggcggtgcagggactagaggaccccctcccccggcgttcccctcgccccgcccgaggctgcgaggacccctgggctcgggggtggtgagggagcttcgtcccggctgggcccgggctggggactcggcctccctgggcgggggccgcacggctgcaggccgaggtgcggacgcgctgtcaggctgcagcccggctcggtgccgggggtgggctcagcgctggggtcgcctggcttcgttcccccgcggaggccacggccgggcgagcagtgccggggcgggtaacccgacccggctccccagagccgctcaccccgcacggcccggcaaggggagggagagggatggggggagggggaagggaaggggtggtgggtgaggggctgtgggcaccgcagggccgagtccccggcccgtctgcgctgctgtagggcggctgcccgcggcacccgggacgatccagcctctgcctcgcgggcgtcgagcctgagacaggagggagccctggggctgcacaggcttggctcagggaggcagacccgagctgctgcctccattttgtttcctgctcagcttggtctgtggtggtggtggtggtggtggtgtgggtttggggtgcggccgggtagggggttcgcctgcggccgcgtctgctcggggcctgaggcctcgaagaccccagcccaagcccccaggtgagccctgcggcaggaggggggttgccttggcctcgggccgaacccagcgggctgagggcaggtgcccagtggatggggagcctgggctgtaacctaagatggaggccgggactgacgcgggcccgagcagggctggcgggacgatcggacaggcctcagccgcgccaggtgccgcctgggttggggttcgagacgcgtagggtgcgggagccgtgtgcggcccgaggccagcgccgtgccccgaggtaggtgaggggatcggaatgccacccacgacgcccgcaggccccgacactccaaggaggcgcgcgaggcccctggggagcccgcctcaggccccgcccgggcagccgggccggcccgtaggccccggccgcgagcgggcgcgcagggggaggggagggggcggcagcggcagctccgctgattgggcggcgctctcacaagcccgacttcacccgccctgaaccccgaagagtgagagaagggaacgcgcgcgctcggtgggggaaggggtgcgcgcgcactcggggcccagccgcacgcgggccggcgcgaggcgctcggtcgcacgcgcggccgcgggggcgcgcgcggtgggggtgtgaggaggaggaggcggcggcggaataggccggggcaggtcgcgctcgctgccttctcccctgaagagagacgcggggggaggggggtgcggcgagcggccccgctctctccccaccgctccgctcgcaccccagtgtaatgagggtcaccccctccccccagctggcccgggagggggcgcggggcacggtaactagtgcgctggggtgggcggcgggcaggcgcgaggagaagggagggaggagggtggccgggcggggaagatggtggtggccgtaaggtgaggggctcgggggagggccaggcgcgatgcggggttggtggccggcggcgctgcagccgccggcctcctccccctccccctcctccatcactaccagccgggctcaggcctagctggccgggctgccgcgaacttcctcccggcgcggcccgtgccccgccggccgcctgcgaacacctcggcctccgcctcccctcaggtagcaggctgcggggcgcggggccggctgccctcccgcagcaaactttgcttgctgctgaatattgatgagagcgatcggctcggctgggaggtgctgccgcggctgcgggaaggagcgcggcccgggcaggcggcggcggcgtcggcagcagccatgtttttcgagctgtagcagctgctg

SEQ ID NO: 35051 - DNA, 2300 bp, Homo sapien
ctcagggaggcagacccgagctgctgcctccattttgtttcctgctcagcttggtctgtggtggtggtggtggtggtggtgtgggtttggggtgcggccgggtagggggttcgcctgcggccgcgtctgctcggggcctgaggcctcgaagaccccagcccaagcccccaggtgagccctgcggcaggaggggggttgccttggcctcgggccgaacccagcgggctgagggcaggtgcccagtggatggggagcctgggctgtaacctaagatggaggccgggactgacgcgggcccgagcagggctggcgggacgatcggacaggcctcagccgcgccaggtgccgcctgggttggggttcgagacgcgtagggtgcgggagccgtgtgcggcccgaggccagcgccgtgccccgaggtaggtgaggggatcggaatgccacccacgacgcccgcaggccccgacactccaaggaggcgcgcgaggcccctggggagcccgcctcaggccccgcccgggcagccgggccggcccgtaggccccggccgcgagcgggcgcgcagggggaggggagggggcggcagcggcagctccgctgattgggcggcgctctcacaagcccgacttcacccgccctgaaccccgaagagtgagagaagggaacgcgcgcgctcggtgggggaaggggtgcgcgcgcactcggggcccagccgcacgcgggccggcgcgaggcgctcggtcgcacgcgcggccgcgggggcgcgcgcggtgggggtgtgaggaggaggaggcggcggcggaataggccggggcaggtcgcgctcgctgccttctcccctgaagagagacgcggggggaggggggtgcggcgagcggccccgctctctccccaccgctccgctcgcaccccagtgtaatgagggtcaccccctccccccagctggcccgggagggggcgcggggcacggtaactagtgcgctggggtgggcggcgggcaggcgcgaggagaagggagggaggagggtggccgggcggggaagatggtggtggccgtaaggtgaggggctcgggggagggccaggcgcgatgcggggttggtggccggcggcgctgcagccgccggcctcctccccctccccctcctccatcactaccagccgggctcaggcctagctggccgggctgccgcgaacttcctcccggcgcggcccgtgccccgccggccgcctgcgaacacctcggcctccgcctcccctcaggtagcaggctgcggggcgcggggccggctgccctcccgcagcaaactttgcttgctgctgaatattgatgagagcgatcggctcggctgggaggtgctgccgcggctgcgggaaggagcgcggcccgggcaggcggcggcggcgtcggcagcagccatgtttttcgagctgtagcagctgctgctaccctgactgggcttcgctggccgcctcggtttctccctctgccgggtccaggcctcttcgccctgcagctgcggatccagcaggcctgcattcaggaaggcgagctctggggtgcagccgcctcggccggctcgcctgcggcctgcgcaccgccgctgcaaaggctccggcgctggctgggcgcagggtgcagcgctattgtgaccgctgcgccctagcgagccaggaaggggggggtacctttttgtgcagggtccaggagcccccctcggaccccgcagccttttgcttttgagagatccagctgctcgacccctggcgagggagggggaggactagtcctgtttgagaattgggaattttgacgggcagaggggttttaattttagttcatcccaagtgtccaccagtctacagaggaggaaaaagagacgggctgtttctatgtagcaggatcggcccagcttcgggaaaatggagttttcagaggctcatcgaggccattttttcatctccagtcgggggaactttttctgcccatggaagtgcagcagaaaggcatagaggccactaggccttgaagtggctgccattttaaagagtcgagtcagatggcctattaactcagattaattgctgtgcttttggattccaggttgatgccggcccaggatggatcagacctgtgaactacccagaagaaattgtctgctgcccttttccaatccagtgaatttagatgcccctgaagacaaggacagccctttcggtaatggtcaatccaatttttctgagccacttaatgggtgtactatgcagttatcgactgtcagtggaacatcccaaaatgct

SEQ ID NO: 35052 - DNA, 2300 bp, Homo sapien
tcgcaccccagtgtaatgagggtcaccccctccccccagctggcccgggagggggcgcggggcacggtaactagtgcgctggggtgggcggcgggcaggcgcgaggagaagggagggaggagggtggccgggcggggaagatggtggtggccgtaaggtgaggggctcgggggagggccaggcgcgatgcggggttggtggccggcggcgctgcagccgccggcctcctccccctccccctcctccatcactaccagccgggctcaggcctagctggccgggctgccgcgaacttcctcccggcgcggcccgtgccccgccggccgcctgcgaacacctcggcctccgcctcccctcaggtagcaggctgcggggcgcggggccggctgccctcccgcagcaaactttgcttgctgctgaatattgatgagagcgatcggctcggctgggaggtgctgccgcggctgcgggaaggagcgcggcccgggcaggcggcggcggcgtcggcagcagccatgtttttcgagctgtagcagctgctgctaccctgactgggcttcgctggccgcctcggtttctccctctgccgggtccaggcctcttcgccctgcagctgcggatccagcaggcctgcattcaggaaggcgagctctggggtgcagccgcctcggccggctcgcctgcggcctgcgcaccgccgctgcaaaggctccggcgctggctgggcgcagggtgcagcgctattgtgaccgctgcgccctagcgagccaggaaggggggggtacctttttgtgcagggtccaggagcccccctcggaccccgcagccttttgcttttgagagatccagctgctcgacccctggcgagggagggggaggactagtcctgtttgagaattgggaattttgacgggcagaggggttttaattttagttcatcccaagtgtccaccagtctacagaggaggaaaaagagacgggctgtttctatgtagcaggatcggcccagcttcgggaaaatggagttttcagaggctcatcgaggccattttttcatctccagtcgggggaactttttctgcccatggaagtgcagcagaaaggcatagaggccactaggccttgaagtggctgccattttaaagagtcgagtcagatggcctattaactcagattaattgctgtgcttttggattccaggttgatgccggcccaggatggatcagacctgtgaactacccagaagaaattgtctgctgcccttttccaatccagtgaatttagatgcccctgaagacaaggacagccctttcggtaatggtcaatccaatttttctgagccacttaatgggtgtactatgcagttatcgactgtcagtggaacatcccaaaatgcttatggacaagattctccatcttgttacattccactgcggagactacaggatttggcctccatgatcaatgtagagtatttaaatgggtctgctgatggatcagaatcctttcaagaccctgaaaaaagtgattcaagagctcagacgccaattgtttgcacttccttgagtcctggtggtcctacagcacttgctatgaaacaggaaccctcttgtaataactcccctgaactccaggtaaaagtaacaaagactatcaagaatggctttctgcactttgagaattttacttgtgtggacgatgcagatgtagattctgaaatggacccagaacagccagtcacagaggatgagagtatagaggagatctttgaggaaactcagaccaatgccacctgcaattatgagactaaatcagagaatggtgtaaaagtggccatgggaagtgaacaagacagcacaccagagagtagacacggtgcagtcaaatcgccattcttgccattagctcctcagactgaaacacagaaaaataagcaaagaaatgaagtggacggcagcaatgaaaaagcagcccttctcccagcccccttttcactaggagacacaaacattacaatagaagagcaattaaactcaataaatttatcttttcaggatgatccagattccagtaccagtacattaggaaacatgctagaattacctggaacttcatcatcatctacttcacaggaattgccatttgtaagcagtttttggtacaacttaaatatatacatatatgtatatatacaggccacttaaagggaaacttgtaacaaatttgtttttggttgcttatcagttcacagctgaaatcctattgctaatcataagctttgggcaaaattttactttgat

SEQ ID NO: 35053 - DNA, 2300 bp, Homo sapien
gtcgattcttgattagccaggtggctagtgataactagaatttcaaatttcaagttccctagggaggtagatcaaacctgctgattcctcttatcctgttttttctatattcatcatctttaacctttttttctttttcttttttttttcttggtttttctttttctttttttcttttcttttttctttttgagaaagagtcttgctctgtcacccaggctggagtacagtggcgtgatctcagctcactggagcctccacttactgggtacaaatgattctcgtgtcttagcctccctactttcttttttatgcaactgaacatgtgtttggccttcatattccttaattaattaattaattaattaattttttgagatggagtcttgctctgtcccccatgctggagtgcaatggcgtgatctccaactcccgggtgctagtgattctcctgcctcagcctccacagtagctgggagtataggtgtctgccaccacacctggctaatttttttatttttagtagagatggggtttggcgatgttggccagggttgtcttgaactcctgacctgaggtgattcgtcctcctcagcctctgaaagtgctgggattacaggcgtgagccacacacccggccaagtattctttaatttagaaatgtaatgttaccagttttagtctatattctgctttgtgcttataaatgcagggagggtggagtgtttgtgagatcagtccttactctaatgacataatcttattagcagaagtatttttgaggaagctccattagggtgattcagatgctgcttgagctcaggtgctaactacctggctggttccataaaagcaggaggcctgacaggtttgtaaaagcttctgatttcaggccgggtgcggtggctcatagctgtaatcccagcactttgggaggctgaggtgagcggatcacttcaggtcaggagtttgagaccagcctggccaatatggtgaaacccctattctactgaaaatacaaaaaattagctgggtgtggtggcgggtgcctgtaatcccagctactcgggaggctgaggaaggagaatcacttgaacccgggaggcagaggttgtggtgagcgaagattgtgccactgcactccagcctgggcgacagagcaagactctgtctcaaaaaaaaaaaaaaaaggaataaaaaaaaaagcttctgatttcatctcccttttcccccacccatttctttgataagtgataattctttttctcctttaaatttaaggttcctcagaaaattttgagtaaatgggaagccagtgttggacttgcagaacagtatgatgttcccaaggggtcaaagaaccgaaaatgtattcctggttcaatcaagttggacagtgaagaagatatgccatttgaagactgcacaaatgatcctgagtcagaacatgacctgttgcttaatggctgtttgaaatcactggcttttgattctgaacattctgcagatgagaaggaaaagccttgcgctaaatctcgagccagaaagagctctgataatccaaaaaggactagtgtgaaaaagggccacatacaatttgaagcacataaagatgaacggaggggaaagattccagagaaccttggcctaaactttatctctggggatatatctgatacgcaggcctctaatgaactttccaggatagcaaatagcctcacagggtccaacactgccccaggaagttttctgttttcttcctgtggaaaaaacactgcaaagaaagaatttgagacttcaaatggtgactctttattgggcttgcctgagggtgctttgatctcaaagtgttctcgagagaagaataaaccccaacgaagcctggtgtgtggttcaaaagtgaagctctgctatattggagcaggtgatgaggaaaagcgaagtgattccattagtatctgtaccacttctgatgatggaagcagtgacctggatcccatagaacacagctcagagtctgataacagtgtccttgaaattccagatgctttcgatagaacagagaacatgttatctatgcagaaaaatgaaaagataaagtattctaggtttgctgccacaaacactagggtaaaagcaaaacagaagcctctcattagtaactcacatacagaccacttaatgggttgtactaagagtgcagagcctggaaccgagacgtctcaggttaatctctctgatctgaaggcatctactcttgttcacaaaccccagtcagattttacaaatgatgctctctc

SEQ ID NO: 35054 - DNA, 2300 bp, Homo sapien
atacaaaaaattagctgggtgtggtggcgggtgcctgtaatcccagctactcgggaggctgaggaaggagaatcacttgaacccgggaggcagaggttgtggtgagcgaagattgtgccactgcactccagcctgggcgacagagcaagactctgtctcaaaaaaaaaaaaaaaaggaataaaaaaaaaagcttctgatttcatctcccttttcccccacccatttctttgataagtgataattctttttctcctttaaatttaaggttcctcagaaaattttgagtaaatgggaagccagtgttggacttgcagaacagtatgatgttcccaaggggtcaaagaaccgaaaatgtattcctggttcaatcaagttggacagtgaagaagatatgccatttgaagactgcacaaatgatcctgagtcagaacatgacctgttgcttaatggctgtttgaaatcactggcttttgattctgaacattctgcagatgagaaggaaaagccttgcgctaaatctcgagccagaaagagctctgataatccaaaaaggactagtgtgaaaaagggccacatacaatttgaagcacataaagatgaacggaggggaaagattccagagaaccttggcctaaactttatctctggggatatatctgatacgcaggcctctaatgaactttccaggatagcaaatagcctcacagggtccaacactgccccaggaagttttctgttttcttcctgtggaaaaaacactgcaaagaaagaatttgagacttcaaatggtgactctttattgggcttgcctgagggtgctttgatctcaaagtgttctcgagagaagaataaaccccaacgaagcctggtgtgtggttcaaaagtgaagctctgctatattggagcaggtgatgaggaaaagcgaagtgattccattagtatctgtaccacttctgatgatggaagcagtgacctggatcccatagaacacagctcagagtctgataacagtgtccttgaaattccagatgctttcgatagaacagagaacatgttatctatgcagaaaaatgaaaagataaagtattctaggtttgctgccacaaacactagggtaaaagcaaaacagaagcctctcattagtaactcacatacagaccacttaatgggttgtactaagagtgcagagcctggaaccgagacgtctcaggttaatctctctgatctgaaggcatctactcttgttcacaaaccccagtcagattttacaaatgatgctctctctccaaaattcaacctgtcatcaagcatatccagtgagaactcgttaataaagggtggggcagcaaatcaagctctattacattcgaaaagcaaacagcccaagttccgaagtataaagtgcaaacacaaagaaaatccagttatggcagaacccccagttataaatgaggagtgcagtttgaaatgctgctcttctgataccaaaggctctcctttggccagcatttctaaaagtgggaaagtggatggtctaaaactactgaacaatatgcatgagaaaaccagggattcaagtgacatagaaacagcagtggtgaaacatgttttatccgagttgaaggaactctcttacagatccttaggtgaggatgtcagtgactctggaacatcaaagccatcaaaaccattacttttctcttctgcttctagtcagaatcacatacctattgaaccagactacaaattcagtacattgctaatgatgttgaaagatatgcatgatagtaagacgaaggagcagcggttgatgactgctcaaaacctggtctcttaccggagtcctggtcgtggggactgttctactaatagtcctgtaggagtctctaaggttttggtttcaggaggctccacacacaattcagagaaaaagggagatggcactcagaactccgccaatcctagccctagtgggggtgactctgcattatctggcgagttgtctgcttccctacctggcttactgtccgacaagagagacctccctgcttctggtaaaagtcgttcagactgtgttactaggcgcaactgtggacgatcaaagccttcatccaaattgcgagatgctttttcagcccaaatggtaaagaacacagtgaaccgtaaagccttaaagaccgagcgcaaaagaaaactgaatcagcttccaagtgtgactcttgatgctgtactgcagggagaccgagaacgtggaggttcattgagaggtggggcagaagatcctagtaaagaggatccc

SEQ ID NO: 35055 - DNA, 2300 bp, Homo sapien
gcctcggcctcccaaagtgctgggattacaggcgtgagccaccacgcccggccagttcttcttttttaaattgaaaccataggccaagcacagcactaatctcagcactttgtgaggctgaggtgggtggatcatttgagcccaggaatttgagaccagccaggcaacatggtaaaaccctgtctctgccaaaaatacaaaaattagccaggcatgacagttcgtgcctgtaattcccctgctggggaggctgaggtcattggatcacctgaagctggggaggtagaggctttagtgagccatggtcatgccactgcactcccacctgggtgactgagaccctatctcacaaataataaatagtaatagataaataagttgagatctctaaaaaagtaaactcagaccagaaaatgttattgtggccaatataatttcaatccagtttctttgcctattatcttcactattacattcttggaccagatcccaaacaacagtcttaatcctcaaaaacagttatgcccattatttacttagtgagacaagtcagagtgtaaatacattttacaaagatcatttaatgaaaaggttaaaggtaaggtgaccctgtggtcctggcttgtctggatcagtctttgtgtaggtcccttgtgctgtcacaatttattaatagcacttcttttcactctcaggtgtcccggtttgaaagataaattacgtggttatcccagttgaataattagtctataacatttagttaatgcaaaaactttatttctaattcacgttgtaattaacgttttcctatttaagtgctgaaggtcagtttttttttttttttaccatatatagaaacgttattggcactctgaatatgcaaagtacaatatatagtgctatttttcagtttttatatgtgaatagtagataatggggagtcagacatttgaggatatctcagactataggttgataaagtccctgagttcccctatcaattccaggctacctctctaacctttctccctaaagctgtcctgttttttatttaagctttgattcttaagtgatcaagacctattctgtttctatgagttcttgaagctaaaacttacttagtcacctttccccttgtttgcttttcatagtagtacaaggctttaaaaatatttgggctgggtgcggtggctcacacctgtaatcccagcactttgggaggccaaggtgggtggatcatgaggtgaggagtttgagaccagcctggccaacgtggtgaaaccccatctctactagaaatacaaaaattagctgggcatggtggcgcatgcctgtaatcccagctactcgggaggctgaggcaggagaatcacttgaacccgggtggcagaggtggcagtgagccaagattgcgccattgtactccatcctgggcgacagagcaagacttcctctcaaaaaaaaaaaaaaattgataaatcttacaatgttttatagtgacagatgcccattgttatttcctaagcgcctgtcttaagtgaggccctatcttagctgagattatttcagaaaagtgatctctctctgggatggttgtaggtatgtcccaaaagggctgtttagaccttggtgggagctcttttggaactttatgatccaactctagctagccagtgtctgttgcttgaaccattcagtagctttctggtttatctctatgctcttttctgacctttctactcttgaactcgttttccatgtagcagtcagaacagtctttttaaaaatgaatacctgattttagctttcctttgttaaagctctccaatggtacacctttgtaactagactaaaatctacaactacgggcccttgcctctttctcacctccttttctgccacttttaacctttgtttactttaacccactgacactggttttactcttgattctcaaacatggaaaaacagatagatgttttctttctcttaacagaattgtgaaaaattgggtgagctgctgttatgtgaggctcagtgctgtggggctttccacctggagtgccttggattgactgagatgccaagaggaaaatttatctgcaatgaatgtcgcacaggtaaagtagatatcgaacggtcttcctccaaagaaagtttgaattttaagtttttcaggaaagacatttattggagacactattttgtggcaacactgggctagttgttacagatatagaaatggtgctgtggggtcactgctttcagaaaagctaccaagtgaataataaatgggtagc

SEQ ID NO: 35056 - DNA, 2300 bp, Homo sapien
tcttgtggagttcatattttgtatgtcaagtgaggctctgtttttatatgaaactaagtgttgatagttcaaaatcatgggaaatgtggctgcaacttcaaggaaaaaaagtttgcctttttcaggacgtgaattgtcttctgctgacttgttttatgcggtgtactttgtgttacttttccaggtaaaccgtcctattggcagggtacagatcttcactgcagacttatctgaaataccccgttgcaactgtaaagctactgatgagaacccctgtgggatagactctgaatgcatcaaccgcatgctgctctatgagtgccaccccacagtgtgtcctgccggagggcgctgtcaaaaccagtgcttttccaagcgccaatatccagaggttgaaattttccgcacattacagcggggttggggtctacggacaaaaacagatattaaaaaggttagaaaaagctaaattaccatatactttctcctctttgcagttgcttgatatcattgatccttgacattagaaaattcatcatagaagaaaataacacagttaataattaaccttattgttgtgtcttgccatatccttctaccgtttagaggcttacgaatggatggttttgatctcccaagtcctttgtattgatcatggtcactgtgtaggaggttggaaaaaatgggacattcatagagatgctatggctttgtttgcttttttgtgaatatcctacagctggtaattaagagagatgacagtgagcacatgatacagagacattgatccacctactaataaaacatttttagtgaggaaaaaacaggtctggcttcatgaaacatgaaggataagaaggttaagccttattggatgaaaatgcagtcatgtcttcaacttaaaacttggcaggatctctaagtttctaataaataaataatattgtatagtcttttttttttttttaataaaataagccttattctggttacattttctgaagaattttattggtttccaggaaatgtagtgtatatgggttggcgtttagtcatttgctaagtagttatttttatatttactgtatgtgccaggtattgtgctggggatgcactaaccaagacgagagatatggcctatactttcataaaatttacatttcggagggagagaaatattgaacaaatcatctcccagtgtgaaagtataaagggctctagagatgtgtgacaaaggaactgaaactagtttgtctctgatgatattatattttattttatttattttttgagagagggtctcactctgtcgcccaaactggagcgcactggtgccatctccgctcactgcaaccttcaacttccaggctcaagtgatcctcccatctcagcctcctgagtagcagggactacaggctcgcatcaccacgcctggctaatttttgtattttttgtggaggtgaggtctaaccatgttgcccaggctggacttaaactcctgggctcaaattatcctcccagagtgttgggtttacaggcatgagccatcactcttgacttgtgaggctattttaaattgagacttgaaatataagtagctgttgacccaggcaaggtgcattaaagccctgcaggttaggagtgaacacgtgtgaaaagccagagtgactgtagcataatgaatagggaggatggtactttgaaatatagagcagagcaagcaccaaggaagatgaacatagtttatttggggaagccaattctcgggctctggggcaggtagagattggccatccatctctctttataaggacgctctagtttacttactaatcttccattctggaggatctttagtatccagtgtatcctaatctttctgctgctgacagtggtaggagtaaggaggtgtttctcattatcaaatagttggggatcgtaaagtaattatgtgtgcctaaaattatactcatgtaatctgctttgtagaatgtgatgttttcattaattttttaaaaaaatgtatacatttggataccagtgtccttttttgccattaagtcaggaggtatttcttgttctagggtgaatttgtgaatgagtatgtgggtgagcttatagatgaagaagaatgcagagctcgaattcgctatgctcaagaacatgatatcactaatttctatatgctcaccctagacaaagtaagtaatgggaaatgctgttttcactgttacaagattgtaaatttgtgttgtcccagccatagtatttgtaggcatgtaacgcagttcccaaggtag

SEQ ID NO: 35057 - DNA, 2300 bp, Homo sapien
tacggggaattcctttaattcccccaggccaggtgagtgctgactcagtgatgacaacagctgtagaagtaggggtttggcttctggcccagatccacgcccttgtcctctgtcaaaaagagaggtggcagctcagcaccattctgttgggatcaggtaactcaggaaaggggctagatgctgtgggcctagagtaagtctccataaaggctggggaagcacacacctgtcatcacctggaaggcagccacactgacgtaatcctctgccactttctggaagagctcgtctggcaggaaaaatgatgatcagcgagggcccaatgccagtagccctgggatctcccagtgacccagccctctgtgccctattcagcttcctctggtgcccctgcatgttcctgctgtgaggctccagcacagcactcacccacactctggcctgtcttgctggatgtttcaaagagctgagctttgatatctgtaaagagaagtgactaaagcctcatacctgagaattagataaacagacaaaagggagggctagcagttcagggagtctcctggaccccacagttcaaggaggccaggaagacctcctagagcaccttgccctggcagccaaggcagtccctattttctttgatccacccagacagccacacacccccaccccccaaagggctgaggagcagctactgtctgcatagtcctggacgtcgtggaagtccacacgtcgacgcctccggtcttcttccagcaggtcactcttggtgccacataagtagatttggcagccctgaggcagaagacaagggtcacctccacaggccaacaaaaccccagcccctagtgttctagtgaggtctgttcacctacctcctctaggctgcgcagttccttcacccagaactttgctcgctcaaagctgctgctgtctgtgaggtcttggtgtgcggcatgcaggagacaaccaagtggtcaagggctgttctctggctagcctggcacccatcttttcttgtgagacagcccaaaccccccccccccttaccatagcagacgatggcagccttggcaccccgatagtagattctactcatggcctcatagcgctcagagcctgctgtgtcctaaagagtaaggcctgagtcaaacttaaggccacgttctccagaccccgctattttccagataaggaaacgggtctatgagaaatgggtctgtgaggccacaaatcaaccagtaataggcaggacctacacctcctcaggaatgagtctcccaagaatagatggccgggggacttacccaaatacctaatgtcacagtccggtctccgaccgacatcaccttggccacgaaggcggccccgatggtctgcaacgagagggaagagatcggggccataggtgcagattaccggccccccactcccccgcccaccgtgcctggcccctccggatgcactcacgttctgataaggccccaccagaaagcggtcgtgcacgtagcgctccaccaggctagtcttgcccacgtactccttgcccagcatcaccaccttgacgtccacgcgctgcccgctcatgctcccggggccgcttcagccacgtcagggtcctgagcggggacgggaggcaaaccccgatctccgctcggcccaggcagcgcccaagcctcagaccccgaccccaaacggcgccaacctacgactccagacagcgcgtcgggctcgagctctggccgtggccttgcacttcggcagcgccccgtgtgcccccgctgttcggccccgggcgccgattatccttcgaagaccccaagcctcggggcggcctgggagcgcgcgggacagcgtcctcaacagcgcagcacgccgccgtgcagctcgctactccgtcattcgctcgcctgcccggcttaagctccgttctggctgggaatcccaaccgaacctggggtctcccgcaacccggctcctacccgcagcgccgcgactcccgcgggagggggctagagggcgagggggcggggccgcaaggtcacgtggcgcgggcgccggaagcggtggctactgtgtggctgcgccggaagtggcgcgcggccggacaactcatggcggcggcggcggcggcggcagctgcttgggcgcggtgcggtggtgactgagctacgagcctggcggcgggtgtgcgccgagccccggcccggcccggccctcgcgtgcctcccaggctccgcacccctgatgctgcgcgggtgctgagcccgcttcggccgggacgatggtgaagtatt

SEQ ID NO: 35058 - DNA, 2300 bp, Homo sapien
actccctgtcacttttcatgaggcgaagcaatacaatgaaaatccattccttcccctgactgcacctccaagtggcactgacagaacaagaagccataaataaggtcgttttgctctcgaaaacctctcttctgactcttaaactagaaggcaaaaggtctctctcttgagatcaacaaagggccttccagcccatcctgctcctggattttgttttgtgcatctagacgcatgcagtgttttagccgccttccaccagctgcagctctggagcttcctgacagtccaaataaaaacatttgcccggcgcggtggctcacgcctgtaatcttagcactttgggaggccgaggcgggcggatcacttgaggttaggagttcgagaccagcctggccaacatggtaaaaccttgtctgtactaaaaatacaaaaattagccaggcgtggtggtgtgtgcttagaaatccacctcttcagaaggctgaggcacgagaattgcttaaacccaggaggtggcagtggcagtgaggtgagatcatgtcactacactccaacctgggtgagactcttgtcaccagaaaaaaacaaaaaacagaaaaaaaaaaaagaaaagcactgcctccgccactcagcatcactcctgtgagtccaacatatatctgtgccatagatgccagatgggagcgctttgcatttagaacttaggacaactccgtaagataggtacccctcccccactgtatgaatgagtcaaaggacaggtccagagaggatggccagctgaaaagaagaaaacctgaggtcatactctacagctgtcaaccctcagtaacccagacctgcctccggccacaaaagctgccttatggctctctagccacatgtatctgaggagctctctatctcggggggaggggagagggggaggtgcagaatcacaacaggaggtgtctcaccatcagccgggcgtggttgatgttccaggtgaaggtagtcatggtctgattctgtgggtccacaatagagtcctccaggacgtacaccgagtgagcaacattggcaggaaatagtcgctcggcccagcgtggcatcctgttggtcttggtcaggagtcgccgggacagcagtttctggtcaggggtcacctcccggtgtactatgtcttccgtcaagacatgtttgctgcaggtgtcagggtgaaggtgaccctcagaagcttgcccctaagagactgcccgaggggattcccatttggaggctccgggcctagagaggccacgccttcccgtaaccttgcagggtggtatgtgctatggttcaaaccagagttaagggcccatcccagggcaaattcccactcccgccatctgactgacctggattcctgccttctagcaggaatggacctcatgatttattgcaccccaggaaagcgccacgggcagagaaataggatttccaactccaagatccctcccaactcccatactgccgcctcttcttgtctcaccacactgagaaaagaatcttacactaaggtctcaagtaaaccaccacccaggcccaacctcccttcaggaccttgcaggcctggcctggccgcttccccgataaggtctacctaggattcgatatcgagtccttcctggtcccagtacttgggggttacccataattcgatctccagatagcgagatggcgcggttttgctcttccaaataccacgtacctatagggattcgggtaccgctgccagaaggcggcgaacacttggtcccaggaactccggagcacgctctggcccaggaaatacttcaccatcgtcccggccgaagcgggctcagcacccgcgcagcatcaggggtgcggagcctgggaggcacgcgagggccgggccgggccggggctcggcgcacacccgccgccaggctcgtagctcagtcaccaccgcaccgcgcccaagcagctgccgccgccgccgccgccgccatgagttgtccggccgcgcgccacttccggcgcagccacacagtagccaccgcttccggcgcccgcgccacgtgaccttgcggccccgccccctcgccctctagccccctcccgcgggagtcgcggcgctgcgggtaggagccgggttgcgggagaccccaggttcggttgggattcccagccagaacggagcttaagccgggcaggcgagcgaatgacggagtagcgagctgcacggcggcgtgctgcgctgttgaggacgctgtcccgcgcgctcccaggccgccccgaggcttggggtcttcgaagga

SEQ ID NO: 35059 - DNA, 2300 bp, Homo sapien
ctctgcagccccaccccgactcccaccacctcctggccatgtcttcagctcacatatgcttccttctttccctttgctgaaaattctcctccttcagaacctccccacccctatcccacccagactggaggccaggccacctagggcccagacatctgagtaggttcgtgtctgcactgcatggtgctgactttagtgaaataaaattggaaattcattcacaacccttgcggctccttccttcagagatggctgattgcaggggggagtttgggggaacccatcagcatgttctgggccctgcagcctctccagtgtcagcctgcaccaggctatttgctctctgtaagccacaccgcccctgccatgctcctttcagccccagggcctttgcatgtgctgttcctttgtctagaattctttcatctctcctatacttagataacacctcttcatccatttccccagtaaagccttctctggcctcaccaattaggtcaaatgttccttagaatgtgttgtggggcatggtctctccctgtgaggacctgtccagctggacctccgccttcctgcgactgtattggtgtctttccctctcaagcctatgagctctgcaagggcagggaccctgtatgattttgcctatcgtatgtcctccagcccccagcacagcgcctggtgtccagtgagagctcagcaaatactttgtgagttaaggacaggcggctgggtagatggatcgtctgcctagacagggcagttattccgctgtgagcaactcttagagaaacttcattttttttcggcgcctggccgaaacttcaagatgtttcccggccaggaacggtggctcacacctgtaatcccagcactttgggaggctgaggtgggtggatcacctgaggtcaggagttcgagaccagcctggccaacacggtgaaaccccgtctctactaaaaatacaaaaattagctgggtgtggtggtgggcgcttgtagtctcagctacttgggaggctgaggcaggagaattgcttgaacccgggaggcggaggttgcagtgagtcgagactgagccattgcgcttcagcctgggcaacagagcaagactcaaaaaaaaaaaaaagatttttcccaaggaactgaggcctgactgacatgtgcttgtgtttaccaggactgtctctttacagagcatctatccctcccaccttccctcccctctctattttgggattactggagtcacagactcagcccgtggctggcagcaatgctccaccctgctacagctgcgttcatcttcctgtccccagatgtggccccacctgctggtgctgaggctagaagtcatcacagccactccttcggccggctaggagagtcaggtgcaagaagggtttatggactctgagtaaggcaagcaggggctgcctgggaggcaaacgccgcggtctggttgcactggcctttgagatgggcggctccttcatgccatgggcaccgcagaggcattggctctgatccttcaacgctgtcgcagggctcctgaggcttagagacggaggtcacctcctgagtcatacacagctgagacatcagtgacaggagaggaccccaactgcgtggataccagagcccaaggccccggaaaaggccatttcgcgtgcctccagggtatggcctgcctgaggaagctgttaccccactgacgttttcgtagcaacaacagcttcctcacagaagaggaggggggccgagatattattcccattcgacacagtaggaagctggggcccacgggggccttcgggggcagatggcaggcaggcttggggacagaccccggagggcaggagccgggtccgccgcccctccgccggcgcctgcgcattgaggcccagctcccctctcaaccccgccccatcgcttgggttttcaaatttgaaacctgcttcttttcccgcccgaacgtgtggatcagcggcgggagagggcggggcagagcgccagccaatagggcatcagaggctccccgaccccgccccgaggatgacaacagcgatccttgagaagccatgtgcgaatgggcgagcggcggccggaggccccgcccccgcggcacccacgtgcagcggctgggcccggcgctttcaggggaccaccaggcccccagagcgccgtgctatgttgggggctagtcactagcacggggctggaagctgagatcaaagacgccaatgagccggcgtgggtggatgagtgaggcgggcaagaagcagcaccggttagcctgag

SEQ ID NO: 35060 - DNA, 2300 bp, Homo sapien
gtgtgtggagaagtccaccctaagagccacagatgtgtgcctgggggtccagccagtgacagaagtgcacggcgcgggctctgtcgtagcccagccctgggtccccatgccgtgtgggccagtttggccgcgtgtttctgcttttcaggagaagccaagatccagtgttttatgtgacagttcactttttaaagattcagattattttgaaatgttttggggaccacacaaaccttgctgcaacctttggtcagaaggctgccagctgctgggtgtttgcagaggtggcacctgccttgcccacccagcatcccgtgcagctggcaaggcaggatgaactcgtttttagattcaatccatttgttccttcagatgtgaccaaagctgccctctgtgcctagccatgggctgggtgctggagacacgagatcaggcaggccctgcccctggggctcattctagggtctgcggcagacagggagacagagggagctgtgagagccctgaggctgagtggctttctggggaagcaccatccctagggacctccgcgttcggtcagtggccgctgctgtcggtgtgcagagcagaggctggggcgagagtggtcagcaggcctgctggtggcagcttgtgcaggaagggaggatggaggttggcttgtggctggcaagagggtggcatgcacgtcgctgaaaggcagggcctgggcccgaggcctgggtgtggggacgcctgaggagactgtacagtgtggagtcgggggggccgcagtcagggagggaggcagagtggcagaaacagggcccagccagaccccagctcctccacccacagcctggagagcttgggaaagtcagtgtcttctctccgcctgtacaagggagcgtaccagtgggccccatcccaggatgggcaggacctgtgggaaccttgtgtggaggagagaggctgtgggctggggtggagtgtgggactcaggtcctgggagaccctcctggggggctgccgagagcatccagctgtgggctgggagagcctgtgaccagggccgcgctgctccagaaagggccctcagaccacagcgtgggggtggggcttggatatgtagactcctgggcctccccttatccagagttggactcagaggagcccaggagtctggttttaactggcttcctgcagcagaaggcagcccaggcttgtcgctggggtcccgggtccctgtgggcttggtcctctctctgccccaccctgccctggggactgcagagctggctgggatgggcttcacctgacctctgcccctccccggtgaggggggtgagtacgaccggcctgcccaccgtggccggctgtcctgttccatccccactgccctcctgcagccccctgatccccggcccgtgctgccgtttcagctcccccgtttcttctcccccagacaacgtggacgaccccacggggaacttccgcagcgggcccctgacggggtggcgggtgttcctgctgctgctgtgcgctctcctgggcatcgttgtctgcgccgtggtgggggccgtggtgttccagaagcggcaggagcggaacaagcgcttctactgagtggcgcctccggcggggcctgtccctgggcccaggagccaatgtgaacttttttttttaccgggattataaaagaacaacaagatgaccttatttcttaactgtttcaaataaatgattaaagtattttcatacattttgcttcttgcccagcagggacaggtggcagagccgaggcttagggtctggcaccccccacagctggagacggaggctctcctggggctggtgtctcaggagcaggggtctgtgtctacagatgggctgtggcccctgcaggcagctgttgaacactggagggtcccccggaccacactggggtgggctcctgaggacgtggggaagtgattttgttttgtggtgtgtggcacgtgtggcgacggataaggcctgaactgggaaacccaggccttcctgttcaccctgagctgcttcctgagacagatgctcaagtgaggctgcaggcgcggtgtggtggggccgagtgtgaccgtttgctaaataaagtgaaatacccaacctcagccgtgtgactgtcctgaggggcttgctttgctttctcttctaatgacttccagcccgccagtgctttagagctttcagctcgtctgctctgacctgcagagtcccggaggatgggatgggttgccctgtttcccagctggggacacacggctctcagaggtcaagtacag

SEQ ID NO: 35061 - DNA, 2300 bp, Homo sapien
atgctcgtgcctcagcctcctgagtagctgggattacaagtgtgcaccaccacacccagctaattttttgtagagacagggtttcgctatgttggccaggctggtctcgaactcctagcctcaagtgatccacccacctcggcctcccaaactactgggattacaggtgtgagccaccgtgcctgaccagaatgtgtgactttaataataaaaaagcgaacgaaaaatatatgaccaagaaaagattcagcactcaatcctgaataagtccattcattcaagagggcagtttctaaaaggagcaagcaaccaacatccctccctgtgatctacaacaggagtcattgattcaaatgtctggaggagccaggcaagtgctgtaaacgagtgaccaggtggggaccagcttagaagaggaaggcattggtggaggggcagtcccattcagctccagcctattgttctgttgtgggaatgtgtgcctagatcttttgctgctgcttctttttttttttttttgggtaaaaaaacggaagtctggatttcttttcttcttcttcttcttctttttttttttttttgtagagacagagtcttgctctgtcgccccggctggaatgcaatggcgtgatctctgctcactgcaacctctgcctcctgggttcaagcaattctcctgcctcagcctcccgagtagctgggactacaggtgtccgccaccacgccgttaatttcttttgtattttagtagagacggggtttcaccgtgttgcccaggctggtctgaaactcctgagctcaggtaatctgctcgcctctgcctcccaaagtgctaggattacaggcctcagccactgagctcagccggaagtctggatttctgatgtgaatgtacatattccgactttgtgtgtgtgtgtgtgtgtgtgtgtgtgtgtgtgtgtgtgtgtgacagagtctcgctctgtcgcccaggctggagtgcagtgacgcgatttcggctcactgcaagctctgcctcctgggttcaagccattctcctggctcagcctcccgagtagctgggactacagacacctgccaccacgcccggctaattttttgtattttttagtagagacggggtttcaccgtgctagccaggatggtctcgatctcccgatctcgtgatccgccggcctcagcctcccaaagtgctgggattacaggcgtgagccaccacgcccagcctctatattctgactttaaaatactggtagttaagccatttattagaatattggcaggtaaaacagagctctattcagctgcaggccaccagttttcgacctctgattcacagctttcctgggccttccatggacgttacttgctgtaccaggcactgcgctcttttgcatagggatgagttccagtcatcactggggtcccaggccaggatctgtgtctgttcctcttgcttcaacccgactaggcctgaggagttgagggtagtggaggccctcaaataattgggaattctgagtctccaaaggcgcgaagctggggcgcctgacggcaggcacggcttaaaggcttgcccagggccacccggggaggacaagggttggaatgcaggactccgccttcaattcagagctcctttctccaggactagaaaaggttattccagagacgggacttgcggccagaagcccaagacgtcctagtcttcgcgaatccgccccattagagcgaccgacaaaaactacaaattccagcatgccccgagtcgcggacggccctcgcgctcccgccggctccaaccatccctctgctcctcattggctcgcaagcctaacgtgctgttccgtgactggttacagctcttgtcgctcgaaagaacccattgctggggctggccggcgtgtgccttggagcctctaaggagatgaaactgcactcaaccaggatgagaggctgcccggccaatgcagctgccgccccgtctgctgcggaggctttgctttttgactccctggcgacagtaaagttgaagagcttccggccggaggccaatagatgggacccccggaaggcggaagttctagggcggaagtggccgagaggagaggagaatggcggcggaaggctggatttggcgttggggctggggccggcggtgcctgggaaggcctgggcttctcggccccggccctggccccactacacctctctttcttcttttgttgttggggtctgtgactgcggatataactgacggcaacagtgaacatctcaagcgggagcattcgctcatt

SEQ ID NO: 35062 - DNA, 2300 bp, Homo sapien
tggtttccaggttgatgggtggcttgccttcaggcactgatacacagaccctgctttttccttcttgtggttccacaatcccctgggcctcctcatcttctctatccatccagctgaaggagaaagagggagggtgcagggcacacacttacttcttcaaagccttggctcaaaaatgacacatgtcatcccacacattttcaattggcaagaagtggtcacatgtccacatctgactgcaagggaacctgggaaagtaaagttagccacgtgcccaggaaaaaaggacatgaatttgtggtgaagagctattcagtttctgccactgaagagttcaggtcacagccctagaaggggcagtggggcagagggtagaatatggagaagtggctatcaccttgtccctgcagaaagactagctgaggctggacacgatggctcacacttgtaatcccagcactttgggaggctaaggtgggtggattgcttgagcccaggagtttgagaccagtctgggcaacataggagacatctctacaaaaaaaaaaattacacagtcacgttgacatgcacctgtggtcccagctacttggaaggctgaggtgggaggattgcttgagcccaggaggtcagggctgcagtgagcctagatcctgccactacactccagcctgggtgagtaacagagcaggactctgtctcaaaaaaaaaaaaaaaaaagtaaagaaaagaaaagaaagaaaaagagagaaagaggagctcaaatcagaatggtgggcaagttgaggggtcttagtgagcccacgcttagaagaaaatataagtccttgcagtggggacacgcatgtgtgagaaagaggcaaaccaaggaccctagctaaaatttttaaaactggagttcatctggggccaggtcagggccgagggcaggatgcccacccttcagccaacactacatgctatcaaattaagtttatatcccccaaaattcatacgttgaaacactaacctgcaaggtgttatttggagacagggcctttgagaggtaattgggtcatgaaagagaaccccttagggtgggattaggaattagtgcccttataaaaagagacaggagggagctggcttcctttatctccacttgctatcgtgagggcatggcaaaaagacagctgtctgcaaaccaggaagagggccctctctagataccagatgtgccagcggcttgcccttggacatctcagcctccagaagtgtgagaaatacttatttgttgtttaacccacctggtctatggtatttttgctatagcagcctgagttgactaaggcaggatttctgagtgagtatgaatgcgctcaagtctttggccacagatataggtgatccagtcccctacctaggtaggtgagcgtgtgcatcatatctgcttacacatatgtcactggagtgtcggaatacatatgtcctatgttcaggtgtgcctgtcacatgcacctcttcaggggactgtgcatgcacatgactatacacccaagtcccccttgtaagggagagcccatgtgtttatgacacgcatacctgaatgtctgtgtgtgcacagccatgcgggcaagttatccatctgtctgcacacctggccacatgcatggaaggagcctgtaggtgtctggggctagaggtaccctgcatatgtgcagctgccggggagaggggtactgagcacatgtttgtctggcacacagtaggtatgaggtaagtgtgtgccgagtaaagtacacgtgtggatacacaggtcccagtgcacgtgtgtgcatgtccacaggaacgcccccagggtggacaaaggtgcctaggtatgtttactcgtgtgctgtgagcccaggcatgaacttagagctccctggtcctggccagaccaggctgggctccttgctgggcacacggaagcctctgccttgtgttggtgcccgtgcgggatgctgccaggagtgtgttggtggcgtgtgtgtgcgtgaacgtgtgtgtgtgtgcgcgtgtgtgtgtaggaagaggcgttcgctctcttagaccttgcttctttctgtggtttggtttctatagagacacttcctgtggcagagaaaagaggtagtgagcggtgtttcaggatgtgagggcccgcaggagccgagtcaggctctctccactgcctgcccgccaccgtgcaagctctggccggcgctgcccacagtccccatggtgggcagcccccgcggcggggacccctgatcggcagcggcatgccagggaagcccaag

SEQ ID NO: 35063 - DNA, 2300 bp, Homo sapien
cggagctttgctcttgtcacccgggctggagggcaatgccacaatctcagctcactgcaacctctgcctcctgggttcaagcgattctcctgcctcagcctcccgagtagctgggattacaggcatccacaaccacatccagctaatttttttttttttttgtatttttagtagagactgggtttcaccatgttggccaggctggtctcgaactcctgacctcaggtgatccacccatctcggcctcccaaagtgctgggattacaggcgtgagccaccgtgtccagccaatgctgtgaatatattaaactgacttgatctttacatcaagatggaagcaaatggtttgcctccatttgtaaataggcattatctcctatttacagattacagatggaggcaaacaagttaactaacttgcccaaagttacacagctagtaagtggcagagactaaagtctgttcctacccaccatgctatgcacacctggctcacccagcaggggctgggggaggagggaaccaggggctgctggaaggtacctgccataagtcccagtacttagtggttggcacaggatggaaggggagccaggggcagactgaggaaaaccctgaccaagtagaacctggccggggatgcccaggtggaggagaacgcagttccagctcctgggagtcgggcccagaactgtcccctgggaatcctcactgggctcttctgactttctctgttgggtctcttataggttctggctgtgtcagatggaggtaagtgacagaatgtgtggagaactggctgagtgggagggaggagggaggtggagatgggtggggacacccctgccacctgctatctttccagggaacatggctgcagagtggatgcatgggggagggtgggttgtgccaggggctggggaaggcagcaaggctcaccccaacttgtccatccccctgcagagctgagcagcacgacggggccccagggccagggcgagggccgcggcagctctctcagcatccacagcctccccagtggtcccagcagccccttcccaaccgaggagcagcctgtggccagctgggccctgtccttcgagcggctgttgcaggacccgctgggcctggcttacttcactgtaagcctggggtagggaaagggaaggggggacacgggagagggcagggcgtggatggagcttcaggctggccagagtggggtcctctgtcagcttcctcatctagccttcctgcagcaccctcttcctcttctcccagctgggaacttttcttccttctccctgtccttgtctctgcctctcattttctctccctgtcttcagatcggtctggctccgtctgtctgtctggccctgtctgtctggcttggtctcttggccctgtctctgtcccaatctttttgatcacatcccccagtttggtctctgtgtctctgagtctctgcctgcctccccctccttcccctcccaggagttcctgaagaaggagttcagcgcggaaaacgtgactttctggaaggcctgcgagcgcttccagcagatcccggccagcgatacccagcaggtgggggaagggggagctggggccgagggctggggagaggggaactgggccacgctccctgaccaactcctcctgtccctcctccttcagctagctcaggaggcccgcaacatctaccaggagttcctgtccagccaggcgctgagcccagtgaacatcgaccgtcaggcctggcttggcgaggaggtgctggccgagccccggccggacatgtttcgggcacagcagcttcaggtgggcgatcctggggggattggccttgaaagggagacaaaaggagcaggggcggggtcggaccctggcggggagtctgaactacaaagcggagggggcaaatttggaggcggagacagagccaaatgccggggcaggcagggcggagctcagagggcggtatcagaggcacggggaaggacagttagaggcggagcctagctgagctcggggcgggcttggaccccgggggtgggtataggaactgaggtcggggcggggcttgggaaatccagccctaggtttggggcggggccagccccaaggacccggcctgggtgcaggcagcccagcgcccccaccccagccccggctcacctgttccggggtcgccccgcagatcttcaacttgatgaagttcgacagctatgcgcgcttcgtcaagtccccgctgtaccgcgagtgcctgctagccgaagccgagggacgccctctgcggg

SEQ ID NO: 35064 - DNA, 2300 bp, Homo sapien
ctcaggtgatccacctgccttggcctcccaaagtgctgggattacaggcgtgagccaccgcgcccggcctagtttggcattttgaaaagattgctgtctgctgctttggagcatggatcaggggcagcaagggcagaaatggacagagcacttgggaagtgaccgcaatgacccaggggagatgacaggcccagtccagggaggtggccacagagatggctaacagcaaaagatcagggagctcctggagcaataaaattgggagaattgaggactgagttggaaacgaggaagtggaggggaaggaaacagcaaggatgtctgcttggtgcccgacccagatggatggacggtgtgccgctcaccaagatcaggaagaaggaggaggcccaggtttggggtgagaagcacagtgcgtgcttctggcttgcagagccaactgctcgtgccagaggccgctcagaaagcctgagcagacggagcttggcaccttccctccaaaacagctcctcctgctgggttcctttctcaacgcgagacacccccaaccaggcaggctctcagcccagaaaaggtctggggaggccatggccagagcccaggtgcacagacaaggtgggactcaccacccagggggacacacagactctgtcactggccagggaggaggcaggcagtaggcagggaggtgctgaaatggcagagaggctggcaagagatacgttggtgctggaatggagctgccttctctgctgcttgtatgagtcccaacagcagctctggtcagatccagcattttctcactttcactagggctgtagccccaaaataaatctttagaagtggtggctgtgtaaatcagcagcattttggaattatatctcttgatggatttgatcgatagctaactgcctcccccactaaacccagagctccgtgacagcagggaaggcaaacttcaaaaatatcaaaaagcacaaccttattaaaaaggagaaacacccccagttcaccaggagcaccttggattcagctgctcctgccaagggtctgaactgcacgggggaatggagagaaacaggtcacgtgggccggggtctctgggcccgctgtgggggtgtcagtttgctcataggtggagacactcgatgtgacattaacagcaccttcaagcccaaggacccagagattctgacacaagaactgagaactgattgcatttccgtgactcagcgacaccctcctacctgggcatgaacccagccctagccaaagatccagagacccgactcccatctatttccttttcctctctccctccccgtcaccaattctactggtcagatgtccctgggatgcacctgtcctccccagcccctccgttcccatcggagttcaggcctcatcatctcctgcctggaccattagcctcttaactggcccctccgcttccaggctcccttccatatatccgggttccaccccgggggccattctaaaaggcagatcaggcccatcccagtctggccagcggctccacattcactcagactcacatcctggacccatggtcgggcattagagacctgccacgattcaacattccacggcctttccagcttaggtcctcatctcacactccctctcctctgagctccccctgggagacttacagacaccccgacgcttggcaaggccataggatgtttttgtttggtttggtttggtttttctgagacagtctcactctgtcacccaggctggagtgcagtggcacgatcttggctcactgcaacctccgaaggccataggatgtttgggtcattccctggggagtcctgtcaggccaggaacgaggggaccctgggaacaaggtgctgagtggcatcagggtctctgcctgcaggcgggggatgtgtctgggtcgtggttgatgggaagaacctgaccatagattccccatgcagagctgacgattagcaattaactgggaggaatctcaggggtgaggttaattgggggacagagggagggcagctagggttccagggactttgcccttgacccaagagtataaagaggagggtctcagttctcctcagggtcctggaggcttcattgagctgctgagcagaagctgaaacacagaattctaaggtgagcccaggaccctcacatcccaaccccacccccagctctgagtaggaaacagcccagcaccccagccccttcatctgtgtcctatctgcgcccacccccaccgcgccccatataacatgtcagtccagccaatcgcggtg

SEQ ID NO: 35065 - DNA, 2300 bp, Homo sapien
gcacgtgtacatctactcgcatggatgaatgcacacacctgtaaacgcacagcccgtgcccacatgcacctgtgacgccaacgttaggcagactcagcagcatggcaggagcggccactggggactgggacgtgggtggggggcctgacaggagttgtggtggtgcaggagctgggtgaccgtcaaattcattaggacgtcttctcttctaccagtgctggaggtgagctctgccatccccatcatcatgggctccaacatcggcacctctgtcaccaacaccatcgtggccctgatgcaggcgggggacaggactgacttccggcggtgaggggggctgggggttgggggctcgtgcctgggggaggacagccccagatgccaggaaccccaggcgtgactgtgcactggctcgagcctgccttgcaatgtggcctccctgcccagggccttcgcgggggccacggtgcatgactgctttaactggctgtcagtgctggtcctgctgcccctggaggctgccactggctacctgcaccacatcactcgacttgtggtggcctccttcaacatccatggtggccgtgatgctcctgacctgctcaagatcatcacagagcccttcacgaagctcatcatccaggtgacagcagggcctggcatggggtgagggtgggggtaacaagggacccagcctccttcactccccctgcccacatcttgcccacagctggacgagtctgtgataaccagcattgccactggtgatgagtccctgaggaaccacagtctcatccagatctggtgccacccagactccttacaggtgagtcccaggcctaaccccaggtaagaggactccctcttcagactcttggtttcattgtctgttcaaaatgctccagatagaccttgaagatcatttagccaggagagggcaaatatgtggcccttctactgtgcttacagttaacattgctaattcctcccaacttcccacatcgccttaggcagacatcaccaatcaattaaagttgttatgtaattgatctagcccagtggttcttgaagtgtggtcccaggccagcatcttgtgtgccgtgtgggaacctattagagatgcaaatcaccctgcccttccctagacctactgaatctggaaacccctgggagcggggccaatggcctatgcttcagcagttcctctaggtgtgctcagtgctcaagtttgagaaccgctgatccagcgcaacccttgggtttcacaggtagagacacaggttcagagaggctaagaaacgtgccagagcttatcctaccatgtcagggcctgagcaccctagaggggttagtgactcagctgggccatgttttgggacccaggtaacgtggggaagaggcagagtgctataaggataccaaggaaagtaacaggaaggtgagctgcgtggagaactccttggagatgttaacagccgcttgtgctggcatcgggggttccttctcctggagactgccacaggcgggagtcccttgtccttctgcactgtttctgctgcttctaatactgggaagatctgtttgaatcaagtggatgctcatggaccacccattatgccaggctgatgaggaagcaggcaattagcacacttccttactcagctgtgaaaaggcaaatgcttcatccaaaccacaatgcaccatatttgcttctccctgatgcttgcatgtgagacataactccatttacaatgagatacgaggaaatccaagccacagcacagcacagcacagcacaagcccttccccttccccttccccttccccttccccttgctgcttcttgtgactggacctttaccctggtgcgaacagaaaacactcatctgactcgccctgcgatgctcctttgcatctgaagttgctccagctcagcctctgagtgttcaaagcagccttacataaaaaaaaacccctgcgggcagcttttacgctgacttcatgacctctttaatacatcaaccactttctcacgagctctctgagcactcttagtgctctctgactcaccacaagcctctctacttcatagcaaaatctggaagggagagaaatcacacactttgatcttcgcaaaaagcaagccatggaagacagctctgttcctcactgcccctgagctccctgccggccacctactgcagcttccggcagatctcaaccagcagcctccacgtcctcacttgaagtcatcctcacccaggttcactctggggaggccgcccttgggcctttctcta

SEQ ID NO: 35066 - DNA, 2300 bp, Homo sapien
atggagtctcactctgtcacccaggctggagtgcagtggcgcgatctcggctcactgcaagctccgcctcccgggttcacaccattctcctgcctcggcctcccgagtagctgggactacaggcacctgccaccacccccagctaatttttttgtatttttagtagagagggggtttcactgtattagccaggatggtcttgatctcctgacctcgtgatctgcccgccttggcctcccaaagtgctgggattacaggcttgagccaccgcgcccggccctgaacccaacttttagagcagaaagtgttttcaatgcacagcgacctttttgagggtctgtccttttcctgaccagaccctgagggacagtgcctgagcagttgagtacaggggaagtcctcagagagtgtgttgtccctgcagttctcactgtcaccggggagccctgccacttccccttccagtaccaccggcagctgtaccacaaatgtacccacaagggccggccaggccctcagccctggtaagactacgcagaggagttggagcaggggcctgggagacatgtaccctgcctgtccttctgtccaaggaactctgcttggagagaggggactgtgatagggcagggtgggccaggcccctgggtagagcagggaagccttgtctctttctacaggtgtgctaccacccccaactttgatcaggaccagcgatggggatactgtttggagcccaagaaagtgaaaggtgctacacacagcctctggggtggcctggggctctctcctcccgcctcattactctcctggtatcaccagaccccacacacctgggattctggacccagccccttctctccctccacaataccctttggaagtccagagggagagttctgggaaggagtggtcccattttgcaggtgggtaaaccaagcttggaaacttggagtagcaaggtcacaaggcaagtaggttcaagaagggccttggcccccagctgtgtgactcagctccctgctcttccttccaccatgtccatctctcagaccactgcagcaaacacagcccctgccagaaaggagggacctgtgtgaacatgccaagcggcccccactgtctctgtccacaacacctcactggaaaccactgccagaaaggtgaggagatgtggaggacctgggcggggtgctgggggacaggggcaaccctgggcctacagaataggttgctggatactcggagacttggcatggtcctagactctcctgagaccactatccctctttgtccccagagaagtgctttgagcctcagcttctccggtttttccacaagaatgagatatggtatagaactgagcaagcagctgtggccagatgccagtgcaagggtcctgatgcccactgccagcggctggccagccagggtgagcagatggttgggaacgggccagggaggagcgtcaggaagacaggctggcaggaggccgggtggtgtgccaggaaggagagctctctgggggggtctttaggcccaggggtggctcactgcgttccctccccaagcctgccgcaccaacccgtgcctccatgggggtcgctgcctagaggtggagggccaccgcctgtgccactgcccggtgggctacaccggagccttctgcgacgtgggtgagtgagggtctggggcaagcagaaggccagcccccaggtgggacgggcttgccaggaaggaggagggagagtgcggaaagcagatgagagggaggcaggagagcccagccttggctgcccagggagccccctttctcctcagacaccaaggcaagctgctatgatggccgcgggctcagctaccgcggcctggccaggaccacgctctcgggtgcgccctgtcagccgtgggcctcggaggccacctaccggaacgtgactgccgagcaagcgcggaactggggactgggcggccacgccttctgccggtgcgccgcgtggggctgggtgacccctccgccccagggctccgggctcccggcgctctaacggcgccccgtcgtgtggctacaggaacccggacaacgacatccgcccgtggtgcttcgtgctgaaccgcgaccggctgagctgggagtactgcgacctggcacagtgccagaccccaacccaggcggcgcctccgaccccggtgtcccctaggcttcatgtcccactcatgcccgcgcagccggcaccgccgaagcctcagcccacgacccggaccccgcctcagtcccagaccccgggaggttaggaagt

SEQ ID NO: 35067 - DNA, 2300 bp, Homo sapien
tttgagacagtccctgtcgcccaggctggagtgcaatggcacaatctctgctcactacaacctccacttcctgggttcaagcgattctcctgcctcagcctcacgggtagctgggattacaggcacacgccactacgcccggctaatttttgtatttttcatagagatggggtttggccaacacgttggccaggccggtcttgaactcctgacctagagtgatctgcctgccttggcatcccaaagtgctgggattacaggtgtgagccaccacacccagccacttctgtcatattctgatggacacacagaacagccctaactcaatgtgggaagacaccatacaagggcatgaatcctaggtggtgaggatcaatgggggctgtctttgaggctgtctaccacagcatctttccatccttcctgccctgtttgctttgcttttcctatgtgtaggcttcattctcaaacaggccctccctagagagtgacaaaggtgatcatcaatgtgttcagacccacatgctctgtgcttagtaaccccagtgcaacttttttgctttcccaaaagttctggcaaaagtcccaagctagcactttaattggcctaaattgtgtatatgcttatctctgaaccaatcactgtggattagagatgtcatgctctgattgaccagacctaggccacatctctagccctagctctgagggtagagttggcagcactagagcccatggaagaagtaagagaggagtcgttgctaaaggaaaaatcaaagtgtcattaccgaaccaggacagatgctgggcagcacatgtgcaccccgtcttcttctcatgttccagctgcacatcttagtgccccttggtttagcacttttctcattaaatcatttgctttcttgcctcacttcctgtggttggtagaatgctaagatggccccaagatctctacccctggtgtttgcacacctcccagttattctgtcaaacatgaatgtagatgcttctgtgaaagaattttgcacatgtaatttaagtcccaaattgtttgaccttaaaataaggagaatggcagggccaggcatggtggctcatacctgtaatcccagcactttgggaggccaaggcgggcagatcacgaggtcaggagatcgagaccatcctggctaacacagtgaaaccccatctctactaaaaatacaaaaaattagctgggcgtggtggcgggtgcctgtattcccagctacccaggaggctgaggcaggagaatggcgtgaacccgggaggcgtagcttgcagtgagccaagatcgtgccactgcactccagcctgggtgacagagccagactctgtctcaaaaaaaaaaaaaaaaaggagaatggctttggtgggcctgacctagtcaggtgagttcttaaaaggcgacacatggcccggtgcagtggctcaggcctgtaatcccagcactttgggaggccgaggcgggtggatcacgaggtcaggagatcgagaccatcctggctaacatggtgaaaccccgtctctactaaaaagacaaaaaattagctgggcgtggtggtgggctcctgtagtcccagctactcgggaggctgaggcaggagaatggcgtgaacccgggaggcggagcttgcagtgagcggagattgcgccactgcactccagcctgggcgacagagcgagactccgtctcaaaaaaaaaaaaaaaaaaaagaaaattaaaagtgggtattgttgtaagatgctgagtttatggtagtttgttacatgacaatagaaaatgaacacacttcacagtggactccaagatccccatgatctttgatctccttaacctcctgatctccacaggacccagagcataagaatgtcccttcttctgcttccagtcccactatctagaaaagagaggaggagcccagctcttcatttcacccccacccacaaactcccaactttccggccctcaaggggtgaccaaggaagttgctccacttggctttccacaaacagcctgtgccccaccaggctcaggagggcagcttgaccaatctctatttccaagacctttggccagtcctattgatctggactcctggataggcagctggaccaacggacggatgccatgagggctctgctgctcctggggttcctgctggtgagcttggagtcaacactttcggtgagtgctgtgggaaccaggattgtcccaggattgttctggggggtcgctatcacagccatgagccatggcctctgctcatgacctgtgggtc

SEQ ID NO: 35068 - DNA, 2300 bp, Homo sapien
gtcgaccccattgtgtaccactgtgtacctttaaaccccagctggatgcttaggtgctgaacgcaggagcccttcctgacttcctctacggaacttcgaacatgtgatacccctctgtccagaaggctctttccctccctactccagtaacctgcacattttcactgaatcttcagatttcacttggacacaacagccttcactaagtgaggtacctgccctatgttccactgggccctgggtttcccttttttttttttttttttgagacggagtctcactctgttgcccaggctggagtgtattggcacgatctcggcccactgcaagctccacctcccaggttcacaccattctcctgcctcagcctcccaagtagctgggactacaggtgcccgccaccatgcccggctaattttttgtatttttagtagagacggggtttcaccgcattagccaggagggtttccctcttttaaggtacttaactccctagatcctagatccatccacttttctccgtctctattgccaccttgtaggtccaggccaccaccatctctttactggaattctgtaaactcctgactgctctgcttccactcttggccccctaggaatccaccagagtgatatttttaaaatataaatcattctttcaaatgtttcacatttcacttagcaaaaacacttcagcctcctggacgtgttcacagtcctccatgacctagctagtgcctttgctccttctgtctcatctcagaccactgggcccagaagctgcggacgccttctcctattccctgaacacaccacttagtctggcttagagcctctgcgtttgctgttgcttctactggatccgctcaaatgtcacaccctgagagtgtcacacactctcttaacgtccgaagagcagttgtcactctctgaaaccatctatttgtttatttacagaataattacctttatctcaccctgccctcacttgctccctccacttctagcaagtaagcagggagcctggctatcttgctgccatcactgtgttctccagcacctggcttggtgcctggcacagaggtgttgctctgtattttcggatgaatgaatgcataggaactagagaagcctagatggatccggctctgccttactcgcggagtttgggcaagcctgtttcctgctgcgtgaagtagggggtggaggaagcggggtgttaagctacaaggtgttgattagctgtaagatttcagccttgttttctccgtagtcttcgggctggagccagccacttgacgtccggcgcctcagctccccacctgtataatgggtgtgaactcatcccgaggtctaggggtggtagcgctgccttataaggcggcagaggccgagggaaggcgaggccgagtgggtggagagaaatcacaacatccggctgcgggggctgggcggggcgcctgcggcgaccgggcaagaggtcggggaacggctgcgaggccgcagcctcctccctgtctctccctctttcgatgtgcgccctcctgattggggccgacccaagggaatacggccacacaagtggaccaaacaaactcgctgccagcccgcaggaggcccaggatacggagcgcgtccccgacaaaaccctagaaaagccgtctgcgagccaaaggccgccgggccacaccttcaggcgacgacccaatcaaaatgcagtacttgagatgacggacgtcttcttcacccaatcacatattcggcctcctgggcgtgccccagagtacccacctccattgtcccggctgagggctcggccctaattggcagtttggtatcctacgaaagcctagaaattcgaacctaggggctgaaccccgccctcagaccaaccaggaagaggtgacgtgattggtcccgcccccgtacttctttgagcgagtccccagctgggggggcgggggaaaaaatgaagaggaagactaatgggaagacggcgcggggagcttctgcccggtgattggtcaaatgaggtaaacagagggcggggcagggcgggccagcgccggggtggcccccgggagggggcggagagtgcgcggctggctgcggcggccggggaggccggggaggccgcggcgcggtcactgcgagccgagccgagccgcgccgagccgcgccgatcgccatccggcctcggcactcgcgcgcgatcccggccggcggcgcggcccggcgggccaggcggcgccacagcccatggagctcgagaacatcgtagcgaacacggtgctactcaa

SEQ ID NO: 35069 - DNA, 2300 bp, Homo sapien
taggtcggggagtcatctagggacctagccttgccccctccctagaaggcaacttctgcccttgtaccacctgccctcacccaggccagatggatacaggactagaaagccagaggggaaactgaggcccagcatgagaaagtggttgtctaaggttgccatggcgttgttggagttggggttcacctcttgactcagccctacttgatgtggacagtgtctcccattcactacgtaacacacatggagaagctgaggttcacagatagcgagtgatgggccacagtgtgaatcagagattcagacccagctctgggaggctcaggccccttccaccctcctcaacctggtggcccacaggccacacacatttggctagctccctgacacattttatttggctgcagtgagtttttttttttttttaaacaaaatgggggccaatattttatgttagagtctgcaattccggctgcttttgaaaaaatcagaagagctggccacattgagccagaaaccctcctagcagcaatcaagcaatcagctggcgttctcctgcagctggccctgtcagagaggccttcgctgttcctggtcatctcacatctggcccacgtttcccacacctgttgggctctgcaggcaatcgaactgctgctgtgacctcagctgctgcagatggggtgtctgcgaggtcaagcaagacaggcaggggaccggggaagccccagtgtgcaggggacggggagtcctgggtgccagcccccttgcccctgcctcatttgagcgtctgatatctctgatgtggggcctggtgatagaggcctgggagcctccttgtccccatgctgccctgtgcgtctctcaggcctgccccactggcctagaatctctccctcccgggccttctgcacttctcagcactgtgacgtccttctcccctttcttcaccgggggaactcctacctggcgggaagcaactggggctggacccattgttggagctacttggaacactgtcctcccgcagcgacctcactgcctctcttggctctcccagtgcaggagcctgaagcaggagaagcacgtgtgtcctggaacgcagcaagggcgtgctggagcgtgcagagggaaggcctgaggtgctgttctgcctcagctctgccttggctgggccctagaggccgtggaccgcactgaggacccagaggcagttctgaggcagtgggactcgagacccagtgtcctattgctcccacaggtggcggtggaaatcgcaaaggcaaaagcaagaaatggcggcagatgctccagttccctcacatcagccagtgcgaagagctgcggctcagcctcggtgaggcctgggcagagactgggggtgctgaggcgaggggccctgctggggccgggggagcctcccctgagaccttgccccggagcagaggggcagacttgggggctccagtgagcaggaggatgaggactgcaccattcagcccagtttcagttcctgggcttgggacgggtggagagcagacagcaaacagggtcacaccgagggtggttgaagcgggtgtcgggaatagggcaggggcagattggggcagttgattccactttgaaaaggagagccagctagggtgagcagggcccacaggacagagggagcagcagctgggccagcccacagactgactgccttgggacccccaggctggggcgtagcctcccaggcccagccctgaggggtgcccagcaaatccttgaccagaagccctcagcctgggcagtgtgacagggttactcctgggaggggacagaagggcccaggaccccagttcctgccaatcttggccaaggccccaggtctgagcagcacccaaggttgctgaggcccccggtggcctgcacgtgcgcagagcacacccgggctgcttccacctcctgggaaggaggcccagctgagagcctgccggaagccacagcttcctctcgcactttcgccaggcaggcagcaggtgtgggcctggccccggctgggctgggccggaacctcacggaccgcacccaaccccagtaccgtgacatacgcaagtcgtgtaaatcaggagacaatgcagggaggtggatggaggcctgggctctggagccagactcccggctgtgtgacactgagctagtcagttagcctctctgggcctcacagccccaaaacagctgtgcccacctgagggttgtggtgagggttctgaagaagattgtggctaccacactgcagagctggaagctgttgtggg

SEQ ID NO: 35070 - DNA, 2300 bp, Homo sapien
ggacacagggtcagatgtacccaagtagaggagccagatggatggtctagggctttagtggtttaggatggctgagcatgggaggccaggggtggaagcaaggaatggctggagctgaagtcagtgagacacagccagctttgaaagctagattaaggatcacagggttaaggcccagatggggcctcatctggaaggtaggggattccctgaagggtttttactggttgtgttggggtgtttgctccagcatgtacaaaagcacccccagtctctgtccatgtggtttagacggggctgggcttgcaccccctgcacacgcatactccacacacatacctagagtgagagagccaggtgggaatgttgcaagtgacagaactgtcctcccgctaacttagaaggtgttccaaggatatggaggagcttcggggtcttagttgtgggctccattctcatcaggagacacccaccagaaccaagatgatagagccatttggttttgcctctttgagcccagttgcaaactcaaggagtctgagtggccaggctggatacctgcctgctgtgcactgtcagggagcagggcacttgggttcacagtttcaccaggatggcacccgtggggcagtgattcccccattgaaatcagggtgcctgtatacaaagaaaagggagcgggtactgggaggccattccctttgcataaggagcacatatcctctcccttaacacacaggcacttagattggttcactgatagagactcagcccaaatgagtccaaaaagaatcattcatggagttgtttgcttgtattttgctcaaatgatggggaaggaattggggttccgttttcctccagggatagatggcaggatatgagcctagggctgttggggttgtcctcgctacttcttggggtgagcttgcctgagagtgatgcaaacagaagcagatacgtgcctgacaccattgcgggaacacctggaagcaactgtgaccaaagctagaatctaccctgggacttgccagttgcatgaaccagtcccctttgagctcaaagctttttcttttctttctctttttctttcttttctttctttcctttcttctttctttctcttttatttttctttctttctgtcctttctctttcttctttctctttttttttttgagacagggtctcaccccctcccttaggctggagtgcggtggcgtgatctcggctcactgcaacctctgcctcccggattcaagcgattctccacaggcgtgcagatttttttttttttttggtagagacggggtacagctcaaacctatttgtttgggagttctgtcacttcaaccccaaatgttccagctaatatggtggtggaggggtttttggcaaatcatcttaagtgcagtagagaagttggacgaaaaacagcccagttaagaggccgatggacagccaacttcagagtggcctctgcaagcttggacctcggggtagacagtggggcgctctctaggggtcatctgttccctgctggggtaggggggaggcatgtccacggaggccagggctgtgggttcggcactaggtcctcctccccgtggcttcctagtaggcatgtggtggtgtacgcctgctgggcacctagcgagaggggtcgtgagttgggagggagccacgttggggtgcctgcctgctcgggggcccctgcccactgcgtgtgcgcagcgcctgtcaggatgtgacggggacctggacatgtgtgtgctctccgagctgagctgtgtgcgcgtccgggttctcgacctcagctgcctggctgtgcatccagcgtgcacgaccggtgtggcctgggctccagcctggagtgtggaccgggtcggccggcgtgtgcctcccctgtgagggtgccctggcgggtgtgagcccggcgggctggagaaccgggtctcggcgccgcaggtgggtgaccgtcctccccctccttccctccgggggcagcctcctcgcggcgtgtggctgggggtgcggggccctctgccggctgccgcgcgcgcgcacgccgggctcagcacccgccgtgtacgcgcccgtgcgcgcgccccgcgcctccagcccagcgctcggagccgctttcgctgccactgtctgctcccccgggccgccgccgcctccccccgcaggcccggggctctgtccgctgggcccgcgctgctcgccccgagccaggagaacgagctcgaggaggatgcctgggcccgtgagtaccgcggcggctgcgggccgggcgggca

SEQ ID NO: 35071 - DNA, 2300 bp, Homo sapien
ctggggtaggggggaggcatgtccacggaggccagggctgtgggttcggcactaggtcctcctccccgtggcttcctagtaggcatgtggtggtgtacgcctgctgggcacctagcgagaggggtcgtgagttgggagggagccacgttggggtgcctgcctgctcgggggcccctgcccactgcgtgtgcgcagcgcctgtcaggatgtgacggggacctggacatgtgtgtgctctccgagctgagctgtgtgcgcgtccgggttctcgacctcagctgcctggctgtgcatccagcgtgcacgaccggtgtggcctgggctccagcctggagtgtggaccgggtcggccggcgtgtgcctcccctgtgagggtgccctggcgggtgtgagcccggcgggctggagaaccgggtctcggcgccgcaggtgggtgaccgtcctccccctccttccctccgggggcagcctcctcgcggcgtgtggctgggggtgcggggccctctgccggctgccgcgcgcgcgcacgccgggctcagcacccgccgtgtacgcgcccgtgcgcgcgccccgcgcctccagcccagcgctcggagccgctttcgctgccactgtctgctcccccgggccgccgccgcctccccccgcaggcccggggctctgtccgctgggcccgcgctgctcgccccgagccaggagaacgagctcgaggaggatgcctgggcccgtgagtaccgcggcggctgcgggccgggcgggcacggagcgcgggcggaagatggtcccaggactgagcccttccccgcgggcggctcagcgccctggccccgggtcgccgccccggtcccccgcccgggccgcgagcagcccctcccccagtccacaccggagggagggagagcgccagtgagcgagggagccggaacggggcgcgagccgccaccagttcgcttggaaacggttgccacagcaacggggttgcgctccccggcaacacgactgcggggcggcgacgccccctccccctccctcccccctcccccgacgcgggcccacagcccgggggtgcagggggagaggggtgcgcggcgggggcatgtcgcccctctggcccggctgggtgtgcctgcctccacagcccgtcgagggtgggggtgggggcgaacggccgtgggcacgagctggctcccacgtggctgcagtcgtcgcagcagggctcctggggtggctgcaaacgtgggggcggcccagcccctgggcttgtcacgggaggaggaggcatggaggctggcgctggggtctttgcccatagaccccccacccacccacccaccgccgccaccacctaatcgcgccggccctggacatggcctgagccgagctgggttccccaggggcgacgtttcttaccagggtagaggagcgaagcttgcatccctcctcctcctcacggccgaggcacgtgccaaaccgggcatgggcccgcggtgagtctctgctccgtgttcctagccaccattctccagggaggggtggaagcagagtgggcaggagcagaggaaaggatattgctgacccagggaagctgaagcccaggccaaatgggagcgacccagcccattgtctggatcacaagtgcccctttcttgtctgagcacaatgccccaactgtactgagtagcatgcaggttggccggcagggaggcacgcgccacatggaggtgcctggtccgccaggggagctcctctgggaggagaatggcctctgactcagaggaaatgacctctggctcccctcccaacctcccctcagcgggcatcatgctggagagagaaatggccctcctgccagctctcccaggcctgactcagcagatgccagccccgaccgcgggcttcagatccaggatcccagcgaccacaaccgtccttgggtttcctttcccatccggggaggcatcctagaggtgactggcatctggggcattggaggccttggcataagatgcccttagatgggtggtgccctggaggtcaggcctgagtctcctgcaggcaggggcgcctggggaattactcacgggtgcctttcattcccttcctgctctgtgagacctgtgttgagtgctctgcatccattatctcctaatttttttttacaacagttgcgcaaggtaagtttattatccccattttagagatgaagactctaaagggaggctcagggaggtgagtgacttgcccaaggtcacactaccagtaagtggcagagctgagtctacactgcaggcttctctggg

SEQ ID NO: 35072 - DNA, 2300 bp, Homo sapien
ccatagccaggtggtgtgaagcccgggtgatgacaaagtcctcggtcccggcagcaagggcatttcagggagccactggtgacacccttacacccttcccacatcaacacagaggaactgaggccagagaggacttgacaggacttgtctccactcccagtcagccaggcttggagctggccagaaccgccctccgcctaggccagggtactgagtggcaagcacccttgcttgcaggtagatgacctaaccctgacaccaagccaggaacccagggcttgggaaactacaaataagaccacagagactgaggcctcggtgggcttgtaggtggagagccctccctcaggccagtgtctactgcgctcagctccggccctcctcagggcagggttttcagagaccaggttcctcctctgaaacctcagcctgtggctctctgtgccttcatccccgcagctggcatggaaataatgatctgacctcccaggggaggcggccccacgggcgtgatggtgacaccctgtggggggcagcctgggtaacatgcagagtgccgaggggtaggcctgagctcaaatctggcttctgccctcaccgagccatgtgatcccatcctggctactcccatacctgagctggagtttcttcagcagtaggaccagggtgccgaggggacaacagaactccctctgatgagggatcaccctgcagcctcaagaggctcaaatgcagaaagcagcccctggtgtcacagtgtacacagcctggaggcggcccagcaaaacctgcggtccctttcccacggaccagaggtctcagacacaggacccttaggttggacacagttctcagacatgttttaaaaacaatccatgttcacaatccatttttaaaaacattctgattaattgccaacatttaaaaatccaggagattttatataaaggtctggatttctggttcatcttgaaaattggacagtcaggtcataccaagtccacatttcacacagtgacaaagattggagctgagcggctccctggcccgcctcactcattccatttcccccctgatccttggaagcatgtgggtttccaatgcctggagctagactgagcacccacaggctgcagcagtgcatggacccatctttgctaaattttctctcccacagccaagactgcaagctgagcaggccatggagcccatgagccgaggaccagggcttggggttttcccaggggactgaggcagccctttgctgcttggtctcaccggagaaaatggagggagggaggaagtgaagaagggagggagaaagctggccccatcctataatgcatctgggggagcaagaatgtggctgatttagctggaagaaggaaaaatgtaccaagacccgaaagacagggaatgtcctcactggaggaaagtgaaggaagaaggctctacagttcttctcctgggttacaagagaagttagctagcaggcagagaggagctttgcccccagagaagcctgcagtgtagactcagctctgccacttactggtagtgtgaccttgggcaagtcactcacctccctgagcctccctttagagtcttcatctctaaaatggggataataaacttaccttgcgcaactgttgtaaaaaaaaattaggagataatggatgcagagcactcaacacaggtctcacagagcaggaagggaatgaaaggcacccgtgagtaattccccaggcgcccctgcctgcaggagactcaggcctgacctccagggcaccacccatctaagggcatcttatgccaaggcctccaatgccccagatgccagtcacctctaggatgcctccccggatgggaaaggaaacccaaggacggttgtggtcgctgggatcctggatctgaagcccgcggtcggggctggcatctgctgagtcaggcctgggagagctggcaggagggccatttctctctccagcatgatgcccgctgaggggaggttgggaggggagccagaggtcatttcctctgagtcagaggccattctcctcccagaggagctcccctggcggaccaggcacctccatgtggcgcgtgcctccctgccggccaacctgcatgctactcagtacagttggggcattgtgctcagacaagaaaggggcacttgtgatccagacaatgggctgggtcgctcccatttggcctgggcttcagcttccctgggtcagcaatatcctttcctctgctcctgcccactctgcttccacccctccctggagaatggtggc

SEQ ID NO: 35073 - DNA, 2300 bp, Homo sapien
atgcattttggctgctagctggcttgtctgcccagtgcccccatggctgccacttacatctggcacagagtttggattcagactcaggctaaatcctagctcctccccttctgagctgtgtgacctggggcaagtcattcccctctctgagcctatctccctgtctatcaaatgggcacaaccaccacagacaaggtggtgttgaagagaggattctgcgtggtccttgaaagatatttctaattcagctaaaccccatcacctccagccccagagttaccttttctgacccagagctgttcctgcctggcagaccgggggacctctagttagtgccagtttcctcagagcattcctgatggctcaggaaaagaataacagatgtaattaactcccagtgactggcagcatcgtgtttttatctgggctgcgtcaccatggcagcctcatggcagggttgtcgagggggcgggcagagctatggttcctgccattgtctgttctggaacgcaggcccaggagaaggggactggcaagggcaccaagtggcacgtggctgaaggcagccatggagtcagacaggagccatctggggagaagtgtggggtggccatggcctggcttccccccagcctggggctcaggctccctgtggctctcgaagcagtgtgtgtgtgcctcgggcacgcggagggtagggtccgtggggctcctggaagaggcccacaaagtagcccaggcagcgctaccccccaccccactcaggctagagttttgtggccaggcctgggttcaaattatggtgctaccacctgccatctacacagccagttgttcccccaactcctcgtctgtaaaataggaatcattccagttaccccaaaggctttcgttcaaacctgtgtgtataaggcattcaggaaaggctcagttctgttctgtgggggcggtgagcagtcacctgccacccttcactctcagagtcagggctccctcctacctccctcttagggtgcaaggttccccctctcacccgcagctgtggagaggaggaagcggaactagagatgcccatctggagtgagtgcaggaccaggtgggtacgaaagactagcttccaaccctcatctagttttcctcccctccgcgagagggaaagggagacggcggcctgaagacagaggcagagccaagtggggctgtgcaagggcaggaggcggggaagcggagttggagcaggcagggcgcctggaggaaaggaagagagtgtggcccacgcccggcgcggcgcgctaggctcagacaaaggcagggccggtggcacgcattaccagtcggagccacccgcctgagcccccctacgggagcggcgggagacccggagggcgcggtgcggagccagttgttccgggctttgggcagccaggggctgccaggcgtctgtacagggcgtcgggtggctgtctgtggggctctaggagatgtaccaccctttccccgccgcacagcaacggcgccgagacgcctcttcagggacctggtgcgcacaggctcctgaaaccctttggccccgggactgcggatggcgaatctctcgttcggactcagagctggagtccgtccttcgcgcgccccctgctggcccgcctcggctcccctcggcgcccgggctccgcggcggcggccggggctcagatcggggaaaccctaccggggaaacctcgaggcgtgacgtcaccctcctcggtgacgtcaccgggcccccggggagcgcgaggttcccacggaggaggctttccccggactgcgcagggcgcgggcgggggccgggaagtcgttgggggccgcggcgcgccttcactgcgccccgtgtctgccctacaggtcccgcgcggccccgggtgaggcacgcccgcgcgcccgccggcgccatgggaaggagcgggcgccgctgctgtcccccgccggcgcgcgcacgacttgagacctgccacgggcagcccccggccgcgggtccccgagtgacgctggcggcacctgagagtgtggcgcgggcccggggccacgcagcggagcccagtgtccagtgaagcgtctgaggacccgccgcccgtgccgccgccatggtgatgtcccagggcacctacacgttcctcacgtgcttcgccggcttctggctcatctggggtctcatcgtcctgctctgctgcttctgcagcttcctgcgccgccgcctcaaacggcgccaggaggagcgactgcgcgagcagaacctgcgcgccctagagctggagcccctc

SEQ ID NO: 35074 - DNA, 2300 bp, Homo sapien
ggaggctggggggtgaggggagcggggggggcgaggagctgtgagctaggacaaatcaaaggaagctggaagaggctgaggccacagatgctcatggccagccatctgctgcccctccccggctgcagggtctccctcctcaccagaatcaggctcttcatgcctaagggtgggggatggctgaagctctgtccctccatggctctccccacttcccttccccaccatgtgtcacccactcccttagggatccccatggcaggccaaccacacctactggccagttggtctagggcacagggcctggctgtgtccctgcctgggtgcctcactctagtggtggccatggagaaattgccatggcctgtggtccctagacatagtgggcactgacttcccaaggcaggggcctgtgagtattttgagttttaagagggttctcccaactccaaagcgccaggaacactgccacataggcagccctgctctccttctcttggcatagccaattacccaacgcagaactcggaggcctggctagaaccacctcctcctccgcggtgcggttgggaccaggtgaagtttgctcagggaggtcgaggttggaggctttgtagtggtggaaaaggcttctaagcgctgtggacggtttcagggtcccaacctagcaaggaacggagttctggaaggccctggcatggtgtccactcccttgcagggggtacttttctgaggccccctcccgttctgtgcttagagctttaggagataaaggtgccaagaggctggccctgagcgtccttggaggagccctgccgtgggagtctggggttagatgctgcttccggaactctacttgggactcctctgggaggcgtgaggcttgagagagaatgcaaaggatctcctagctggccccatctgagagggcacaggcgtggaggggaggagaggcctggaatggagggataatgagctgggtaggggctgagaatggcctggaataagtggtcatggagccgagatggggggctgtggttgggaattgggaactgggatcaggatgagactgggatgggttggactgaagatgtgccgtgacacatgttgggggggacacgtgctaagcatggggctgaagctgggatgggaaagcaactggggtggatttgagggtgggatgcagatgacagtggatatgatgggatagactaggcaaggacctctcagggaaaggagacgggccaggggtggggtgttgtgtgagctgggttgggatgaaaatgggtttaacatgaggtgggacgcaccaggaatggagatcaatgaagcaatgggtggggcggaaccggattgggacggggggtgggcggggggaggtggggacgggactgggttcggggctggaaggagggctagcgccgaggttacggacggggcaggtgagggttcgggacgtgggtggggctggccctggagcggcgcgcaggggcggtgggtgaggggcgcccggggcaggccgggaagggggggcgggcctccccctgggccgggccggggcggcgctaggaccgagcgagcggagggagcgagccgggcggagccagcgccccccgccccccgccggccggctcccctcccccggccgctggctcgctcggctcgcgacgctgcagaggctccgaggcggcggcggcgactccctctttccctccctcctcctccgtccgcccgtccgtccgcgcgtctgtccgttcggcccggtccggcccgaagcatggccggcgtcagcttcagcggccaccgcctggagctgctggcggcttacgaggaggtgatccgagaggagagcgcggccgactggtgagccccccgcccccgcccccggcccctttgtccccgcgccgccgccgcgcctttgtttctctcccgccccgccgccccgccgccgggaagggagggggaccccgaaatggtgcagcgggccgggagggccgggaggggctgcctttgtgcgcgccgggggaggggccggcgggccaggcggggcactgccgggccccgagcgcccggaggcggcccaaggcgcgcggtgggagcggcggccggacgcggcccggaggcgcggggtcccgatgtggggcccggggccgcgtggccctgcgggagcccatcccccaccctaccccccgggcccgggggacaggtgtgcacggggcggccaagggcaccttcgccaccttcgagcgggcgaggtccgggcggggacggggcggggaccgagctagcggagccagcgc

SEQ ID NO: 35075 - DNA, 2300 bp, Homo sapien
agggcaactgagaactatgggtccactgagtttggcaagttaggggttactggtgaccttggccagagcagtgccagagaaaatgcggggaggaggagacagaggacagatgtctgtctgcatcctatagaaatgaggggatgaagataacctggaagggtgacgggtgcggagaccaggggagtgggctctagggcatgccagcagggaacacccttgcttccctgaaaatagggaaaactgagtgcagggtgtatgggaactctctatactatctttgtaacttttctgtaaatctaacactgttctaaaatagaaagtttatttaaaaatgttgatggcaagaggtgagagtgggcgtggctggagagtttgtaggtggctggtggggaggcaggaatttgaggaaggaagagcttagatgcatttagggcttctgttttttggatgcaaaattgagtgtgcaggaggctggggggtgaggggagcggggggggcgaggagctgtgagctaggacaaatcaaaggaagctggaagaggctgaggccacagatgctcatggccagccatctgctgcccctccccggctgcagggtctccctcctcaccagaatcaggctcttcatgcctaagggtgggggatggctgaagctctgtccctccatggctctccccacttcccttccccaccatgtgtcacccactcccttagggatccccatggcaggccaaccacacctactggccagttggtctagggcacagggcctggctgtgtccctgcctgggtgcctcactctagtggtggccatggagaaattgccatggcctgtggtccctagacatagtgggcactgacttcccaaggcaggggcctgtgagtattttgagttttaagagggttctcccaactccaaagcgccaggaacactgccacataggcagccctgctctccttctcttggcatagccaattacccaacgcagaactcggaggcctggctagaaccacctcctcctccgcggtgcggttgggaccaggtgaagtttgctcagggaggtcgaggttggaggctttgtagtggtggaaaaggcttctaagcgctgtggacggtttcagggtcccaacctagcaaggaacggagttctggaaggccctggcatggtgtccactcccttgcagggggtacttttctgaggccccctcccgttctgtgcttagagctttaggagataaaggtgccaagaggctggccctgagcgtccttggaggagccctgccgtgggagtctggggttagatgctgcttccggaactctacttgggactcctctgggaggcgtgaggcttgagagagaatgcaaaggatctcctagctggccccatctgagagggcacaggcgtggaggggaggagaggcctggaatggagggataatgagctgggtaggggctgagaatggcctggaataagtggtcatggagccgagatggggggctgtggttgggaattgggaactgggatcaggatgagactgggatgggttggactgaagatgtgccgtgacacatgttgggggggacacgtgctaagcatggggctgaagctgggatgggaaagcaactggggtggatttgagggtgggatgcagatgacagtggatatgatgggatagactaggcaaggacctctcagggaaaggagacgggccaggggtggggtgttgtgtgagctgggttgggatgaaaatgggtttaacatgaggtgggacgcaccaggaatggagatcaatgaagcaatgggtggggcggaaccggattgggacggggggtgggcggggggaggtggggacgggactgggttcggggctggaaggagggctagcgccgaggttacggacggggcaggtgagggttcgggacgtgggtggggctggccctggagcggcgcgcaggggcggtgggtgaggggcgcccggggcaggccgggaagggggggcgggcctccccctgggccgggccggggcggcgctaggaccgagcgagcggagggagcgagccgggcggagccagcgccccccgccccccgccggccggctcccctcccccggccgctggctcgctcggctcgcgacgctgcagaggctccgaggcggcggcggcgactccctctttccctccctcctcctccgtccgcccgtccgtccgcgcgtctgtccgttcggcccggtccggcccgaagcatggccggcgtcagcttcagcggccaccgcctggagctgctggcggcttacgaggag

SEQ ID NO: 35076 - DNA, 2300 bp, Homo sapien
gtccctcccaaggcctcctggtgggtggtcagtcaacctgaagggggccaagacccccacctctctgcgtgtgctccctctgaccgctctcgcctccctgcaggggccgctacctggtggcgctgggccacgcgtaccacccggaggagtttgtgtgtagccagtgtgggaaggtcctggaagagggtggcttctttgaggagaagggcgccatcttctgcccaccatgctatgacgtgcgctatgcacccagctgtgccaagtgcaagaagaagattacaggcgtgagtagggctggctggcggggaggtggtcccaagcctgtcagtgggaacgagggctgctgggaaacccacagtccaggtctctccccgagtgagccctccgggtccttaccagcgtaataaatgggctgctgtactggcctcaccctgcattagtcaggatgctcttaacaaatgaccatgttcctgctcagaaaccgcccaaggctgcaaagagcaggaggaccaagccaggagaagccctgggccctcctgactcccactttgggctctccctgccctggtgaaatgacagaacggccaacttgacacgctgaagctgctctgtctcatgcgtcctcctcatttctggatccagagccagggctgccaggagtagccagagagctctgtgtggtgatgttcatattagtgaggtttaccttgaccacgagcagtgggaaactcaaaataatggtggcttatttctcatctaaaaacatcccggggtgggtggtctgggactgatctggtggacccaggctccgccttgttgcttgactgttggcagcacctgcttacttaccactcatggtgcaagatgacacttcagcctccgccaaaatgctcaccttccagccagcaggaagtcggaaggagaagaaaggggacagagccccatggcgtccatccttagaggatgctgccacctgaacctctgctttcatcctgttggtcagaacccagtcacatgaccacacccagtggcaacggaggctgggaaatatagtctttattttgggcacccatgtgtccagcaaaactgggggttccatcagtcggcaagaatgggagagtggccgatgcagtggctgatgcttgtatcccagcactttgggaggtcgaggtgggcagatcacctgaggtcaggagttcaagaccagcctggccaatatggtgaaaccctgtctctactaaaaataaaaaaattagctgggtgtgctggcgcacctgtagtcccagctacttgggaggctgaggcaggagaatcgcttgatcttgagaggtggaggttgcagtgagccaagattgtgccactgccttccagcctgggagacagcaaaaaaaaaaaaaaaaaaaaaaaaaaaaaaaaaaaagggccaggcacggtggctcacacctgtaatcccagcactttgggaggccgagatgggcggatcacgaggtcaggagattgagaccatcctggctaacacggtgaaaccccatctctactaaaaatacaaaaaaattggccgggcatggtggagtagtcccagctactcgggaggctgaggcaggagaatggcgtgaacctgggaggcagagcttgcagtgagccgagatcgcgccactgcactccagcctgggcgacagagcgagactcttgtctcaaaaagaaaaaaagaaagagaaatctgcctcccagccttgggctcctgccctaccagcccacacccctggtagagccccctctcccaccagctcaaagcccaagttccttcactgtgaccttgtctgctcctctaaaacaggcaacaccagacagtgagaagagccagccagacatgggcagaaaacctatttctgtgatctactggctgtgtgagcaggggctagttgctctctctgggcctcactgaagagaagggtggcactatgctagggccggcacggttgcaaggtagatgtaagatggggtacaggtgttgtggagggcagaaatgcaccatccgaaggctacatgtcccccacacttatgtcttgcttggcccacactgtttcattttaaaatcagtagcaaacaatttaaaaaatcagaagatttgcctgcatgatgcagtggctcatgcctgtaatcccagcactttgggaggccaaggtgggaggattgcttgagcccaggagttcaagaccagcatgggcaccatagcaagacccctgtttctacaaaaaaaaaaaaattagaaaattagccaagtgtggtggcatgcacct

SEQ ID NO: 35077 - DNA, 2300 bp, Homo sapien
tcccagcagacccctatagatggcccccgacagggtgctggggggtgagaggtccataagagcccccggtggtttcggggaggaagctgccccctgcatgggccagagggcatatctggtaggtggagtggcctgggcaggaggccagcaggagcctcaaaaggcaatggtcctcctgaaacacttgggctttagcctgagcgtggctgtttgtggacatcatagcaatttctggactgtgggggagggtggtggcggtgaatagataagcatcgtgactggggaagctcaggtgagcaccacctgagggagagggtctggcagtgaataaataagcagtgtgactgggaaattgtgaagctcaggtgagcgccaccacctcctgggttgctttagtgtccagcagctgcctagaactatgttgaatgaagagctctctgggttctggaagtgggacagctttgggtggggcagtgttaccaccgtcagcctggcttgggtctgcagggtccagggcctcggtcactttgcttctctctccacagctcactcctgggggcaaagcggcgcaggccggagtggccgtgggtgactgggtgctgagcatcgatggcgagaatgcgggtagcctcacacacatcgaagctcagaacaagatccgggcctgcggggagcgcctcagcctgggcctcagcaggtatgcgggtggacatggatgggtgcgcccgcgctggcagtggggatccctgcgggcccggcccgctgtcacgctttccttctcctccagggcccagccggttcagagcaaaccgcagaaggtacgaggctggccgggacatccgggcggtgggcggtgtgggcttggacggccaggcctgctcgccctcctggcacattctcggtaccccaatccctggccgggagtggagggcagaaaccggagctaaggcgggtctagggccctggagttgagccaggggctgctgcacggtcctggcaccacgcatgtccgcctgtctgtccgcctgtctgtccgcctgctgcctcccgccgccggcgctgcgtgctcgcccgcactcggtcagccctcggtcctgcgtggactgagatcgccactcccaaatgggccccttgaaacctgagtcgtcctctccccgtagcctccaaatagatgtagggggtggggtgggggtggggggctggagctgccgctgtcctctgctgcaggcgccccacttccacccaggcccccaccttaccctgcccgcccgccctgcccggctgtgtctctgcccaggcctccgcccccgccgcggaccctccgcggtacacctttgcacccagcgtctccctcaacaagacggcccggccctttggggcgcccccgcccgctgacagcgccccgcagcagaatgggtacgtcggcccctgcccgcccgcgcccacgccatcaggcccactgtggccccacgcccgctgcccgctgctgctcagtctgtgctgcgccccagcccggcggaaccgtgcggcagcgccccctggcggccggggtggggctgcaggcacagggcccctcccgaggctgtggcgccttgcagggcaccgccctggggaggggtctctgaatgacgccgcgccccctgctggcggctgggggttgggttgtggtgtcgggccagctgagccccagacactcagtgccgccttgtccccggctgttctgacccctccccgtctttcttcctctcctgtgtctgtccctttgtccctttatctgtctgtctgtcttatttccttcacaggtgcagacccctgacaagtcagtgagcccccctctgcctgtgcctttcttcttccttttggcactctgggtggcggcccctccccaccctggctgccctcctctccacttcgccctcctgtcctctcacctacccgcccagcagggctcctggcctcacccttacccactccctcccatcactgtaacccaaacccacatgcaccaaatcctgggaggggctgcccccaccgcccacccccagtgtggggttctgagccacaccctccccacagacagccgctccgaccgctggtcccagatgccagcaagcagcggctgatggagaacacagaggactggcggccgcggccggggacaggccagtcgcgttccttccgcatccttgcccacctcacaggcaccgagttcagtaagtgccagcccagggcagggggtactttcctcgcccccagcccaggcgtgatccctgaccctgtgtcttttttggtcaatgcct

SEQ ID NO: 35078 - DNA, 2300 bp, Homo sapien
gaggaaggagttaggaaggtgggaaaggcacaagtttgaattgggccatgatggtctgagatacctagtacagtggttccccaacctttttggcagaagggaccgctttcatggaagacaatttttccacagactgggggtggggtggggatggtttcagggtggttcgagtgcagtacatttatcattagactctttttttttttttttttttgagatagagtctcgctctgtcacccacactggagtgcagtggagccatcttggctcactacaacctctgctgcccaggttcaagtcattctcctgcctcagcctctcaagtagctgggattataggcatatgcgccaccacgcccagctaatttttgtatttttagtagagacggggtttcaccatattggccaggatggtctcgaactcctgacctcaagtgatcctcccccgcctcaacctcccaaagtgctggggttacaggcgtgaaccactgcacccggcccatttatcattagattctcataaggaatgagcaacctagatccctcgcatgcacagttcacaatagggttcacgctcctatgggagtctaatgctgccgctgcactcagcttctctggcttgccgctgctcaccttctgctgtgcagcccagttcctaacaggccacaaacggggagttggggacccctgatctagtaaacatctaggcagggttttggataatggagttagagttcctggggagaggtcaggctggccatgaaacatgggatgcctttgcatataggtggtgttgaaagccacaggacagtacggggtctcagggggtgagcataaagagaggcgacatcagatggccaaggccagaggcagaggaggatgggaaggaggggccagtggggcagggggaagctgtgaagccagggaaaaagggtgtttcgcggaaaaggatcaacctggaccagtgctgcccctaggcagggcaggatgaaacttaaccaccacggattccatggccccatggcctccaggccacaggggaccttgagaagagagatctcaggggacgggtgcggacaagagcccgcctggcatggcttcaagagataactgaaggaaagcaagtggagacgcgataaacagacaactccctggaggaattttactctcgagaggagaattaaagggtagtagctggagagggatgtggggtcaagagaaggtctttaacgacgagaactctcacggcggtttgtgcagaacagggtgggtgtgatgactgtggatggagaggggagaactgcagcgactctgtcctaggaggaggtgatgggccgggaccaccaagcgagtggagggtggacgccccttccctcaccccgacacccgcatgtgctcagtgtccgtgccgccggccctagtgcctgggctgaacgcggggccgggactctgaggacgcctcccaggcggcgcagtccgctctggccaaggtggagcgggacgcggcgcttccgacggtgcgcgggtcggctcggggttgcagggacatccggcgtccgctcctgccctgttttcctgccttcggcagagcgttgcgcaactctagctttaaacgcccctgtccccctcaacttgtctcccccagcccctctgatttacagattctgcagtccccgagggttgcgcctacgataccgacactcgcggcagccctgcgaggcgagtatgatcgtcccatttttcggagtagcaaactaaggttcagagactactatgtcccaggtcggtctggtttgaaggtccgctttcctctccctccgccagcgggcggtgcgagggactgggcgaggcagcgcttccctaaggaggcgacccgcagccccggccccctcccgactccgccccgttgcagggcccgggtcggcgaggcctctcagctctaagcccgacgggacttggtgattgggcaggacggaagagctgggtggggctttccaccagcggagaaagtctagtgggcgtggtcgcgacgagggcgtggcctggtgccccgcccccgtccgcgcgctcaaagtggagggtggctgtgggggcggggtcagaacactggcggccgatcccaacgaggctccctggagcccgacgcagagcagcgccctggccgggccaagcaggtatcgacgaccgcgcggggcgtcttgggctgcaccaggcgggcgcccggggcctgctgaggaccacaaagggcactgggggtcgtggtccaggctgtgcttcctcccgctggccctggcccctgc

SEQ ID NO: 35079 - DNA, 2300 bp, Homo sapien
tggacggcagtcacaagaccgctagcagatgaggcaggatctcagcatctggtgagaggtaggcagggacggcacaggcggccacacttcctctgagccaggcactttgcatgtatggccacatgctcattccagtgagacagcggttgctcaagccatatttgtcacttgatatgtggcattgggcaagttacttaatttttctgagcaccgatttcctcactgttgaaatggcgatgagaacgcaaaggatgtggcgtctgaggtggacggagcttagggctgcttgggccacagtgggcacagagctgggtgccaggaggccttcaggacatatttcctggccaagtgcattcccaaatggcattccttatcctcttccatgttctctcccagaggtggtgctgaatgacctgaggctgttccagaataaaggtatacacacagccccgctattggcatcttgctaggcaagccaacaaaaggcgcccccagcaggaagcaaagctttaaatgaacatgtgacctctccggggccccctgggacctgccacccacactcacgtggttggggccattcagggctgtgggtcccatgtggactggatgcccagcgtgagtgtataccgtgagggcctttgagctctcggacagcgtggagtggtcaagggaggcctccaggaggaagaggtggccaaccgccccaggcagcacagtggtgagggggccctggaggggctggcctgggggagatgcaggccagaacacacaggtccctgagtgttgggctgaggagcctgggctgcaccccaggaaggggagagacaggttggtcttgggttgtggagagtgctgcatggaggcccagtggggcagtggcccctggggggatgccaaaggctggtgatgttcagtggctcgtgaggtggagaggagcaggtgaacacgagagagatttcagggagaaagaaaagcagcaagatggggtgaggcgctcaaaccaggacgccgagtgggaaagccaggagttggctagagaagggtcctgggtggaggcagggccagggagtgtcaggcccagggtgcgcagctgcccggggcgggacgggggaggggcgggaactcatgactcggggagccagactgcgatcagacgcgcgtgcccagctgaaccaggtgcgtgagaaggctgccttcaggtggccgggggctccctccaggtaggtgtgggcaccttgggcagccagaaccccagggaggaaatacatgctgcccccagcccctgagctgaagacaggctcccctccccccggcctgcagctgtctctagacggagggacgggaagtggccagaaggggaagtgtgaggagttcccgtccagcctgtcatcagtctccccaggtcttgaagcggcggccctgctcctggccgtgaccatggaccctctggagacccctatcaaggatggcatcctctaccagcagcatgtcaagtttggcaaggtggggacccctggctgccaggcagctgccaaggaccaacagtgggtggagaatgcagcctctgcccctgcctcggacagcccaggcagacctgggagacttgggaagggagtcagggtggaggatcccacccaggtatggggagtggaatggagtgcgggtgtcagcctgagacggcaggggctgagcaggctctgccagaccctgcctccgggagagatgggaaatacaggagtgggagagggtcgaaggctcaaacctcccagcagggaagagcttcacagcctctgacccatgaaatagtgccaccgagggccctaaatagggtgaggggctgagctggaggaggcctcaagggtggagcccctccctgcagcggcactgtcctgggagcaaggaggcagggggtcacctctcctcggcagcagccccacacccccgcagctcagctgcagctgctgcccaggcagataaaccgtcagtttcctttgctcgaagctatttgcatgtttccttccttaacagcttgaggcagaggcctccctcccaccccagctcttggcctgtggcccaagtgcccctttttgggggtgagagggaaccaatataatggcagtgtctggtggtctgcccggccactggatgctttacaaacatgacccagtagcagtcccagctcgagttctcatggccttttgagagacgacattgatgcttgtggaggtcacagttaggaaagagcgggctgggatttgaacccagggctgaccaatcccaagcatagccaaggcctcctt

SEQ ID NO: 35080 - DNA, 2300 bp, Homo sapien
ctgacccctgtccccattcccccaggagagcgcggctgtgccttctgcgggggcctgggtcatcggatcactgactgccccaaactcgaggctatgcagaccaagcaggtcagcaacatcggtcgcaaggactacctggcccacagctccatggacttctgagccgacagtcttcccttctctccaagaggcctcagtccccaagactgccaccagtctacacatacagcagccccctggacagaatcagcatttcagctcagctggcctgggatgggccaggctggtcctggctgcctgttccctgtgctcttcagaattactgtttttgtttccttttaccccagctgccattaaagcccaaacctctagcccagccctggccctgcctctgtgtttcacctcatccgccccctggttcctggacagacgtcacctctgacctctggagcccctctgaggcaaggccccagcatctcccactagcactgccaacacctggcctgctggtacttggctgtggaaggagccaccgagctggtgcccgcctctggggactctgggtctctccactgggttgtctgaatttatgactcaaggagggaccacattggcgggccaaggagaagtgcttggattctctggtctccctggccagctgtcatagctctcaggcccactcttcctgtcagggctgtgatgtttcagggacttctcctgaagccccttgggaggctgcttcttgcctcaggacccccacccactgcctgcctgtgccagccacctggagggagccctccattccgttgactgaggaggcagcagatgtcatagaactgccatttaggccacaagctctccctaagcctgctctgtgcccagctctgctgagctgtgaggacctagatgggccagggagatggctgcctgggaagccgtcaggcgaggggagagaaagacgcacacgcagaaacgtggacggcagtcacaagaccgctagcagatgaggcaggatctcagcatctggtgagaggtaggcagggacggcacaggcggccacacttcctctgagccaggcactttgcatgtatggccacatgctcattccagtgagacagcggttgctcaagccatatttgtcacttgatatgtggcattgggcaagttacttaatttttctgagcaccgatttcctcactgttgaaatggcgatgagaacgcaaaggatgtggcgtctgaggtggacggagcttagggctgcttgggccacagtgggcacagagctgggtgccaggaggccttcaggacatatttcctggccaagtgcattcccaaatggcattccttatcctcttccatgttctctcccagaggtggtgctgaatgacctgaggctgttccagaataaaggtatacacacagccccgctattggcatcttgctaggcaagccaacaaaaggcgcccccagcaggaagcaaagctttaaatgaacatgtgacctctccggggccccctgggacctgccacccacactcacgtggttggggccattcagggctgtgggtcccatgtggactggatgcccagcgtgagtgtataccgtgagggcctttgagctctcggacagcgtggagtggtcaagggaggcctccaggaggaagaggtggccaaccgccccaggcagcacagtggtgagggggccctggaggggctggcctgggggagatgcaggccagaacacacaggtccctgagtgttgggctgaggagcctgggctgcaccccaggaaggggagagacaggttggtcttgggttgtggagagtgctgcatggaggcccagtggggcagtggcccctggggggatgccaaaggctggtgatgttcagtggctcgtgaggtggagaggagcaggtgaacacgagagagatttcagggagaaagaaaagcagcaagatggggtgaggcgctcaaaccaggacgccgagtgggaaagccaggagttggctagagaagggtcctgggtggaggcagggccagggagtgtcaggcccagggtgcgcagctgcccggggcgggacgggggaggggcgggaactcatgactcggggagccagactgcgatcagacgcgcgtgcccagctgaaccaggtgcgtgagaaggctgccttcaggtggccgggggctccctccaggtaggtgtgggcaccttgggcagccagaaccccagggaggaaatacatgctgcccccagcccctgagctgaagacaggctcccctccccccggcctgcagctgtc

SEQ ID NO: 35081 - DNA, 2300 bp, Homo sapien
ggggcccaagggcatgggttaggccggaaaagggccaagccaggcccctagtgtccagcgatgggccagagactctgtccttctctctgcagtacaccggattggccgcaccgggcgctcgggaaacacaggcatcgccactaccttcatcaacaaagcgtgtggtgagtctgttaccagcgccaccttagctgttccctgggtcccctgcctgtggccacccaggttctggccacagagcccaggatgggccctgatgcttccccactcctcccccagatgagtcagtgctgatggacctcaaagcgctgctgctagaagccaagcagaaggtgccgcccgtgctgcaggtgctgcattgcggggatgagtccatgctggacattggaggtgactgcagagcgggatccccgagtccccagccggcaggtggcaaggaggggtgctggaagtcagaaacgtgaaaccggtggaccgagggtgcctaacggggggcccgaagtccagggcatggatcctggtccttgacttggctgacccctgtccccattcccccaggagagcgcggctgtgccttctgcgggggcctgggtcatcggatcactgactgccccaaactcgaggctatgcagaccaagcaggtcagcaacatcggtcgcaaggactacctggcccacagctccatggacttctgagccgacagtcttcccttctctccaagaggcctcagtccccaagactgccaccagtctacacatacagcagccccctggacagaatcagcatttcagctcagctggcctgggatgggccaggctggtcctggctgcctgttccctgtgctcttcagaattactgtttttgtttccttttaccccagctgccattaaagcccaaacctctagcccagccctggccctgcctctgtgtttcacctcatccgccccctggttcctggacagacgtcacctctgacctctggagcccctctgaggcaaggccccagcatctcccactagcactgccaacacctggcctgctggtacttggctgtggaaggagccaccgagctggtgcccgcctctggggactctgggtctctccactgggttgtctgaatttatgactcaaggagggaccacattggcgggccaaggagaagtgcttggattctctggtctccctggccagctgtcatagctctcaggcccactcttcctgtcagggctgtgatgtttcagggacttctcctgaagccccttgggaggctgcttcttgcctcaggacccccacccactgcctgcctgtgccagccacctggagggagccctccattccgttgactgaggaggcagcagatgtcatagaactgccatttaggccacaagctctccctaagcctgctctgtgcccagctctgctgagctgtgaggacctagatgggccagggagatggctgcctgggaagccgtcaggcgaggggagagaaagacgcacacgcagaaacgtggacggcagtcacaagaccgctagcagatgaggcaggatctcagcatctggtgagaggtaggcagggacggcacaggcggccacacttcctctgagccaggcactttgcatgtatggccacatgctcattccagtgagacagcggttgctcaagccatatttgtcacttgatatgtggcattgggcaagttacttaatttttctgagcaccgatttcctcactgttgaaatggcgatgagaacgcaaaggatgtggcgtctgaggtggacggagcttagggctgcttgggccacagtgggcacagagctgggtgccaggaggccttcaggacatatttcctggccaagtgcattcccaaatggcattccttatcctcttccatgttctctcccagaggtggtgctgaatgacctgaggctgttccagaataaaggtatacacacagccccgctattggcatcttgctaggcaagccaacaaaaggcgcccccagcaggaagcaaagctttaaatgaacatgtgacctctccggggccccctgggacctgccacccacactcacgtggttggggccattcagggctgtgggtcccatgtggactggatgcccagcgtgagtgtataccgtgagggcctttgagctctcggacagcgtggagtggtcaagggaggcctccaggaggaagaggtggccaaccgccccaggcagcacagtggtgagggggccctggaggggctggcctgggggagatgcaggccagaacacacaggtccctgagtgttgggctga

SEQ ID NO: 35082 - DNA, 2300 bp, Homo sapien
gtcgcgtaaccacccatgaaagcgtccatgcctcgccgtgcgatagtatctccggaacaaatttgtccctctgcgcgatccggaactccgaggtcgttcctacgcgccgtcgttcgcctcttcacatcggattgggtctcacgcaaggatgaggcggggtttcgccgtggcgcgcatgcgtgcagcaaagaatggaggagtcggaacccgaacggaaggtaggagagaggcgagaccccgcgcgtgtgggagcgggcgtgaagaggggagcaggccgtgcctgactggcgtgtgcttgcagcgggctcgcaccgacgaggtgcctgccggaggaagccgctccgaggcggaagatgaggacgacgaggactacgtgccctatgtgccgttacggcagcgccggcagctactggtgaggggcacgcgtccggggagggatggggccgtgaccgcggggtcgcagggggcgggcgtggcctcggcctccgtggggaggagggcagtctgaggagtgagcttcagtacaccagggcgcggcccccagacaaacgagggaccgacggcttgatctgaggggtagggcagctttgcgcctcgggcacaggatcctcgccccaaagccaggatcctgacgctgaccttgtggactccatgcccatcctatctgtggatcccgggtggaacctcagctccagaagctgctgcagcgaagacgcaagggagctgcggaggaagagcagcaggacagcggtagtgaaccccggggagatgaggacgacatcccgctaggccctcagtccaacgtcagcctcctggatcagcaccagcaccttaaagagaaggctgaaggtgggctgggcagcactgcctgggcgagaaagaagaagctgagcctggtacaccgttttggtatctgtctgacatcttccacttcttttctcagcgcgcaaagagtctgccaaggagaagcagctgaaggaagaagagaagatcctggagagtgttgccgagggccgaggtatggttgtagccaggatagtgagaaggtggactgagtcttctcctcccagccccaggcatgttatatctcaagggatctggcttctcagaagcaggagccagccctgagccatgtctctctcttcagcattgatgtcagtgaaggagatggctaagggcattacgtatgatgaccccatcaaaaccaggtatgtctgtacagtctgcagttgcccttgcttaggatggtacatgcagggatgctcccaggccagctattcccagggctctcttgatccctgttacccatccacagctggactccaccccgttatgttctgagcatgtctgaagagcgacatgagcgcgtgcggaagaaataccacatcctggtggagggagacggtatcccaccacccatcaagagcttcaaggaaatgaagtttcctgcaggtagtcaggggctggagagagataccacacttttataatcaaatgcctgtgaggttatgtcctggctcccactgagctcagccacatctgcattggatccagtcactggggctggagggatttgaggaggagtttctttaggttccttgttgcctcagctgtacgtgttcattgttctctgctgttacaaagcttcaggaggaaagtgccattgggcatagacactgggtacaaatcctggctgcacctagcctgtgggccttggacaagtctctttttttctttttttttttccactctctctctctctctctgagcctcagtttcatcatctgcaacttgtaggggtagtgccagttttacaggctttggggctctgagaaagtacctgtgagtcatgaagacgatgtcggttggttttcatagccatcctgagaggcctgaagaagaaaggcattcaccacccaacacccattcagatccagggcatccccaccatgtgagtgtggactgtggacctggggtccttgaggagggctggaacagggaggagcaatggctaggtgtccttcatcttctgttgaaattggccctcgggtcatcctctcccaacagtctatctggccgtgacatgataggcatcgctttcacgggttcaggcaagacactggtgttcacgttgcccgtcatcatgttctgcctggaacaagagaagaggttacccttctcaaagcgcgaggggccctatggactcatcatctgcccctcggtaagataggctggcctggagggcaggccagagattggggctgccatctggtgccagcctttgtccctctgcctgcagc

SEQ ID NO: 35083 - DNA, 2300 bp, Homo sapien
gggtcactaagagccatgtatttgggtgttgtgagcaggaccagaaaccatgtcctccatccctcccaggttgagacccaccatgggactggcagtaagcaccagcttattttttttatagagatggggtcttgctatgttgtccaagctggtcttgaactcctggcttcaagcgatcctcctgccttggcctcccagagagctgggattacaggaatgagccactgtgcccagcctaagctttctttactaaagaagacttcatgaattcctgtgtatccttcacatcccagctaagaggccattgtactgtgaaaactatgacacttcgaaaagcggtaccttgtcttaggatctttctctttaagaccagttatctgtctatatttctagtctcaatctacataagctcctcgcacaccaggtatgtgtcttgattatcatctgcttgagcgcagtgccagcgcccagcacacactcttgaaggcaagaaagcacagagctgaccaagtcattccttagaagtctctaataaagttgaaaccacttactctgacagtcacagcaggcatgctctggtcgcaatctccttttctggccttaggtctggcttccccatcccacccttgccgcaatgctgttgcctagtgaatctgtgtacttgcacatcgccagacctgtattcctgcagcgccctggcccaggacgcctctcctctcccggcctgagattgccatgtatttgggtgttgtgagcaggaccagaaaccatgtcctcctccatccctcccaggttgagacccaccatgggactggcagtaagcaccagcttattttttttatagagatggggtcttgctatgttgtccaagctggtcttgaactcctggcttcaagcgatcctcctgccttggcctcccagagagctgggattacaggaatgagccactgtgcccagcctaagctttctttactaaagaagacttcatgaattcctgtgtatccttcacatcccagctaagaggccattgtactgtgaaaactatgacacttcgaaaagcggtaccttgtcttaggatctttctctttaagaccagttatctgtctatatttctagtctcaatctacataagctcctcgcacaccaggtatgtgtcttgattatcatctgcttgagcgcagtgccagcgcccagcacacactcttgaaggcaagaaagcacagagctgaccaagtcattccttagaagtctctaataaagttgaaaccacttactctgacagtcacagcaggcatgctctggtcgcaatctccttttctggccttaggtctggcttccccatcccacccttgccgcaatgctgttgcctggtgaatctgtgtacttgcacatcgccagacctgtattcctgcagcgccctggcccaggacgcctctcctctcccggcctgagattgccacgcttccctggaagcgccccccaggcagctctgttagagcatttacagtaataaccgtttacatttatacagggcctcccacttcaaaaccactgccatccgtatctgatgcgtgccccaccagtgaacgtatgtgtcacacaggcgcagtcagggaggcagggtgtgtcgagcggtttatcccgcaaccccggcgtccccggcagggatgaaagcgcagggcccacgcgaactcggcccgcagctcccggccctagaggacgcactgtccgccggcaggggcgtgcccaagacgccatgctctgggagaggttgggcacctggcaggccgccccgactccggatcagctgtctccgctgcgtacgtcttcctcttccaatgggcttggattgagccttctagcgcatattccaagtcctccaatgtcccacaatgccttgcagccggtttcgccctcggtcctggcaactgtcgcgtaaccacccatgaaagcgtccatgcctcgccgtgcgatagtatctccggaacaaatttgtccctctgcgcgatccggaactccgaggtcgttcctacgcgccgtcgttcgcctcttcacatcggattgggtctcacgcaaggatgaggcggggtttcgccgtggcgcgcatgcgtgcagcaaagaatggaggagtcggaacccgaacggaaggtaggagagaggcgagaccccgcgcgtgtgggagcgggcgtgaagaggggagcaggccgtgcctgactggcgtgtgcttgcagcgggctcgcaccgacgaggtgcctgccggaggaagccgctccgaggcggaagatgaggacgacgaggac

SEQ ID NO: 35084 - DNA, 2300 bp, Homo sapien
tggcatctgtgcccttttctccttttgggaggtctctggtatgtgagcctggggcagccccttccccactctttcctgtttccctctttgcaagatgggtgagttggaggggttgaagatggtctctgtgcatctggatgtgagaagaggtctaggaaagaccctgaggccttcatggatctgtagcctgggccatcgaggcccctcacactgacttcacagtcaggggaagttgggggtaaattgagttttttataaattagatctgattttccagtgggggtgggacatgtagctgagggcttgagagttaagaggataatgaactcttctgtaaagtcaagcaaactacctcatcccccgaaatggatctggtttgtaaatttggattttaatacaatgagttttcccaaaatgcccctgacacacttgtgtccaaactccatgccccaaatttagttttcgctcctaaaaccaactcgaggttatgtggggagctaacagggtcactaagagccatgtatttgggtgttgtgagcaggaccagaaaccatgtcctccatccctcccaggttgagacccaccatgggactggcagtaagcaccagcttattttttttatagagatggggtcttgctatgttgtccaagctggtcttgaactcctggcttcaagcgatcctcctgccttggcctcccagagagctgggattacaggaatgagccactgtgcccagcctaagctttctttactaaagaagacttcatgaattcctgtgtatccttcacatcccagctaagaggccattgtactgtgaaaactatgacacttcgaaaagcggtaccttgtcttaggatctttctctttaagaccagttatctgtctatatttctagtctcaatctacataagctcctcgcacaccaggtatgtgtcttgattatcatctgcttgagcgcagtgccagcgcccagcacacactcttgaaggcaagaaagcacagagctgaccaagtcattccttagaagtctctaataaagttgaaaccacttactctgacagtcacagcaggcatgctctggtcgcaatctccttttctggccttaggtctggcttccccatcccacccttgccgcaatgctgttgcctagtgaatctgtgtacttgcacatcgccagacctgtattcctgcagcgccctggcccaggacgcctctcctctcccggcctgagattgccatgtatttgggtgttgtgagcaggaccagaaaccatgtcctcctccatccctcccaggttgagacccaccatgggactggcagtaagcaccagcttattttttttatagagatggggtcttgctatgttgtccaagctggtcttgaactcctggcttcaagcgatcctcctgccttggcctcccagagagctgggattacaggaatgagccactgtgcccagcctaagctttctttactaaagaagacttcatgaattcctgtgtatccttcacatcccagctaagaggccattgtactgtgaaaactatgacacttcgaaaagcggtaccttgtcttaggatctttctctttaagaccagttatctgtctatatttctagtctcaatctacataagctcctcgcacaccaggtatgtgtcttgattatcatctgcttgagcgcagtgccagcgcccagcacacactcttgaaggcaagaaagcacagagctgaccaagtcattccttagaagtctctaataaagttgaaaccacttactctgacagtcacagcaggcatgctctggtcgcaatctccttttctggccttaggtctggcttccccatcccacccttgccgcaatgctgttgcctggtgaatctgtgtacttgcacatcgccagacctgtattcctgcagcgccctggcccaggacgcctctcctctcccggcctgagattgccacgcttccctggaagcgccccccaggcagctctgttagagcatttacagtaataaccgtttacatttatacagggcctcccacttcaaaaccactgccatccgtatctgatgcgtgccccaccagtgaacgtatgtgtcacacaggcgcagtcagggaggcagggtgtgtcgagcggtttatcccgcaaccccggcgtccccggcagggatgaaagcgcagggcccacgcgaactcggcccgcagctcccggccctagaggacgcactgtccgccggcaggggcgtgcccaagacgccatgctctgggagaggttgggcacctggcaggccgccccgac

SEQ ID NO: 35085 - DNA, 2300 bp, Homo sapien
gtctcaaaatagaaaataaaatcaattttgctggccaggcgcggtggctcattcctgtaatcccagcactttgggaggctgaggtgagcagatcacgaggtcaagaattccagaccagcctggccagcatggtgaaacctcatctctattaaaaatacaaaaaaaaaaaattagctgggcatggtggcgtgtgtctgtagtcccagctactcaggaggctgaggcaggagaatcgcatgaacctgggaggcggaggttgcagtgagccgaggtcgcaacactgcactccatccagcttgggcaacagagcgagactccgtctccaaaaaaaaaaaaaaaaaatcagttttgctaatgcaatagataatgaatggttggtttagaacaaacttctgtaagcaccactgataatgattcctgccaccatcttttttaatccacgtcacatgcttagcatcctttctagcagcagagagggctgctttggactgccctggaagctgggcctccacacagctccttgagctccgtccttgctctcagttcccctgccacctcagcctcagcccagcgttgggaccagcccaatgggtgcttcagctgctcatggcccagcctaaggcttcagctcttcctggctcaaattatgggatgtttcaggcgtatgtctcattcttaccctgggaaaatactctgtattacaagatatcccagtgcttcctgaaatccagaggcagaacaatacagtggagagaatatgagctttgcatagagagaaacgtgggcttgagttccccacatctcccctgcctgcacccaccatgtaccccttctcagggcactgtgcacatctcactttatcctcctgtttatcgtgcatcattgtcactgtctgtttgcatccttgagtcctggccacctgttgggcaaagcagtcaagtactcagcttcactctctaccactgcaaagtggggataatgacacttattttggaggacttgggggatggttagaaataatatgccaaggccgggcgcagtggctcacgcctgtaatcccagcactttgggaggccgaggcaggtggatcaactaggtcaggagatcgagaccatcctggctaacatggtgaaaccccatctctactaaaaatacaagaaaattagccgggcgtggttgcgggcgcctgtagtcccagctactcgggaggctgaggcaggagaatggcgtgaacctgggaggcggagtttgcagtgagccgagatcatgccactgcactccagcctgggcgacacagcaagactccgtctcaaaaaaaaaaaaaaaatgccgactctagaacctggcacaaacagtggctcttatagttggtgtcccagaagtcacttgctttttctcaactccgtgccctgtggttaaggcagctccacccatctactccagagcaccagagtctgctcagaagcaccttagaaagtgaaaggagactggcctcatggatagccctgagtgttccagaggagccttcagcccactaatgggttcaggcctatttattgagcacctgctgtgtgcagggttgttatgctacacactgggacccaaaaactgaagcaacacagcccctgcccttgaggcgtgcagtccagtttgagagacaaatgcgcaaacagaccatgacagtgacgcacaataagcagaagatggagtgacgtgtgcacagtaacctgagaaggggtgcatggtgggtgcaggcaggggaggcgtggggaaacctttccagaagagccacatttgtgtttgggatgggccttgagggacagtgcaggtgttcgccctgttcaggtgagaggtgcaatgtagttggaccacctgggacctctgtggagtggggcaagtgaagggcggtcaggatggcaggtggtggttgggatgcttcctgggtttctgcatcaccctgcctcacctctgggccttcctccccatcatcagggatcccgggtgcaaggggcacaagtttgcacacagtggcctggcttgccagctgccccagccctgcgaggcagatgaggggctgggtgaggaagaggatagcagctctgagcgaagctcctgcacctcatcctccacccaccagagagatgggaagttctgtgactgctgctactgtgagttcttcggccacaatgcggtgagtgagcctgcccaggctagagagggctgggggccagccaaggtgagcaaaaggagcaccctgctctccccagagaccccgttgctcacggtggtaattaccgtgc

SEQ ID NO: 35086 - DNA, 2300 bp, Homo sapien
acgagcctgctgccttcggctctgtggcagcttgaaagccaaccagtatgacatgggagacagagatgagtttgagggtctgaaatgtgccctagttagaaggacagacacttgggagtcatctaagtctgctgtttcatgaatcacgatggccagactttcctcatttctcacgtcgctgcagatcttcccttttacccaggaacagtttagcttcaggactcctggtcaaaaggcccttcctgtcattggccgctctctactccccaaaggcccgcagttcacaggcagtctctgcccctaccagagtctctctccccagtctccacacattgcatgtaagtgggaccaccgcagccctttcccagcaaaggcctggccctcatttgttcttatagctggagttgtattaattgtgtttttgctatggcacatggtctggaggagaaggagctccctcaggaaaagctgaggcagcagagggtcagctccgatgtttgctgtttgaccgtgagcctttttcctcccccttctccagatctccttgtcacacacatcctgcaaatcacagtcttgtggagatgactctcattcgtcctcgtcttcctcctcatcatcctcatcctcgtcctcctcttcctgccctgggaactcgggagactgggatcctagctcgttcctgtcggcacataagctctcgggcctctggaattccccacattccagtggggccatgccaggcagctctcttgggagtcctcctaccatccccggtgagtctccaggctcgggagagagccaggccctataaatgtggacagctgtgttttcctatccactttgttcaaacaaatcataagactggttactaaaataagtaaaagtggaactgttctggtggaagcaggggcagcttagaccttgactatttctggaactcctttccccacaactctgaacttgaaaaatactgctaatagaaaaacgtttgcctctcaaagttgtcattggctctggtagttcacattggatcaagagggcatccggtgaggtctgtctgagtagaaagtggagtcataggacttagatcacctgacccctgcagcaccacagaggacctgggcaaccttgtcttcctaggccttgatttccccacctaagggatgggtataaaagcactgaatttaaatgcccaagagattggcagtgtaagccgtaatagttattagctaatttagcagctgtgtaagtcttctttgaccctgaaataactctcagagacccagagacaaaactcttgggttattggtttattatgtaaatatgatttactgtcatacttctaaatgaaggagctgagttcttcaaagtgggtctgctcccagaattatgagtgttgagcagtatataattccattaattttggtacataagctagagagtcatcagaacctttttcccacttgtctgaaatctggggccctcaggggtctggcatgccctgctgctgtggtacacgtggcacagaggcagagcctgggcctgctgctccactggcttctgcagatcatcctccaggcctgaggagcacctgtgtacaagcagatcctagagagaccctcagagacagaatgcatatcttctgctcatgctgcagaaaaggcatggggccttgtgtggaatcagcattcctagtaccttcttgcttgggcctgggctccttgagcctgctcagctgtgttgctgcccacacagaatcttctgcagctccagggtcccctgtgctgagaggctgtgccctcttgtcacagaagcaggatgctgtggcagtgagcctgtgggctttccttcccaggtctgggctcccattctgacccctttctcctccctctgcccacaggtgaggctttccccgtctcggagcaccaccagcactcagacctcactgctccccctaacagccccaccggccaccacccgcagccagcatctctaatcccgtctcaccccagctcctttggctccccaccccacccacacctgctgcccaccaccccggcagcacctttccctgcccaggcttcagagtgccctgttgctgctgccactgccccccacactccagggccatgtcagagctcccatctaccctccaccagcatgccgctcctgaagatgcccccaccattctcggggtgcagccacccctgcagcgggcactgtggtgggcactgcagtgggcctctcctcccacccccgagctctcagccactccctagcactcacaggtaagtgtgctg

SEQ ID NO: 35087 - DNA, 2300 bp, Homo sapien
aacaactgtcttgctcattgaaatgttcccttggcagacactgatttaggctgtatcttttgtgagttccacatgtaaaatttctgtctctctggtactctttttctaagttccttgtacttccgaaagtttcattatgcttctggtactactgtttggttcctttcttttttgagaaaccaaggacccaagtcagtgtaatggtaacattagaggtttaaggataccctaatgctaactcattatgagaaagtaatttcacgggagaaaaatgatggcattatcttattggtaggatgagggtgatacccttattattcccgtaggcctctgcagacacatgttacccagtgttgggtaagtttggaaggtatgtcagttaactaccattgcataacaaaccacctccaaaacctagtggtttaaaacaataccactttctatctctcatgagtctgctctcggctgggctcactcatgtttctctgatcagctggccaatcagctgggaagactttgctttctccacaagtctctcacatccctccagcagctagcctggtctcgctctcaggccatggcagaggttcaggagtgagcaagcccagccgtgcatggaaacaagtggaaatgtatacacacctttcaggtttatggctggcagcctatttgctaacatcccattggccaaagtgacatagtcaagcccagtgtcagagtgggggcagatacaaagttgtaggatataggaagctattaattggaggcattaaatgtaatcagtctcccagtcaggacccctcaatgtgaaagcaaacctacagacttatatttgtttttctttttttttttttttttttgagacggagtctcgctctgtcgcccaggctggagtgcagtggcgcgatcttggctcactgcaagctccgcctcccaggttcaagcgattctcctgccccagcctcccgagtagctgggactacaggtgcttgccaccatgcccagctaatttttttgtgtttttagtggagacggggtttcactgtgttagccaggatggtttcgatctcctgacctcgtgatccgcccacctggacctcccaaagtgctgggattacaggcatgagctaccgcgcccggcctgagttatatttctaagcaagtttgtcacagaaggcaaaaaaaaaagtccaaataatgactgtattgggcctatgctatgggcatacacagggtagacactttacctgctacgcagtgatgatccttacaacaactctgcaaggtaggtaggaattggagcccagagaagttaaataacttgctcaaggtcacccagccagtatgtgttcaggcaggaattagaatgcatatctgtttgatttcaaagcccagactgttttcaccatactcactacctctcaggagcaccaaccagagccttaccttccctctgacacaatttcccattgagttgatgctttctgactagctgtacaaacgcctcctccaaaatgttgctgcgatcctaagggaattgtgcaattcttcagaaaacccacacattctcctaaactgtccactgactaaaagcattctttccttccagatgggcattggtccctgggctgtacaggcagcccaagaattgtggacactcccagccatgccagagagggaagggccatcttctctttaacctttaagatttggggatgtcagagaattaggatatttgagcatgagttttggagccagactcactagggttcaaccactcgctagcttttaaccttgggcaactcatttaacttcttgaaatctgtttcttcatcttaaaaaatgggaataagaacacctcgtttgcagagctgttacaaggactaaattttaattatgtctaaaaagtgcctaacccagtgcctggcacgtaataagtggcattactaatattgttactattattttgaaggagagcctttcccctcctgggaaaccctgtttctgtctgttggacaggtcccccccgcctccagccagcctgtgcagacttgctgcctgctgtgtcaccgggaacgcaaaggctgggaagaaggcccttctcaaaatggactggtgttgcagggtgagaagctgccccctgacttcatgccaaagctcgtcaagaatctcctaggcgagatgcctctgtgggtctgccagagttgccgaaagagcatggaggaagatgaaaggcagacaggtcgagaacatgcagtggcggtaggtaaccgctgacaggggtccctgaatgcaggagg

SEQ ID NO: 35088 - DNA, 2300 bp, Homo sapien
ttccatctcaaaataataataataataataataataataataataataataataataataatgtatcgaaatacatctatgttacctaccaagtctaaagaagccccagcccaagtattgcacctcttccctagtagggagtgtgatctacagcagctttcccttcactttgtacgaaatatctcaacatatcccagactcctagatggcttactgcgaggcccctatatatttgtgagatttattatccatcctctggcacacacatcatgccttaccaaatcatccaggatatctgctattcccttttcttaaggtccatcaagatgatgtcatcagtgcctcagcagattagcctgatatccattagaatggagatttagtaaaaaaaatccctgtaaactggcagggtgcagtggctccgcctgtaatcctagcactttgggaggccgaggcaggtgcatcacctgaggtcaagaattcgagaccagcctgggcaatacggggaaaccccgtctctactaaaaatacaaaaaaattagggggcgtggtagcatgtgcctctaatcccagctaatctggaggctgaggcacgagaatcccttgaacccaggaggcggaggttgcagtgagctgaaattgcgccactgcactccagcctgggagatagagtgagactctgtcattaaaaaaaaaaaaaaaaaaaatccctgtaaactaagtggctgggtccagagtgtgacataccctgaagcaagacagtgagggtttaccgctgcccctgccagatcaatgcaagggattcctggtgtttggtacagaagaataaccattgaccagacctcttgttgcctattagagaccaacaactgtgctgatctgtcccaagaaggaccgcatctggaagaatgcctgcagttggggttcttaccagaataagtaagtttatcataatgctctgttgttcttcaaggccgtctctcttctgttctgggcaaactgaagaggtaatggtgatgtgatgggactcaccctgcgtctttcaaatctttgatagtggcattaatccctgggtgagataaggtactatttttgatttattttcttggtagttaaggagagctccagggccttccatgtagctcttcctttcaaaatagcccttgccccatgggttaggaagccagtgtcaggattccgcccctgttgataccaatagcaactctgcatataaccacaatttcagagtacatagcccaggcatgagacagacttcactcaaaactttttttttttaatctgtgccatgtacatgtattatacagtatattcacaaaaagaggggggaaattccatttttaacaattaaatacataattattaagttttaaaaattctcctttgtgtaccactccaaaatcctctcctgcacatactatttttttggaaacacctagtcgtctcatcgttatcacaccggttgtaactatgtacctacgtgtctaccttccccatcagactcgggaacaaggagtcgggtttgagtcccactgtcccaagcacagaacgctggactcccagtagaccatatgttgcaaataaagaccttcgtccctttcaactcaggccgtccacgagcccaggagttccaacaaaatgatgtacagcaaccttttccaggcctttatgttgcctcaatatttctcacctgcaaaatgggaatgatccgtacctgcctcgctgtgctgtcggaaggagtcagacgatgggtgtgaaagtattgtaacactatagaaattaattcactcatccatttaacaggcaattattaagtgctagggtggtgcagcgcgattaccaccgcattacacgcgttcctccagcaggttgcatccttcccgtcccgcgtagggggggaagggcgtctccccaccaagtttttctcccagcgaactccgggtggtgaccttattcaaaatggcgcaggcggcctcgggggctagtgcggcggcgcggactccgcgtgccctctgacctgttggcagcaggcggagggggggaaccgggcgccgccatattggctgttgtcctgtgaggggagcggtagcggcggcggcggcggcggcggcggcggcggcggcggcggcgtgtggagcgagggagcggcgcgagcggcggcatgacgcggaggcggagcaggccgagcggcggtgcgggcaggcgcgagcgggctcgggccgcggggccgcagaagccccaggcgcccgagcccccgccgccgccaagcctggaggcgggag

SEQ ID NO: 35089 - DNA, 2300 bp, Homo sapien
ggcatgatcacagctcactgtagccttgacctcccaggctcaagcaatcctcttgcctcagcctcctgagtagctgggactacaggcgcatgccaccagatccagttaatttttgtattttttgtagagatggggtttcgtcatgttgccccgactggtctcgaactcctgggctcaagcaatcctcctgcttctgcctcccaaagcgctggaattataggcgtaagccaccatgcccagcctattttcacttttttgaggaatcattatacggttttccacagtgtctgtaccattttacattcccaccaacagtgcacaagggttcaatttccccacatccttgccaatgcttgtagtttctttcttttcctttttttttttctagtggccatcttaatgggtatatgacgtagtatctcattgttctttatctcattgtgatttgtgtttctctaatgattagtgatgttgagtatcttttcatgtgctcactggccacttgttgatcactggagaaatgtctattcaagccctttgttgtggtttttgaatgagattgttcttattttgttgctgagttttaggagtctctgcatattctggatattaatcctttgtcagatatatgatttgcaaatattttcttccattctgtgggttgcctctttactctgctacagagtcttttgatgcacaaaatgttttaattttcataaagtccaatttgtctattttttcttttgttgcctgtgcctttagtgtcatatccaggaagtctgttgccaaatccgatgtggtaaaccctttgccatatgttttctatgagttttatgctttgggattttaaaagttgtgggtctttttgggtgaatttttatctatggtgttagagaaggaaccaccttcacttttttgcatgtggatatccagttttcccagcaccatttgttagaaagactgtccctcctccccgcattgaatgggcttggtctccttgttaaaaattatttgaccatatatgggagggcatatcttggggctctctattgtattccattggtctatatgtctgtctatatgccagtaccacactgtcttgatgactgaagcttggaagtaagttttgaaatcaggaagtgtgagttcttcagctttattcttatttttcaggattgttttggctaatcgaaatcccttgagagtatatgaattgtagaatgagtttctctgtttctacaaaaaatgtcattgggattttgacaggaattgcattaaatctgtagattgctttggatagtattgacatcttaactatattaagtaaggatgattttttttaaattactgattcaatctcctcactagttataggtttattcagattatattatctattctgagtcagttttgcatttctatgaatttgtccatttcatctacgttatccaatttgttggcttatatttgctcatagtactctcttatgatcctttctatttctgtagaattgctagtaacgagccattgcagttgggatctggcagcagaggctgtgtgtgtgtttgtgtgtgtgtgtgatcggagaaatgcttgagagggtaacacccgatttaggagtggacagggtatgaggacaaagaagtggtaatgggagaccttgccttttatttcttttaatcttttttgataatacatttgtgcattatttggtcgttctctttaaattcatttttaaaggtagaagcaaatcaagactggtagatgctgtgccaaggaaagtcagggatcctaggttcgaatcctgtctctgttcgcaattcgctccgcaacctcaaacaaacgacctcagtttcatctatgaaaagctggtaaccatcgtcagttgccaggccatgaagagagtcaacggaaataagtttttattctagggcacccgctctctctcaggtaaaagccgcgccccaatcaggtactgccgcgccagggccgcgggacatctcgggatttgtggtccacccggcggaactcgcggtcccggcaggcaccgcggcggcggcagggcgacgtggcgcggccggctgcggctgcgcaggcaggtggagcaagatggctgtggagctgggcgtgctgctcgtccggccccggcccggaaccgggctgggtagagtgatgcggaccctcctgctggtgctgtggctggcgacgcgcggaagcgcgctctactttcacatcggagagacggagaagaagtgctttattgaggagatcccggacgagaccatggtcataggtgcggg

SEQ ID NO: 35090 - DNA, 2300 bp, Homo sapien
agctaggatttgtctgatgtttttctcatgattagactagagttgtgggtttttgaaaagagaccacaggctgggcatggtggctcacgcctgtaatcgcagcactttgggaggcagaggcaggcggatcacctgaggtcaggagttcgagaccagccgccaacatggtaaaaccccgtctctactaaaaatacaaaaattagccaggcgtggtggcaggcgcctgtaatcccagctactcggaaggctgagacaggagaattgcttgaccccgggaggcagaggttgcagtgagccgagatcgtgccactgcactccagcctgactgacagagtgagactctgtctcaaaaaataaataaataaataaaataaaataaaataaaaaagtagaaaagagatcagagttgaagtgtcattatcaacatggctcttagctggatatcacatttaaaaattagataatttgggttttcatttgagatctgatttcttgagagtgtgaatctgacaatctgaagtagagcttcatcctgatatagtaacagctaaccggatggagtggtcccctttagatgggctgtgcattgaccacggttctggggtaggatgcagtgccctgggggagtcaacaggaaggggaatgggtggattatatacttccaggtttacggggtaaaggggttactgggaatgattcatttcccacccacggtgaagttctctctggagcagagtgattaagatcatagattgtggggaagaacaaaacaaaaaccccaaacccatagatttgcaaccaaactacctgatttgcctctctgtgcctcagttctctcaattttaacttggggataagcacctaccgataaggactacgtgagataaccctcatgtagtaagaactattaacaatgactggcacataataagaacttaatagatgtttgctatctattaggaaacttaaaagtttgcctggaagagcagaggaggtcaagtctaacaattgccgctttctttccccaggtaggaggctagtaggaggggtgggggggctgggggtgagggggatggttaagttcccacggtgacggggcagatatgggaactcagtctcctattcccttcttcagttctcagctccaccaaagtacccttttcctggatgacagctgtcatttatatggcgttgaactgtgtgcctagcgctgcacaagtgtttgcactttctccttgaatccccacagctaccatatagaataggagccattgatatacccaggtgaggaaacagatgcagagatgtggcttggtcaaaacacagctgaattggcagagtctagtttctttttctttttcttttcttttttttttgacggagtctcgccctgtcacccaggctggagtgcagtggtgcgatctcgactcactgcaagctccgcctcctgggttcacaccatgctcctgcctcagcctcccgagtagctgggactaacaggcgcccgccaccacgcccggctaattttttgtatttttagtagagacggggtttcaccgtgttagccaggatggtctcgctctcctgacctcgtgatccgcccgcctcggcctcccaaagtgctgggattacaggcgtgagccaccgcgcccggcaagcagagtcgggtttcaaattcagtcaacttgtcttcagggctcggctcctaacgcctgcgcgggctgtcagctgaactcagcgccgagccgtgagcttggctttgcccctccaagcttgcgcggagaacgcgccgcctgggccgagacggggaccccgggacgctcccgcctcccctcggaaagaggacggagatgcagattctccccgagcgttggtttgggagtctggactcttaggtccagtcccagcccagtgatttgttgggaggccctgggcctctgggcttcagtttctcgggcttccaggcgggtcccggggcggctaggaaggagccgcccagagagggaggcgcgcccgcgctgctcgcaagcagaaccttggaggcggcggctccgggagctggcggcgcggccggagcggcggacccggcggaccggggggcggggcggacaggcctgggcggagcgggaggcggaggcgccgcgtaggcccgggaggccgggccggccgggctgcgagcgcctgccccatgcgccgccgcctctccgcacgatgttcccctcgcggaggaaagcggcgcagctgccctgggaggacggcaggtgagcggcggcggtgggcccgggccccgtcctcccggg

SEQ ID NO: 35091 - DNA, 2300 bp, Homo sapien
tgtttctcactaaagcagaatggggaaagcgatttgactgcctccattcgtggggcacttgagatgtgtccctgtaagtcttctcacagaacacatgactggatctcctcctcgtgaatgacacctcatttccttcatgtttcttaagtccgtcaggtgccataagattctggaatttagtggccacaacttgtacttttggggatttttcagacttggtgttgaaaggggaaaacaggaatataatagaaagcgtggactagcgttcgacctgggcaggagtcctccgtaattatgtgagcagagacccctgcatctgtccgaccgcagcctttccgtcactgagccagttatgacagtattggctctgcagggctgtgtgaggattaaaggaccgcacacatgtaaagagcatggcactgcctagcacaacaggaggtgccagttgtcttcccgttacctttgcagttttgaggtcctgtaaccagagcagctgaggattcaaacctcgtagtacgaaggtctgtatgagacaagaaaggaaaggtaacagaggagcatttctatttcctgatccttttccatagctgtttccagagaaatttactgatgtcaattctgtgcttttgacacagggttggtgcaaagatccacgcaactgatgcaggctagtgtagctatctagtgtaggctctggagccagcctgcctgggtttgaatccgccttttactagtcttgggcagtgattgatgagggagacaaagcctcttctggactgcccctcagagccagggtggcctgggcctgggagccactgggactgcaaatctggtttgccacctggtggcaccaggaacaattgttctcggtgtccactgtcctgaggaattgggactctgggttcaatccagttgctctgcggtttgtgctcttagagcacaggatgatgcccatggggatgtggtcctcataggagaggggagcagggccgagggaattagcgtgtggacgtgctcggagtacccagtccacgccgttcccctggataatagtcactgcttcttttcatgaaggtgggatatcaccccatatccatctctccagtctctaccctgtccccagaaaaagcccagagggcaagggagaatctgtagaggttccagccttcccagaccactctcaggactgggctgtgctcctccccagctgaatccaccaccacaggataatggggggtaagtcagaagccctggggggtttcctaccaggccacctctcagctgcgtgtggaacctgggcctggctgcaaggctactggcttccaggttggcggtctctctagaaaaagggaggagttggtctggctttagcatgtgacttaaggcatgccctgactgccttacccctttctgtaactcacttggcaagctctctgctgtctggcctgtgcttgctgtgctggggccacagataagaatctgacacggcctgagaagcaaggacacaaggcattacaaaaaagtgggaagatgccgtgggaatacaaaagtgggagcattatgggggcagggggcagtgctggccatgacattggagttcggctctgaaggatcaacaggggtcctcaggcagataaagaaggacatttcaggcagaaggagcaggctgtgtgagggctggagcaggaaggaatatagcaagtggagaagctccgaggtgcccaacatgagaacatggggcgaaggcttgggagcacctggagttggggccaggtcatggagggctttgactgtcaggccaaagggcttggcctttgtctggcaaacagaggagggtcattcagaagactgaaggggtctgagcagggcaaggaacagatgagtgaggaaggatcagagggggacttaggagatagaatttatttatttatttatttatttatgagatggagtctcgctctgttgcccaggctggagtgcagtggcgtgatctcagctcactgcaacctccgcctcccagattcaagctatgcttctgcctcagcctcccaagtagctgggactataggcgcgtaccaccacacccagctaatttttgtatttttagtagagatggggtgttaccatatttgccaggctggtcttgagctcctgacctcgtgatgcacctgcctcggcctcccaaagtgctgggattacaggcgtgagccaccacgcctggccaggagatagaatttataagacctgatagctaatcgctgactcttaagattgtgaagtggattcctttgcagattact

SEQ ID NO: 35092 - DNA, 2300 bp, Homo sapien
attcttggaagcaggatggagccacggtttctgctggggtggatctgtaggggagcgggtttggaaagcagtgggttgcatctctaaggtggggactcctgtcattggctcaggacattgagccactatcgtggggaggagcacctgcaagtgacaggagcctcctcatccttgccctgagcagctctgaccaggactcagtcacagaaagtaagagagcattgaggagccggggcagctctgtgaactgggagtggttcagagggcttcccgagagcgggtggcatgggttgggtctagagaggcaagcaggattcggatgcatggtagtggcatgagcagaaacattaaagttgcttctgtactaattcccaggtgcttggggtagacgagttatgtgcagcctcctcgtggggaggccagagaacgggtctgtcacagggccagccctgccccgccctcctgaccctgtcccgcgcttgctccaggtccgggttgctctccggcggcctccctcggaagtgttccgtcttccacctgttcgtggcctgcctctcgctgggcttcttctccctactctggctgcagctcagctgctctggggacgtggcccgggcagtcaggggacaagggcaggagacctcgggccctccccgtgcctgccccccagagccgccccctgagcactgggaagaagacgcatcctggggcccccaccgcctggcagtgctggtgcccttccgcgaacgcttcgaggagctcctggtcttcgtgccccacatgcgccgcttcctgagcaggaagaagatccggcaccacatctacgtgctcaaccaggtggaccacttcaggtagcgcccgcccccaccctctcccctcggcacccctgcccgggctcaggcttctcaggccctgtgagaggccacctggggcaggggcaggagggcgggaggtggcagacccctctcactgggtgtgacaggaacctttggagagggccctgatctaatttccattttgaaaagctcactgtggctgccgtatgtggaatggattataccagggcaagaggagaagcagggagagcagttaggtggtcactgctgtggtctgcggtgacagtggcttgatggcctggtggggggtgggtagagagaggtgctgtggaggaagcccagacaggactccctggggattggcccggggattagggaaagggagggtcaaggccacggctttaaagttgcccacagtctggcgttatcctaaaatccctgcccttaccaaaaagtgctcccttccatgaccacagcctgagatctcacccaccagcccccacctcctttccctctaggtaactcccactggaagatggattctcagccccaccagcctgatcttcccaccttttcaagtccccttgatccagatccccagaccccccccttttccctgccacccttcttgtctttacttcctccttacccaacctggagtccaaggtccatcattaaaaccctccctggcatactccctcaagcctctggtcccttgctgctggcgtaatcccagcctgatttactccagctctctgctccacacctgtgcctgggcactggagggtatggagaggaaagacaacacgtgaggcggccatgctgctgtccccatgccgatgatgcccctgccaggaaggccctctgccctgctgggagcctcactttcctctggtctgtccactgcagcctttaaaactatctgttctcctcattcatccctcgtcctcactcatagctgacgactttgcttccaatttcagaaaacagaatgaaatggaagagaactttccccagttccctccacaactcacctgccagcctctgtgcacagggactcaaggctgttccagcttctgtccgggctgactcccaccatccccatccttcagtatttccccccaccccacagttgggcccttcctctccctctcgatcagcgttcctctcctggagcatacccatgagcacacacaccctgaagtggctcctctctcaaaggaaaaagactccctggatcccacatccctcgaggctgtcacccttctctgctttctggcagacctccttccctttctctcccctcgtctctcttgaaccccttccgctcagactcctgcacccaccatggcacagagcagctctcactgaggtcaccagccacctcctccactctgttggtccagaggccatgctgggccctcatcctgtggacctgccagcagcatcttctttcgtaaaatg

SEQ ID NO: 35093 - DNA, 2300 bp, Homo sapien
tgatttactccagctctctgctccacacctgtgcctgggcactggagggtatggagaggaaagacaacacgtgaggcggccatgctgctgtccccatgccgatgatgcccctgccaggaaggccctctgccctgctgggagcctcactttcctctggtctgtccactgcagcctttaaaactatctgttctcctcattcatccctcgtcctcactcatagctgacgactttgcttccaatttcagaaaacagaatgaaatggaagagaactttccccagttccctccacaactcacctgccagcctctgtgcacagggactcaaggctgttccagcttctgtccgggctgactcccaccatccccatccttcagtatttccccccaccccacagttgggcccttcctctccctctcgatcagcgttcctctcctggagcatacccatgagcacacacaccctgaagtggctcctctctcaaaggaaaaagactccctggatcccacatccctcgaggctgtcacccttctctgctttctggcagacctccttccctttctctcccctcgtctctcttgaaccccttccgctcagactcctgcacccaccatggcacagagcagctctcactgaggtcaccagccacctcctccactctgttggtccagaggccatgctgggccctcatcctgtggacctgccagcagcatcttctttcgtaaaatgcccctgcttggggcagcaccctctggtcctccctctgcactggctgggcctctgtgtctgtgggttctgctcatctccccgagctctcaccatcggggcttctctggactcggtgcttcggcagccccccttttttaactccaggtgttccttggggcatctcatgtcatctccagcattaaaccacgtctctgatgattcctgaggctgtttcctggagttctctcctaaactccaggctcaacagcccagccatctacacagtccctccacgtggtggcctcagagctactgcaagcttccatgatcacagctgaattgctggtggcctgccctgccccaaacctgtagctctgtcctcttctccatgggaatggaagctctttgctctcattgctcaagcccaaaagcccgggggtcatcctcagctgctccttctctgtcatacactgcgtcctattcgtcagcaaaatccatctagaatctgcccgcttctcgctgttgccactgccacctcctgagctaggccaccttcatcttttggtctctcacctaaatcattgccatagtctcccagctggtctccctgctttcacccctgctctgacagtctcttccagcacaacagctagggcggtcctgtccaggcataagtcacagcacgcctctaccctgctcagagcctccatggcacccatcttacccgagtcaaagccccgtccttcagtggcccttgggccttgtgcagtcactgtgtcacccccaacatccccacctctgccctcgccctgcccagctgcccgttggtctgctcctgcctcctgccgtggcagtgccatctctcctatgcagagccctaggcacccactgccctgtgggtcatctcttcaggccttcaggtttctgtcactcagttcccctggccctccctgacggccccaccgaggacaagagccacctccacccccagcaagatcgccctccttgcctgctttgcttttccccccagcacgaaccactgctggccacgctttgtgtttgcttgtttctgtttccttctattggaatctcagttccttgagaacagggcctggtttttcactgctgtacctcccgtgctttgaatggtttctggcacatagtgggtgcttagtaaatatgcgatgagtggagggactgccccacaggctgagtgaagtcagtgctgggccagagggcagcataggcaccatggggacccccgggtgggtgctgagccccaggcagtgagcccgtgtgctgcccctgcccagccttgcccaccctgcacaggttcaaccgggcagcgctcatcaacgtgggcttcctggagagcagcaacagcacggactacattgccatgcacgacgttgacctgctccctctcaacgaggagctggactatggctttcctgaggctgggcccttccacgtggcctccccggagctccaccctctctaccactacaagacctatgtcggcggcatcctgctgctctccaagcagcactaccggctggtgaggcccggacagcctgctctgctcagagccggga

SEQ ID NO: 35094 - DNA, 2300 bp, Homo sapien
cttgggcaccgtgccctgctctggtggctgctgtgggcaccctgggcactgtgggtcagcccagacctcagggtccatgcaggctggcagggtggggtggcggaggcgtagctgaaggtgccagaatcccagccacacccgggatgcagggatcccaccctcaaacagccccttctctaggaggcttatgcatccaactggagatcccggctcgcctgcttcctagtggggcacagccctgggcaagaggcttcactgctttgagctctgggttcttcctctccagtggggaccacaggacctctgatggcgaggttgtgtggggtcagtgggtagctggcacccatgcagccctgagtccgtgctctttcctctcttcctccccaggagcagttcaaggtggacagggagggaggcctgaacactgtgaagtaccatgtggcttcccgcactgccctgtctgtgggcggggccccctgcactgtcctcaacatcatgttggactgtgacaagaccgccacaccctggtgcacattcagctgagctggatggacagtgaggaagcctgtacctacaggccatattgctcaggctcaggacaaggcctcaggtcgtgggcccagctctgacaggatgtggagtggccaggaccaagacagcaagctacgcaattgcagccacccggccgccaaggcaggcttgggctgggccaggacacgtggggtgcctgggacgctgcttgccatgcacagtgatcagagagaggctggggtgtgtcctgtccgggaccccccctgccttcctgctcaccctactctgacctccttcacgtgcccaggcctgtgggtagtggggagggctgaacaggacaacctctcatcacccccacttttgttccttcctgctgggctgcctcgtgcagagacacagtgtaggggccatgcagctggcgtaggtggcagttgggcctggtgagggttaggacttcagaaaccagagcacaagccccacagagggggaacagccagcaccgctctagctggttgttgccatgccggaatgtgggcctagtgttgccagatcttctgatttttcgaaagaaactagaatgctggattcttaagtgatatcttctgattttttaaatgatagcacctaaatgaaactttcaaaaagtatggcaggccagacaaaatgtgtcgtggaccgctcacatgtcacttttggctgaggggcaaggggacgggtgagttacaagctggcaaggaattggggtggggcggggacgacaagtccaggggggaggagaagccaaaggtgtgagggttcctgtactacctccaccccaccaaggcttctgggcagcccccgaatgcccttctgagcagtcttaccaccttcaggctctctctgggtaagcttcctccggcctcactgagacacggaggagggagagtggctgaggagattcacccacaggactggagagaggcaggcagggcactcagccggtgcctcgggtcatggcttgagtggggaggagaaggggagaagtgggaggatccctgtggtgttccctcagcacagagggattacagtggtcactgaatgcccaggagcagtgagaagacatgaactggggagtgctcttgggggaatcacttggagggaagcccagagcccatgagagtgggaggcaagggaccctgcatgtaggccactccaaggcatttggctgccaaagatgcaaggcagaaggcagaggagaccatcaggccccagtaatgtgggtttgttttaacaccaggacacctggagtcctgaaggaagggattcctgagcaccatcccagagctcaggaaggtggaatccacagctctggttcaaaagacttctctgaggatgatcagggctgctgtgtgcagttgtgtgggttgcgcactgtgtaacctgtgtataagccgagggatttaagcagaaagggctggggtaaagcttcaggttcaggtgtttagtccagggtctttgtgatcctaaattgaccttccccatcgattcagccacacccactattgtgatgggcagacaggcctcgactctagtgcaggggtggtggagaggggactgtgccagttccctggacaatcccagctgcttcatcttggactgacatggacaccaggcagtaacaccagctcttgggagttggtgggaacaggtgtaatatcaaagctcccagctctgcactctcctgtcacataggaagacctcagaaaatggaggttccttcctttccacct

SEQ ID NO: 35095 - DNA, 2300 bp, Homo sapien
gaacaatagctagtaaggagatagaatcagtaatcaaaaacctttcaacaaaaaagcctagaacaaggtggcttcactagtaaatttggccaaacatttaaataaaaattaacaccaatcctcctcagacttttccaaaaaacagaggagagataacttatttcagcttattctgtgaggccagcattaccctgtgatatggtttggccgtgtgcctacccaaatctcatcttgcattgtagctcccataattctcacgtgttatgggagggacctggtgggaggtaattgaatcactggggcgggttttcctgtgatgttctcataatagtaaataaatctcatgagatctgatggttttataaaggggagttcccctacacaggcctcttgcctactgccatgtaagacgtgactttgctcctcattcgccttttgccatgattgtgaggcctccccagccatgtggaactgtaagtcaactaaacctttttcctttataaattacccagtctaggatatgtctttattagtagcgtgatacaccctaatatcaaagccagatcaaaaaaactacaagcagctgggtgcagtggctcatgcctgcaatcccagtactttgggaggccaaggtgggcagattgcttgaggccaggagttcaagaccagcatggccaacatggtgaaaccccatctctgctaaagataacaaaaattaaccgagtatggtggcgtgcacctgaaatctcaactactgaggaggctgaggcaggagaatcgcctgaacccgggaggcaggggttgcagtgagccaagatggtgccactgcactccaccctgggcgatagagcgagactctgtctcaaaaaaaaaaaaaaaggaaaagtaaaaaactacaataaaactgccaaccaatatacctgataaatgttgatgaagaaatcctcaacaaaatactaacaaactaaaattcaacagcacattaaaaggatatgcagtcatcccttggttgactacatgggtggactggttccaggacctcccttggataccaaaatttgtatttgcttcctggcaactgtggggtaacattctctacaccaaacatctcaaactcaactgtctacaagagccaagtaagtgccctaatgagtgaagtcggccaggcaggaactgagaattatagaagggaggtgtccaccgtcacccttgcttggaatgcagccctccaagacctggtcttactatttttaagagagctggtgatccaactttctttttttttaattcatagttttttaatgttttttacatctttatttttatgtatttatttttatttctataggttttgggggaacaggtggtgtttgggtgcataggtaagttctccagtggtgattactgagattttggggctcccatcacccaagcagtgtacactgtacccaatgtgcagtcttttatccctcgcccacttcccacccttccccctgagtccccaaagtccactgtatcattcttatgccttcgcatgctcatagctgagctcccacttatatgtgagaatatacatttggtttttcatccctgagttacttcacttagaataatgaaatccccatacacctaggttcagggctcctccccaggaaacttctgaggtttggggagtcccaggagagaagttaggaaactctggcctccatcccctccctgtagcagccaaagttcttagggatttagaggcgattttcttttgtcctttctaagaattgacatcattggtctcatctagacttgcttcaagccctactgatgaacctttgacagagtcttccccccaatctgactcttctccatttttccagaaaagggattagataggaaagtcacatacccaggggcctgcagcctgtgacttcagaactggaagtctaaaccctacagccccttcttcttctgagccacctactattgttgcagaattgtgtgactgagtcttgtctccttaaaacgaccgtaaactcttgagtgcaaggattgtattagtcagagtaaagctatgctgctataaaaaatagtccctacatgcaaaggttcaatacagtagatgtttatttcctgcttacaaggcagtcttcagcatgtgtatgtccatgtggtcattcagggatccaggctccttgtgttttctggctccacctcaccctagttcctaatcatcatccatatccacctgatggaatagaaaatagcgtgaggtgtgttcccaggaggctttgcatgggttagacctg

SEQ ID NO: 35096 - DNA, 2300 bp, Homo sapien
agttaaaaataaataaaaataaaatgtaagcaaacacttaaaaaaaataaattgaaagaataaaaaaagaaaaaaaaaatcccaaggaatcgacgaaaaaagtttactcaaactattatgtgaacttagcaaggttgcaggatacagtatcaatatacataaatcaagtatatttatattagcaatggacaattggaaaatgaagtaaaaatacatttctattttcaatatcattaaattcttgaggatagagagagaggtttgcataggttcagtggagacatgatagaggaatgggttagtttaaccagcggggagaagtgatctggaaggatttcacacgtaatggtatctgtgctgtgtcttgaaagataagaaactccaaacaatcaaagggatgatagtcattccaggtaaaaggacaaaagcaaacattcctaggccctaggtgatccaccgtgcctagccggtgatgggtttcaaatgtccaggcacagtggctcatgcctgtaatcccagcactttgggaggccaaagcgggtggatcacctaaggtcaggagtttgagaccggcctggccaacgtggtgaaaccccatctctacagaaataaatacagaatattaaataaaatacagaaattagtctggtgtggtggcatacacctgtaatcccagctacttgggagggtgaggcaggagaatcgcttgaacccaggaggcagagtttgcagtgagccaagattgtaccactacactccagccaaggctaacagagcgagactccgtctcaagaaaataaataaataaataaataaataaataaataaataaataaataaatgggagagacctggtgatgttgcattttagcagttggctgtgggagaggagttgagttcagacctttgatggcctttcagctatttatgttcagttcttgccattgacagccaagccaccaaaggtggtgatactatatggctgcttcctaagaatgaggcattaggtttcaccaagcaatccctattccaggatgagggaatccctattccaggatgccagcttctcacttgacccactcagaattctgtattctgctttggtgctgttgacaatggtgaccatctattaagagaaatagcatggtagctgtgatagcagcaatagtattgctagcctcagggccctaaactaccagtggcagtagtatccaagtaagtgagaagacagaaggtagagcaatatttttccaggctcatggtacagaggttgattacaatacctctgtactgtatcattaggctttgtgaatagcctgatcaatttgccaaggaatggaagtggagatcggaagttttcattaatttacttacttagggctcagacttacactattggttttattacccttgttatattatctttcatatctgtttctcggttgattacatattgaatcaagttgtatattcctaggccctcacagggaaagaaggagacagatctgtgtttgaatgtctgtctctgctacttagctatataatcttaaggtagataacctaacccctctgaactctagtttcctcatctgtatgatggattgataatgcctaccttatcaggtcattgtgaaaattaaagatacgtgaaaatactcagcatgttcttagcacatagattctcttacatttgcttcacttcttaaaatgtagcttttgttgtaggttatcctgtgtatttgaccttccaaacaaaggttgcttttgactttgtgacttaaggttggaatatctcctactactcccctgtcctccttggaccagaaaaaaaaaaaaatcccactatgatcctagtcatgcttatgtggcatttggagaatttaagaaggtatagaaattgacagctttggcaatattattgcttatgttatacaagatgtgtaacttatcagtaaggtgaaatggcaaagtaatgcttatccttaaaagctaagacttaaatcgtctcagataaagctaatactcccatcttgacctcttctattcacacaatccttcaacaggacttcattgacttaactagagagatcagaccaaggacaaaagatcgcagtggactgtgtgattgacctgacaagagctgagggagaaaatagacctattgccactcttgacttaactttagaacctgtcactccttcccagagggagccaaccagtcttcagacatgtgccagcctctctggcaaagcggtgatggaagggcaggtggacagaagctctcagcctacagcacggag

SEQ ID NO: 35097 - DNA, 2300 bp, Homo sapien
caaggtaagtatgaaagactttgtgattccagttttttaaagtacaacctcttgagcttctccccttccattgctagggagtctatctggacccacctcactggagcaagatgctccagtttgtgctgtgtggtattgcatggtgtcattttcctcaaccctttccattatgtggcaaaggcctatacaaatcatgtttcctaagtatgtaaagcatatgtcatcagaccttacaaagacaaagaagctaaagaaaaacaaaaggacaaagaacatcttaaatgactacattcaattaccatggaactttacttttttaactattcaaaaagatatccactgtattatttcaactatatgactctcctgaaaaaagtaaaactatgaagacagataaaagatcagtggtttccagcagctgctagggagaaagggagagatgaacaggcagagaatagagcatttttagggcagtgaaactgttctatctataataaatagacacatgtcattatacatttgtccaaattcacagaatgtacagtattaagaatggagcctgatgtcaactatgaacttggagtgattataatgtgtcaatgtaggatcatcagttgtaacaaatgtaccactctggtggaaaatactaatcatgggggaggccgtgcatgtgtgggaggcatggaacataggagaaatctctgtaccttcctccgattttgctgtgaacctaaaactgctataagaaatagagttattgatttaaaaaacatattcattgtctgtgcatcccaggatttccagaacaaaaataaaaaataaaagatattcactgaatctgttattatgatatatttaagcaggacacagtggtaaccctaaaaattggagatcattaaagaccaaagtaacagcatgtgggcatgatttctcaaattgcagtatagaaaatacataaaacaaataaattcaattgcaagcttaggcaagaaaatattgataaaatgattgaatatcttatttcataactctaaacagggatttagcacgacatgaaaactagattcacataatcaaaataaaagaccatttttattctaattttaactcagaaattattatgcttattcaatttaaccctttcactgaaaggttaaagagataagaaggacagattataattgcttaatattgctatggtaacttccattcaaatacctgtgagtcaccagaagtcaaaaaagtagccagcattgcaacacaggatggatcatgcaagagaaactagtaccaggttaccttatcttataatattatttgctgttaaaatgaaattttaaaacagcaccaaaagttaagttggggctaaaactgttgtgcaggaaagatttcatatagcaggagagagactgccgtcctcagaaagacccgcatgcaagcctggcccttggctgttgtttaggaaattggaattgggagggttcccaccatgccctaagactggtcaccgtgtctaaagtgtttatagaaacaatgcggttacttctgagcagctgctttccttctgaaggtcggaatgtgggtacatgtgagggagagtaacctccatataaaacacttgggtactgagtctctaatgagattctggtactggtagacatcactgcacatgggttgtcaaaatgtgaggctgggggaattaagcagatcctgggaactccacaggagagaacttctggaagcttgtgcctggtttcctccagacttgaccaccacatgcaccttttccctctcattttgcttgtactctttcattgtaatcaattaaagatctgaatatgattatttgctgaatcctgtgagtccttctagtgaatcaccaaacctgggggtggtcttgggaacccttgtcacaaatgcattatataaggttttcattaagttgacatgacctataatcagatggttatttcacagaataactttccctaatctgtttttcttttctttccttgatatttgacttggaggttcttgtatttctatactcaactgattaaagccataaaagaaataagtggggggaggagccaagatggccgaataggaacagctccggtctacagctcccagcgtgagcgacgcagaagacgggtgatttctgcatttccatctgaggtaccgggttcatctcactagggagtgccagacagtgggcgcaggccagtgtgtgtgcgcaccgtgcgcgagccgaagcagggcgaggcattgcctcacctgggaagcgcaaggggtcaggg

SEQ ID NO: 35098 - DNA, 2300 bp, Homo sapien
gggatcgcggattctgggctagatcgcagacttggtatcgcggattgggatttggatcggggattttgagttggatcacggattgggggttggatcacggattggggtttggatcgcggattgggggttggataggggatttggagttggattggggatttggggctgggtgtggggcgagggggagtgaaaaggtgacacggagctgccgcggctcaggagccagtggttgggggtctgagaagaactcaccaccttgaagaagttcttcggctttgggagccgcaggggccggcggtccggggctccctaggccacgtctacaggggttcggggtaccgaatcggaagatccacagggcgctgtcaagggcgaagccgcggaagtggagcgctgcctggcgcgcaggagcagagacctggaagccggggacaggcagcacaggcagtggggtgggggctcagcccagggtgggagggggtccccaggcccggcttccccgcagcccctgggatggggcctcagagggcaccctcagaggggtggtgccaaacggagcctcagctgctctgcatcccccataattccccagctggagcgcttggtggagaatgtgagtgatttaactcaccaagctaagcatacacagtgttatttttaacctacacgtttaaaacatggtgttatatacattataggaggtgcctaatgagagaactcattcctctatcaaaaaataccgtgagtcggccgggcgcggtggctcaggcctgtaatcccagcactttgggaggccgaggcgggcggatcaccaggtcaagagatcgagaccatcctggctaacacggtgaaaccccgtctctactaaaaatacaaaaaaaaaaaaaaaaattagccgggcgtggtggcgggcgcctgtagtcccagctactcgggaggctgaggcaggagaatggcgtgaacccgggaggcgcagcttgcagtgagccgagatggcgccactgcactccagcctgggcgacagagcgagactccgtctccaaaaaagaaaaacaaacaaacaaacaaaaaaccgtgagtcattttcagtagcgaaaagctctcacctaaaactgtccgttttacatccgtatccacctgtgtagatcggttctttactgaaggttcttagaaggaaacttggaagtgggaggtgggttctgtgttcctgaatgggaagacacatttttctcaaaatgtgagctctttctgtgattatcaattttacataagccgaatgaaaaaatcaaggttttaacatttttgcatgacacctactgtcttttactattgtaatgacatttgtaaaaattttagggctgggcgcggtggctcaggcctgtaatcccagcactttgggaggccgaggtgggcggatcacgaggtcaggagattgagattgagaccatcctggcaaacacggtgaaaccctgtctgtactaaaaatacaaaaaaaaaaaaaaaaaaaaaaaatagccgggcgtggtggtgggcgcccatagtcccagctactccggaggctgaggcaggagaatgctgtgaacccgggagggggagcttgcagtgagccgccatccagaagtgctgggattacaggtgtgagccaccgcgcccggcctgaaaagtgcatcttcattttacagggaattctttcaaatcaaataatcaaaaactgtaaaagggggcaaagtacttttttgcagatctacaagtttcttatgtaaataggaaaaaaagcctttgcttttctggtataagaatttaaattaaaagaggaatgaaactgttttctatccacaatgtgtgaggatgttttttatactgctgcctgaagtttaagttgctgattactttttaaatagataatttggtggtaagtactatattttaaaaatgcgtatgcccgttacccttcaattccattatactaaaatacccttgggaaatagagatacatgcactttgtttttcacagcacttattttaaaaagaacccatagaatggatcttataagtaaatttcagttgcatccataggatgcaataatatgtgaccatcaaaggtgacaatagatatagaagtacgttgatgtgcgaagatgtattttgttttagccagcgaggaaaaaagaatcagtttgattacacatttaccaaacattaagaatttaatatggtaacttttatttcagtattaaaatagcaattttatttattacttttttatatacagaattcgacaccaaattttggaacttaaa

SEQ ID NO: 35099 - DNA, 2300 bp, Homo sapien
atctaaattcatgttagatctggcttaacctgtgcttatgtatgtatatgttacagttatgtacattaaatgtgtgtgtaagagttggaattatttgaaagatagcaaaattttaactagaaaaaataagttaatatctaataatagttgacttgttgattaaaataagtagttattatgaaagagaaaaaaggtgatttcaaattgattcagaagaactggcctagcaactaagattgtatgctttcctttttttttaaaaaaaaaaagaacggatataatgttatgtgacaattaaatacagaaattacaaaactagttaaattgatgttgccattaaagcaacattaaatagttttgggggagaagaaagaagccgagaagatggtatctgtgcagttaagatggtcatgtcatttgatacatgtaaacagaaagcagcctgaggcccacacctgcaccatgctgaaagagctgaccagcgttatatgttcagtcctagatgaaatgctgcatttgttttttaaacactggtatgcattgttttaaaaatgtataaaataacagtgaaaagttaaagaatcgtaagaatgtagctaaaggtaaaaaaaatttgcaaagccataatttttatgatgaaacaatatattttttatcttttacgtataatgttttaatgcttttttagcccaatgaaatgtggaagtgttttgtgatttttatcttactatagtgattgttttataaacaaagaaaaaattaattcaggattgcagatatggtaaactattaaaatagtttgggtattaaaatatgaaataattgggtattaattcaaaatccaagagttgccattgaacaaacctgtaggcataggtaagtgctgaggtgaaagtgccaaccaaagccgttagattgaacatttatgcctggagggaatcagtagaggaactggctgtggaccttcacctctgcatcccctttgctttctgctgtagctgggtatcacaaaaacaacaacaaaagccacttatttcttaaagacagagaaaggatagttccttccatttaggcattcctaaattgcctccccggtggcccctgcgctcttggaggaggtcaaggcagagcagaccctcaggtgggggagcgatgcacttgaccctgaggacatcaggtaccaggcccactagcccccgcaggcgcggagctgcggctgcagccaccagcctagacgtggcgcgcccgcagcaagtggctggacaccgcagaccaggcccgcgtccccagcagcgcggatcccggggccagccgcccaggcagcaaagtcaggcggtcggcttcgccagcagccgatgagtctcatcctgtggattgcccagcgccagggatcaggatccggagaggtgtccaggaggagcagaccctcagaccaggtaggctgtgcactcagtgaccctgacgccatccaagggaagctccgccatcccgcgccagtgccagagctgcaactgcaaactgcgcgtcctggcacgagcagcggtgggggcgggtgggggaaggagcgagtgactctccaggcgtcttccgctacctgacaccagccaggcagcccccagggccagagcgtcagcgccgaagccaggctcatccgggaagccactccggtggccgcggggtgcccatgccagcaccagatctctcttcggaaggaggagcggggcgggctacacggccaggcgggccctccccttaaggcggggtgggccgcgcgcctgcgattttccgtccgtggtcctggggcagccctggccagcccaggagaacccgcgagcccagcggcgcctgcacctgcggcttccgggagccgggcggctttgcgaggctcactaggtctgagaggtcggaggccgccagtgtcgctgctgaagggtggaccaggcgggatcgcggattctgggctagatcgcagacttggtatcgcggattgggatttggatcggggattttgagttggatcacggattgggggttggatcacggattggggtttggatcgcggattgggggttggataggggatttggagttggattggggatttggggctgggtgtggggcgagggggagtgaaaaggtgacacggagctgccgcggctcaggagccagtggttgggggtctgagaagaactcaccaccttgaagaagttcttcggctttgggagccgcaggggccggcggtccggggctccctaggccacgtctacaggggttcggggtaccgaatcggaagatccaca

SEQ ID NO: 35100 - DNA, 2300 bp, Homo sapien
tgtatcttggtagggacttgtaaatcctcagtgtatgcagcaaaaaaaaaaaaaaaaaaaaaaatacaaaatacagggaaaatgtaggaaaaatatctaaatatatatatatatgaagattcctgaaaaagaggggtaaggaagaaaactagacaccaaatagtttcctactccaagattttagagacttcagtggtattcttggagtctgaaaagctttgtagtttccaagaatttctggttgcaatggggtagggaaaagattggggaaagagagggaccttatttcctacggtccttctgagagccatatgctttatatgtgtactcatttagtacctaggaccttctgacactttcttatgttgctggtggaagtataaattattaaacctcttcataggtgttttggcaatatatatccaaataaaaaagtgcagatgtgtacaatgaaggttgtatagggatattcactgcaatattgttctaatattgttctaaaagcaaattcatgaagggatcagttgaatattatatattcatataaagactgccaccattgagaagaatgagacgtctgcattttctgacaagaaatgatttcctatacatatttaccataggaagcaagttgtgtaaggaatgctacctttttggcagtgtgttgggagaggttatgcacacacctatctaccttgcccaggtgcttacttacactgtctctggaaggccacacaagaaatttaactttttcagaagagaagtttggggacacaggatggagggaagcttttcaatctattcccttttatacattttacatttgttaccaagtgcacgtgttgccttttaaaaattgggtttttaaacacatttaccactactactcaccaccaaaaccttcccccctcagctcttctccagggccttgactggcgctggcagctcaccaccccttttttctccagcaagaagccactggtttaagggagatatgagaggtggggtggatacgcaggtggacatttacttttcactctatatcttttatttttatatttacaatcatgtgcatgtaatactgttacaggaaaagggtcccaatccagaccccaggagtgggttcttggatctcactcaggaaagaattcagggcaagtccgcagtgcaaagtgaaagcaagtttattaagaaagtaaagggaataaaagaatggccactccatagacagagcagccccgagggccgctggttgcgcatttttatggtttttcctgatgatatgctaaacaagtggtggattattcatgcctcccttttttagaccgtatagggtaacttcctgacgttgccatggcatttacaaactgtcctggcactggtgggagtgtagaggtgaggatgaccagaggtcactctcatcgccattttggttttggtgggttttggccggttcctttactgcaacctgttttatcatcaaggtctttatgacctgtattttgtgctgacctcctatttcatcctgtgattagaatgccttaacagtctgggaatgcagcccagtaggtttaagcctcatttcacccagttcctatttaagatagagttgctctggttcacacgcctctgccattaccttttaaaaacaaaaaatccatttttatttaaaaaaaaaaacaaaacctccagaccccttcttaacacctcttccctcactccacacccgctagcccttttcatgggacaagctcaccagctggtccttctccagcaaaaagaccagagctttctgctcttaagggaggggactagggattagggaacaaccccagaagaaaggtgatgagttaactgtttagaaggttagtgttggttcttttattcgattaaacaggaatacacatatatctaccaaagaataggtaagggagaaataagaacactaaaaaaactcggaatcgttaagtgtgaagcatatttggagttaaaagaaccaaatattactaagtaagcagacgcgggcacgcgctgcataccgggatttgtagtcccttccggggcggggtacagcgcgcctgcgcagaggggccgtccctcttccgggcgcatgcgtgcggcagcggcgccaggactgactgcgccgtggaggctgctgcagtgttgtgagttggaagctggggagctcggcatggcggtccccgctgcagccatggggccctcggcgttgggccagagcggtcccggctcgatggccccgtggtgctcagtgagcagcggcccgtcgcgctacgtgcttg

SEQ ID NO: 35101 - DNA, 2300 bp, Homo sapien
gtttgctaagtgtgacatctggggacacaaagacagtttccccccacacttgcctgtttctttttgtcttgtaacttatcattgaacactggatactttaggttatagactcttcaactctggattctgattcttttctgctgagagttgttactgtttgttcgtttgtttgtaaccagcctgcactaaatttgtaaattctgtaagcagcgtgtagccggagccgtctctgctcattttttgtttcttatgcatggcttcccaggaaccgctcctttatctgcgtgcttggtattctgccaacagttgtctgaatttgtacactaacaccttgagtcggtgaggcttccactgtggctgatggatctacccgtggactagggcgtgcacacacagctcaggccatctgctttccacaggcacctcccctcgctgtgtcttctcttcgcatgagctcaggcaccgtcatcagtcagtgatgctgggtggtttgggcaggttctggtctctgaggagacgagcagagctactggtccttcctgtgtgtttgcatcgatatccctatttgaaaattctccaaatcatgtgagtccctctggtggtgacagcaaagctgctggtttcatggtgttcaacaaatgtgttttatatttaggtctatgggccgggagtggtggctcaggcctgtaatccaagcactttgggagactgaggtgggcagatcaccagaagtcaggagttcaagaccagcctggccaacatggtgaaaccccgtctctactaaaaatacaaaatttagccaggcatggtggtggtcacctgtaatcccagctactcagtgggctgaggctggagaatcgcttgaacctgggaggcagaggttgcagtgagccgagattgcacacaataaataaatgatttaatgcccatacaatggagtgctgtgcagctcttaaaaagaatgccacaagcatggtcaacacatactgttctactggatgaggagtattaccatcagctccatttttcaggtgagaaaactgagacttagggaggctacataattttccgaaggtcactccctactgaatgtaggagcagggatctgacagccacctaatgacaccctagaacagcactctctcctccgctctcctccatgtccccctctgactcccgggagacctccccagcttgcagtccccagggccctggtgtccataacccgaggaaggggaggggcccatgagatcttggactttctcactttctgaaaatgagcaactgagaacgagacttgactttgcttaggaagtataaacaaatgcgacatttattgcctatcaaatattagaagcagttcgtctatttaacgtgtgttagtatcggtgttcctttttattcaaactctccctattgagctcaagaatcaaagtcagataactttgtcgataaatcccttcctttctacacccttgctactcactgtctcaagacccaaactcactgggacaaggcgctgcccctcctgattcaagcctggtgtctgcctctcactatgcaaatcaggagccagacagccgcggagagggcggcggtgagtgcacagagcacacgcatgcgttcggcttgcccccacgccgcccccgttatctctgtgtgtgtgaagatgagaaattttcacttctccagtgagttactgtactgctttgactctcacaagcgtgtcgacttgatggatttttgtaaatatagccgtcagcggatgcctcttgtccccatctcgggaaccataacccagattcccaaaggggagcttgcccacatggatggaaactgaggccctcagagaggccatcggccttgatcccttgctcctattcaaagatctcaacattattgcagccttccttggggcagccggacattcccgtgtggaggaagcgtccactcacgtgccatgggaactttgtagatttcactgtgatgcaaacagctccccgtgaggccctcagtgcccagggcccgttgttgggtgcttttgagggtgggaggtggaggggtttccattttgcttgggggatcagcatcacccattctttctccttttcctctgggctggtgctcagatggtgagagcactgtgctgatgaggtgggccctggggtggaacccatggccccctccgactcccaggagacctggccagctgcagcggcccccgtggaccagcagagggacaagagaggagctgacgtggaggagccgaggcccactgggggctcctggagagtccgtcc

SEQ ID NO: 35102 - DNA, 2300 bp, Homo sapien
gtcaacagcactttgcaagattcaagcaaattgggggctctgaacaggcaggaagacaagatgcccttgacggtctagattctgtaaggtcaggaattccttaaaaggttagaatttcccaaatctcaccatgtcctcatggtctgggtgacttagagggtcacagagtgattgtgagcccaagatgttgtgctgagtgtaaggtacagaggtcagagcctcttggagggtctgtgtgtcctggagagtgaatgcatcctcagtgccctcagcattcaaggacctgacagggccagaatgggtaccccaggcagcaggatgcattgtaattcagtgttctcttgtgagtccaagctgactgcatgtcactgggtcttgctaggttaggactgccatggggttcagggtgctccaggaggtcaaagtgtgtcctagggtaggggagaagggttaaaattagagcagtgtttcccaattttacgttgctatggactaaacgtttgtgtccctccaaaatttctacgttgaagtcctaacacccaacgtgatggtatttgaaggtggggatttggggaggtgattaggtttagatgagctcatgagggtgaggccccatgatgggattagtgtccttacaagcagaggaaaagaaaccagagctggttctttctccaccatatgaaggcaccgagagaaggcagccacctgcaagccaggaagagagccctcacaggggagccaaataggcggaccccttgatcttagacttcccagcctccagaactgtgagcaatagaagtctattgtttaaaccacacagtctatgctattttgtcatggcagccccagctgactaagacccacgtgcactcggttctcctggagatcttgatacaaggcagattgtgactcagtagaatggaggtggggcccagggatctgcatttccaacatgctcccattgctggtgctgctgctgctgctgatccatggaccacacggtaagcatcgaaatcctaaaggattctgatttcctgtcttgaatcaccagcgtgtttttaaaggacctgtatgacggcatgaccctgggaatcagactgtcctgtgggtacagtgtgttccagggggtccatgtgttctcactgggtcagtgtatcctgagaagcagaggtgaagtgttctgggtgtcagcgtgtcccaggggatcctaaggtcctgggctgttgcatcatccttaaactgtcagagtgtcctggggatgtcagaatgtacttcccaggtctaagtaacctcaaggggcagagtactgtgggaccaggctgtcctgactgctcagagattcccggtgtcaggattttcttgaagaatcagaatgtagtatgtcacgggaatctcagtctctttccaagtcctggagtctggagtgggtttgggggtcaggatgcagctggaatgcagatgttcaggtcagggttttcggagagtctgggtgaccttggaaggtcatggtgtcctgggggttctgggtgaatgaggaagtggtgtttgagggaggaaatcagaaagtacttgagagctaaggtgtcctggaggcccattctccggagtgggttcaggttggcctgagcactggctggtgtgttctgaactatcagggtatctgagaggggccagcatgcacttgtgacttctccttttttagtttcctggaagcagatccttgagtgtcacccccatgctgagacgccaggcaggctccactcctgggtccctttcccctgctcttcgttcctctccccacagtggggttgtgaggagggggtctcgggaggaatgcattttctcctcctccccctgcctgctcccaggaggggatttaacaggacaaaagaatccggtcctctgggaatacgagcccttggccccagtccctggaccctccgacagaacaccttccctcatccggcttgtgatcctccctgagcaagggggctctggtgaccgtgtagtgattggatgggcccacaggggcgaggaggaggtcactcctccaagactcaggggtgggatgggaaagtaggcagctgacagaagggagcagcatcccggtggggagaagggccaggcagagaaaagtagtcagaaacagagcaacaggtgaggctgaggcaggagattgagctgacactcaagccaaggaagggggaattaggaaacaattagaaaaaaagtaaagacagtgaaaaagtcagagacagctgcctgcacctacacacacattcagagacagagtcccagag

SEQ ID NO: 35103 - DNA, 2300 bp, Homo sapien
atgttacagttatgtacattaaatgtgtgtgtaagagttggaattatttgaaagatagcaaaattttaactagaaaaaataagttaatatctaatgattgttgactcattgattaaaataagtagttattatgaaagagaaaaaaggtgatttcaaattgattcagaagaactggcccagcaactaagattgtatgctttcctttttaaaaaaaaaaaaaaaagaactgatacaatgttatgtgacaattaagtacagaaattacaaaactagttaaattgatgttgccattaaagcaacattaaatagttttgggggagaagaaagaagccgagaagatggtatctgtgcagttaagatggtcatgtcatttgatacatgtaaacagaaagcagcctgaggcccacacctgcaccatgctgaaaaagctgaccagcgttatatgttcagtcctagatgaaatgctgcatttattttttaaacactggtatgcattgttttaaaaatgtataaaataacagtgaaaagttaaagaatcgtaagaatgtagctaaatgtaaaaaaattttgcaaagccataatttttatgatgaaacaaatatgttttttatcttttatgtgtaatgttttaatgcttttttaacccaatgaaatgtggaagtgttttgtgatttttatcttactatagcgattgttttataaacaaagaaaaaattaattcagggttgcagagatggtaaactattaaaatagtttggttattaaattatgcaataattgggtattaaataattcaaaatcgaagagctgcgattgaacaaacctgtaggcataggtaagtgctgaggtgaaagtgccaaccaaagccgttagattgaacatttatgcctggagggaatcagtagaggaactggctgtggaccttcacctctgcatcccctttgctttctgctgtagctgggtatcacaaaaacaacaacaacaaaagccacttatttcttaaagacagagaaaggatagttccttccatttaggcattcctaaattgcctccccggtggcccctgcgctcttggaggaggtcaaggcagagcagaccctcaggtgggtgagcgatgcacttgaccctgaggacatcaggtaccaggcccactagcccccgcaggcgcggagctgcggctgcagccaccagcctagacgtggcgcgcccgcagcaagtggctggacaccgcagaccaggcccgcgtccccagcagcgcggatcccggggccagccgcccaggcagcaaagtcaggcggtcggcttcgccagcagccgatgagtctcatcctgtggattgcccagcgccagggatcaggatccggagaggtgtccaggaggagcagaccctcagaccaggtaggctgtgcactcggtgaccctgacgccatccaagggaagctccgccatcccgcgccagtgcctgagctgcaactgcaaactgcgcgtcctggcacgagcagcggtgggggcgggtgggggaaggagcgagtgactctccaggcgtcttccgctacctgacaccagccaggcagcccccagggccagagcgtcagcgcccaagccaggcttatccgggaagccactccggtggccgcggggtgcccatgccagcaccagatctctcttcggaaggaggagcggggcgggctacacggccagacgggccctccccttaaggcggggtgggccgcgcgcctgcgattttccgtccgtggtcctggggcagcccgggccagcccaggagaacccgcgagcccagcggcgcctgcacctgcggcttccgggagccgggcggctttgcgaggctcactaggtctgagaggtcggaggccgccagtgtcgctgctgaagggcggaccaggcgggatcgcggattctgggctagatcgcagacttggtatcgcggattgggatttggatcggggattttgagttggatcacggattgggggttggatcacggattgggggttggatcgcggattggggtttggatcgcggattgggggttggatcgcggattggggtttggataggggatttggagttggattggggatttggggctgggtgtggggcgagggggagtgaaagggtgacacggagctgccgcggctcaggagccagtggttgggggtctgagaagaactcaccaccttgaagaagttattcggctttgggagccgcaggggccggcggtccggggctccctaggccacgtctacaggggttcggggtaccgaatcggaagaaccaca

SEQ ID NO: 35104 - DNA, 2300 bp, Homo sapien
tcaggggatcgagatcatcctggctaacatggtgaaaccccatctccactaaaaatacaaaaaattagccgagtgtggtggtgggcacccgtagtcccagctatttgggatgctgaggcaggagaatggcgtgaacccgggaagcggagcttgcagcgagctgagatcgcaccactgcactccagcctgggcgacagagcaagactccatctcaaaaaaaaagttctttcagccaggcatggtggctcacgcctgtactcccagcacactgagaggctgaggcaggcaaatcatttgccttaattgatttgcccacctcgtcttcccaaagtgctgggattacaggcgtgagccgccatgcctggccagaagttcttcctagaggttctatgctgtcctagcaagaattggtaagaacagcatagaacacaaggggttgcaaatttgtgggccgtagaccaaatctgttccacaagtgacaagatgttttttaattgaggtaaaatgtgcataccataaaattagccgttttaaagcaaacaattcaatgacatttgtatattcataacgttgtgcaaccaccacctctgtcaggctccaaaacattttcctcatcccagaaggaaaccctatgcttgttaggcaatcactctgcctttctctctccccacagcctctggctctaatctgctttctgtttgtctggatttacttattataaatggcatcattaacacatgtgggctttgtgtctggtttctttcacttgccatgttttggaggtttatccatgttgtagcaggtatcatcagtgtttcattcctctttttcttttcttttctttctttttttttttgagacaggcttacgccatcatccaggctggagtgtagtggcacaatctccgttcattgcaactctgcctcctgggttcaagcaattctcctaccttagcctcccgagtagctgggattacaggctcgctccaccatgcctggctaatgtttggtgtttttggtagagatagaatttcgccatgttggccaggctggtctcaaactcctgacctcaagtgagccgcctgcctcggcctcccaaaatgctaggattacaggggtgagccaccacatcaggtctttttttttttaagatagagatggagttttgtgagttgcccaggctgttcctgaactcctggcctccaaaagtgctgggagagttcagacatgagtcatcacatggcgttcatttcttttttatggctgaataatattccactgaatggatctaccattgtttgcttacaccctcatcaattgttagtttgggctgtttccaccttttggctctttgactattgtgactagtactgccaagaacattacttgtttgaggactataattgccggatcatatggtaactctatgcttaacttttgaattagaaacggtgttttaatttttcgaatatgactcctttacgtgtctgtgtctgtttccatgtcttcctactgtcttagtaggaagctcacgactcatttgcgtaatttttctggcccctgaaggcacctgattttgctgcccctagaatactttggaggcaaaaagaaaataactctgtgcccaattcagccagagtcgtggggtaaaatcttttcacttctcaaagtactactgtggttcatccccaaaggggggaaatcaggttttccggagaggaggcggctacaattagggaggtgagggacctcacgcgcctcttccttagaggaggcgggcgaggcgaacggcggaggaggagaagcgggggcgctgtgcgctctctggggcgtgggccgcgctcggggctgcccacccctcgggaacgagccggggcgctcaaggaggcagcgacgcgaggcgcagccggtccaggtttcgcccgccaccgccgtgcggcgcctctgcgggtcagggccgggggcgcggtcggggccgggcggggcccaggttggctcgcgggtaggcggccccgccccccacatccgggggccggggccgggctgtgggcttgccgcgcgccggtgagtcaggccgggttttccctccgcctttggggcaggcgatcgagcgccgcggagcgcgtccctccctcgccaatccggctccggcgccggcgcccgcccgcgttttcccggcgcctgccgctccgccgctccgacccggcacgcagtcccggcccgagccgacgccttgcaggagggttcaaatccgcgcgggggagctgcgacgcgcaagggctgcggagccgcgggccggcg

SEQ ID NO: 35105 - DNA, 2300 bp, Homo sapien
aagttgtgcaaaggggagggaggggaaggcatggaggattcaaggggaggatggcctggaatgaggcccaaccaaaaagggagcagaagtgggcaacacagagacctggctttttctccagggctgttcctagtcccagctgaggcctgaggaggagtggggacttctctactctttccctccagagcagagggtccgggatagaaaattcaatctggggctgggtgtggtggttcatgcctgtaatcccagcaatttgggaggctgtggtgggtggatcacctgaggtcaggagtttgagaccagcctggccaacatggcaaaatcccctctctactaaaaatacaaaaattagccgggcatggtggagcatgtctgtaatctgttactcatggagctgaggcaggacaatcgctcgaagcttggaggtggaggttgcagtgaaccgagatcacaccactgcactccagcctgggcaacagagcaagacttcatctcaaaaaaagaaaaagaaaattcagtctggacctgggtttggggtcagtgcctgttccctcctccttcctaaccctcacccttcctccttagggcagatgggcagctcccatcttctccccttcccccgttccccaggacagcgaccaacacagggcggcagggtagggctggaccccctcctccgcagaactgaattctgttgaatacccagtgggcagattaagttcgggctaaggggaccagaaaggctgggacaggaaaggagttttcttttcttttcttttttttttttttgagacggagtctcgctctgtcgcctaggctggagtgcaatggcgcgatctcggctcactgcaacctccgcctctcgggttcaaacgattctcctgcctcagtctcccgagtagctaggatcatgggactacaggcgcctgccaccattcccggctaatttttgtatttttagtacagacggggtttcaccatattggacaggctggtctcgaactcctgaccttatgttccgcccgcctcagcctcccaaagtgctgggattacaggcgtgagccgcccggcccggagttttctattctttttttttgagacggagtctcgctctgtcgcccaggctggagtgcagtggcgccgtctcggctcactccgagctccgcctcccgggttcacgacattctcctgcctcagcctcccgagtggctgggactacaggcgccccccacctcgcccggccaattttttgtatttttagtagagacggggtttcaccgtgttagccaggatggtctcgatctcctgacctcctgatccgcccgcctcggcctcccaaagtgctgggattacaggcgtgagccgccgcgcccggcctggagttttctttttttttttaagcatcacttcatatttcaagagctctcagttctcctgagatttctaggctctgtccaggatccctaagcctgttcacagtcctacttgaagtttctaatctttcttttctcattaaccaaaactggagagaggaaaaagcccatcattttccctggacagcagcgcctactgggagtttcacccgcattaacatgcaaacgacaggcaaactcctagtcatccttccaaagaccctgctccacagccctgccgaggccggtgcgcacctagcccagccactgcccctcacggcccccgcgccgccctcactgagcagggcgggcagcgctgtaagcgtaaccacttggggcttggggcttctgacccgggagtcgggtgctgggttgagtgcgaggccgacgcctctgccgggtggggaacccgcccgccggcgaggagcggtcgcggccaggggcttccgccgactgggaggcccggggccgggccggagggactcggaacctggaaacgaccaggcgcgacccccagaggactacaggcgcggcttttctggccgccgcccggttcccgcgggcgactccactcggcatgcgcggcggggagcctcggcggtgaggcgcaaagccgcgggctcgtgggacggccacccctccgcaaaaccgccaatgggcgggcccgggccgccgatcgcccgccgcggcttccggttccgatgacagtggcgccggaagccggggccggggctgcggggcgaggtgagagcgggcgggcttgggagccggcaggtgcgggccgagggcgggcacagcggccggcggagctgaggcgcgcggcggggaaagctcggccggcctcccgggccccagccttctccagaacccctgctacccacgact

SEQ ID NO: 35106 - DNA, 2300 bp, Homo sapien
ttgctctcattgcccaggctggagtgcaatggcgcaatctcggttcactgcaacctccgcctcccaggttcaagagattctcctgcttcagcctcgcaagttgctgggtttacaggcccgtaccaccatgcctggctaatttttttttttttttttttggatttttagtagagacagggttttgccatgttggccaggctggtctcgaactcccgatctcaggtgatccacctgcctcagcctcccaaagtgctgggattacaggtgtgagccaccatgcccggctgttcaggaattttcataaagcattttaatttccagtccaagaaccaatccaagatcacacactgcatttagtttctcctgtctaatctttactttttttaatctgagacatttcttctgtcttcctttatcttccatgacattggtatttttgaagcattaaggccaattattttgcagaacgtctctcaatttggagttgtctgatgttttctcattacttaggttttgcatttttggcagtacttcagaagtgatttgtttctcagtgcatcacactggaagacacaagatgttgctttattgcattattgctgttgttcacttttattttggagacaagttctcactttgttgcccaggctgcagtgcagtggcacgatcttggctcactgcaggcttgacctcctgggctcaagtgatcctaccacctcagcctcagaagtagctgggaccacagcagtacactaccaggccctgctaatttttttttttttttattgtagagacagggtctccctatgctgtccaagacggtgtcgaactcctgggttcaagtgatcctcccgtgtcagcctcccaaagtgctgggattatgatccgctgcacctggcctgatcttcactttgatcacttagttaagatggtcgctgctaaggttttccactgtaaacttcctaatttttctttgtaatcactaagtagtttgtgggctgtaatcctagcactttgggaggctgaggcgggcggatcactcgagcccaggaggttgagaccaggctggtcaacatggcaaaaccacatctctactaaaaatacaaaaattagccgggcatggtggcacatgcctgtagtcccagctacttgggaggctgaggcatgagaatcgcttgaacccaggaggtggaggttgcagcgagccaagatcgcgccactgcattccagcatgggtgacaaagcgagactgtctcaaaaaaaaaaaaaaagtagtttgtggggagatactttgataccatataaatgtcctgctctttaccaaatttcagcctactagttttagtatccattaatgattgttgtgtgaattattactaagctgtctgcaacatggtgatttttcctgctttgtcattctttatacatttattagttgacattcaactgaaaagaagctttcccttctcctttcattattatcacttcacactcatattcttattttattcaataggttataatccattgcagttatttaatgttcaaattgtcttaggtctgaccagagggagtccctggttcctatgtcttttttaaaaattgagctataattcacttaccattaaactcactcttttaaagtactctgtccaggtgcagtggctcatgcctgtaatcccagcactttgggaggctgaggcaggtggatcacctaaggtcaggagttcgagaccagcctggccaacatggtgaaaccctgtctgtactaaaaaatacaaaaattagctgggcgtggtgtcatgtacctgtaatcccagctactcaagaggctgaggcaggagaatcgcttgaacccaggaggcagaggttgcagtgagccaagattaagtcactgcactccagcctgggtgacagagcaagactctgtatcaaaataaataaataaagtacaactctggatgggcatggtggcttatgtctgtaatcccagcactttgggaacttgaggcgggtagattgcttgagtccgggagtttgagaccagtctgggtaatatggtaaccctgtctaccaaaaatacaggtattagccagtctcataactcggtctcaaaataaataaatacatacatacatagatgaaaatttaaaaaataaagtccaactcagcggttttcagcatatttacagagttgtacaatcttcaccactatctaatttcagaacattttcatcacccccaaaagaaacctaacccattgactgtctctccatttcctccctctccctagcctctgg

SEQ ID NO: 35107 - DNA, 2300 bp, Homo sapien
actaagtagtttgtgggctgtaatcctagcactttgggaggctgaggcgggcggatcactcgagcccaggaggttgagaccaggctggtcaacatggcaaaaccacatctctactaaaaatacaaaaattagccgggcatggtggcacatgcctgtagtcccagctacttgggaggctgaggcatgagaatcgcttgaacccaggaggtggaggttgcagcgagccaagatcgcgccactgcattccagcatgggtgacaaagcgagactgtctcaaaaaaaaaaaaaaagtagtttgtggggagatactttgataccatataaatgtcctgctctttaccaaatttcagcctactagttttagtatccattaatgattgttgtgtgaattattactaagctgtctgcaacatggtgatttttcctgctttgtcattctttatacatttattagttgacattcaactgaaaagaagctttcccttctcctttcattattatcacttcacactcatattcttattttattcaataggttataatccattgcagttatttaatgttcaaattgtcttaggtctgaccagagggagtccctggttcctatgtcttttttaaaaattgagctataattcacttaccattaaactcactcttttaaagtactctgtccaggtgcagtggctcatgcctgtaatcccagcactttgggaggctgaggcaggtggatcacctaaggtcaggagttcgagaccagcctggccaacatggtgaaaccctgtctgtactaaaaaatacaaaaattagctgggcgtggtgtcatgtacctgtaatcccagctactcaagaggctgaggcaggagaatcgcttgaacccaggaggcagaggttgcagtgagccaagattaagtcactgcactccagcctgggtgacagagcaagactctgtatcaaaataaataaataaagtacaactctggatgggcatggtggcttatgtctgtaatcccagcactttgggaacttgaggcgggtagattgcttgagtccgggagtttgagaccagtctgggtaatatggtaaccctgtctaccaaaaatacaggtattagccagtctcataactcggtctcaaaataaataaatacatacatacatagatgaaaatttaaaaaataaagtccaactcagcggttttcagcatatttacagagttgtacaatcttcaccactatctaatttcagaacattttcatcacccccaaaagaaacctaacccattgactgtctctccatttcctccctctccctagcctctggcaaccactaatctcttttttgtctctatagatttgcctattttggacagttcatatacaaggaatcataccacatgtagccttttgtgtccggcttctttgattaatagaatgttttcaaggctcatctatgctgtagcctgtatcagcacttcattcctttctatggctgaataatagtccactgtagggatgtgccatgtttttccactagctgatggacatttgggttgtttccaccttctggctattataaatattgctgctataaatattcacttacaagtttttgtgtggacatatgtttttatttcttctggtatatccttcggagtggaactgctggatcaggtggtaactctaggtctaacctggcagttaaacagaatcctatgcatgctgtagtccatgagttgaaataaacacttgacccatagtaagtgccagatcatcttcatttcacagcaaccagtaatttcacagatgaggaaatgaaggctcccagaggtgaactggcttttcccatttgagcagttccaagtcagacagttaaaaagtggcaggacctggaagagaagctagttctttcaccctggcattcagggctgcctcctgggctacggggctggcatttagaatagagctaaggtctgctgccaaggcaggtgccccagtctgcctcctctgtgtccttattccactttctctgcagccctccaggggacccctctctcagccaccctctctctggtgatgtcacagtgctgccggaagatcaaagatacggtgcagaaactggcttcggaccataaggacattcacagcagtgtatcccgagtgggcaaagccattgacagggtgagcacgtggccggctccaggcgtggggtgggagcaccctgaagctgggatgtacaaggactcgaaggagagccagcaagagtgcccgcatcaccaggccctgtctctcctccttcgtcaga

SEQ ID NO: 35108 - DNA, 2300 bp, Homo sapien
ctcctctcaggtgctggctctcaggtcctagcccccaccagctctacactaaactggcccctttcttcccagatgggccgtctcccacaggcagcgcctgctggaactcaacagctccctggagttcaagctgcaccgactgcacttcatccgcctcttggcaggaggccccgcgaagcagctggaggccctcagctatgctcggcacttccagccctttgctcggctgcaccagcggggtgagtgcccaggcagctggggttgtgctgcctggcctgacacatgtctggatgtggtaggttacatcaggctgccagtccctgcacccatgtggggctgtctgttacacagatgcctctccccaactagaaacttctctgacccctcgtgtccaggatgaactctagactcctcctctctcacatctgccatacctttagtttatagcttcagcgcagaccacccagggtcctcgtgcctgctatgcgccacaccacactcatttagagcatgccatgcccgtcccacctgttctgcctcgtatgcctccctgacctgtgtggcctatggaaaagtcctttaagaaaaaaaaaaaggccaggcacggtggctcacgcctgtaatcccaatattttgggaggccgaggtgggcggatcatgaggtccatcttggctaacatggtaaaaccccatctctactaaaaatacaaaaaaaattagctgggcgttgtggcgggcgtttgtagtcccagctactaggctgaagcaggagaatggcatgaacccgggaggcggagcttgatcgcgccactgcactccagcctgggtgacagagtgagactccgtctcagaaaaaaaaaaaaagacttgtctgggtgcgatggctcatgcctgtaattgcagcactttgggaggccaaagcaaagggcggatcacttgagctggagaccagccttggcaacatggggaacccctgcccctgctcccatctctacaaaaaataaaataaaaaagactcagttgagcactcttcctgtcatgctagaatttccaaacctggaatctgagtctcacctatgcttacaagtagtaacctgtactaacttgtttttttagttccacctcatatttattattttaaattttatctcaaaataaatatgaaaaccaagccatgatttattatttatttttgagacaaagtctcactctgttgcccaggctggagtgcagtaagtggtgtgatcccggctcactgcaacctccacctcccaggttcaagcgattctcctgcctcagcctcccgagtagctgggattacaaatgcctgacaccggccgggcatgatggctcacacctgtaatcccagcactttgggaggctgaggcgggtggatcatgaggtcaagagatcgagaccatcctggccaacatggtgaaaccccatctctactaaaaatatgaaaaattagccgggcgtggtggcgggcacctgtagtcccagctacccgggaggctgaggtaggataatcacttgaacccgggaagcggaggctgcagtgaaccgagattgtgccactgccctccagcactccagcctggcgacagagcgagactctgtctcaaaaaaaaaaaaaaacacacaaaaaacacacacaccaaaaaaaacaagtgcctgacaccacaaccacgtctggctaactttatatattttttattagagacggggtttcaccatgttggccaggctggcctcaaactcctggcctcatgtgatgcacccaccttggcctcccaaagtgctgggattataggcatgagccaccacgcccggccccaaaacatgactgaagttttagctagatactgctgcctgttgaaagctcttaacctggggttgctctaaatggagattagtgtggagacaccagtgccaacctgaggacttatttgatccttgatgcagtgggggaggaaagagaactggaaaagaactgtcctcattcctgattctgtgttagtaatgcctgttctcatcctgcagaagcagcctggacctccacctccccagtggattttacagtcaaatttgcctgagggcattttcatccctgctcagtctcctcaggggcttgggagccaccgggctcagcatattgtgctgtgctgcacagtcctgctgcccgcttgggggtggacccagagccctgcaccccctgagctgccccctctggttgccttgtagagatccaggtgatgatgggcagcctggtgtacctgcggctgggcttggagaagtca

SEQ ID NO: 35109 - DNA, 2300 bp, Homo sapien
aacactgtggttttctgaagacatatttgttctcagcacttcattgtcttatggctcaaaatgcagacacgtgtgacctgggccaagctgaggttcctacactttcactatttacgtatccttttgagctgaagtcaaatgtcaaatcacaggtatgggtaaagtctgggcttggagacaagtggacctgggttcaaatccagctttgtgtgagctgtaccaaactattcatctttatgtgtgtcagtaaattgtgaatataaagttatatattcctggtaaaaggatggtaaagtctttacctttaccatagaggtattttttggtgagcactgaatgagatattgtatataatatgctcgccacataaatgttaactttctttttccttccatgtaagagctgaagggacttcacaaccgaggctctgagtgaggtcagtcaagcgagcccatttgtttgaatttgtttgaactgggttctcaggagtgaaattctccatcactctgctggacagagtgatttttagtagagacgggggtttcaccgtgttagccaggatggtctcgatctcctgacctcatgatctgcccgcctcggcctcccaaagtgctgggattacaggcaccgcgcccagcctatttgtttttatttaatgcaaaacaaaatttattgcactttagttcagagttacaaggtttttgttgttgttgttttgttttagagacaagattttcctgggtggcccagactggagtgcagtggctattcacaggtgcagtcatggctcactgaagcctctaacttctgggctcaagcgagccccctctcagcctcccgggtagctggaaccacaggcacgagtcaccacacccgggaaaggccaatttttaagttggtttaactgacctgtgttcccacccacaactaccggaacacttctaagtttctacttactggcctgttccagcaacacaaaaatggcaggcctgccacatcaggatcaaaggtaattagtattacaaattagtaatttgcagcgattatctaattaatatccatccagagttccaaaatatagtggaagaggctaatcagagataccaagatccactggatctcggcctgccaccgccccccacgccctggcagctctgtccctttaccttctacagacccgtccaaagggtagctcctcatagctctcaccctgcacggcagggagctcagtccccaaagccttccctccgctgttcccggcttcgctggagccgtccttccctcagccccggctggcttctcggctaggccctctgcatgtgtagcgtcaggcaatggtaagaactgcgggaaaatagcgggtgaagggatgctggtttggagagagaggggacggcaattttagataaaatcaccagggaaacctctcccatgggaaacactgaaacggaaccctgcgggatgagagtgagccacacgctatctgtggaaaagcggtgcagacgcaggtcagtggggtcatcccttgctctgtatctttcacacctgcgcagccgggtccaggggtcagaaaacaaagaaaaattatgcaagaaaggaggcagccttaggccgggcgcggtggctcacgcctgtaatcccagcactttgggaggccgaggcgggcggatcgcctgaggtcaggagttcaagaccagcctgaccaacatggagaacccctgtctctagtaaaaatacaaaattatctgggcgtggtggcgcatgcctgcaatcccagctactcgggaggctgaagtaggagaatcgcttgaacccgggaggcggaggttgcagtgagtcgagattgcgccactgtaccccagcctgggcaataagagcgaaactctgcctcaaaaaagaaaaaaaacgaggcagcctttccagcacccagagccccgccctctccggccccgattcccagggctccgccccttgcctcacattccctccgctccgccctaatcggttccgcccagtcccttggtccggggatggccccgccttaaggaccatgactccgcccctctccgctctccgtagttacgaagctgggcgtcaacgattgggctgagtcggagacttcctttcctgattggccgtgttgtacggcggcttctcgcgcagctgatgacctggaagtgatgcctaaagctgtggaccgcgtgggctcgcctccctgggactaggtttcagcggccgctgcgatgaccaaaataaaggcagatcccgacgggcccgaggctcaggcggaggcgtgttcc

SEQ ID NO: 35110 - DNA, 2300 bp, Homo sapien
gaggcacactttctcaggacctcttgagactgtaccccaggtcatggtcactcatatcagctgagaataaacttctttttttttttttttttttgagatggagtctcgctctgtcacccaggctggagtgcagtggcgcaagctctgcctcccgggttcacgccagagaataaacttctttaaacattttacagagcttttttttttttttttttttttttttggtcaacatagaccattcacctggccccttaactccaacagaaactccagatttgcctttggaatcaggaggctgagcttcctgacttcccaactctgggatttagaacaagtcactttccctattgaaacctctgttttcttcatctgggaatggggcaggcactcacataggtttgaggaagccacagggctggtcactcttcacttgtgtccagcgtcccatccacctccctggcatgaccttgcctccccctgcagcactggcccatctagggctccccacacctacatatctggccctgatgcccctcgccaatctctgcccccactgtaccaaagatggagccccgcatggcgactcctacattgctctgggggcacagacctccatctgcctggaacagcctcccaccttcctcatcaagtcctgttttcttacaggaagacacccacatgccccagccatcccatccccaaggactggccaagcagttccagcacacccctcgggtggtctcagtgtgtgcccttctccagttcctccgggtctgggcctgggtcagccctttacacacacggggttcccaacaagtagcttccagatggcctggtgaggctgcagggcaaatttccaggaccatgccccacttctccactccatcccccaaggacaaaagcctcctcaattccgacatcctaatcctgctgcccctgtctccacagatcctccccacagagaatccctgcctatcctgcccaggccctctgcttgcttctgccttcccagaccggctgcagtgatcatttcacccagccatggtcactttcaccatattggccaggctggtcttgaactcctgacctcgtgatctgcccacctcggcctcccaaagtgctgggattacaggtgtgagcagccaccgtacctggcttgacttcaagtctttattctattttattttatcttattatttttttctggagacggaatttcgctcttgtcgcccaggctggaatgtaatgatgcgatcttggctcactgcaacttctgcctcctgggttcaagcagttctccatttcagcctcccgaaaagctgggattacaggcgtgcaccaccacacctggctaaattttatattattagtagagatggggtttcaccatgttggccaggccagtctcaaactcctgacctcatgtgatccacccaccttggcctcccaaagtgctgggattataggcatgagccaccgagcctggcctattttattttattattttattttatttttgtgcctggtcgcaaatttacattggactggttaggctcaagcgtctggtacacacattttcctttgtcaggtcttgcaaataaaactttgctcctagggaagtggtccttctaaaacggaccttggttttggctgccagatgagaattgcttccagcaatgaagaatgctgtccaaggagttcaagaccacccggagaaacacagtgaaaccttgtctctaaaagaaattgttttaggccggaggcagtggctcacgcctgtagtcccagcactttgggaggccaaggtaagaggatcacctgaagtcaggagtttgagaccagcctggccaacatggggaaaccccgcctctactaaaaatacaaaaattacccaggtgtggtggcgggcgcctgtaatcccagctactcaggaggctgaggcaggagaatcacttgaacccgcgaggcagaggttgcagtgagccgagatcgcgccactgcactccagcctgggcgacagagcaagactccgtctcaaaaaaaaaaaaaaaaaaaaattgtgggggaggggtgcggaggttggaggcggcagtgtccgctgcaacggttggggctgcgcgtgagaaggtggcggtgtaggcacctgtgctcggggaaggctggcggcggcggccgggccatggccagagaccccctcctctgggctccctgaagtcctggggagccgtgacccatgggatcgtcgagcagccgggtgctgggccagccgaggcgagcccttgcccagcaggaacagggtg

SEQ ID NO: 35111 - DNA, 2300 bp, Homo sapien
gtgatccacctgagatcaggagttcaagaccagcctggtcaacatggtaaaaccccatctctactaaaaatacaaaaattagcccggcatggtggaacacacctgcaatcccagctactcaggaggctgaggcaggagaatcgctagaacctgggaggtggaggttgctgtgagctgagatggctccactgtactccagcctgggcgacagagcgagacccccgtctcaaagaaaaaaaaaacctggtgatctagctgggcaacatagggagaccctgtgtttacaaaaaattcgcttggcgtggtggccacgtttctggttccagctacttgggaggctgaggcaggaggctcatttgagcccgggaggttgaagctgcagtaagccgtgatcgtgccactggactccagcctgggttacagaacaaaaccttgtgtcaaaaaataaaataaataaaattggtgaccataccaccttactttggttgttaagatacagaagagaaaatggaatgcccagcccaccacactggtcctggctgcaggaatccactggaaacgctagttccttgtgttctgggttgctatttggtaacctgcaggctccagaggttgtaatcctgcttgccttggggcccaccacccatatgattaaaaggaataacgggattaccgaggcctttaaaattttgtggtcaaggagataatataaaggagttttgtgtattaggaagagaacaacgcccccaccctgtcctttacctcgtgagttcacgagtggtgtatttgttttgttttgtttttgagacgatgtctcgctctgtcgcccaggctggagtgcagtggcgagatctcggctcactgcaagctccgcctcccgggttcacgccattctcctgcctcagcctcccggtaactgggactacaggcgcccaccaccacgcccggctaatttttttgtatttttagtagagacggggtttcaccatgttcgccaggatggtctcgatctcctgacctcgtgatccgcccgcctggacctcccaaagtgctgggagtacaggcgggagccaccgcgcccggcctccgtatttgtttaaaaaaaaaaaaaaaaaaaaaaaggccgggcgcggtggctcacgcctgtaatcccagtactttgggaggcccaggcgggcggatcacgaggtcaggagatcgagaccatcctggccaacatggtgaaaccccgtctctactaaaaaaacaaaaaaattagccgggcgtggtggcgcatgcctgtaatcccagctactcgggaggctgagacaggagaatcgcttgaacccgggaggcggaggttgcggtgagccgagatcgcgccattgcactccagtctgggcgacaagagcaagactccatcaaaaaaaaaaaaataataaaaaggaagaaaaagaaagacaaatgatttacaggaaaaaatttaagtaaacaaaagtacaaatgcgatgtcaatcgttcaggtggtgccaggggacagagaaccggggaacaccaaggtctcatcgtccctgcagagcatctctgggggaggcgacggacagggcgcgagcgcggggcttggagggcaccaaggtccagggggatggcgggttcagtcccaatccctccgacccgtgctgagggccttggaggaccccactcgcccaacctcggaagcccgggttctgccacttccagccacgcgtccttgggctgcgaaactttctccagcccagtttcctcttttgggacatggggaggcggaggctgccaatgctgggatggagtcctcgagagcaagagaccagcggcctcgacgagcttacaatccgattaggccctcccaccgatgtgctgtagctgcccgccgccctggacccggcgccgtcccgcccggcttcgggagccctccgtagcggccggactcgcgcgcgttctaaaatgaggacaaagcccgcccaggtctagagcgcgcgcgccgtggcggccaatgggacgctgaagctaggttgagtgacggacttgagcagccaatgagtgtgcagtttgttgcgatgtggcacccggctccggcattataaagggcgccacgagtcggcattgtcaggcggcggcaccgcgcgggacggagcttggctgttggtcggtgggttcccgtgcggcggcggccaaggaggaggagacacagttggagcagctccgtgggctgactggggcgaggcctcagcagcgcgagcttgagtgcggccgagcctgcggcgccttcccctgcgggtggg

SEQ ID NO: 35112 - DNA, 2300 bp, Homo sapien
gctaccggggattaggggttcaacacataaattgggggtgggggggtgcagctcagcccataaacatgccccctctggctcgctctcccagggcatccatcgtagcacttagaaaaatgatcacttcttcttttttggctttgtggtggcgtgtgtgtgtgtgtatttgtatatacacacatatatatataaatacacagacacacatatatacaaacacacgcattcattttcgtccacagttcctggctcataactcccacagcccttgttacactcttttgttacaacattgggtgtgtcaggcctcaggagacaatcactctaacctcctgcccttccttttacctgcccaagacaggactctaatcttccctacctttctgatggtgggtcataaaactcattccagagacggtcccaccccatatcctgctagaaggaatgctgctgtcatgaagcttccataaaaaccaaggggactggattcagagagcttccagataactgaacatacagaggttctagaagggtggtgcgcccagggagggcacaggaagctccatgcccttccttcatacctcaccctatgcatctctttatctgtatcttttataatatcctttataataaaccagtaaatgtatttcccttagttttgtgagccactccagcaaattgaacctacagagggaattgtgggaacctcaacttgaagccagtcggtcagaagttccaaaggtcacccgggcgcggtggttcacgcctgtaatcccagcactttgggaggccgaggcgggtggatcaggagtttgagaccagcctagccaacatggtgaaaccctgtctttactgaaaatacgaaaaattagctgggcatcgtggtgggcgcctgtaatcccagctacttgggaggctgaagcaggagaattgcttgagcctgagaggcagaggctgcagtgagctgagatcgcgccactgcactccagcccgggcaacagagtgagactgtctcaaaaaaaaaaaaaaaaagaaattccaaaggtggccagcatggtggctcatgcctgtaattccagtactttgaggccgaggtgggaggaatgcttgagcccccagtctgggcaatatagtgagaccccatctctgcaaaaaaagaagttccagaggcccagacttgctactggtgcccagggggctgtggggcagcttgggcattgagccctcatgctgtgggatctgatgctgtctctaggtagatagtgttggaattgaattggaggacacccaactggtgtccgctgcagaactgattgcttgcctggtggtggggagaaatccttacatattttttggagtcacagaagtcttctgtgttgattgttgtagtgtgaaagcagaggaaaaacaatggtttgggttttttcaaaacaactttcatgacacatacgagaatgtaaattccagaagggccaaggccatgtctgttttacctactctttttcccccagcttctagtacataggaggcatttgatatataccaaacaaacaagcaagtgactgactagttgatgtcctgagaatcttcttgctgctggaagggtcctcctgccctcagcatttctctctgggaagctcttagactactctctcagtcatgcccaccttttcggtcataggtcagaagccaatgacctggccctgaggctggctcgccactacacgggacaccaggacgtggtggtattagatcagtaagtgcaactcacagccctaccgttcccagaagcctggcccacaggcttcttggtgatccgtgagactgactctgggtgccttaggcagggaggataaggggcctgggctactgaagacaagtgtggcaggcagaggaccaggcctgagacctcccagaggctctgtcaccctgggccaccattctgggaaggcagctctggggagcagagtgcgctttgtaagagactcaaaggtggtcccacaacattgtacatgttcaaactactccagcagtagctcccatgaattgagtatgtgatgtgcacaaagccgaggctgacaatatcaacacatttaagattcattataaaccagaaggaggaaatcccacctcatttcacagcagagaaaacaaccgagagagattaaatgatgagctgctgtcacatagccagtcagcagtcttgcaagaattgttgctgactccaaagcttgtgctctttcccagcccaagaacttgggggctctgtcaggaaagttggcctcccttgtgtgtcttca

SEQ ID NO: 35113 - DNA, 2300 bp, Homo sapien
tcttggtattacatagcatccatgtgttggtgactcacaaatttttttgagcccagacatgtcccatgtgttccaactcgaggttctaactgcccctgtgacatctgacaaacatctccagcttcatgtgttcaaaagggcaagggttgattggaccatggtactgttctccctcacctgcccaagaaggctatccccactcacccccgctcatcttgccttgtaaagggcatcaccacctatatctgctccaggcagaaaccacacgctccccagtcctgcatcaatcctgcctcctccatctccatgatgcctcttaactccctccacctctccatctccatggccaccacctgctctcacctggcgtcctcctccttggtcttctccttctacttttattcttgtcaactccattagacacagccagaggccacctcctaaaataggagctgacttatgtcccttttctcattaaaactcttcagtggcttcacatggcactgagaagaaaactcaggctccttcccagccctgtgcacatgtcccctgcatgtctccccacttcctctcctaccctgccctccttaggccctggcctccctcatcttctcctggttcccggagcacactgagctcttttccttcacaaggccttggagcatgctgctccatctgcctggaaacctctccctcaagactcagtacatgagtcacctccccatagacgcttcccctgaccctctgtgttggtctgctctggctctcataagaaaataccagagactgagtggcttaaacaaaagacatttattttctcacagtcctggaggctggaagtccaagaccaaggtgttcgcagggttggtttcttctaaggcctctctccttggcttggagatggccctggttggtcttctgagtgcaggtgtccctggtgtctctttgtgtgtccagattttctcttataaggacactggtgagattggatgaggggccccctgacggcctcatcttaatgtaatcacctctcttatctccatatccattcacatacgggccattgcgagctaccggggattaggggttcaacacataaattgggggtgggggggtgcagctcagcccataaacatgccccctctggctcgctctcccagggcatccatcgtagcacttagaaaaatgatcacttcttcttttttggctttgtggtggcgtgtgtgtgtgtgtatttgtatatacacacatatatatataaatacacagacacacatatatacaaacacacgcattcattttcgtccacagttcctggctcataactcccacagcccttgttacactcttttgttacaacattgggtgtgtcaggcctcaggagacaatcactctaacctcctgcccttccttttacctgcccaagacaggactctaatcttccctacctttctgatggtgggtcataaaactcattccagagacggtcccaccccatatcctgctagaaggaatgctgctgtcatgaagcttccataaaaaccaaggggactggattcagagagcttccagataactgaacatacagaggttctagaagggtggtgcgcccagggagggcacaggaagctccatgcccttccttcatacctcaccctatgcatctctttatctgtatcttttataatatcctttataataaaccagtaaatgtatttcccttagttttgtgagccactccagcaaattgaacctacagagggaattgtgggaacctcaacttgaagccagtcggtcagaagttccaaaggtcacccgggcgcggtggttcacgcctgtaatcccagcactttgggaggccgaggcgggtggatcaggagtttgagaccagcctagccaacatggtgaaaccctgtctttactgaaaatacgaaaaattagctgggcatcgtggtgggcgcctgtaatcccagctacttgggaggctgaagcaggagaattgcttgagcctgagaggcagaggctgcagtgagctgagatcgcgccactgcactccagcccgggcaacagagtgagactgtctcaaaaaaaaaaaaaaaaagaaattccaaaggtggccagcatggtggctcatgcctgtaattccagtactttgaggccgaggtgggaggaatgcttgagcccccagtctgggcaatatagtgagaccccatctctgcaaaaaaagaagttccagaggcccagacttgctactggtgcccagggggctgtggggcagcttgggcattgagccctcatgc

SEQ ID NO: 35114 - DNA, 2300 bp, Homo sapien
gcaggggtcagcaatctaggtctgtgagtctagttccacttgggactgatgatgagctcacaaagtggcagatggcccagctgtgaccagcaacgtagcacagtgctggccaagtgctggggtcatggcagtgcttcagccccattggccatctcaggtgctaggcaagggagctgaagtaggaattcagtcatcttgatgaggctgccagagctgatggaaagaaagggagtctgagactcagcaggcacatggaagatgaataaagttgaggttaaaaaaaaaaaaaaagcagagactctagtcttagactgcttgggctcaaatccctgtcccctacttactaacttgtgatctcgggcaagttacttaattctcagtgcctcagtttgcttatctgtgaaagacataatgatactaggtacccactttaaggtgtttggagaattaagtgtgttaatttatgtagcttgctctgaatgtgcctggcacatggtgagctctcagtacatattcactgttattatccttggcctttgacaatcaagattaccaccagcccccttggctggtgaagtgaaaccagttgacagtcaccccccaccccacctttgtcatacaagcctcaaaaggccttccagcctgggcaacataatgagaccttgtctctaccaaaaaaaaacttaaaaattagccaggcatggtgactggtgtctatagccccacctgctcaggaggctgaggtgggaggaccacttgagcccaggagtgtgaggatgcagtgaatgccatgatcacaccatacactccagcctgggtgacagagtaaggccctgttaaaaaaaaaaaaaaaagtcctccttaaagacatgggctttctagacagggttcttctgctgaagcggctttccttctgccagaatctcaggaactcctggatctgcctttccagaaccagcttctctctccctgctctgccttcagactgccctctttctacctctccctctagaactacatctcttctggctgggtttatagcttggggctgggggaggcccagtgggactggctgagtggagccagccgtgtgacggaggcggccctcttccagttgggcactgccaccctctcgtggtccaagcagcacatgagcagaaccaggtgctcaacaccaacagccggtacctgcatgacaacatcgtggactatgcgcagaggctgtcagagaccctgccggagcagctctgtgtgttctatttcctgaattctgggtaagtggactgtggccagcccccgggaagagggtgagacggtaacaaagacagtcactcacatgggcccagtgtagtgtagctgaccgagtgtggactcggagaggcagcccccactgcaccaggctcctgagattcccggctgtaggccctgatgctttctctgttggatccagtttccttgtctcttattgaaggatgttattacctcctttctaggatcattgctggagcttagtgaggtaatatgttcctttatttctgccttaaggatacagccaaaatccctgcctgtgggttgctcagtaaggaaggaaaacatcaagtgattcttcaaagaaatacagaattgcaaggagggctctggaggaagtgtacagggtatcatgaggcctagaaaaagtgaggggacctgacctgggggttcagggaaaccttccctgaggaagggctgttaagctcagagctgactaggagataactagaagaggaggaaggaagggtgctgccactgcatcagaagtctcgtcaaggctgggcacgatggctcatgcctgtaatcccagcacttcgggagatcgaggtgggcggatcacctgaggtcgggagtttgagaccagcccggccaacagggcgaaaccccgtctctactaaaaatacacaaaatttagctgggcgtggtggtgggtgcctgtaatcccaactactcaggaggctggggcaggagaatcgcttgaaccgggaggcggaggttgcagtgagccaaaattgcaccactgcactgcagtctgcaggacagagagaggctctatctcaaaaaaaaaaaaaaaaaaaaatagtctcatcaaaactcttgtcaaggttggtcaccacacagaactgcctgtggaaaggccctgtagcaggaaaggatatggtacccagcacacttgaggaaccgaaagaagtccacgaagggaaagcagaggctgtgagctgttgggaggcaagcagggcgcatcacctagggccttctccgccaagtgg

SEQ ID NO: 35115 - DNA, 2300 bp, Homo sapien
ttttatagatgaatgtgaaggggacttaccaggtctctttcctcctggtccctaggagaccactaggaatacatgggatgcttctggttagcacaatgattgcaggacacctgggcattcaggggacagggccagggatagcaaacacctaaaatgcataggacagtcctacccagtgacaaatcatctcaacaagaatcccggtgccaaccctgttgagaaacaccatgccctgggttcaaatcctgactcagccacttccatcccctaccctcttggactccaacattgcctagagggccaggcatgaaataaaggacagatgagtgcctggcacagggccagagacaaggagtgggcttttctgagcaggaagaaggtgaggcctcctggtgttctgtgccatgctataagatactcctggcccaggaaatggctcaacctggtctgacctccaactatatcacctcttgacccaggagcaggtgagatgttagccgggcccagctacagccttctcaccctctgccttaaagcaggaaaagcccctgagccaacctgattcctctgagctgcacggggccacagctgtggctggagtttgggctgcaagacagggctgaaaggcggggcccaaataggactcacacacacacaaatacacacacacacacacggtctgtgaggtcttgatcctcagaaacgaagtacaggctgggtatggtggcgtgcacctgtagtagcaggtacttgagaggctgagatgggaggatcacatgatcccagggaggtagagactgcaatgctgcactccagcctgaacaacagaataagaccctttctttaaaaaaaaaaaaaaatacaggccacaagcagttaacctcgcagttaatttgggaagaattttttccaaaaatcatgtaaaatattcaattcagctttacagttaaaaataagaaattccattcttttagggaagatgaaaaagtcctgttgcatggatggtggtgatggctgcacgacgatgtgaatgtacttttgccactgaattgtatccttaaaaatggttaaaatggtaaaattttgttatgtatattttacacaataaagaaaaaagaaactccaaatgttctttaataaatgccttaagcggccgggtgcggtggctcacccggcctgtaatcccagcactctgggaggccgaggcaggcagatcatctgaggtcaagagttcaataaatgccttatgcatcttacaactgtattgggaagagaagaagaaatcagcaatgagggagtgaagcagaggcctgggaatcatgatgtggacagaaagaagggacaatcaggagcctcccctgcacctgctgcagtcccaggcccgtgttccagggttcttcaaggcagaaagccccagtgcctcaccccaggagggggcttttctctcatatcccagccccttgggaggctttttcttctcactccctgggctgggagtcaagaagacctcagtaggagtccagcctctgcagccttgctgcgtgtctgacaacaaaaccctttccctttctgggcttcagggtcaccgacatgtaccacaaggaggattcccaacctctcttcttgcccaaacgctgcatgattctctcagcgacgatacagctcgtccggttcaccctgcctagattctagcaggaactatggtgccctgaaggtcaagcccatggtgatctccttggtcagccccagaagggaccctgggctctccttctgctcttcctgctgccccttcatggggctgggaaaacctaggacctgcttctcccaccctgaggcccctactgtgtaccaggcccgggtaaggtaccagtcacatactcgcacttaggcctcacagttcatcccattttatgcacaaggcgactcaaagactgagtctggcccagagaaggcctgcaggagctccgagccccgcctgggcgccgggagcaggggcggggtcgtccgggaccctttcccggaagggaggccgcaggggcctgcggggcggggcctgcggggcgaggcccggggcgcgtcccggaaccagagacggggcagcgctcgagttcctgcgcgggactgccaaggcacgaccacgggccggaaggctgccaggcccagtgggcaagcgaagaaatgaaccaccgcaacgcgggcgcttcggggcggggccgagtgcgaacctgagccccaaatcccgacccaggcaggggcggggcccggagcggggccttggaggcccagcccgcgcggcgacg

SEQ ID NO: 35116 - DNA, 2300 bp, Homo sapien
ttgactaattaatgtcgtaagttatattaacaaattttataatatagagccatccttgcaatcctagaataaatactacttggatcacatgtattattcttctagtctgtgtttaaatcaaatttgctaatgttttgtttaggatattaggtactagcactagccaggcaatgttttttttctcagaaataaatagcaagtaacatttattgaacacacgtgatgtaccagagactttactaagtgctgtgtatacattgtgtagcttaatcctcacatgaggtaagctactgtattatatttatatttccccatttcacctacggggaaaactaaagcagaaagggcttaaagaacttgtagtgtgggtttttttatttgtttgttttgttttgttttcacaaaaagtctcactctgtcgcccaggttggagtgcagtggcgccatctcagctcactgcaacctctacctctcaggttcaagcaattctcctgcctcagcctcctgagtagctgggattacagatgtacaccaccacacctggctaattttttgcatttttagtagagacggcttttcaccatcttggccaggctggtttcgaactcctgatctcagatgatctgcctgccttggcctcccaaagtgctgggattacagctgtaagccaccacacccagtcttgtcctgtgttttgccactaaagtgcactgtctcaccatctcatgtcatttgcctctcattttgaaaataagagacacagaggaaaactctaatacaaaactacacatatccaaagtagaagttttaggaggagagaacagagaaaaacaaatatgaaagaaataatcaacagagttccctgagtcttcagatcaaaaggcctcactgaatatttggcaagattaataaaacagaactacctagatatttgggggggatgggatttgttgacattttctttatatcttgtttgtttacttttttattttttattgagacagaatcttgctctgtaaccccggccgtggtgcaatcacagcttactgcagccttgacctcctgggctcaagggatcctcccaccacaacctcccaagtagctgggactacagacaggaatgtgccaccacacctggctaatttttttattttttgtagaggcagggtttcaccatgttgcctgggttggtctcaatctcccaggctcaagcgatccacctgcctcagcctcccaaagtgttaggattacaggcgtgagcctctgtgcccagcccattttctttatatcttaacataatatatttttataagtggccatatgttagatgacagcatagttcaaaatcagaaattacataggtcccattatttaaccattagggtatacaatcaggaataactaataaaaaaaaaatgcttagaaattcaaaaataaggccgggctcggtggctgacgcctgtaatcccagcaatttgggaggctgaggcaggcggatcacttgaggtcaggagtttgaaaccagtctggccaacatggtgaaaccccgtctgtacgaaaaaaaaaaatagctgggcatggtggcgagcgcctgtaatcccagctacttgggaggctgaggcacaagaatcacttgaacctgggaggcagagattgcagtgagccgagatcgtgcctctgcactccagcctgggcaacagagcaagactccatctcaaaaaagaaacaaaaaacaacaaaaaatttacagaactggacatccccagaagaagaagattttcgtttttcgtaacttttgaaaactctggccagaatctgaacaaagaggagctgagtggctgcaagacatttggcctttgtgtgtctggtcttgaatcaccttccagagtagaagtcgttcggatccggttaggaagagcgctcgaggctctgaagttgcagctcactgagaaagtagggttcgtttcctgccttgaaccaaagtggcacatggtaagtgtcttcacatgggttctgccgcagtgactttaatgggtttcagggaaacgctgtaggtgggtggggtgaggacgtgcaggtgcttcctcccactgaggactgcaggccacagagctcaaatgaaggcagtgggacagcgagaccccactgggaccacacagatgcacaagctgcttcaaacctttcagggcccttaaattcccagcaactaaaaggaaacaggccgcctggggtgctggaaaccgccggcctggagtcagccgaaggttcggtgagaccgtgggaggccaccctttggtggc

SEQ ID NO: 35117 - DNA, 2300 bp, Homo sapien
tttctatgtcaatctgtatttcctcagaacaaaaccacttaaggatgtgatcaaacatctggtgaagtgttcaagactagtgccccgacagatcgttaataaacgtatcctctgaccatgtcatgaatgcttttctaaaaaccaggatttccctgattccctgagctcttgccgcccttcccccagacttcaagttctccttcccagtacttctagaagggaacttgcccaaagtctctggtctttttctcagaaactcatcctttatttacttttagagtcaggacttgtttgcatatgtaaaaccaggaccatattgtttgcagatgctgggggtgctgccagataattgaatgtaaaatgctgaggcttttaagtcatttttacaaacctggacacaaaggaatattttcttaggattaaaaaaaaaaagagcatgaagtaaagattgtgagattgggtttctaattcaaacatttcactttgtattcttagtagtcaggatacagaaagtgaggggcctggaggtgggggagaggtggggtccgggagagaaaactttacagattcaccatctaattgagagaaacaaaagcacaaaaggagttaggataaatgaccagcacaatcccagtaacctgtgatcccgccgctagcattaacagtacctagctttttatattaaggtgagagtagctcaaaagtaactgtgtttcctatcagtgttgataaaatccttctcccccttcagggagaggttcagatgtgatagcagtagcccaagtgtgacagcagttgttaaaagtgaattgtttttggcatgaaatgcttttgtttaaaaaatgaaatcagtgtggaagtcctttctgtcctgtctagcactgataaaaacagatgagagtttcttacacaggttgactggcttaaactaaaatgttgggtttcttctccaagtacgttttgaaatctgccttaatatctgcgaatacaatggggaaaagcgtgagttctggctgggcgcggtgactcaacgtctgtaatcccacactttgagaggccaaggcaggaggattgcttgagcccaggaatttgggaccagcctgggcaacatagtgaaaccccgtctctacaaaaaatttaaaaattagctgggtgtggtggtaccttcgtgtatactcagctactcaggaggctgaagtgggaggattgcttgagcctgagaggttgaggctgcagtgagcggagatggtgccactgcattccagcctggatgacagagtgagaccctgtctcaaaaaaaaaaaaaaaaaaaaaaagtgagttctgaggtccggctcaagggtgcagcttttgcgtgggccccccattcaactgggacaggtgtggccagtgtgctccattctgcgcagaagcctcagcccctcatggactccactccaggcagccctgctgggagtggggattagtaggggtggtgtctgctgcgcctgggtggagcagctctcactcacaggctgcggggggcctttggaagctgggggctggcccaggctgctcacaagggtcctgtgggacagctgggcagctccatccaaagcagcagggagtggcaggtccagtccctgcaggaagctggaagcctggcatccagaggcctagccaggttccgatttacagggcaagtcaaggacttgcagagtcagggctggggagtgcagtgatgatggaggagtgagtgcgcctaaaggcaccccctggagtaccctctggctgccctggtattgcttttgagaggtgaagccagctggacttcctgggtgcagtggggacttggagaacttttcttacaagaggtttgtaaaatgcaccaatcagtgctctgtaaaaatgcaccaatcagtgctctgtagctagctagaggtttgtaaaatgcaccaatcagtgctctgtaaaaatgcaccaaacagcgctctgtagctagctagaggtttgtaaaatggaccaatcagcattctgtaaagtggaccaatcagcactctgtaaagtggaccaatcagcaggacatgggcggggacaaataacggaataaaagcccgcaccccccccaccaccagccagcggcagcaacctgcgtgggtccctcaccttgtgggagctttgttcttttgctcttcacaataaatctccttgctgctcactctttgtgtcagtgtcatctttaagagctgtaacactcaccaggaaggtaggcggctccattctttttttttttttttttctttttttatttgagacggagt

SEQ ID NO: 35118 - DNA, 2300 bp, Homo sapien
gcaaaccattggtccttgcaggaaggagggaatccaaagtagctgttttgccaccacgtggccagttagtctgcctgaggagtaccttgtttagtctattgctgacaggttagccattcataggcagcagtagcgggattggtgtaagtgctgtctacctgttaggtgatgctacacacgataggttagtggatattcttttattccccctcaagatctgcccttcttccttctgcctctgctctctgccctctaggaggctggcccctgccctggaggtttggtcattggaaggccccagtagatcagagagcaggagagagcagttgagtatttattctgtgagctccctccctttcaagccatggctttgcagaggctgttccccttaaccaagggccacaggtgctgtggagcagccctcttctatagctccaagttccccagggttcccagttagggatggtaatggcctcccactgtcaatacccgcagagtgctgcttcggcctcccctgctggcccctctgatctccactttgtgaagtggctctacattcaggctgtcttgagtcaccctctctgaggatgccatctattcttccaggaccctaatggacacaagtaagtcattttctttttcgccttttagaatgagttgcagacagtatttccatcttaattcagccgccccaattccctgattaatcttgtgggccaccttaaattgggcagtctgggaagatcttttagaagcagtgaggttgaggaccttgacctggaggatgaggaggggcttgccgtttaacgatctgagagcaggaatgcaggtagtgaggtggtaggcaagggcagaggcccaggggccagtgagcttggctttttcaatacacagaagcttcaggaacatggcaaacaatacatgcagtaacattaacataggtaggtggtgtgcagtttatgtgcctgtaagaaatgtagtgctgacttgtaagagggtgttggcctcttttcagaatgaggccaacttttcattctattgggcatacaccagactttagcacagagccaagtctatcaaccataacccccggccatctcaggggttcccctctgaattaagggaaggagatggaacatgttagccagaggcactcaacagttctaaaaggtgagtatccacagaaatgagacaaccagaagatatccagagtgagagggaagatggatataacgttatttttcttaaaaaaaaatggttggggggttactcaaatcacaaagatctgaactgctggtttgttgtttcatttaggtattacaggagttagcgaaagagttacttgggacccatttaggacatgaatatgcctggtaggaatctgaacccagcctgacttccagcagttcttccctttcctgccaagacttgttagtgccactcattctgttctctggacccaggctgtacgccacagccttcttgcctcagccctgtgatttaaatttgcagcagaatcgcagtacaggttaagtgtggtgcatactagatcataatttttggccaagttgtgcgtctaatacagaattaagtcatcagttgaacaagacttgaagttcattttctgaatctttcccattcgttatagtctcagttttctcaaaagccctctccaggccagaaacagtcttaccatttttgtttcccgcaccgaagtccggcagctaagaactcgtgagaagattctaaggggcgtatttctgtttggcgcaatctcgaccctgcctctctaaatgtgagtgcgcagaggtcgctttccgccacgaagcggcgctaatccaccaccgaggacagacccactcagttttttgcaggatttgaagttttgaacttttacaagtgtcagaaaggtaattcacaagtttagaggaatgtgctaaggcacgagtggtgggtgctccagccaggggtgggctgcagaaggggcgcggtgtcgccgggctcccctccgacctctggggtccacagtgcgggcttgggctggggaagcctcagaggtgcgtgcgggggcgggtgccggcgcccgggctaggtgagggcagaggtgcgcgctgcgcgtgggatcagcccggcgccgacgggtggctccgaggagctcgctccttcctcgcccccgccccctcgccgcgcggggccagcccggccgctcctcccctgggtgggtccctgctccttttctggcagggtctatttgcatagaggaaactgcccaaagtggccgctgtggaggagctggctgc

SEQ ID NO: 35119 - DNA, 2300 bp, Homo sapien
acaaatatttactgggttctaggcctgagataccaaagacaatataaatcaggtccttgtctccaaactcagcacaaagccacagagagtgactaggggcaccatagtgctgcatcacatagcatagaggtgctagtcattctcagcttccttctgatcactacacacttttaaacattagaccttttggtggcatacaaattaaaacactaaagcgagatgaatgtaattacaaagcagactctactattgggtaacagtgtgtgtgacgtctataatataaaggcctctgtaggtggcatttcaagtggctgctttttaacatagtgttgcttttttgagcagaattgtgggctgtcctgaccacactttcttataaccccaggaggcaggatctctcctactccatgaaacaggagaacattctttggtgccagcttgaatttacattctcatatgctgcaatttgagccccactctaccttgtattatcgcccagaccagtcagctcaacattctatctaatagattcccttgagacgggatgtgtaatcaattgtagaaccaatacatttcactctttgggcaaaatctgttagcataccaggtggctccaaatactccactatttgaggacttcacatctaactggagtagtcaggagccgggaaatgggtgggaactcatgtcagagacagcatcttaaagaaatggcctttcaaggatgagtaagatttaaatttgtagatgcaaaaatggtggctattctagatgaaaataatatcatttgtttcattctgtagcataaagagtttacccttccagttttccaagtttcttttcaacttcgcttcttggagtgcaatctccatgaaaattcaacttactttttgaaatgctgtacaatctccgagatttatctaaatttaccctacttacccaaaccagatggcacaagtttctatcatgttagatcactaaaggtatttccgttccctcctttcacctaacaggataacaggtctcccacatgctactgggctaatacccgcaagagttcaaccctaccctcccaaatttgatttctagctttcccttttatccagcgaatccccgtcagaatacagaagccaacccccaccccgcccgccgtccccccccacgatcttcagtctcacctaaaccctttccctcacttacgcccttccttgctttgacaccctattcttggttctcctcctctgctgatcattccttctcaggcccctttccctctggcccttgagtgttccccacagggctccgactttgaccctaatatttctcatgttacatacttacacgggggaactgcctgagggtcctcagaactgcagaataccttatttgaggtaagcaagccccataacggactatcactagctcagagacatttttcagccttgaataaaatcagcccgcagggacaaaaaaaaatggggaaaacttcgttagggaaacttccagcgaccttaactgctcaggaggtagggatcctaacaggaaaaccttgtcaggagtctccattgaaacctccgggtttttgttttgttctgaataggagcacgtgccttgaaaagattagcaccccttgagcttgttttctgagacagcctctttgtccgaatccaccttagactggaagcgccaagtgggcaggacaagcacccagtccagggaacagcccagggaccagccaaggcccgccctaggcggttttggggccgttgtcgggtgccggctgcgggagttgaggtcccgggggagggggcagacacgcggtacacactgagggcgggacacgggcgttccttcccggttccacccgagcccgtagagaacgtaaacaccctcccggcctagaggccccgggaccgggtgggcgggggggggggggtggaaatgcttgggccgcgcagccgcagtgtggaggctcgagccccgctcttacgtcacgtggagccccgcccttaggtggagcggcgggagcgcgcaaggttctgtcacgcaggcgcgttcgcgcggcgtaggtggtgctagaggcgactcgggggattctagggcgacggcgctgccgccattttgtggggtgtttgtcgcagcggccgaggagggaagacggcagtttggcgacatttctcggccgaagggccatttgcttttgcggaggtagggttgcagatggtgtgtgctgggacaggcggctgtcggtctttaggtctccgagccaggtgtcggagaaacgaccgcgttaggggcct

SEQ ID NO: 35120 - DNA, 2300 bp, Homo sapien
cctcacccaaatctcatcccaaattttaatccccttaatccccacgtgttgagagagggaccaggtgggaggtgattggatcatgggagtggtttcccccatgctgttctcctgatagcaagtgagttctcacgagatctgatgcctttataagtgtttgacaattcctctttcacacacacttctctcccctgttgccttgtgaggaaggtgcctgcttcctcttctgccatgaggccttcccagccacgcagaactgtgagtcaaacttctttcctttataaattacctagtttccaggaagttctttatagcagtatgaaaacggactaatacaaggagactcttgcatcctcaaagttttaagcctattcctcattaaagctatgtattaataggctttgggaaataaaggacaaaggatctgtgtccatagttggcacaaaactttatgaagtaaggacagcaattgcagatgagatagtataggggaactgagagatggaaccagaacagaaatcagagtaagccgtgatgggggctaccagaaaagttaatagcctctccagaagtcatcagaatactctgaaggatgctgtacttcctataattacatgaaataggacattgatatttatacattaaaataaagagtaaccctagaagattgagagacaaatatgttacatattttcatacttttatgtaggattctacaatgttccttaaatatttaggatttaggtaaatatactttctctttaatggtttcattggatggttgaatagtaaaccctaatttactaatgtgaatgagaaatggcctctaaagctgggcgcggtggctcacgcctgtaatcccagcactttgggaggccgaggcgggcggatcacgaggtcaggaaatcgagaccatcctggctaacacggtgaaaccccgtctttactaaaaaaaatacaaaaaattagctgggcatggtggcgggcgcctgtagtcccagtagtcccagctacttgggaggctgaggcaggagaatggcatgaacccaggaagcagagcttgcagtgagccgagatcgcgccactgcactccagcctgctcttgcaaatgtctctgtatatccaggcttgtccaacacagacctatagattgtccaagacaatcacagtctttagtctgatatctgatctacaatgataacacagtcaaccaggagacttttataagaaggtttaaatgctgggggaaaatcactaagtagattcgtcagagaaaacacatctgggaaaattttttcaatgtgatttgaatcagatcagtgttggggtacaatgacatagggtaataagtgacagacattaggaaatcaataagacattttagggactgctctgaaacccagggactccacatcaagccaataattgaagttgacagaaacaaatctcagttcaattcctgattttctatatcaatggagagggatgatatggctaacccactgcagctaagaacccattactgagtctgcttaaattgttacttcctctttcaagggcgtttgggcatgaaatggcaggacatatgttaaattgttgatatgctacagtttctagaaccaatagcatgagaagtcctgaaggttactgcagtctgtgtggcagttgtatccaaaaggcacattcggctgtgactcagctctgagaccctttccttggtggtagcagaaactgacaaggaggctggaaagaccagcctatcatattcccctacacaacctctgagctaaatccctccctggacccttccactccccacctcacatgtacactgcgaagtgtgctgtgaaccagagaatgcttctagcaccgtttggtgccactgaatcttgctttatagatcaggaaacactggaggcagctgggatgttactcatctgggacagtgtgggatgcctgggagaccctttgtgactcagtgttaaatagcaaataaggcactgagacttttagtgaccttgatgtgctggagataaacagatccattgtgtcatcgtgaaaagccttcaatgatatattaccttggagagtggttttttaagacacacctttgatcttgctgaaagatggactcagcatgtttgctctaatgactaagtgaagtaagttgccacgtactttgttgtgtaagttgaagcagtcagtagaaaggattaaatgcaagagctttggagcaagcaagatctgggtctgaatcctgattctgggacttgataactgatctagggcagataaccaat

SEQ ID NO: 35121 - DNA, 2300 bp, Homo sapien
tttttcttcctgaagagtttctccccagaagccagtgttaatttgcagatgccaacacatgactaatggtcttatctcaaaagattaatccacactaaattaacataggaccaaggcctcaggattgtatagcctttcgtcgtgagagattccaggctttgtgattctgacagacaggctggcagttgtctcctcataagggatggtagctggttagttaattggtcagtcagtctgcctggtacaccctgttactgcctgcctaacagtcactgccctcctcttctttgtcaagaacaccaattttgttcagtgagcaatgcgctcagctccagatgatgagatatgatggagctgcttcagttcaggtgaactaaattccctgtgattggttcagaggtgaggaagtgacctaattctggccaatgaaatgcaagagaaggatggaaaggagctgaatgggttggaggaggaaaagggatggtggcttctggaaaagaaaataaaaggtgatcatcatgtggaagttagtcctttttgtttctgtaatttccttcctgatattggatgtggctgtgagaaaactggttcctggagcagcagctatgctgggctcttgagtggagaccatagccagaactttgggtggcagagcagacagacggaaagacactgagccctcgctgatgtcatcaagccaccaaaccaactgcggtcagttccttctgcctacctctagatcgctttttaaacaaataataaatgtcatgatgcaagccactgttagcaaaggtttctgtatgttggtgctggaagtattgctaatgatacagccaattttgcaagcctggaaattgttttctctcttaaaagcattcatgtcatacatgcatatggtaaagcaaaatgttgaaaagtatatcaaggtgttaaatagcaagtgcaagtattattccagctcccagtaccctcctcagaggcaactactttttttttttttttttgagatggagtctcgctctgtcgcccaggctggagtgcagtggcgcaatcttggcttactgtaacttccgtctcccggttcaagcaattctctgcctcagcctcctgagttgctgggactacaggcgcccgctaccacgcccagctaatttttgtatttttagtagagacggggtttcaccatctcggccaggctggtcttgaactaacgtcgtgatcaacccgcctcggcctcccaaagtgctgggattacagacatgagccaccgcccccagccaattaaacgttttttttaaaaaaataaatgcaatggaatgcaatgaagctatcaaaaatgccactgagggagaatatttattgacaaattcaaatgttcaaggcatattcttaagtagggaagcgccaaactttctaaatggagccggtgttctttttgtaactgagaagatttagtttaaaaaaaatatatatatatatacacacacacacacacacatatacatacatacatccgttggcttcacagtagctggcacctccctcccctttgcttcaggcacttcctgggagtcctcgtccattctcacctcagcgacgaaacccctccacataccctgtttctcctcacatttatccccgaaaatgttatataattatgtgtatggcttattgtctgctccctaccccccaaaaaaatgttctccagggcagtgacgtttctttcattgattgatacatgtgaaaccacttgcaaccgtgcttggcacacagcaggtgctcagtgcccctctggtgaataactgaggggcactaggtctgttctgggccgttttcctgccgcccacgccctccctcccgaaattcccacagacacagagttgcaagttactgccctcagcgaacctccccttatcttccctataaccaggaacctggggccctccagctcacaggggccctcttgtggcatgtgggcgcgtaacagctcagccgggaccccgcctcaaacgcatggaactacacttccccgaatgcaggtgtcctctcgtggactccatttcccagcggcctcagcggctgccccgcccctcctggtccccggcgcgccgcggggtgagcggcgccgggcctgaggtcgcccagacgccgtcggggcggagccgggtcgcgaggctgcatcccggccggcggttccggagcctcgcggctggggaggcgcggcccgggacgctcgagcttagggaggtgagcgtcggcggcaggccaagccggtaggaggcggcgcccggcacggggac

SEQ ID NO: 35122 - DNA, 2300 bp, Homo sapien
tatcttcaacaaaatgctagcaagctaaatccagcagcacatgaaaatgttaattcaccgtgatcaagtaggctttattctggggatgcaaggttggttcaacatttgcagtaacaaatgtgattcacttcaggaacggaaaaccatatgatcatatatatagatgcagaaaaccttttgataaaatgcaacatcccctcatgataaaaaccctaacaggctgggcacggtgcctcccaacacactggggagtgaggctggaggatggcttgagcccaggagttcaaggcctgcctgagcaacacagacccatctctaccaaaatatatatatatatatgcacccagtgtggtggtacatgcctgcattttcagctactcaggaggctgaggcagatagatcacttgagcttaggagcttgaggctgcagtgagtgtgatcatgccactgtactccagcctgggcaacagagtgagaccctcaaaaaatgaaatcagatataaaataataaactaaatgtgaggagcacagtaaataatacaaagaagttgggaaacatctccagcggggagatgtgtgttgtttccctctctgtgtccatgtgttcttactatttatctcctacttataagtgagattatgtggtatttggttttctgttctgcattagtttgctaaggataatggtctccagctgcatccatgtccctgcaaaggacgtgatcttgttctttttcattagcctgcaatatctgcatattcctacctactacctgaccacttcagctaatcctatgtcacaagttaaggttctgagacttgtagcctccacttcagggactatattttattttgtagctattgtattctgagccttgatcttagtggtccaagattatagcatcagcttccagagaggatggagaaagagaaagtcaagaagaaaaaagagcatgatcaatatgcctcttaaggctcttgggagctgctaagtgatgctttgctcgcaaatcatcagttggagggtacagacagggccatatctaactaacagaggggctaggatatgcaatctccatcctggggagccatatgcctagtccaaaaatggggttctgtcactttggaagtgagactggcaactagggcagaacagcagtctctgccatagaaagatatcagtataattcccattttgaagataagaacactgaggcctaaagaggctgagtgcttcttgagagtaagtggtaaagccgattccgactgtgtaatctgtctagtactcgttagttgtttttccagatgctctccctcctcccaccctccgtcctctaataggccccagggtgtgtttttctcctctgtgtgttcatgtgttctcatcatttgactctcatttataagtgggaatatcccatatttgtttttctctttctgtgttagtttgctaaggataagggtctccagctccatcatgtccctgcaaaggacatgatctcattgtattttatggctgcattgtattccatagtgtatattaccacatagtctttatccagatttaaatgtaaaacccaaaaccataaaaacccctgacaacagcataggcaataccattcaggacataggcatggacgaagatttcatgagaaagacaccaaaagcaacggcaacaaaagccaaatttgacgaatgggatctaattaaactgaagagcttctgcgtagcagaagaaactatcagcacagtaaagaggcaacctatagaataggagaatatttttgcaaactttgcatccaacaaaggtctgatatccgtcatctataaggaactgaacttaaacaaatttataagaaaaaaaggtggctagatggactggtagttgaagtttcaactttgtgagaaacctactcctccacccattctggatccccttgctgtagactgtttgtgtcttcccaaattgtcagcagtagagttccaagaagactggaagcattggcggttgcagaaaagcagaggcagctgtggcagcccaggctgagcaggtgcaggagttccagagccttggagccatggcctgggctgatgcatactggagatgggatcagcctgcgtgccacgcgcactgtgagcagcaggcagggccaaaccaccttttctgcccgcacatggtgcgcatgtgtgttctcctctctccccacccccgccatggaggcggtgtggcatgtgtggcgtggcatggcatccacagtgaggacaagagaagagctccgttccctcaggaccccactggg

SEQ ID NO: 35123 - DNA, 2300 bp, Homo sapien
cgactggaggaaggatttttatggaagacagcaacacattcggctttgtgctgagaagcagagtgtagaagaaaaacagtagatactggaaaaggagtcaaaagccatatggtttagggcccacaacaaggattctggctttcactctaattgcaaagagaagacaataaaacatctcatttttgttaaaaaatcttttttacaccaggcatagtggctcacgcctgtaatcccagcactttgggaggccgaggcgggaggatcacttgagcctaggcgtttgagaccagcctgggcaacatagtgagaccccgtctctcaaaaacaaaaacaaacaacaacaacaacaacaaaaaaaaacagaagcagcagcttgtggaagtgtagagtagtgtagagagagataacagggccttgcactgggcaagcaaccatggaaggacacctgcagttcatggcaacagggtgggcgtggctctacaagtaagggacagttgtgccatatggaattacctatatgggaagattggtaattaacacacagggaaatcaccatgctactttcttctatgattttgactattttagattctacgtgtaaatgaaataatgcagtatttgtatttctgtgccttctttatttcacttaacataatgtcctccgggttcatccatattgtcacatatgtcaggatttctttatttttttaaggcagaataatattcctttgtgtatataaacacattgtggccgggctcggtggctcacgcctgtaatccgagcactttgggaggccgaggagggtggatcacgaggtcagaagttcaagaccagcctggtgaagatggtgaaaccccatctctattaaaactacaaaaattagctgggcgtggtcgcgggtgcctgtaatccctgctacttgggagactgaggcagagaactgcttgaacctggaaggcggaggtggcagtgagccaagattgcgccattgcactccagcctgggtgacagagcaagacaccgtcccaaacaaacaaacaaacaaaacatttcctttatctattcatccatcaacagatagttgtttccatatcttggccatggtgaataatgttgcagctaacatgggagtgcaggtatctcacggagtttcacttcctctggatctatagccagaaatgggattggtggatcctaatgtagctctagttataattttttgaggaacctctataccgttttctgtaatgattgtaccaatttacatccttttgatagtggccatcctaatggaggtgcagtgatttctcattgagtttgggtttatatttctcttatacctagagatgtttaccatctttttatatgcttgttgctcattgctcatttgtatatcttcattggagaattgcctattcaagtcctttgtccattttaaaatcaggttatttggttttgttattgttgttgagttgtaaaagttccatataaatccaggatacattgcaaatcagatatatgatatgtaagcattttcgtctattctgtagattgcctttgtttcctttgattagccaaagtttttaagtttgatgtagtcccatttgtctatttttgctgttatctgtgcttctgatgtcatattcaagaaatcattgccatctccaacatcctgaagttttttccctttttactttagtaatttataaaataatttggtctcacatttaggtttttaatcaattttgagttaatttttatgtatggtgtacggtcagggtacaggctcatcttttgcacgtggaaatccagctttgtcaacatcttttgcaggggattttcctttcccaattgtgtagtagttgttttcgtgccgcccacgccatcctgaaattcacacacagagttgcaagttactgccctccgggaacctccccttctcttccgaagaaccaggaacccggggctctacagctcacccgggccctctcataggtctgggcgcctaacagctcagctgcgacctcgcctcaaacgcgtggaactacacttcccagaaagccagcgtcctcccgtggactccatttcctagaggccttagcggccgccttgctcctctaggtcccaggcgctctgcggagctttcgctgcccggtgagcggcgccgggcttgaggtcgcccagacgtcggaggagccgggtcacgaggctggagcttcctgcttgcagagtgcggcggggaggcgcggcccgggaacgcgggatcctggggaggtgagcggcatggctggctgtgccg

SEQ ID NO: 35124 - DNA, 2300 bp, Homo sapien
acagaaagttcatccttaaccttttccctccaaggcttggaggttagcagcattgtacataacagcagttctgatcataaacccgactacatttgcacaaaacagtagagagactccattccttcctacctttattttttgtaaagacagcatctcgccatgttgcccaggctgtcctggaacttgcggtcttgagtgatcccctgacttcggcctcccagggtgctgggattacaggcatgagccactgtacccagcctggcctttacctttcttacagctctctgggatttggcattatttcaggtttgccaagaaaataacatccgtttccaagatttaaaatgttgctggtgtgtccttacttgtttttcctgaccttgtgaattaacaagttttcaaacaatctgttacatttgcttttagtggtacagaggaggcaaaatacatttttcttgcgcgtcctatgttggtggctgagacccctaagacaaaagacaaattaacaagagcaaaacatacaagtttctttaatacaagttttacatgacacagcagcctacataaggaaatgaagtcccaaagaaacagttaaagttgtgtatttttatgctaaatttgatgaagtcacagagaaatataaatggacaaagaggatatgatctaatagtaatacactgggggcaacttagcaaggcctgtttgttcaagagttttctctgtgactgtgtgtcttcagcaataaagatgttactttcctccaggtatagggagtgcaaatctcacatgagaatcttacgacctgcttcaggggacgttaggaaattcttcctaggttttacaacctgcttcgtgggagatgtgtggaaaagtccttcctgtttctgctgttttctcaaatgatgaggtgccatattttggcagtgagtgtgtgtgtcctgaactatatcagtacgtgttaggagggaacaaaattagatgtgttgtacccaatctgccttcttttcttctttactgtatgctttgaaggctgcaaaatttcctctaaatattccctttacctaaatcttttctaaaaagtttctagtcttttaaaaaatgtttagcttaattacattgtcaaagaatatggtcttgtgtgataccaattgcttgaaatgtgttgaggctactttacagactagtatgagatcatttcttaagtaaatatatgcttttccatgtgttttcttcagttttggggtggagtagtctacatgtctattcattaacataaaactaattttgcttttcaaatatttcatatctatagtgacctttttgtcagcttttctattagttactgagaaggtaggttaaaaactctgaggccagggtggtggctgacgcctataatcccagcattttgggaggccaaggcaggagcgttgcttgagcccagaagtttgagaccagcttgggcaacagagtaagatcccatctgtacaaaaaagaaagaaaacaaaattaaaaatgggttctgcccatgtttgctttatgtattttgtatcttatgttattaaatacataaaagtttaaaatattttatttgctggtaaattaatgccttttttttttttttaagacactctcttgctcttgtcacccaggctggagtgaggtggcgcaatatcggctcactgcaacctctgcctctcaggttcaagtgattttcttgtctcagcctcccgagtagctgggactacaggtgcccgccaccacgcctggctaattttttttgtatttttagtagagacagggtttcaccatgttagccaggctggtcttgaattcctgacctcaggtgattcacccacccgcctcccaaagtgctgagattgcaggcctggccagagagacgactttagccggggtaaggggccgcctgggaaccccgcgtcccgcctggacacaccgatgacctgcagaggccacaccgtgggccacctcagctggccactggcacagccttgccctctggggccccgttctcgcacacgccgacggcctggccgcactgcagccccgcagccttgtgggaaatgtagtctggcgctccgggctgtaagcgccggtcgcggctgtgtcggtcgccgctgctcccgctcctgctgggagagggtgagtgcggggccggtggcgggggcgcgcgccatccgtgagtcttgtaggcccccgcaggaggagctccggattgcggggcgaggccccagcttcctgagggttgaggggcgggcccgcagcagatgggccgggggtgc

SEQ ID NO: 35125 - DNA, 2300 bp, Homo sapien
caggagaattgcttgaacccgggaggcggagcttgcggtaagccgaggtcatgccattgcaccccagcccgggcaacaaaagtgaaactgtgtctcaaacaaaaaaactcccaacatgtagttagtgctcaatacatattatcattcttaaattcctgaaaacaataatatccaaactcctgagcatagcacccaaaacccttcaatatcttagaatcattaggctctcaaagcaaatgccttgtggaaaggttatataattgtgggaggctacttgtaattgtggactgctgtcattgcctcctcattggtcttcctgtatcccctctagccccaccactgtctgccttctttgaagctgaccagtgcgtctatcaaaacgtgcccagccatgtcactctttcaaatctaatcatttccaggcacagaaataaatccaaatttccttccttcaaggcctgtagttactcctgcaacagcatctcgcagtcttccttgttcagtaggccctcgccagtcatactgaccttgccaagcctggagttcaccaagcacacttctctctggtcagcatttctgttccctccctttagaaggcactttacccatacagtcacatcgtttcttccctcactgtattcaaatctctgctcaggtgttacctcctcaaagagaacttccaaaactgctgcttgaaataattccccgccccatcacaccctaacccctaacagtagtgttatcactaccagataaatactttctacttgtctgacccctcctctagtacaattaaaactccatgagtgcagggttttcacagctatttctccagcccctggactcggggttcttactctctggagcccagtttgagtgacctggagtcacgagggaggcgagagagaagggttaccagcgatactcacacaacatcctccccctctggtgctttgccgggtccctgggaactgctacaggggctgcacagcggctgaccctggccttgtcaagcacttgacacataagtgctccaaagtgtctatggaatgaaatcttcaataaaactccaaacagaatgctgtagtcactgacactgcttcctaaaacgtggccaacaattccgtatgtgacaaacaggtcacattcttgattttttttaacgaccaacaaagttaaaaccctctcatctttccttcctgagctccatgcaaattacctattcaaaagcaactaagtatctccagttggatattcttaggcatcatctcatccttgccagtctctgcaaaatatggtcgacaaaaataaataccaccttcttaaataccacccagctgtccaagatggagacttcctggcatccaggcgccttcctctccctcgtccccacctctgagaagttcccaagcacgaagtgttctgcgtcccgaacattccaggggccgccagccaccatgggctctgtcctgaggtgccaagcaggacatccctgcccgacatccttgtcctcccgcaccgcacacgcgttagtggctgtggcgtcgccaccccagcacacgctggcccgcccgcagtgccaggctggaagtgtcgggcgcttgccaggccaaggggcaattctgttgccttccaggccttttcggcgcggtcccagtcaggaacgcgccctgtcgcctcccactccgtcttccggaccctcccgatcctctctcgtcagcgatcgggcgtcgctcccctggactaacctcccttgccccatcttcagcttttcgctgatctgcatcttcctgcgccttagtgcaaggcagagacctggttctaaagcgaacggaacggaaccgattctgtaagttgcaatgagcgcgctgaggtcggcgtggaggggtctctgggaaaggtagtttccgcgcctaaagcgccggggccgggccctgttcccgcaggcgcaaggcagcactgtctccgccgattgtccctctgggaagtggagtctggccggcggaactgcagcagccctgagacttgtgggaattcggcccaagggttcccagggcaacgcgcaagcgcagttcggctcccggctgcagactccagctcattgtgttctgactgcgatgtggcgcttgcgatctctcgccgccggcagaggctcctcgaagagcgacacggggctgaccaggcacggtggtcaaagccgcagagggagagcgggagcggtcgtgaggtcgtctggggagaagggcggaggcaaagccgaggaggtgcgggttgtggtccattctggaggacgctgatcg

SEQ ID NO: 35126 - DNA, 2300 bp, Homo sapien
agtctccttacttctgctcagacctgcatgttggggttcctggggctccagcctcactgtctgtccacactctcagccccagggaactcctgcgtcccacggctttaaacgcctccgtggcgatcccacctcagctttctctcccgccctggcctcttccctcagttccaggctcatgaaccacgaagcctccactttcctgcccaaacccgaactcttggcttctgccctccttgacctgctcagctgtgtctctggtcctcatattctcagggaatgccccagcagctatgccatcctccacccctccaagagccaaatctccatcaggtctaaaatcctgccacccccctccccttctcctccagccccctgctcacaggtgtgcatgcctccctcctacacggcgaggaccccctgccagtcccccagctgctgcccccgcttcctgatggtctgtcctccagacaggggcagtggctgccttggtcatgccaagcaggaggctgctgtgtgctgggagctgtcaggctcgtcctgaacagggaagggcccatccacctcccaaacccagtttatgcagtccttcgcaatgtcaggctcagggcctggcaccagccaagctccccacccttcccactgttaaaatggataggagcagggctaggcccagcctgttgactctgggcttccaccaggagaagtggttctggcagtagaaactatcggggcctgggagaggcgggggaagagagaaaggtggcatgtttcttgcttgctccctctaccagccttgtccaaatccccgcagccaccctaatccagcctgtctaatggagcccaagccggctcaggccctcggacgaggagcctgctaatccctgtggctaggagctcaccacctgtctccaggacgccctttgctctcttggcatcagagagccaaatcctgggcctcggatggggggatgataaaagcatcttttggccaagccccctcaccttggcctccacgatgagatggggagttaggtgcagagagcgttggcacagtgagcaccgcagctcgagtggctgcctcagacccagagcccgaggagactttatacggagccagaacgaccccgcggggttccatcctcccaagcaataggcgggagtgggagctgcgaggaaagccggcccctcccctccctccatccaaggcagtgtgggctgtttgtttcatgccattctgggtgtgaatcctgatgcccacacatgccagctgcatgcacttgggcaactcaactcactcctcgagggctgtttctcgactgcagggtgttgtaagttcgctaatactaaaggcttctccctcctggccccttcctgcccctcgctcttcctcctcttccttaggccctcccagctcaggcagcccctgccccctgcagggttctgcaaggagaaagctggggaataccttaggcaactgcagtcaggagcactggtggccaggacagagacagagagacagaaaaggggtcagggacagagagagataaccgcagggagagacaggaagggacagagacagaaaagatttccaagaagaggacagaggcagaaagccagggacagagactgagaaacagagacctagaggcagaagaagactgagatagagatggacagagattgtgtcagacacagccccagagacagccagacagtctgagtcagacgcaaaccaaagacaagaaaacaggaaaacagacccagagattgggagagggaggggaaggagatgcggggagagccagcaccgccaccccccacactcaggaggggtctccaccctcggagcggtctctcatccctccctagaatccttaaatcctctctcgctcagggcctcggccgcatctgtcacagacttgtcctgaaccgacagcggctggcgcaggtgactggcttggggcgggagcctgggtgtgcgctggggatggaccccgaggaagaggggccaagctgtcgggaagcggcagggctggaggggtggaggcagtggtcgggcgggaccccgggcgacagggttcggcgcttgtaagagcgagacggaggcccgggcaggccggctgagctaactccccagagccgaagtggaaggcgcgccccgagcgccttctccccaggaccccggtgtccctccccgcgccccgagcccgcgctctccttcccccgccctcagagcgctccccgcccctctgtctccccgcagcccgctagacgagccgatggcgcggccccggagagcc

SEQ ID NO: 35127 - DNA, 2300 bp, Homo sapien
agctgggattacaggcttgagccaccacccccggccaaaacctggtttttgctgacatcatagaaccaccgattcttctctagccggagtctgccccagtgatttcttgctattccttattcatttcagccaacttgagcagttccatcttctgtgacttgtagcaaataacacatgccaaccttttattccgtcttttctggccacttttaggggttcctatttatcctcagagttgtgatatttcatcgaggatgtattttttatgggccatccctaccctagctcattcattatgccaaactccctacattttatttactctgaagactcagggcttcctcagcttgaatgtgttttctgctatatctctatcactatttctgtatgtaatcaatctgttattattccccctccccattttctctgctttcttctgaatctttttattagattttgggtatcagagcacttgtctcctgcatgtcttccaaatgtttcctcaatttctggtgttctgatggtatttttctagagttgcattagatttgctcctttgaaaattatatgtgtttggggttactttgaagaatatgaagagaaaaagggaggtaatcatgggtactcagtctggcaccttttactttgtaaatctcaatgctatgttgttttgtcaataatggtctataactgtcatatctttattattattattttaaaataataattaaatatagaaataacatatggtccagaaatggaattgcccatgtgttaattctacatttaatttttttttgaggaactgccataccgttttccagcgcagcgctaccattttacattcccaccattaaggcacaaggattgttttctggttttcttttttttccaaattttataatagccaacctaatgagtgtgaaatcgcagtggatgtttgatctgctttgatctgcattcccctaatgattagtgatgtgcattattatcttttaacaatataaaacatccattttgttcgatttaattatttttacattgcaataatctttgtattgttgtaacatcgtgatccaagatttctttttcatattatctacctgatatctcttagtccctctctgcattttctatcttcaagtaccctttgtgtttaggtttgtctctgtaaacgctaatgtttgatattttaaaaatcaacactttctgagcacatagtatttggcgtgtacagtgccggtcaccgaggatgcagttgtgatgatagcgctgggagttgggctttattttacgttttaaagaagtcacttcaaaagaagtgagtgccatgaagagggaaatactaggcttatgcttttgttttactctgagtgccagtaaatatgtaaagattacaaaaatttatttatttatttatttatttatttgagacagagtcttgctctgtcacccaggctggagtgcaatggcgcgatctgagctcaccgcaaccttcgcctcccaggttcaagcgattctcctgcctcagcctcccgaatagctgggattacaggcatgtgccaccacgcccgactaatttttcgtgttttcgtagagacagggttgcaccatgttggccaagatggtctcggtctcctgaccttgtgatccgcccacctcggcctcccaaagtgctgcgattacaggcataagccaccgcgcccggccgagattataaaatttagacataattcatttttaattaaaatcgcagaatggactgtaatagttctgtcaccacctgcgaataatcagcagcggctagtcttccagatttaaaaattcatactcacttttccgtcttactatttttgtcattctaattacgaatacaatgggtggtttagcggagggagagtagttggagcccaagctgagggactcggcttcagccttctcgaactccacagcccgaccgcgttctccgctctcggcgctgtggttctctctcggacaccgtaagtggtggtgccgcagcgacgtctgggaaatgaagtccggagggacaaacgctgcggttcagccagggaaacccgtcggctctccggcgcgcaggcgcagttgcgcccggcagcgacgggaaacgtctctgaattaggtgttccgctcgcctcttgtgcggtgtggagctgcgcgccccccgccgaggcgggcccaggtacaggctgccggtgagggcgggcccggggcgtgcggctgccgcggcgggaccaggacgagggctggcctctgcgcgtgtctgccgagtccccggctcc

SEQ ID NO: 35128 - DNA, 2300 bp, Homo sapien
cctgggcacgagtgatccatccacttccgcctcccaaagtgccgggattacaggcatgagtcattgtgcccagccctttgcccatttttaatgggactctttgtatactgttgtggttttttttgttttgttttttctttgagatggcatctcgctctgtcacccaggctggagtgcagtggcatgatctgagctcactgcaacctccacctcccaggttcaaggaattctcctgcttcagcctcccaagtagctggggtttcaggcatgcaccaccacgcctggctatttttgcatttttagtagagacggggtttcgccacattggcctggctggtcacaaacctgttatttgaattctttgtatatactgggtattagtcctttgttggatgagtaatttataaatattttctctcaagttgttgcttcactctgttgtttcttttgctgtgcagacactttttagattaatatagttgtttatttttctttttgttgcctgtgcttttgaggtcttagccacagacctcaaaagcacaggcaagaaaaagaaaaatctttgcctagatcaatgtcctgaagagttgtcccgatgtttccttctatcagttttatagtttggagtctttaaatctttaatctatctggagttgacttttatatatgttgagagagaaggggtccaagttcattcttctgcatattattatccagttttccccagaaccatttattaaagacgtagtcctttcctcattgtgtgttcttggcacctttgttgaaaatcagttggctgtaaatgggtgcactgatttctgggttctcttattctgttccatgggggggtgtgtgtgtctatttttatacaaatatcatgctcttttggttactaacactttctaattagatataagctcactccagttagaatgattattattataaagacaaaaaaatgacagatgccagtgaggatttggggaaaagggaactcttatacactattggtgggaatgtaaattagtacagccactatggaaaacagtgtggaggtttctcaaaaaactaaaaatggaactaccatacaatccagcaaccctactactggtaaagggagagaaatcagtatatgaaaaggatacctgcactcacgtttgtcactgcactatttgcagtagccaagatatagactcaacctaccagcaatagatgaatgggtaaagaaaatgtcatacatagacacaatggaatactattctgccataaaaatgaatgaaataatgtattcacagcaacatggatggagccgaaggtcattatgttaagtgaaataagccaggcacagaaagacaagtactgcatgttctcacttatattcgggagttaaaacacttgatctcatggacatagacaacaggaggatagataccaaaggccaggaaggccagaaaggaaggggaatgaagagaggttggttatgggtacaaacatacagttagatggaagaaataatttctaatatttaatagcagactagggtgactatacttggcaataatattgtgtatatttcaaagtaaatcgaagagagggcttgaaatgataccaacgcataaaaatgataaatgcttaaggtgatggataccccaaatactgtgacttgatgatcattacagtctatgcacgtaacaagcactcacatggaccctatacattatgtaaattattttgtatcaacagaaaagtaatcacaaccagcggtgggagctacagcacactgatcctcctaaatgaatctaatttccggttttgttttttcaaactactccgcttgcttaacaagtgcgcgggctgtaggcagcacggccagcagctggagacctcctgcctcgtgtgcggcgtgcgtactccctcgcactgcagcccctccgcgcactgtcgcctttgagagctctcgttggcggaggcggttcctctcccggagttcgcagcgcgcaccgcggcgtcccctgggaagtgtagtcggcgtggggccggaggcatgccgggagtggtagttctcccgcggttggcggggtttcggggacagctcgcggcctttcgggggttctcctggcttgggccatccaggcttggctaggattgccggcctggggttgaggcgctcgcagtggtctcttccgggccggggtggatccgggcctctccagcgagtgggcggcgtgcagcctcgtctgggcttctgggaccagccctacgcggctcgggccccttggccactgggtcccggggcgccg

SEQ ID NO: 35129 - DNA, 2300 bp, Homo sapien
tctgcctgggctcacttgcctctgtgctgtctctgggctcttccatatgcctcctccagcaagctgcaccctgtgggggaacaaagtcccccttatcttgtcctttggttatttgtcccacttttctttttcagagggccactgccaaggcgacaagtcaatattctgtaggatggaagtcttgtcccgctattgctccatcccaggctacaacaagctgtgctgcaagtcctgtaacctgtacaacaacctcaccaacgtggagggcaggatagagccaccgcctgggaagcacaacgacattgacgtgttcatgcctaccctcccagtgcccactgtagccatggaggtgcggccatcaccaagcacccccctggaggtccctctcaatgcctccagcaccaatgccacagaggatcacccagaaaccaatgccgtagatgaaccctacaaaatccatggcctggaagatgaagtccagccacccaacctaatccctcgacgaccgagcccctatgaaaagaccagaaaccaaagaatccaagagctcattgatgagatgcggaagaaagagatgctcggaaagttctaataaaatggaaagatagcatccctagcatttttttcttgcttatagagatattccatgggatagcaaatcctgtgtcatggagatgaagtcaaaattcctgattccaaaaggttttgagaaaacaaagagggggaatgacgtaagaaagataggcatgagcatgtggtaactaggttagcacgtgtgcttcccagcccaggagcgaccaaatactgtggtggcgtcaggtgtgcagtggagaggaatatagaggctgtatggcctccctcagtgagggcagggcaagagggatcactctgagagaacaaaaataggccccaagttgctaagcagtgattgggaaccttcctttccttggcggagatgcatgacattccctaccgatccccagacacagcctgtgggactcttaggagaaatggtgatttactgaataactgacccgttgccgagatgagtacaatgaagtggaggtgatgaactcaaatcgtcttccagggccaggcggctgaccggggtgagcgtagtggcccgctggggaccatggccgccctgacagccacacccacctggagctgacttggttctggctgttgctgccactgtgaaatctgtatctctctccatctctgctctactatccccggccttgccagacagtgttctttttcggaagaagtctagatttttgcatgaaaaaaactcaatctttaaaggtcgactcagaacattttaaggaggcctccacttggtctgatgcagtcttgctaattaagaactaaaggccttctgaccttcttggtgctcatgctgtacggcatctgaatgtctcgaccgagtctgagccgtgcagctgtcctccacctgcgaaagtaatgagaatcctatcacgggacataaggataggtctaaacagggtccatgccaagaaaacagtggggtgctctcccaggcctctcccctgtccactaaccctggccttgccggctgccttccaggctctgggggaagagctcctgcattcttccctggccaccttggctccagggctccccagagagcctcttccctccccaagtacctgagaaagatgagagaggcacgtgctctgctgggaaggtccagtgagcggttcaagggcctggaatctccctacggccaagtctaagggttctgggattctgggctttgtgggctttgcttgcttgctgggaatgggctttccctgtcccgccctgccccacctcgcctctgtctctcagaagctccagaacccagcagtgacctgcaaaatgtggcctctgatgggggcttagggtgggagatggggagagcctacattgtcttttgctccttgaaaactttaatagctcctattttccagagaatggtgctttgtgagcaacatgcgagtaagagagaaataggaggaagggggagtaggggcggatgggagaagagtggctcatttttacctctcactgccttgacattttgtgaacgtgaagcttaaactttctgggcttacaagacccaggggcacgtcagctccttagatgggctcagcctgacacataattcttaaacctttcctgtttaagaaacttctagaggctgtgtactctcaccaatcctcttcgagaatttgttcatgtgtatttccccattatatggatgaggctcaggataacagcatagtggctacctt

SEQ ID NO: 35130 - DNA, 2300 bp, Homo sapien
agcaattatctttgatttatggaaacatggtgagatgctggcttttccatttatagtagtgatttaaagtatcctttaaaaaattgaaaaaagttttaggcgctgtgtaaagaaatacccaaccatagacacggcaggaaggtgcagaacatgccccttgaagtaggggcggctgctggttgggtttcactcgtgtttcgaagaggatggaagcgctgacaaccacaggaggaatgcgtcatgggttccaggacagcaactggctggacccaactctgggctgcctagctcccccagccttcacaattcaactcatgccacctcttacaggaagtcctcctggatgcccagctctggagtcatctctgtggtatactaggattccagttccaactttctctggaaccagttgggtcatcacaggtcacgagagcagatgcctacagagagtgaggagaggcgggacctgccacaaactgcaaggtaagtgcccatttaatggttgctaagcaggactgtggggctagcgtggccacatcttccaatatctcaagaaaagttaccaatctaaatttccatgtgacatctcaccatgcctgggagctggatccagcctcgggcacccttaggtgacacagaaagagtacagcttgcaggtgaagatggctgtccagctgcgatgctctcacacccaggacccacaatcgaaagaaccaaggacgtgagatcacagttagagcctgctgtgtaagtcgtgtttcccccaacgactgggacctcctggccagcagggagaggcctgagtcatctccgggtcctctgcccctggccaaagcaaagaccaaagccctggccacacagacctggggcagggcaaatgagaaaatcaaaggggtgggtgttcaccctctggggaagtgaggcagaaattgggggtcccagggcagagatgatcaacagcctgagagggggctctcaggcaggccctggagagaggccgctgagctcagacagcatgggaggatcagggccttgctggagaggagggactggggaggggttccggttggcaacgggctctaacagcaaactggccccagaatgggcccaggtgtccttggatgcttgggtggaaaaggtaggcagagcttggagaggccatttcaggttgggggccgggagtgcaatggcgggaggacagaatgcatacgtggggttgaggacaggtgagggcaggagcctgactgtgctcatgggcagagagcccaggtctggcaggaagaggctgtgctgaggctgcagcggagggatgggaaggcagatgggggacaggggacagggacttcagaggaagaggaactggggactgaaggagccttgcctctctcagtaagggcaaaagttgatctttggggtcgcgccctgggtgtaccctcctaacagcatcttctggcctttgcggcctctatttgggcattcggcctggctcagaccttggacccagtagtcagtcccccctcccctttcattccctcaccctgtcctgccccagagcacagagacagggggatgcaccccttgaattccagggctgatgggtgggacccggcaccccaagggctctctaggtggggacgttcggccggcgccgctcctcggaggttgtgcccctggggtggctggcggcggggctcccccggcccggcccgcggcgcttctctgccgccgcctcggggtgtctctgcttcgctgcgagcccggcaccgcggcgacggcggcgcgaagagggaagcgggcggcggcggcggccgcgccaagatgcgccgggtcaccgcaggctgaggcgcccgccgtccccgccctccccctcgctcgcctccctccctcccgcctgcctccctcgctcgctcgctccttccctctccccgccttccctccgcgctcccccgcccgcccctccgcgcctcgcctcctccgccccgcgccctgcggtgctgcagctgcgggcggctccagctgcccccagatgtgggctgggcggctcgcggggaactttcgcgccggctgcgagtgcggggccccggctgcagtccggctgccatggatccgccggcgggagccgctcgccgcctgctctgccccgcgctgctgctgctgctgctgctgctgccgccgccgctcctgccgccgccgccgccgcccgcgaacgccaggctcgccgccgccgccgaccccccaggtaggtgcggcccggcccctactccccgggacccccgccggcctggccctgtcccgcgtgc

SEQ ID NO: 35131 - DNA, 2300 bp, Homo sapien
atccaattgcctgtgaggaggacacggctcatgggtggaccctgcagattgtgaagttcaagtcacagctcctgggaaggtctctgtgtgtaaagattgtgggggcgagatagattcagggaccacactctgctctgctctatatctctgagtgtcgatccagctgccttgtgaccaggacacttggaagaaccatggaccctgcaagagggcaggttcagagagtgagatgagcacgcttgagggattaaagtgtaacttgaaccactgccttgcaaactgcgtgagggcatgcaggtgtgtgtctgtgcgtgtgtgtgctgggaagatgtttagcagcctcatggaggggtaactgacatacaagagaacaagccaggcatggtggctcacgccgtaatcccagcactttgggaggccgaggtgggtgaatcacctgaggtcaggagttcgagaccagcctgaccaacacagtgaaaccgcatctctactaaaactacaaaaaattagccaggcatggtggcgggcacctgtaatcccagctactctggaggctgaggcgggagaatcacttgaacccaggaggtggaggttgcagtgagccgagatcgtgccactgcactccagcctgggcaacaagagcgaaactccatctcaaaaaaaacaaatttttttgatcaatgttaacacacgtacgcacccgcaaaaccatgaccaggagcatcacgactcccaaagcttcctcatgattctttggaatccctccctacagcccctcccacccccccccatcccaagcagccactgatttgctttctgtcacagtcagtagatttgcaatttccttaataccatgtctgagcccagtaggcaaatactttctttttattgggtggacatttcgtggcatgttcaagcttttgaattcagagagtgagaggatgagaaagaaaaggctggtctgggtcactcctgggaggcctggccctaagcaccgtgtggctcatgtgccctggagcccctgtgcaccggtcatccctgactgccctgccgcaagctttatagctcccccatcacctttcccggaccagctggtacaatctcaaacttttcaccaattctgacatctaaacaactaacgccagagacaggctctgtgggaccagcagctgcgacctcacctccggtcactggaacactgagctgttaaatgaaaggtgcgtccttctttctccctttccagggagaatgctctgctcttcttcctgctggatccctcctctacctgcttctctcccacctcctgcagcccccggagccccgtggcgatgcaggcagactcatctgtaccctcattctgtttgcagaaccacatctctgggctggctctgcccaaggacaccacaccttctccattcctcttgccctttccccgtggggtgcaggtggggctgggcccacgatggcatcaggcccactctctctaatgcaggaagggatcagatgccgggagccatggagattgtcctcatcccgatcatctcccagcttagcaaatgatgatgaagacagttttcccacaagataggcatagcctctgggacagtgcctcgtttattttctagcacaaaatagacgttagaacagtggggctttgtgggcatatggagatttttaaggctccttaggaggcaggtaaaaatttcttcaataagacaaaacactatccccaaagaaaatgattgataaatgtggggaaaagcaagagagatcagattgttactgtgtctgtgtagaaagaagtagacatgggagactccattttgttctgtactaagaaaaattcttctgccttgggatgctgttaatctataaccttacccccaatcccgtgctctctgaaacgtgtgctgtgtcaactcagagttaaatggattaagggcggtgcaagatgtgctttgttaaacagatgcttgaaggcagcatgctccttaagagtcatcaccactccctaatctcaagtacccagggacacaaacactgcggaagcccgcagggacctctgcctaggaaagccaggtattgtccaaggtttctccccatgtgatagtctgaaatatggcctcgtgggaagggaaagacctgaccgtcccccagcccgacacccgtaaagggtctgtgctgaggaggattagtataagaggaaggcatgcctcttgcagttgagacaagaggaaggcatctgtctcctgcctgtccctgggcaatggaatgtctcggtataaaacccgattgtatgc

SEQ ID NO: 35132 - DNA, 2300 bp, Homo sapien
cactccagcctgggcaacaagagcgaaactctgtctcaaacaaaaaagaaaaagaaaaatgacttatgaaacgtcaagcacaacatatgtagaatgagagtctcagaaagaaagaaaaggggaaagaaagaattatttatagaaataatggctgaaaacttaccaaatttgatataaaacattaatctatagaatcaatgtttactttcagtaaaataaataccaatatatccactcctacacaccttgtgtcaagctacgaaaacacaaagagcaaatattgaaaacagtaagacaaaaacttctcctcatgtacaagagcaccacgataaaattagccactgatttctgatcagaaacaatggtgagaccatgaacggcagctcacgcctgtaatcccagcactttgagaggccaaggcaggtggaatacctgaggtcaggagttcgagaccagcttggccaacatggtgaaaccccatctctactaaaaatacaaaaattagaccaggcgcggtggctcccgcctgtaatcccagagctttgggaggccgaggtgggtagatcacgaggtcaggagatcaagaccatcctggctaacacagtgaaatgccatctctactaaaaatacaaaagattagccaggcgtggtcgcaggcgcctgtagtcccacctacttgggaggctgaggcaggagaatggcatgaacccgggaggtggaggttgcagtgagccaagatctcgccactgcactccagcctgggcgacggagtgagactccatctcaaaaaaagagaaaaaaaaagaaaaaattagctaggcatgttggtgcacacctgtaatcccagctacttgaaggctaaggccagagaatcgcttgaacctgggaggcagagtttgcagtgggctgagatcacaccactgcactccagcctgggcaacaaacagagggagattctgtctcaaaaagaaagaaagagagagagagagagagaaatagaaagaaagaaagaaagaaagaaagaaagaaagaaagaaagagagagagagagagagagagagagagagaaagaaagaaagaaagaaagaaagaaagaaagaaagaaagaaagaaaaagaatgaatgaatgaatgatgggaaggcaatgggatggcatagtcaaagaatgaaagaaaaaaaattgtcaactaaaaatgccatgtccagcaaatctatcttttaaaaataaagatattcccagataaagacagaaaatttgctgccagccatcctacctcataagaaacactaaaagaaagcttctgaactgaaagaaaggcttgattcttctatttgaaaatactgaattgatttgtcacagggtatgtgtgtatatgtgtgtgtgtgtatgtgtgtgtgtgtatgccaaatattccaaaatttctcatgcactttaacttttattgattttagaagcaaaaatattgcaaatatataaaaatattctttgaaggtttagttcaattttatacttttttagtcctatgaattttaataataaagaattgatttaatttttgattaagtctagctgaagacagtaaagattaattgaagcaaaaattataaaaatttattcaaaactcacaatgataaacaagtataaaaatgtaagctctatgtctgagttgaagcaaggcaagaacatattgtgtggggaggttagaattgcaggcagaggagaccctggagcaataatccctggaaataacaggaatttcggggacaaatccagatcctcaaaaactgtgaaactgagggagtctgagcagagttctccaatgaaccaggtatcatctgtgtgccagggtgagaggacggaaaacgggccaggtctgtctctgacaggttgagaaggtggagtgggaaggagggatccggaaggccaggagggtggagggaactgcaggggtgggtggtggtgggcggggctgggctttagcctcctcctcccactgcccaccccacccttaggagccctttgtgagggggaggccccagctctgtgatgtggacctgggccccagtaacttgtcccagaggggatgcccagggctcagctgcctgaggacagcagtgcagttgacatggatattctctttcctctgcacagtgttattgagacagagctgtgccccagccccattccccagatcatccatttcgtcctcttcattgtgttcagcctggtgatcctgatcatcttatgcccctacattcccagggagccatcctcagtgcctcccagagaggaggacagc

SEQ ID NO: 35133 - DNA, 2300 bp, Homo sapien
gtcatgaaggattcgggacaatgctgttattctagactatcttcatccctgtctatgcatccagtaaagactagtagggccgggctcagtggctcacgcctgtaatctcaacactttgagaggccgaggcgggggaatcacgaggtcgagagatcgagactatcctggcgaacatggtgaaaccccgtctctactaaaagtacaaaaattagccaagtgtggcgccacgcccctgcagtcccagctacttgggaggctgaggcaggaaaatcgcttgaacccggtaggcagaggttacagtgagccgagattgcgccactgcactccagcttggtgacagagcaggacttggcctcaaaaacaaacaaacaaacaagaccaggccgggcgtggtggctcacgcctctaatcccagcactttgggaggccgaggctggcggatcacgaggtcaggagatcaagaccatcctggctaacacggtgaaaccccgtttctactaaaaatacaaaaaaaaaaaaaaattagccgggcgtggtggcgggcacctgtagtcccagctactcgggaggctgaggcaggagaatggcgtgaacccgggaggtggagcttgcagtgaaccgagatcgcgccactgcactccagcctgggcgactgagcgagactccgtacgaaaacaaacaaacaaaaaagactggtagtatgccctcagtcattacacaactcaaacaccaactccacaaattcccaaaacactcctagatgaagtggtatcccttcactgagaactggcctttcagggaccagacatatcatgcaacctagtgaagtgggctggaccaagacaggtccagggagcagctgggcgtctaaaggggcagcacagtttattcccaacagtttgttgccatctgggaatatgccatgagttaccaaatattccagtgattccagagaaagctaaaatccagattcttatgtgaaatcttttgatttctaaatattggcaacaagttttaagatttgtaaacattctgggaatcaaaacagctctgctggtttggtgtggctcatgttgcctcactttgcaaagtgttaagtgctagtaaattttagtgttttttctgagacagggtctcactttgtcgcccagcctggagtgcagtggccatgatctccgctcactgtgggatcgacctcccgggctcaagcgatcctcccactctcagccccccaaggagctaggagtagagctgtcccgccacgacatctggctggttttttgttgttgttgttgttgttgttttggtattttagtagagacggggtttcgtcctactaaaggcccgcctgggccttccgaagtgctgggattacaggcgtgagccaccgcgcccggccaaaattttcctttgtacttactcaaattcctttcttttccaagtgaagaaacagactgagtgtatagtgacttacccaggccacacagttggataccagagatagtagtcacaatcgctaacatctgccatgtggtccttactgcaaatcttatttaataatgaggtcggtttttgttatcccacttaactaatcaataggagaagccacctctgatttccagtccactatcgtgcactctttcttgccaagccgtcatagtcattagattaaaaaaaaaaaaaaattcctgctttcctgcctcgcctgtgcgtttccttagtcgccctttcggggcttgttctaatgagtgctacagaaaaatgacgaagtggaaaatatagaccatgaaatgaaaatttaaaagaggaaatggtgtcacaaagacaacgacggccagggaaccccgtgaagcgccgggcagggtgcacaactgtcctcggagaaagttcaagaggaacttccccgcgaacaggtcctgccggcggccgggaatacgcacactttttatgttatgacttggactttcccgaacctttcgaaacagagggaaggcgaggcggtgaagagggagaaaaatctcccccacctaaggcaaaggcgatgcccgcccgcccccaccccgcgcccgcccgcccgctgggtcacatgacacggccaagatggccgaccgggaaggcggctgcgctgctgggcgggggcgggagctggagccggagctggagccggggccggggcccgggtcagcgcttgagccgggagaagagtttgagatcgtggaccgaagccagctgcccggcccaggcgacctgcggagcgcaacgaggccgcgggcggccgagggctggtcggcgcccatcct

SEQ ID NO: 35134 - DNA, 2300 bp, Homo sapien
ctaatggcacatcttagggttgtgaatattgactggttgaacataattacatagatttgtagggagaaaaatttaattttctaaatttaggacacccaagcagagggttagagaccacccctctgccccaagaccaagcttaactgaataccataaagcagtaaaaggctggtcttcatgtttttgattacttaatcatcaagggcgacaccacctccatttggtgtatggaacctagggcaccccaggtcaccgtatcaagaggaagacaggttatggagtgagttgcccttctttagagggaggagaaagagtgcctgtgaaacttgaaaatctggaaattgagttccttaaaacatctgggcatacctagctttggcaagactgctgtatatgtattccaatttcaagaccactagatgatagaactgggcttggtgtcttctttaaagataaatctttacaaattgcttttatggttattgctgtcttcagagtttctcccttctcttgatgaagttttacaagttttatttcctttgccaatcatccattacagttttaaaatttataaatataatacataggcttctctcgaaatataaaaataattatactggccagacatggtggctcacgcctgtaatcctagcactttgggatgccaaggcgggcggatcacctgaggttggaagttcgagaccagcctgaccaaaatggagaaaccccgtctctactaaaaatacaaaattagccaggcgtggtggcgcatgcctgtaatcccagctactcgggagtctgaaacaagagaattgcttgagctcaggaggcgaaggttgcagtgagccgagatggcgccattgcactccagcttgggcaacaagagtgaaacaacatctcaaaaaaaaaaaaaaattataccacccccaacgaaatgctttacttaagccacttttaaccctctccacaaccaaggtgaaatgcttaggctgtttcttcttgcccagcagctctccccctaccttcttgggttttgctgagataattttgaatttttagtcccaggatgtctcagtatttatttaagacctttactacaagttcacggccataatattatcgttcagatttaactgtaattaactatataaaaatatagtacgtataaatatgctctttaattgtccatattaatcaatgctggtgaaataaaacaggtaaaggattagtatccaaaatatacaggtcagtaagacaaaggcaagcaattcaacacgaaagtcaattgagcaagcaattcacagaagaaatactagcagagaataaacagaagttatttaacctcagtagtaattggacagctgcaaaccaaaaacaatacgatcccccgcccccattccaattggcaaatatttccaagacaatgtaaacgcgcgcgcgcgcccgggtgagggccgcgcttcgcacctgggactttcctgccaggactcttactttgggatctaaacttttagtttctaggataccagcttactgggtttcagagagcatttggccagcacgtatagatatctgatgataattgcacacagtctttattacaccctcaaggcaatgcgacaagataatgggagttgaaatggaactctctgaattcatttgactccaacggttttccttaccaaaaaacaaagtgtgcgtaaaacctaaaattgtccactagtagcggacgaaagatcggcaacaagaatttgagcctggagctgaggggaagatgcttccctgcaggcacccggctggcactatccggcaagagagaaggctggaaaagccttctgggcggggtgcgcatcctcctccgtccgggacagagggtgcaaaatggcgcccaccagctccgtaggagaggccttgagctggactcgcccaataggaatgtttgggggcgggacgctttcccagcacgccctctaagagcttggggcagggcttcctgtaggtagcgcccttccattggtcaaaaatggaaccggggttgcgggagaagccaaacgcggcgagtcttgctaaagccgtcgccgtagcaacgcgcggagccgtctgggagaggcctctggagcaggaggcccagtggctcttctgacccaaggccccgccgtccaggtagggggctgtggcctctagggatcagggactacttacctgcgaatcccggttgcccgcccgccagcacgtccgttccctaagcagaccgcctggcctcctgcctgacccgtcttctcaccgttgcccggagtctg

SEQ ID NO: 35135 - DNA, 2300 bp, Homo sapien
gatgggagtttaacgtgttggccaggctagtctcaaactcttgacctcaggtgatccaccccacttggcctcccaaagtgctgggattacaggtgtgagccaccacacctggcctactttctaggttttaaaccaagtgaagatattgcccattcaaaaaaaattcagcattaaagtgcatatactgttttgtagccttttttccatttattccacttaatattagattttaaatctctttgtgtatcgaatattcatttacaatatcattttttaaatggccaaataatattctgttgtctgtctaattttgtttaaccccgccttgtggctgtcttcaaattcttgttaccacaaaccgtgataatgatgaggtgaccatcccgaaacatacttctttgtgtccgtcttcagttatttccctaggatatattactaaatgtagaattttggtaacctgttgtcatcaaattgccactagaaagttgcacagttggccaggcacagcagctcacgcctataatcccaacactttgagaggctgagatgggaagaatgcttgagcccaggagtttgaaaccagcctggacaatgtggcaaaaccccatctctacaaaaaaaaaaaattagttgggtgtggtagcacgtgcctgctgtcccagctactccggaggcttaacgcagggttatcacttgagcctgggagttccaggctgcagggagccatcatcatgccattcaacagcatgggcgactgagcaagaccctgtctccaaaaaaaaaaagaaagttgtgaagtttacagtctcaccaagcagcacttgagaggccttttttcttttaatgtttaatgcaggcctgttctttctttctttccttttccttttttcttttcttttctcttcttttctttcttttctgcttctctggagataatgctagaatacagaaaaattacaccttcaagattggggccaggcctgtaatcccagcactttaggaggccaaggtgggtggattacttgaggtcaagagtttgagactagcctggccaacatggtggaaaccccatctctactaaaaatacaaaaattagctgggcgtggtggcaggtgcctgtaatcccagctactcgggaggctgaggcaggagaatcacttgaacctgcgaggtggaggatgcagtgagccaagatcacaacggtgagccaagattgtgccactgcactctaacctgggtgacagagtgaggctccatctcgaaaaaaaaaaaaaaaaagattggttccacaacattgtgaatgtacttaacactacttaactgtaagattaaaaatggttaacatggtaaattttatgttctgtgtatcttaccacaattaataataaaacataaaattatacctttaaggccaggtgcagtggctcatgcctgtaatcccagcactttgcgaggccaaggcagcctgatcacttgaggccaggaatttgagaccagcttggctaacatggcaaaaccctgtctctactaaaaacaaaaattagccaggtgtggtgatgcatgcctgtaatcccagctactcaggaggctgagccatgagaatcgcttgaacccaggaggcggaggttgcaatgagctgagattgcaccactgcactccagcctgggcaacaggcaagactctatctcaaaaaaaaataaaaaataaaaaataaaaagtacgtttgagctaaccctaaccccttagagattttataagcttcagcactttaacaagcactaagttctctattcgtcttttgaaggaatgtttatccattacacaaatctaacctgatattttcctgtgatattttatgactataagcaaagcattatctaattgtatttgtaatagtactcaaaggtatgtggtgagccattttcgctgcctgcccaggccatgtgcatccctccccaaccccaaacagccattcttagagtatcgtctgcatttacaagggtgtgtttcctatgtgtctccctggctaaatcaggtgtcttttctgtgtttgttgttgttatgccacaatagttgattctctgtttgaattctaggacagctgtgggaagaggccgagcgtggctttatcttgcactcatgcaaaagaaactggcagattatctgaaagtgcttatagacaataaacatctcttaaggtatttcatcaaccatgtttgcttatcttttgcttggtaaataattagaacataggctgggtgcggtggctcacacctgtaatcccagcactttgggaggcc

SEQ ID NO: 35136 - DNA, 2300 bp, Homo sapien
ccgcctgcctcagcctcccaaagtgctaggattacaggcgtgagccaccgctcccggccccatttatgttataataaaaaaggatatgcatacatatgttttactttcatatgtatgcatggaacatttctagagtggcgtatcaaccttatagtagtgattgcctgtggaggcagtcatgggagggggttttcactgtaaaccttgggatcgcgtttgaatatttcaccttgcgcatatgttacctgcccttccatgtcttcctgaggactctcacggtctgagtgcctggcagtgcaccttaccaaagaatggaccagcaagaaccacactaaagcttcatgcatcctaagtacaagggctcacccacttgaaatttaaacaaaatatattcttttatttcatatcaggccaaatacgtcagaggaacaaaatatattcttttttctttttttttgagacagttttgtagtttcgctcttattgcccaggctggagtgtagcggcactatctgagcgcactgcaacctccgcctcccaggttcaagcaattctcctgcctcagcctcccaagtagctgagattacaggcgcccgccacctcacctggctaattttttgtatttttagtagagacggggttttgccatgttggccaggctgatctcaaactcctgacctcaactgatccatctgcctcagcctcccaaagtactgggattacaggcatgagccactgtgcctggcctaacaaaatatacccttttcttcttcttttttttttttttttttttttgagatggaatctctccctctgtcgcccaggctggagtgcagtggcacaatcttggctcactgcaacctctgcctcccgagttcaatcagttctcctcctcagcctccctgagtcgctgggactgcaggtgcatgccaccacgcccagctaattttttgtgtgtatttttagtagagacgaggtttcaccgtgttgaccaggctggtctcaaactcttggcctcaggtgatctgcccacctcggcctcccaaagtgctgggattacaggtgtgtgccaccacacccagccacagaatatacttttaatgtcaaaagctgaaaataaactgagtatctaccagtcaggaaataattgaattaattatggaacatatgtaatattccacactgtggtatattttgcagacgtaagaaagaataaagtgtatctactggtatattgaatgagactatactatattgaatgaggaaagtatgatgctgaggagtacatatatcccgtttttgtaaacaaatcaaaaaattccgtgtgtgtgtgtgtgtgtgtgtgtgtgtgtgtgtgtatatttttttttttttttgagacggagtctcgctctgtcgcccaggctggagtgcagtggcgccatctcggctcactgcaagctccgcctcccgggttcacgccattctcctgcctcagcctcccgaggagctgggactacaggcgcccgccaccacgcccggctaattttttgtatttttagtagagacggggtttcaccgtgttagccaggatggtctccatctcctgacctcgtgatctgcccaccttggccttcaaaagtgctgggattacaggcgtgagccaccacgcctggccagttttttttgttttttttttttaatccaaactggcctagactttagactgatgagcttcgtgttttgaaaagtcccgtgcgctcctttccttcagtagtataagggttgtgtcgagccatttgcgtgtggcaagttggtgttttcaccttgcttgctcatcctgaaaccttggtctgcagggagcccactctcctggcagcctggccctggagacgctgactactgtgacccaggctggctttctctctgtactctgggatgtggatgttactgagctctggctgtctcttggtttcttgaagacattggtacttctacaaggtgattggaatattggggaacagttacaaagtattaaccattaataaaaaaaagttcttccttcttatgctccttttaaaaggcatgaaagaattactgatgtccttgatcaaaaaaattatgtggaagaacttaaccggcacttgaggtaagactcctttttttttcaatgtgacagttacatactcggtatcctgtcattgcttcatggaacttcgagttgccacgtatttataaataacttgtttccaaaccaagacaaaagggtcatcattcaggcaacatttatttgtacaaactgaagaagtatgatttcttct

SEQ ID NO: 35137 - DNA, 2300 bp, Homo sapien
cctgaccttgtgatctgcccacctcggcctcccaaagtgctgggattacaggcatgagccactgcacccagccaggttatgttttctttaaaggcaaatgattgtaatagaaaatgtgcttcaggcaggtgtggtggctcatgcctgtaaatcccagctctttgggaggccaaggtggaagacttgcttcagcccaggagtttgagaccagcctgggcaacatggcaacaccctgtctctacaaaaaatttaaaagttagctgtggtgacacacacctgtactcccagctactcgggaggctgaggtgagaggatcacttgagcctaggagttggaggctgcagtgagacagagtaacaccctgtctcaattaaaaaaacaaagaaatgtgcttaatgaaaagcgtagccctcttcagggtgtgctctctgcatctccagagagtggaatgggaattagcttatggtttttgcctgcttcttcccttcgggcaagtaacacgccctttcaagccttggtgtttctttttttgggcacagcagttaatgtgtagaaaccccaggcctgggttctgagtctaagtggagaggaattctcagggggtgtagacactgttgacagagaaagtgaggagttcagtgcttcgaggtccctccactagtgaatgatgccgagagccagccaagcaccaaggacagagatcttgcttctttctccccagctgcaccttcctctctgcaagctgtgtgatgaggctggaatgaggagggatgggttggtgtgtttactcatctgccttgcctcttgtgacagcctctccttaggcaggtcctggacagcgtcctgcttctctatgcttttccctcagccatgagaagtccttccaggggaataagaggtcctcttgggcatatcttcaatgatttgttttttattcctccctgcaaattctttaattctccctctagtgatttaaatatacttttaccgatcattagctggaaaaactggaaagaaagaagagtcaggaaaaaagcccataacccctttactaagtgacaactattcttgtcattttattatttgatttgtattgttcccaacttttcttttttcttttttgagacaggctgtggctttgtcacccaggctggagtgcggtggcatgatctcagctcactgcaacctccgcctcctgggctcaagccatcctcccacctcagcctcctaagtagctggaattacaggcatgagacatcactcctggctgatttttgtgttttttgtagagatggggtttcaccatgttgcccaggctggtctcgaactcctgggctcaagcagtccacccacctcagcctcccaaagtgctggaattacaggtgtgagccactgtacccagccactccatcttttcttaagcatttttaacctagttgatttttttttaatacaggtgagagcataccatataaccttttttccttattagtattatatcttaagtatgttctcaagtgattaaaagtttttgtaaacattttattgagtacatgtttgttttatgcttccactatgatgtaactatttccctaatagtgaacattcaggctgtttctaattttttgtgtctataaatctttgtccacattcagcaatatgctatcatttttgtagagggagaaaatctggagagggcagagatggctaggggcaagggcggaggagagattttactacatacattttcatgtctttggaatttggaaccatgtattattacctattgaaaacaaggaaataaaatatcaaacctgtgaacatacattgtcaactgtgaagatgccaaattaatgtttttaatttgaacaataagattaattttgatgttaagaactgtaaaaattttccttaatcagctttcagctgcaacagaccgaatttgctcacttcaagaagaacagcagcagttaagagaacaaaatgaattaattcgagaaagaagtgaaaagagtgtagaggtgagaaattgacctacatttgggcagcatgtttctcactcagacacacctattgtcaatctcaagctcatggcttaacaacaacccagtcttcagaatgcaaaggtgccttgcttatgtcagaaagggcctctcactgcggtccctgcccacatcactctcagaccacctggatcccttggacggggactcccttcatggcctgtgggcctttgcatgccaaagttcctactcgttcttcagcatccactcacctgccatgtcctccatgatgtcatc

SEQ ID NO: 35138 - DNA, 2300 bp, Homo sapien
agagagagtgaggctctgaatccctaacacagctggctctcaggactagctttgtgaggataccggacttgtgaggagacccagaacgtgagttgttaaaatgccttccgcctctgtacaatcccagagttgcctcatcacactggctcccgtctgctgagggctgaggctgagcctgggactgcatctggcacgagaacacactgcttagcctgcaggggctcaaaaagactttgagggaggctgaggcgagaggatggcctgaggccagaagtccaagacctggccctgttctgcactagtctctaccgctctccccagcaggaacctgagtctgcaggcttctccccggcctccattctgctgcctgctgtctggaagggggaaggctcagatggcatagccatttgttcttgctccattcttgttcagtgtcagaacaattcctttgtttacacaagagacaggactgaacatggtctaaattggcagaactaaaccaaataaaatgaagcagtttgtgcaattgagggaaacagtctgatccttttttttttttttttgagacaggatcttgctatattgcccaggctggaatgcagtggtgcaatcatggctcactgcaaccttgacctcctgggctcaagtgatcctctcactttagtctcccaagtagctgcgactacaggtgcatgccatcacgcctggctaatttttgtattttttctagaggtggggttttgccatgttgcccaggctggtcttgaactcctgacctcaattgacccacctgcctcagcctcccaaagtgctaggattataggcctgagcctttttctttttttcttttttttttttgagatggagtcttgctgcattggccaggctggagtgcggtggtgtgatctcggctcactgcaacctctgcttcctgggctcaagcaattctcctgcctcagcttcccaagtagctgggatgacaggcgcccgacaccacacccagcttattttcttgtacttttactagagatggggtttcaccatattggcctggctggtcttgaactcctgacctcaagtgatccacctgcctcggcctcccaaagtgctgggattagaggcctgagcccccacgcccagcctggcctgggtctttcttaaaagctgagatcagtctgaactatcatcagattagactcatctcagtgacaaaatggcaggtctctgggaaacacaggctagacttcgaagggagggattagaaaacagcatcagggcatttagaaaaatccctgtggcttttactaaagatcgggaggcagctccttcccttcctggtccggctgcagaaacaggaaataggccagcagattgacaggatgagaagaggctgcgcagatggacagaccttgggaagccaggtcaacaaggcaaactgaacatacaagaactctgggaaacacaatttaggaagaatccagatgttcccaagccaatgaaactggaaactgttcctgtagctaatgtagggcctgcgaagaggctttgccatctctgtcatccggtataggcttgcaagaggaagaagggaagaggggagagagcacaaaagcaactcctcaggtagtcctgtctgggtttgcaaacacctgatgctgtgacacccacagcactcactgggagggaatggtggccaggcagctcacactgggatttggaagctaggttagccggtagtgccaggcggccacaaagtgcaacaatacatttgtttgtttgtttttgagacagagtttcactcttattgcccaggctggagtgcaatggcgcgatctcggctcaccgcaacctccgcctcccaggttcaagcgattctcctgcctcagcctcctgagtagctgggattacaggcgcgctccaccatgcccggctaattttatatttttagtagagatggggtttctccacgttggtcaggctggtcttgaactcctgacctcaggtgatccacccacctcagcctcccaaagggctgggattacaggcatgagccaccacacccggccacaatgatacattttaaagatcagagaccaaccacagtttcgaggtctatggtccactaggaggggacctgtgacactgccttgctgtccatccaatgtaaagaggaaaacactggctgcaaaccccagaagccagctccacgccagctctgttccacgtctgcttctggtgagtgctctcgggatgccctcacagctggcctatgctctgagcatggggacagacactgggcc

SEQ ID NO: 35139 - DNA, 2300 bp, Homo sapien
atttaaaaaccttgttttaatataagttggacaatttatatataagagaattggctataagtgtatgaaatgtattctaccttactactattctttttttttttttttttgagacggagttttgctcttattgcccaggctggagtgcaatggcgtgatctcagctgactgcaactgctgcctcctgggtttaagtgattctcctgcctcagtcttgccaagtggttgggattacaggcatgcatcaccatgcctggctaatttttttttttttttttttttgagagggagtctttgtagcccaggctggagggcagtggtgtgatctcagctcactgcttcctctgcctcctgggttcaggtgattctcctgcctcagcctccagagtagctgggattacaggcgtgtgcatgcatagataatttttgtatctttagtagagatggggtttcaccatgttggccaagctggtctgaaactcctgatctcaagtgatctgcctgcctcggcctcccaaaatgctggtattacacgagtgagccaccgcacctggccggactctcttcttgattacctcagccaaagtgccttctgaaatggtaccacaggtgtgtgcttctagttcagtttgtagtagagggcctggtatgtaccgtcattcaccctgcctgctccatctgcatccccctcacatccagcaagagttttcctttacacagggtttacggctcccctgctgatcacctgccaaagccttctctcggagataacacccttgccaaggcctaagtggcctttgaagatcaggccctgcttagctctgggctcctgtctttcttttgatgtcctctctactttttctcaaacctgtcaaaactggattcggactctgtggcactggggttggaaacatgctttgtccgcatcttcccagggtggcactcaggcttgcactagctaaggtagctctgcggcagggtccagcactaccttattgttaatttgtgtattgtctgtgtccactaaagctggggtgaggaaggcagccaaatcagacatggggaggcctgggaggctacggcatcttaggttttgggcagtgctgctagaaaccacgaacattagtcatctcgcagcatgtgtgcacatggggtgacccgggggcctcctcgaatgcagcgtctacgcctggtgaatggacgcactcttaccaattctgctctgggagatgcagcggtaacctaccgagcgcagaggccggcgcgcacccgtggagcccgcgctcgcgatccctcctcgtgccagggccccagggcagtcaaggcctgccgaccgttaggcgggtcaaggggtacacagggtgcgaattcgttaggcaaaagctgggtacaggcgcgagccacaggcacggaaacctcgcgccgaccggggccctaggcccgacgacggcaggtaaggggaagtggaggcacacagggctgggacgtgccccaggcaccatacgggtggcttcgggcgcgggacgtccgcagccccgcagctcccaggacgttcgacaatctgcagctgaccagcttcggccggtttggggataaagggaagacaggcggcgcggggagtgggaacgcctgaaggccgcgcccctcctttcaggtcggccaggagcgcgccggtaagagcctgggggcaaggggtagaaagacgcccacctcatcacaacccagagctcgggactcctatacagtcccatagggaacaggcggccgccattcccctcccccacgctggcgggtaaggctagagaacggtttcaaggaagacgcatgcgcatgaaataattataaaccgctaggactccgaagttcaatattcgcgggaaggcgcaggcgcaacaaaaagcccggcgggtttatgggtgggggtgctgagcccaaaacccaagcgtgtaataatccgccggcgggaggtgggctggctcttgaaattacgcatgcgccagagctctttgtgacgcaacggggcggtgcgggcagctggctgcgcgtgcgcagaactcgcacaagggaccttatttaggttgcgcaggcgcccgctggccatttcgtcttagccacgcagaagtcgcgtgtctaggtgagtcgcggtgggtcctcgcttgcagttcagcgaccacggtgggtaccgtttttgcgaggattgtttgtccccatatctctgggagggccacggggaccttggcgagctgcaggctgccgtcgagagccgcgagtggttcgctgaatctcggcaccgccgctga

SEQ ID NO: 35140 - DNA, 2300 bp, Homo sapien
accaagacataaagaccactgaggcaagatgatgaatttttttttttttttttaaagacagagtcctgctctgttgcccaggcaggagtgcagtggtgcaatctctgctcactgcaacctccacctcccaggttcaagtgattctcctgcctcagcctcctgagtagctgggattacaggcacgcgacaccatgcccggctactttttgtatttttagtagagacggggtttcaccatgttggtcaggctggtctctaactcctgaactcttgatccacctgcctcggcctcccaaagtgctgggattacaggcatgagccccacgcgtgggctgatgattaactttttatttaaaaaaacctttggccgagcatggtggctcatgcttgtaatctcagtactttgggaggccgaggcaggcagatcacttgaggtcaggagttccagaccagcctggccaacatggcaaaaccccatctcaactaaaacttaaaaaaaagtagccaggtgtggtggcacacacctgtaatccctctacttgggaggctaaggcatgagaattgcttgaacctaggaggcagaggttgcagtgagccaagattgcaccactgtactccagcctgggtgacagagttagactgtctcaaaaacaaaaccaaacaaaaaaacctttcattgccagccatggtggctcacacctgtaatcccagcactttctctgcgaggctgaggtggaatgattccttgagcccaagaattcaagaccagcctgggcaacaaaatgagaccccattgctacaaaaaataaataaataaataaataaataaataaataatctgagcaaggtggcacatgcctgtggtcctacctactcaggaggctgaggcaggaggattgtttgagcccagaaggtagaggctgtggtgagccatgtttgcaccactgcactccagcctgggtgacgggctgtgtctcaaacaaacaaataaaaaataaaaatttaaaaaccttgttttaatataagttggacaatttatatataagagaattggctataagtgtatgaaatgtattctaccttactactattctttttttttttttttttgagacggagttttgctcttattgcccaggctggagtgcaatggcgtgatctcagctgactgcaactgctgcctcctgggtttaagtgattctcctgcctcagtcttgccaagtggttgggattacaggcatgcatcaccatgcctggctaatttttttttttttttttttttgagagggagtctttgtagcccaggctggagggcagtggtgtgatctcagctcactgcttcctctgcctcctgggttcaggtgattctcctgcctcagcctccagagtagctgggattacaggcgtgtgcatgcatagataatttttgtatctttagtagagatggggtttcaccatgttggccaagctggtctgaaactcctgatctcaagtgatctgcctgcctcggcctcccaaaatgctggtattacacgagtgagccaccgcacctggccggactctcttcttgattacctcagccaaagtgccttctgaaatggtaccacaggtgtgtgcttctagttcagtttgtagtagagggcctggtatgtaccgtcattcaccctgcctgctccatctgcatccccctcacatccagcaagagttttcctttacacagggtttacggctcccctgctgatcacctgccaaagccttctctcggagataacacccttgccaaggcctaagtggcctttgaagatcaggccctgcttagctctgggctcctgtctttcttttgatgtcctctctactttttctcaaacctgtcaaaactggattcggactctgtggcactggggttggaaacatgctttgtccgcatcttcccagggtggcactcaggcttgcactagctaaggtagctctgcggcagggtccagcactaccttattgttaatttgtgtattgtctgtgtccactaaagctggggtgaggaaggcagccaaatcagacatggggaggcctgggaggctacggcatcttaggttttgggcagtgctgctagaaaccacgaacattagtcatctcgcagcatgtgtgcacatggggtgacccgggggcctcctcgaatgcagcgtctacgcctggtgaatggacgcactcttaccaattctgctctgggagatgcagcggtaacctaccgagcgcagaggccggcgcgcacccgtggagcccgcgctcgcgatccctcctcg

SEQ ID NO: 35141 - DNA, 2300 bp, Homo sapien
accccattctcccacctcagcctcccgagtagctgggactacaggcgcccgccaccacacccggctaattttttgtatttttagtagagacggggtttcactgtgttagccaggatggtctcaatctcctgacctcgtgatcctcccaccttagcctcccgaagtgctgggattacaggtgtgagtcaccgtgaccagctctgacttccttttctaatgctggagacagaggtgaccctgtggagacgtggaccctctattaggtggaggggagaggaggaaagggacggagggagggagggaagaaagggagaaaacaccaataactcaaagaagaatcaccatgtaagcaactggtgcccatcaggaacatgcatcttgcaagaatcaccatgtaagcaactggtgcccatcaggaacatgcatcttgcaagaatcaccatgtaagcaactggtgcccatcaggaacatgcatcttgcaagaatcaccatgtaagcaactggtgcccatcaggaacatgcatcttgcaagaatcaccatgtaagcaactggtgcccatcaggaacatgcatcttgcaagaatcaccatgtaagcaactggtgcccatcaggaacatgcatcttgcaagaatcaccatgtaagcaactggtgcccatcaggaacatgcatcttgcaagaatcaccatgtaagcaactggtgcccatcaggaacatgcatcttgcaagaatcaccatgtaagcaactggtgcccatcaggaacatgcatcttgcaagaatcaccatgtaagcaactggtgcccatcaggaacatgcatcttgcaagaatcaccatgtaagcaactggtgcccatcaggaacatgcatcttgcaagaatccccatgtaagcaactggtgcccatcaggaacatgcatcttgcaagaatccccatgtaagcaactggtgcccatcaggaacatgcatcttgcaagaatcaccatgtaagcaactggtgcccatcaggaacatgcatcttgcctgctgttatctaatagtcgagacgtgaagtgggctggcaaatttgtgggttctgttttttttttcaagatggagtctcactctgtcgcccaggctggagtgcggtggcgtgatctcagctcactgcaacctctgcctcccgggttcatgccattctcctgcctcagcctcccgagtagctccgacttcaggcacccgccaccacgctaattttttgtatttttagtagagagggggtttcaccgtgttagctaggatggtcttgatctcctgacctcgtgagccaccgcgcccggccggcaaatttatgggttcttgttatggagaattgacctaggttgatattcattctgccagagccagtggaatttgtagtttctgaaaagagttgtgttatttggcaaaacctgaattgggcatcacttatcttcatgtacttagccaaagccctaaaaaaacttttttgaggctgtgtgcggtggttcacgcctgtaatcccagcactttgggaggccgagacgggccgatcacgaggtcaggagtttgagatcagcctggccaagatagtgaaaccctgtctctactaaaaattaaaaaaataagccaggcgtcgtggcaggcacctgtaatcccagctactcaggaggctgaggcaaagaattgcttgaacccaagaggcggaggttgcagtgagcaggcagaggagaccctggagcaataatccctggaaataacaggaatttcagggacaaatccagatcctcaaaaactgtgaaactgagggagtctgagcagagatctccaatgaaccaggtaccatctgtgtgccagggcaagaggacggaaaacggaccaggtctgtttctgacaggttgagcaggtggagtgggaaggagggatccggaaggccaggagggtggagggaactgcaggggtgggtggtggtgggcggggctgggctttagcctcctcctcccactgcccaccccacccttaggagccctttgtgagggggaggccccagctctgtgatgtggacctgggccccaataacttgtcccagaggggatgcccagggctcagttgcctgaggacagcagtgcagttgacatggatattctctttcctctggacagtgttattggtacagagctgtgccccagccccattccccagatcatccatttcgtcctctttgttgtgttcagcctggtgatcctgattatcttacgcctctacattcccagggagccgtcctcagtgcctcccagagaggaggac

SEQ ID NO: 35142 - DNA, 2300 bp, Homo sapien
gttccccatgtcccatctttccagcgcccaagggagcctctcaggggagtctcatcaccccccgccccaccatcacagagcagcctgctcctggcctgtatccaaacacccctgggggcggctgccctgggcgtgctcccctttccctgatggccgctagaactccgtgaggagaggctcgccagggtcacccagacagtccctgatcccacattgtcccgacacatgaggcttcaccccggaggaaataggaaaagggagtgaatcctgtgggctcccctcacaaaaggaaagctacgtgctgtcacttgggcgcaaggcgggctatgaggctggagaaaagctcccagggacgacgcctccgggagcttttttctttttctttttttttttttttttaattgatcattcttgggtgtttctggcagagggggatttggcagggtcataggacaatagtggagggaaggtcagcagataaacatgtgaacaagcgtctctggttttcctaggcagaggaccctgcggccttccgcagtgtttgtgtccctgggtacttgagattagggagtggtgatgactcttaaggagcatgctgccttcaagcatctgtttaacaaagcacatcttgcaccgcccttaatccatttaaccctgagtggacacagcacatgtttcagagagcacggggttgggggtaaggtcatagatcaacaggatcccaaggcagaagaatttttcttagtacagaacaaaatgaagtctcccatgtctacttctttccacacagacacagcaacaatccgatcgctctatcttttccccacctttcccccctttctattccacaaaaccgccatcgtcatcatggcccgttctcaatgagctgttgggtacacctcccagatggggtggtggccgggcagaggggctcctcacctcccagacggggctgccgggcagaggcgccccccacctccctcctggacggggcggctgccgggcggaggctgaccccccacctccctcccggacggggtggctgccgggcggaggggctcctcacttcccagacgataggcggccaggcagagacgctcctcacttcccagacggggtggcggccgggcagaggctgcaatctcggcactttgggaggccaaggcaggcggctgggaggtggaggttgtagctagccgagatcacgccactgcactccagcctgggcaagattgagcactgagtgagcgagactccgtctgcaatcccggcacctcgggaggccctcttttttttttttgagatggagtcgctctgttgcccaggctggagtgcagtggcgcaatctcagctcactgcaacctccacctcccgggttcaagcaattctcctgcatcagcctctggagtagctgggaatataagtgcccgccaccacgcccggctaattttttgtatttttagtagagatggggtttcacaatgttggccaggctgcctttaaattcctgacctcagatgatccgcctgccctggcctcccaaagtgctggaattacaggcataagccaccacatctggccgcctcctgaagtctttgctgcacagggctccatccttttgtggggccaggagggtgggattctgccctcatctgctggccagtgctcccacctcattttaccaggggacagcccggccaggagaggttggcgtgggatgcacccaccactcgggggcctgtgggaggtagtcaccccctcctggccagactgagcgtctttgctttgcagtccacttattcaagtgttaatccctccctcaccaccataacccatctcctgctttccagcttgcagaagtctcttgaaagaactagagaacactaaggaccacactctcctgctggaaaagtgaggctctttcctcttccctcccgtgtcctccttcctaccaggacctaggatgccaccccagggcctagggctgatctgggaggggagatcacagccgtgatgtcactaaagccctgggcaggggtaggcagagctttgtgaagtcagcaggggggccctggaggtccacaggtgcccagtgctcccggctgcagcctgtgcctcctgtctcctgcaggcgcctgaagaagctctctagggagggcagctcccatcaccttccacgccaagtccgcccagggccagtgtacaaaccagcacctgctaggaaccaccggccacgtggggggcgtgggaaagcttctcccaccagcttccatgtgtccccacgggctcccctggctcct

SEQ ID NO: 35143 - DNA, 2300 bp, Homo sapien
tttcacagatgctgtgtttttacaaattgaatgtggcaaccctgcatcaagtaagtctataagcaccatttttccaacagcacgtactcacttctggtctctgtcacattttgggaattcgtataatatgttttcattattatatctgtcatggtgatccaggttgatgttactattgtaattgctttggactgcacaaacgatgcccatgtaaaacatctgtttgtttttattatttatttatttagagacgggttctcactctgttgcccaggctggatgaaatgcagtggcctgatcttagctcactgcagcctcctcaatcaggagtcaaggatactcctgcctcagtcttcctagtatctgggtctacgggtgtgcaccatgccaggctaatttttttatttttatgtttgtagagacaggggtctcactatgttgcccaggctagtcttgaactcctggcctcaaatgatccacctgcatcagcttcccaaagtgctcagatcacagggagagccacctcgcccagccaattctgacctctttgccagtccattctggatggaagcagtccctccccttcagaatcccattgaattctccatagtaccacagtcttttggcacttacctttgcaggagtagctcttttgctcacaaatgtacttcctgtaactacattttaagctcattatttggatcatgtagcatccagaattttattctgctttgaatagctgcttccccaggtagacaggaaaccaaaattctcctacacaaattttggggctgaagttggggcgccgtggctcacgcctgtaatcccagcactgtgggaggcagaggcaggtcgatcacctgaggtcagcctggccaacatggtgaaacctgtctctactaaaatacaaaaattagccgggcgtggtggcgggcgcctgtaatcccagctactcgggaggctgagggagaatcgcttgaacccgggaggcggaggttgtagtgagctaagatcgcaccactagactccagcctgagcgacagagcaagacttcgtctcaaaaaaataaaaataaaaaaaatttgggggttgagggttggatgatactaactcatgcaaacaccaaaccctgcctttcttccccttcccggtggcaagagggcttttcagatcagtgatacattcgctgattctagtgttttccaccctagtagtcaagcctttgggtgtccaaacaaatagagaacaagagatcaggatctctaaaggtctagaaaaaccctgggccacttccattttgtgaggttctcagcatactgaaaactgaagatgtactaagagtgggttactaaaatggtggcgtatcttaaatctttccatggcaccatcctttctctcgtcctgtcatccctgtatctctctgccctgacacctaatctcacttcaggaaacataaattgaaagttcaaataacctcggattatattattctggactgtgtgttatgctgggcgacgaggctgcgcaggctcctgggccgagccatgactctgcaggaactgcggcgccggctcacacagcgcggagcagtgcacgccaatccggccaggcgctcgcgctgggttctgctcacgcccgtaggggcccgcgttcgctgcaacgggcccttcctgatggccgatcgtcggactcctaccccttttgccggctgccgtttgccccgtcagcgaagggcgcgcgatgcgtcccaagtctcggctccaggaaccagacgggtgagggctactgggggttgggttggaacgccccgaaggcaccacagcaaccgacgcgggaacgcctgttaaaccagccccgccccgagacgcgcgcgcccggcggtctcgatccagcgtggcccgcccctcacctcccgcccaaccaacagccacttcctgcctcactcccggccaatcttcacactccacgaagaatagccgtagggggcgtatgggacggtgcgtagagcgatgcccacgccggccaaccggatgtcggggcttgcgcgggagggcgggacttggcgccggctgtggctactcaggggccaggggcgggcacagggccgggcttcgtgcggtggggctcgctcgcgcggcagcggtggccgaggcctcttggttctgcggcacgtgacggtcgggccgcctccgcctctctctttactgcggcgcggggcaaggtgtgcgggcgggaaggggcacgggcacccccgcggtccccgggaggctagaggtgagaggggagacctgagcgcgtcc

SEQ ID NO: 35144 - DNA, 2300 bp, Homo sapien
caggtgtgtgctaccatacctggctaaatttttctttttttgattttttgtagagacaggataatttttttttttttttgtatagacagggtcaggctatgtttatgttggccaggctgggaaataaggtcttaatagaggaagttgaagattcctgggggaatagcatgtagagcagctatagagggagagggtgctgattactagctaaaagacttagaaatttttgcaaacatggactcatgatagtttttgggtgatgagtcttcttgtaggatagcttgaaagaggaggaggaaactagaggccctggtaatataaggtaacattaagtatcctgatgtcagtaatggagaagagtgaaagactatgattgattgggtgactgtgtgggcagaggatgtgaggagaaaaggacatcttgtgtgtgtgtgcgcacacatttttagttgtgtatcttctacttgttttctcccccaccttgtacctgtactttctcaagcccaaaaatgaaaatttacctgctaccaaccacatcatcttgtgcatctgtgtagctcagtttttatttctttagatctgtggtcctccgtggaaagagagccactaccccaagacacatctaatataatacacagggcgcttacgtggttagaaaagaagagataagccgggtgcggtggctcactcctgtaatcccagcactttggaaggccgaggcgggcagatcacgacgtcaagagattgagactatcctggccaacacggtgaaaccctgtctctattaaaaataacaaaaattagctggatgtggtggtgcacacctgtcatcccacctacttgggaggctgaggtaggagaatcacttgaacccaggaggcggaggttgcagtgagccaagatagtgccaatgcatcccagcctggcgatagagcaagactcatctcaggaaaaaaaaaaaaaaggagcttgttttggccaggtgcagtggctcacgcctgtaatcccagcactttgggaggctgaggcaggtggatcacctgaggtcaggagttcgagaccagcctggccaacatggcgaaaccctgtctatactaaaagtacaaaaattagccgggcatggtggtgggtgcctgtaatcacagctactcaagaggctgaggtgggagaattacttgaacctgggaggcggcggttgcagtgagctgagatggtgccactgcactccagcctgggcgacagagggagaatccatcacaaaataaataaataaaatatataaattttaaaaagtagcttgttcttagtttaatattctttttgagttctaaaacgctaatttgaaaacatgtctattgatgatatttgagcaaccgtatccatattaagccttaatatgagaggaattatcttctgtgttaatttttttttttgagacgaactcttgctctgtcacgcaggctagagtgtagtggcgtgctcactgcaacctccacctcctgggttcaagcagttctcctgactcagcctcccaagtagctgagactacaggcgcccgctatcgctcccagctaatttttgtatttttagtagagaagagtttcgccatgttggccaggctggttgtgaactcctgacctagtgagccacctgcctcggcctcccaaagtgctgggattacaggcgtgagccacggcgcccggccatctctgttatttcattgtaatgttttaacgggtaccccctgtaaattagtgtatgaaagggcttttgtctgttgtaaagcactttacaaatgcaaaagtttgttggaaattgtatttgaatgccccacatctgtgtaaccaatcctctctatatgaggatgttgtgtatgtttcagttttattttgaaattttccagaaatggaatcttttaactgattttagggaaaccctttaatctctctaggctgcctttctttatctatgaaatgaaatagtaagttctttttagctctgcgatttaaaagctttaattttaaatgagagagtggttagtgatcttcatgaagtttgataggtggcaatacatttaactgattttgctctttatgtgtagatcatggaagggaagtggttgctgtgtatgttactggtgcttggaactgctattgttgaggctcatgatggacatgatgatgatgtgattgatattgaggatgaccttgacgatgtcattgaagaggtagaagactcaaaaccagataccactgctcctccttcatctcccaaggtttgaaatggtctttgaatctatt

SEQ ID NO: 35145 - DNA, 2300 bp, Homo sapien
aacctctgccttccggtttcaagcgattctcttgcctcagactcccgagtagctgggattacaggtgcctgccaccacgcctggctaatttttatatttttagcagagatggtgtttcaccatgttggccaggctggtctcgaactcctgacctcgcgatccgcccacctcaacctcctaaagtgctgggattacaggcgtgagccactgcatctggtcaactttctttttttgagactgagtctcactctagtggccaggctggagtgcaatggctcagtctcggcacactgccacctccacctcctgggttcaagcaattctcctgactcagcctcccgagtagctgggagcacaggtgtgctcacaggtgtgctcacctcacctggctgattttttgtatttttagtagagacggggcttcgccatgttggccaggctggtctcgaactcctgacctcaggtgatccacctgccttcgcctttcgaagtcctggggtttcaggcgggagccactgtgcccagccaagaataactttcatagttgctttgtaactatatttaaaaacaaaagagaaatggaaaactgttgatttgggtaccctgctcttgggtgctagggttgcttcagccataggatccacagctgagtctggacaatctgtgatgtggtgggtagaggactgtggtttgagtcagcatcttgactacatcaagtcagctcactgcttggcctcaatgcttgcaactataaaaagactgaggcccaaaagagatggtaaggatacaagtagtaaggttgtgaggctttaggcctcatgcaaaaatgtacaccctcagacctttgttccttttatctttctagccaagtaaaattatttataatctctacaaagagtggcaattaaaattatttataatcattaatttctactttatttatatacaaatactaatatatgtatatacatatacagaaacaggagaagctggtctgatactgtgaaaacatttcagcaggatcttggcatagtatatgtatatatacatatactaatatatgtttttctgtttgtaaattttttatttttttcctcatagtcgttaaagatgttatgtgaatgtatttttaattgtgtagtcaaacaataagataaaagttttactttaaaaaagttgccctttaggctgggcgtagtggctcacgcctataatcccagcacttgagaggctgaggtgggtggatcacctgaggtcagccattcgagaccagcctggccaacatagtgaaacaccatctctactaaaagcacaaaaattggcctggtatggtggcacacacctgtagtcccagctgcttaggcacgaggctgaggcacaaggatcacttgaacacaggaggcagaagttacagtgaaaaagaagttgccctttagttgttctcctgttggtggccatttaggtggattgtcacttttgctttcagagtcactgctgctgtaataatccttgtacatgtctgggtgtatgttgtgagtatttctctaggtagttatctagaagtgaattgctggttgatgatcatgtgcgttttattttaaatcaccactgaagaagtacgtactgacttatgctcccactctcattagcagttgctaagagtggaggctgttgaatgggccaggaacttgaggggttggtttggaccaaggtcatgggtgacagtagaaattggaagtagttggaatcctgcagtcttagaggcagagtgcgtaaaataatctgtagcatttgttatttattttcctgttgcttatttcaagtttcatgaagttggcatttctctccattgttcatgcaaaatttctcttacggtagattcaccataaacttttgttgatcattatctgaaatgattttctgaaacatttttttttctagggaatctggaaacccaggaaaataccaaatccagatttctttgaagatctggaacctttcagaatgactccttttagtgctattggtttggagctgtggtccatgacctctgacattttttttgacaactttatcatttgtgctgatcgaagaatagttgatgattgggccaatgatggatggggcctgaagaaagctgctgatggggctgctgaggttcgtgtttgctgcttgtgcatttgtgtctgttattgtaaggagctgttattttgtgaaagtctgtgttaaggttttttttcttcatttggcaatattggcataaaaagtataaccatatgcctgcaaaagacacaatattg

SEQ ID NO: 35146 - DNA, 2300 bp, Homo sapien
gctcttaaaaagacacttatattttgattttacatgctggttacctgttccattgttgtcaaatgcccactctccatcagatgtgttcctccattttcttatccacaaagtactcctcacttttcaatttgtcatgttactaaatggtgttacattaaagccctgtgttaagtgtctgcttttgactgaatttcttcatagtaaccttcagtgtgtgtgtgtgactatgttcaattagtgggttgatcttcgtataattggccactatgtgagagttcactactaggcagaaactattatggacagtgaaataatgacttttatctcaccacgtgagtttgatgcagtcttttctgtctagcccttgcctcttcctgcccatgtgattgcggtgcagtagtttctgttgtataatagtgtggacagcagctcagaaaaggagggaatgctactgataatttgtagataatattctttaagacttaggggaaccattgaactttgaaatttttattagaaaattatttgttcagaatcagactccattattttacatatacttaaatactttaggggtatttttgaaagttagcccagttttttatgtgctattaaatttttagattacatactaaagaaaagtatgtacacagaatgtagtgctcctagttactattttttctattaagaaatagtttagttctggtgtaaaatttgtttgaatgctaaaaaaaaaaaagcaggactgcattatggcacttttgccttggtggcccactttctccatttaaaacattaggatttgtatttttctgctgcgtttgtatgaagacatatttgattgttgttttctcttgattttaaaataaaacctcatgagccctagtaaaaagctagagtaacgaatgtttgaactactgatggtgtatctcaatgtgcagcctcctgccacctcctgcttaaccttttagcaattagagtgcccatatctagagttcctgatatcctttggcatcacactatctagttttagtactaacactgtttgattgctccagtccctctactcccctttgcctattagttttaataatggggcataatttgtcttggtttggttttgttgagtaactcagttttacctaaaggactgtttttggtccggcgcggcggctcacgcctgtaatcgcggtactttggcaggccgaggtgggcggatcacctgaggtcaggagtgggagaccagcctgaccgacatggagacaccccgtctctactaaaaatacaaaattagccgcgcgtggtggcgcatgcctgtaatcccagctactggagaggctgaggcaggagaatcgcttgagcctggaaggcggtggttgtggtgaaacgtcgtcctttgcatttccagttccctctaatggagctgcactcttgcatgcttttgctcacatcttctggactttttttttaagtagtgagtaatactgcacttttgaaacttgctcgggcttttacaaataggtggaaactaccagtgattcggaatgttgcaagaggaaactaccagctcactagacgattctgaccaattatggggctggatacaaggaataaggtcaaagtaaaacggctgacattaaaatagcgtggctacttagagtttatcaaagtcgaaatttaaaaaataatttaaaaaaaaggtctctgtactgccaggcgggcgacagggactggccagctgcgccgcactcgcctgccagattccccttttctcggggtagccggaagggcctgccttcagcgggtgctgtgcaggaaaccaatagccgcctcttggacgggctcctgtcagtcacgcttagctccgcccccaggattaaggcccgcccaggggcttccctccgcccttcgcttgagaattccttttaaataccgctctggcgcccgagcgcgcctcttgcgtgctcgtccccacgccctcgggcggccggttcttccttctctgattggccagggcccctgctcatcagtcgtgatgcacaaggtctcttaccgaggccccgccttcttccgagaggcccgaaaacaattttaagatggcggccgcggcggtagcgcggaaaacaatggggccggggcggtggggagaggccgaggcttgaggtaggcagcaagcgccggctgggggtcgggccgagcggggcaggaggaaaacccgccgccgcgcgcgagcccgctccgctgccctcgggggcatggcgcggccgtgaggcggagaggggtagccgcggggagcgaag

SEQ ID NO: 35147 - DNA, 2300 bp, Homo sapien
ctccttagggctctgtggaggctcagggaggagctttcgcttccctcctgatgctggtgcctccagagctagacaggaagatggaagctgggtggcccgagcaggggtgggggcttggctggccctcctgtcagcttgagctggcttgagcccaggcagggccctgacagcctgggcaggctcagagggagggaggtgggaaccaagagacccggggagggctcccggggccaagacccaggtccctgccctgcacatctgccaagggacttcctcagaagctgctgatgttaggctttggcttcctgctgtggactgaggggatgaactccgacgggaggacattcaggccttggaggaaatgagagcttggctgacaggagggcctggactcacgaagacacttggacacccacaagcacagagacatgggtgtgtgacaactgaccaaggggcatgcaggtatgtatgcgtggtgcacacagacaccctgggcacagcccactggcaccagcgtcaacccctgcgtggtgggctgcatcccacccttcaggcaggccctgtggggcaggtttcagggaggaaggaggctgagtgggcagagtctgaggacgcggccaccatcgctccctggcactacatctgtgtccgggatctaggaggcagtcctccatcactgagccccaagatgactgtcacagcttggtctaaagcaggggccgggcctgagccctggcccctgccctggaggagctcacagagcccccagctggggcatatctggtttccgggggcaggggcgatacccagaggaggaagaagggattctgagagagcccaacaggctccgagcctcaggctggagctgagcttggggcagcaaggaaggaccaggtgcgagggcagaaccatgcggcccgacccctgcagcacggcctgtggcctcccccagctcctgcccgtgcttctgggtcagtctggactttgccacttctgaccaaaagccaccgcaaacccactcaagccaaaagaggaagtgaccgttaggcccaactgggaaggctggcggccaggggcactccaggcagggcgaggggggcggccgggggcgctccaggcggggcgagggagacacccagaactccaggcaggagtcctcgggtgccacctttcctctccacctggccctgcgtgggctctgtcctcagggtggcccgccgtagtccccctccccactctgagtttcctgtcccaaagtcctaaggaagtttccagaactacatctcaccatcttgagtcagccttggctcagtgtccatctcacaggcctggaaggggcaggagtcagcactgtccagaccacagggcctgagtgtggggagggcagccgtctaggaaggtggtggagggttgttaccttgaggcaagagggctgcggggcagaaagacacagcaggtgactgttgtgggaggcccaagagaggcctgggagagggatggcccacaagggctgaccctcccgccacccagggggccttggacaggtttcctcctggcagggtggcccttgtgcatggaacccctacaacgactaaggctggcaggcatgaggtttcctgaaggagaaagagcttgtggggcccagtgtggctgggggggcgctgggactccattctgaagccaaaggcactgggaagggcttccgcagaggagggtttggcaggggttgccaggaacagcctggatggggacagggaacagataaggtgggtggaggagttagccgggagcctggggctggctccagcatgatgtgggggtctgcaaggccctggagaaagtggggtggtgcagcagggggcacacccacagctggagctgacccagatggacagcttgggctctgccacgcgggactaggcaaggaaggggcacgaacaagcaggaagtggtgaggcggtctccagctagctgctctcccctgcccagactttggtttcctccctgctggcttggcctggctccctggctctgtgtggtatggtcacacccccgtgcaccccctccactgagatggggcggggagagcaccgaggctgctcttcctctcctgggccgtcctctgagcagcagacggggctaagcgttccccagctcgccttcacacacagcccgtgccaccacaccgacggtaccatgaaggacgaggtagctctactggctgctgtcaccctcctgggagtcctgctgcaaggtgggctggttcctatctaggaagagggtgggccttagatccctac

SEQ ID NO: 35148 - DNA, 2300 bp, Homo sapien
gtggggccctttatctcctggtaaacaggacccgggggagaggggaggcccctaggaaggaagcgagggtaaggcgcaggctgttgccagggtgattcaggcagcatcacccaccactgcccacccagcctgtccatctgaggcagtcgtgtgggacagagaaagccagggtggggctcgggggtgggggtgggcagtggctgtaagtaggcaagcggggactggcatctaggcaggagggaggcgcacctgcaggtgcaggtggctctgaacccattcctgatggctctctaggcctctgcacctccagtcccatccctgtgggcgagtgctgcctacacctggtgtcacccagcaatgggtgagccctggggatagccagctctgcattcaaggggttaggtttccagggtaaccgagcccctgagcccagcgtggagcctggcagagccagtaatctgactcccctttccctcccgccaggggctgtccagaggctccgctttgcctcagcctttagccccagagaggcagggtgtggagggtgggggctggcttcttgggtaagagatgcctcagggaagatctacctggctccctgctccttaaacctttccctcctgcccaggtccaccccttcctcttccctggtcacttggcacttcgacctcctgcccgtttcggaaaggggtgtgccctgaggtgactgaactttgcctgatcatgaccttgatcatgcacagggctgctggtggggtgaggccatcccacgcaactctggggtctgtgaagccaccaaggatcaaggaatggaagagctgcctgagtgtagagggagttcggtcaggcttcttaaacttggagacttggaaacagaaggccttgtaggccacataggttttcagagactcgcctggcagaggcctggagcgtcctgctgcgtggactgtgggcaccgagccaccaggaggttgttgatctcattcttgctcactggtccctgccagactggtggtgcctctctactgtcgggcagccccacctctgtgctgccccatccacctacagccctcatgcctgggcccagctggaggttctgacaggggccccctggggtggcatgcggacccttcagggtgccccaggcgcagcacaggtctccagagacacaggcaccagggcgttcagagctagtcccctcgctgctgttgactgtccttgagcagccccagggccggtttctcaacctcatttgctcacctgagcaatgaagtgaggtgggctcctggaactgcagcagccaccccccggggccatcgtgaggctaagaatccagtgcagggtgagcaaccagcgaccgctacaaggacagtgaagagctagcaccaggaccttgggtagcccacccgctggagggagcgtgtgctgcaaaaagcaagagtgggctttggaggccaacggatggagcggattcagtctgaggctgttccagcccttgcttaggatccacctacctaggtctggaaatcgtatttccacttcagatgccttctcagaggataaaataacccccggtgggggagagtactggaagagggctaattcccctggttttctccccatgagcattagtgtcagtgtaattttagagtgaccccagctatgtcacgtgtggcaggcacaagaacagatgtcaatgagctattgcagaggtggacacccagatgtgtgcgctggcacactggaggggcccgtagggtggctctagaccgccccctcgtgacggcttgcctaccacctgcaggcgacgttgtggacgtttaccagcgggagttcctggcgctgcgcgatcggttgcacgcagctgagcaggagagcctcaagcgctccaaggagctcaacctggtgctggacgagatcaagagggccgtgtcagaaaggcaggcgctgcgagacggagacggcaatcgcacctggggccgcctaacaggtgaggtctggggcgggagggggaaaaggcgggggcgggctggttgtaggttccctggtctcagtcccgatccttcccgacccacccagaggacccccgattgaagccgtggaacggctcacaccggcacgtgctgcacctgcccaccgtcttccatcacctgccacacctgctggccaaggagagcagtctgcagcccgcggtgcgcgtgggccagggccgcaccggaggtatgggcgcagacagggaggagcacggggtggggggacgggtggcccccgcaccctttccagcgtcgggcctccgtccc

SEQ ID NO: 35149 - DNA, 2300 bp, Homo sapien
gcccctaggggatagaagcctaaggatcctgtgaggtatgagtatggggtgacataggcctcccttgtcgaggggctgtcactgtttctgtggtgacccagtagtaccaggtctttggaggcctcaagagaagctgggaatctgggctcttatgtgaacccatctcgttgtcacatgtagaaaatctgtcttaaacccctggtgaaaccagacgtagccagtcggaggccagattggaacctggcctccactttgcagccagcgggggtccaggaacttgagggaaggacccaggaagtggaatctgcagggaaggaaggaggtgggcagggaaccagagaggaagggcagcaggtgtgggcatcatcctggaaacgcaaggtcaagcccaggacggcctcttagaccaacgcaaaatggaccctggagaagggtttggggcccaatttcctatctagcccgtgcagcagctctgccagcgctcaaactgtggccctcggtcaagcacctgctgaggatctgcccagggaggcagacccttgggggcagcccggggtctcagccatgcagcgctcccagccttcaggctgtccgcctccccaggcctggacttcagcaatgatggacacccttactcctaggaggttgcagggtctggagaggaggcagacacctgccacacacatgcatggtgacagcagaccgttaacgggcctgatatctgcctatgcccctctgagcctgtcccttttccctgagtacaaggcacaaaggttgtgccccagcttggctctttaatctttccccaaccaagagggaagcagggggaactgtggtttgtgggccccaggatgtcctaatgactcgcctccaggggagggtgacacagcctccaggcctcattgctgctgctcttaacaacgtggtcctgaggcaagaaagtgtggcaggggctcccaggctggtccctctcctcacctgagctgcctccccagctcccgagggttatagggtgccagcatggcttggcagagccctggcatagggcctggcccatggggaggcagtcacagagttggacccacagtcagagaagctgagggcaaggcgggtggaggagctggcaggcgggggaggctgcccagggccagggcctgcagtgtgtagggaaatgacagaagggttggtgtgggcgggagcccgtggggccctttatctcctggtaaacaggacccgggggagaggggaggcccctaggaaggaagcgagggtaaggcgcaggctgttgccagggtgattcaggcagcatcacccaccactgcccacccagcctgtccatctgaggcagtcgtgtgggacagagaaagccagggtggggctcgggggtgggggtgggcagtggctgtaagtaggcaagcggggactggcatctaggcaggagggaggcgcacctgcaggtgcaggtggctctgaacccattcctgatggctctctaggcctctgcacctccagtcccatccctgtgggcgagtgctgcctacacctggtgtcacccagcaatgggtgagccctggggatagccagctctgcattcaaggggttaggtttccagggtaaccgagcccctgagcccagcgtggagcctggcagagccagtaatctgactcccctttccctcccgccaggggctgtccagaggctccgctttgcctcagcctttagccccagagaggcagggtgtggagggtgggggctggcttcttgggtaagagatgcctcagggaagatctacctggctccctgctccttaaacctttccctcctgcccaggtccaccccttcctcttccctggtcacttggcacttcgacctcctgcccgtttcggaaaggggtgtgccctgaggtgactgaactttgcctgatcatgaccttgatcatgcacagggctgctggtggggtgaggccatcccacgcaactctggggtctgtgaagccaccaaggatcaaggaatggaagagctgcctgagtgtagagggagttcggtcaggcttcttaaacttggagacttggaaacagaaggccttgtaggccacataggttttcagagactcgcctggcagaggcctggagcgtcctgctgcgtggactgtgggcaccgagccaccaggaggttgttgatctcattcttgctcactggtccctgccagactggtggtgcctctctactgtcgggcagccccacctctgtgctgccccatccacctacagccctcatgcctgggcccagctggaggttct

SEQ ID NO: 35150 - DNA, 2300 bp, Homo sapien
aggtgtctgcctcctctccagaccctgcaacctcctaggagtaagggtgtccatcattgctgaagtccaggcctggggaggcggacagcctgaaggctgggagcgctgcatggctgagaccccgggctgcccccaagggtctgcctccctgggcagatcctcagcaggtgcttgaccgagggccacagtttgagcgctggcagagctgctgcacgggctagataggaaattgggccccaaacccttctccagggtccattttgcgttggtctaagaggccgtcctgggcttgaccttgcgtttccaggatgatgcccacacctgctgcccttcctctctggttccctgcccacctccttccttccctgcagattccacttcctgggtccttccctcaagttcctggacccccgctggctgcaaagtggaggccaggttccaatctggcctccgactggctacgtctggtttcaccaggggtttaagacagattttctacatgtgacaacgagatgggttcacataagagcccagattcccagcttctcttgaggcctccaaagacctggtactactgggtcaccacagaaacagtgacagcccctcgacaagggaggcctatgtcaccccatactcatacctcacaggatccttaggcttctatcccctaggggctgggctcgtgaatctaagtgctccccttctttgctctcctgttccccaggccctcagagagccagcctcctggatgccccccagacacagtgggtgccatggagccagtgcctctccctcactctgctgtcctggagcctggctccctgtggtaagccaggcttgcagaggtggctcctgacatcaatccgcgggcatgtggctgctgcgggaggcacacactggctcaggacaaagggcaagggctcacggctctacccacgactcaaagagcatgccccagcccttcagatatggccccacctaggccttcatgccagtgtgcttttatagtcaccctgccaaggacccagaatgtccttccccaggtgacacaccctacctacagagaattctgccccagccatgcctgcccttgataatataccccgccagcacggcctctgcccagccatccctcccgtgtcaggcaggctccccgcagagtccctgggtgatgcctctctggccctggagccccaaggccagcccaggcctctgctctggcagaacaagtgcggcaggcgggcgtgctggcagagctcggcgtgggtagatggagctcggagggtccggaagggtccaggttccctcgccctcctccgcagcctctctgggatggcgctccgggacagggaaacagggaagcaggtggcggggaggccgaggggcagctggactcagcccgcttaggcctccagcaggcaggcaggcaggaggccactctcccggaacctccaggccgggggaagagcgcctccgagggctcaggccctactcggccccaccatcgccaagaccggccagcggggcggcgcggggggatcggcccgcaccctccgcctgcaagagcgctgggcgcacgcggagggcgggggccagcccgggaagctcggggtgcggaggacgggctggggccgcacgggagcgcagggcagcaggggccgggctgcctcaggacgcctccctccctccctccctccctcccacaggccggatgctgccgacgcgttctgggcgccgaagggagtcccaggaccgggtgtcacgccggggtcgcccaggccggcgcggggcagcaggcagcagggtgggggggtgccctcgcgcctgtgtccctcacgccgccccagctcctgcccaggtggctgtggctggcgttccgggacctctgtgaccttgggtctctgcccctctccgagaaccccacgggtccccagctcagcgtcgggacagctgcgcccgcggagtccggtccggagcacccacgggcgcggcccgggcccgaggagaacgccgcggctccagcagcaaacaagtgggggagggtgggaggggcgtcctcgcgccgcccgggcggggaaggggcgcctgcgtcggcttccggccgccttccgcggccaccgccgggcccgctcccgccgccgacgcccaggtgcgccaggtgcgggccgggcgggggtcgcgctcacctttctggccgctgagtgccgcgtaccaggacagcgagaggaaggcgcacaggcagaagagcagcagcgtcaggaaggtgccattgcggagcctcatctcctcgggtgcgcggc

SEQ ID NO: 35151 - DNA, 2300 bp, Homo sapien
acggctctacccacgactcaaagagcatgccccagcccttcagatatggccccacctaggccttcatgccagtgtgcttttatagtcaccctgccaaggacccagaatgtccttccccaggtgacacaccctacctacagagaattctgccccagccatgcctgcccttgataatataccccgccagcacggcctctgcccagccatccctcccgtgtcaggcaggctccccgcagagtccctgggtgatgcctctctggccctggagccccaaggccagcccaggcctctgctctggcagaacaagtgcggcaggcgggcgtgctggcagagctcggcgtgggtagatggagctcggagggtccggaagggtccaggttccctcgccctcctccgcagcctctctgggatggcgctccgggacagggaaacagggaagcaggtggcggggaggccgaggggcagctggactcagcccgcttaggcctccagcaggcaggcaggcaggaggccactctcccggaacctccaggccgggggaagagcgcctccgagggctcaggccctactcggccccaccatcgccaagaccggccagcggggcggcgcggggggatcggcccgcaccctccgcctgcaagagcgctgggcgcacgcggagggcgggggccagcccgggaagctcggggtgcggaggacgggctggggccgcacgggagcgcagggcagcaggggccgggctgcctcaggacgcctccctccctccctccctccctcccacaggccggatgctgccgacgcgttctgggcgccgaagggagtcccaggaccgggtgtcacgccggggtcgcccaggccggcgcggggcagcaggcagcagggtgggggggtgccctcgcgcctgtgtccctcacgccgccccagctcctgcccaggtggctgtggctggcgttccgggacctctgtgaccttgggtctctgcccctctccgagaaccccacgggtccccagctcagcgtcgggacagctgcgcccgcggagtccggtccggagcacccacgggcgcggcccgggcccgaggagaacgccgcggctccagcagcaaacaagtgggggagggtgggaggggcgtcctcgcgccgcccgggcggggaaggggcgcctgcgtcggcttccggccgccttccgcggccaccgccgggcccgctcccgccgccgacgcccaggtgcgccaggtgcgggccgggcgggggtcgcgctcacctttctggccgctgagtgccgcgtaccaggacagcgagaggaaggcgcacaggcagaagagcagcagcgtcaggaaggtgccattgcggagcctcatctcctcgggtgcgcggcgggcgcccgcggggccgaggctgcatggcccgggggaccggggccggggcgcaggggtcggaaggcggcggcggcggcggcaggggccccggccccgggtcggggaggggcggggggcccggggccgggcggggaccgggccagggagcgcgccggccgcccctcagggcgcaagctttgtgccctgtactcagggaagaggaacaggctcagaagggcagaggcaggtatcaggctcactgcagatatcaggggcgcgggacactggcggcctcgcctccgcggcagggccgggccgggccgggctgggctgggctgggcggcgagagccgcggcccggcctggatctggggcctggatctggggccgccgcggagtcgacggcgcagggcggggcggcccggatttaaaggggccgcagcaccgccgtcgccggcgccgcgagggggtggggtgggggccggcggccgggatcccgatcggctcccgcagccccgcgtgggctcgtgcgagtcggcctcaggtaaggctggagtgggagtgcaggtcgaccgcagccggggcggggggcgggcggcgggggcggcgctccgggaccccggtacccttctcagcaacatctcctccgcgcgcggaccccgaccccattcgcacgttctcggggctctttcccgggcgtgaggggctctgggtggcgcgggggactgggcggttgaagccgggagcgaccgctgccttcgctgccgcccagggcgcttccccgctcaggagcttcctctgggcctctggacggaggcgcgcaggggcccgggaggcgggaacgatgggcctttctaggcggtatcagggccgatgctcgtggatgcagagcagtgaccagcccagaaccgtaccggcttcccggggcaggggcggcccgagag

SEQ ID NO: 35152 - DNA, 2300 bp, Homo sapien
cccagatagtgccactgcactccagcctgggcgacagagcaagactccgtctcaaaaaaaaaaataagataaactaaaaataaataaataaataaataaaattacaaaaaaatccaaaaaaatttgttttaaaatttttaatgagatgaggtgtcactatgttgcccaggctggtcttgaactgatgagctcaaatgatcctcctgccttagcctctcagagtgctgggattacaggcatgagccaccacacccggctaattttttgtattttttagtagagacggggtttcaccgtgttagccaggatggtctcgatctcctgacctcgtgattcgcctgcctcggcctcacaaagtgctgggattacaggcatgagccaccgcgcccggcctctgggtgactaagttttaacattaagtaactcattaacaatttctaaggccctttatgtcacaacctaagtgaaaagccattatcctttgccacaaatagaagacacctgtgaaaacacgacagtttcctctagaaggctcctataagtcccagtctctagttcggaaagttccaggagcactgagtggggagccctctcctttaacagggggcctcaggatccagcccacttcaacctctggctcggccacccccttcttggcatcaatctctctgtccagacccctcgaagctcccgattccactcagccccaggtgtgggccggggctgaactaggaagacaaagccgcattcaatctcagtctgagtccagcccctcgggcctcccccgggcgggtggggcagaggtccctgcagcctccaccaggaaccgggcccctaggtctgggaggtccaagccggcagcgggccaggcgctgcccaaagcctgcccagaggcggcgctgggccagtccctttataatttgcgcccttcctggttccacagaggattgaggaacgcctgaaattagaacgcaaatgggccgtgcgtggtggctcacgcctgtaatcccagcactttgtgaggccgaggcgggcggatcacaaggtcaggagttcgagaccagcctggccaatacggtgaaacctcgtgtctactaaaaatacaaaaattagccaggtgtggtggcggccgcctgtagtcccagctactcgggaggctggggcaggggaatcgcttgaacccgggaggcggagggtgcagtgagccgagattgcgccactgcactgcagcctgggcaacagagcgagactccgtctcaaaaacaaacaaacaaaaaacaacaaaaaacaacaacaacaaaaaaacaatgaaggcgtgggcccccatcaatatcgggctgggctgggcggggcgaggtggcccctacaccaccgggggcagggcccgttgctcccgttagcggcgctctcgggccgcccctgccccgggaagccggtacggttctgggctggtcactgctctgcatccacgagcatcggccctgataccgcctagaaaggcccatcgttcccgcctcccgggcccctgcgcgcctccgtccagaggcccagaggaagctcctgagcggggaagcgccctgggcggcagcgaaggcagcggtcgctcccggcttcaaccgcccagtcccccgcgccacccagagcccctcacgcccgggaaagagccccgagaacgtgcgaatggggtcggggtccgcgcgcggaggagatgttgctgagaagggtaccggggtcccggagcgccgcccccgccgcccgccccccgccccggctgcggtcgacctgcactcccactccagccttacctgaggccgactcgcacgagcccacgcggggctgcgggagccgatcgggatcccggccgccggcccccaccccaccccctcgcggcgccggcgacggcggtgctgcggcccctttaaatccgggccgccccgccctgcgccgtcgactccgcggcggccccagatccaggccccagatccaggccgggccgcggctctcgccgcccagcccagcccagcccggcccggcccggccctgccgcggaggcgaggccgccagtgtcccgcgcccctgatatctgcagtgagcctgatacctgcctctgcccttctgagcctgttcctcttccctgagtacagggcacaaagcttgcgccctgaggggcggccggcgcgctccctggcccggtccccgcccggccccgggccccccgcccctccccgacccggggccggggcccctgccgccgccgccgccgccttccgacccctgcgccccggccccggtcccccggg

SEQ ID NO: 35153 - DNA, 2300 bp, Homo sapien
taatgctatccctcccctcttcccccaccccacgacaggccccagtgtgtgacgttccccaccctgtgtccaagtgttctcattgttcaattcccacctatgagtgagaacatgcggtgtttggttttctgtccttgtgatagtttgctcagaatggtttccagcttcatccgtgtccctacaaaggacatgaactcattcttttttatggctgcatagtattccatggtgtatatgtgccacattttcttaatccagtctatcattgatggacatttgggttggttccaagtctttgctattgtgaatagtgccgcaataaacatacgtgtgcatgtgtctttatagcagcatgatttataatcctttgggtatatacccagtaatgggattgctgggtcaaatggcatttctagttctagatccctgaggaatcgctacactgacttccacaatggttgaactagtttacagtcccaccaacagtgtaaaagcattcctatttctccacatcctctccagcacctgttgtttcctgggtttttaatgattggcattctaactggtgtgagatgctatctcaatgtggttttgatttgcatttctctgatggccagtgatgctgagcattttttcatgtgtctgcgggccaacaatttttttaaggaaaaaaaaaaagtgactcagttgggcactgtggcctacgcctgtaatccaagtgagacagccaagtctaaaggggtcccgctttgggaggccgagacgggcggatcacgaggtcaggagaccgagaccatcttagctaacacggtgaaaccccgtctctactaaaaattagccgggagtggtggcgggcacctgtagtcccagctactcgggaggctgaggcaggagaatagcttcaacctgtgaggcggagctttcagtgagccgagatcgcaccactgcactccagcctgggcgacagagcgagactccgtctcaaaaaaaaaaagaggtccaggagaaactcccacacctgcctaagcactggaagaactgggtagagccacagaagctctgcaggggggaggagctttgcagggggaggagctatgcagggggaggagctatgcagggggaggagcatgcagggggaggagctatgcagggggaggagctatgcaggggggaggagcttggtctcatgttcggggtggaacttgggattctatctgggaggcgagaaaccagctagcgggactctctctcgctttgctgagagtccctgtttccctttttttccttcttgcccaataaattccatttttctcactcttcaaagtgtctgcgagattaatctctcatggccgctgcacaagaacctggcttttagctgaactaaggagaaagtcctacaacagtttggcgtgcaacatggggcttgagaaagggtgagtgagatgcaaaccaagaaatttttttcctctctttctaagcctatttatcttcggacttctgagggggaggggaggggaaaccgtgaccccacccccttggtctccgtggccttttccttacttctggacggatgggcgaacggcggttctctgtcgcccaggctggagtgcagtggcgccatctcggctcactgcaagctccacctcccgggttcacaccattctcctgcctcagcctcctgagtagctgggactacaggcgcccgccaccacgcccggctgattttttgtatttttagtagagacggggtttcaccgtgttagccaggatggtctcgatctcctgacttcatgatccgcccgcctcggcctcccaaagtgctgggattacaggcgtgagccaccgcgcccacccctccatgaagaaagtttttctaaatgaaaaatgtttaggacgctcaggagagaaagaacagattaaggaatgatctccaccgcacagacctcaaggctgttatgcatgcagggcacagttccagtgcaaatgtccgcaggcacggcatgagggcccccactgggtgcctcgggctccttccagggcagcagttgaagcgggtcgtactgcaggcctgcagaaaggctggggttcctctccttttcgggttccttcctgatggaatcctaggttttcagcggttccttcctgatggaatcctaggttttcagcagcttccggaggccgcctggactgcagaaggcgccctgggcgtgtgtacttccacctccgcaggcgctggcatctccaggctgcttcaggccgctttggacctcaccatcggtagcatctgcgtcttcttgagg

SEQ ID NO: 35154 - DNA, 2300 bp, Homo sapien
gaaatgagaggctggtccatagtgggtctcgcggctcaggtgccgagccttccctgggcatgcacgccgggccctggagggtgggaaggggccagtggacgcggggagcctgcggggtgggactgcatcgggaaaggggaaggagtcagaggcgagaagggggagagtgtctgtctggctccagccgctgcacgctcttcctgctcaggggactcacggtgaccccggagccactccccagcccagcctccaggtaagaggtcactgagatgggtggcagcaggggccggggatccccctattacgacagcggtcatgggacgctgactcactgccggccagaccacctgacctccgcggcgggaggagagggccctgccagggggttcccgccgcgccttgtttacctccgggaggcctcggcctcgcgtgggggcagggcggccgctggggccgcaaggcgtgcggggaagggccagagccgggtgtccaccccagcttcccaaagactccctcttctgtgcttccttctcccctccccgccccccccccagtctcttcacatgcccctagcccccgcggaaacttcccgcgatcccaaacgggccaaatggcgagaaagcaaaggagctccttcttgggggtgagtggggcgccttgagcgcttcctcaaagctatgttcccagagccacaggccttccttgtgtccctcaccctgctcagaccgggccatagccgggggctggggcaggaaagccggccctcggcgggggccacgtggctctcaggcgcctgggctgctgagtcacgcttggccagcacctgtctgtaggccacagcctctgccagcacgcccctctgtgtcccctgcccctgtctgcaaggcagtggctccagcaggccctggggcattttccactctccaccgccggatgcagggagaggcctgaaccctctccacagggctgctctgggcagggtggaagccttgcccacttcggagccctccgggaaggatcattcacacctgtggaccagcccctgctgtgcgcacacccacacatcaccttcgcacctgactggccccatccagccactcttgcctccctctgggtttcctcccctgggaggtttctccagctcctgcaagccctgggctgaaatggcatgagttggacccagcaggttctgacctcctactcacaggaccttgcctgggaggctccagagggtgaccactcgtcctgcccctctccttgccccagttctggcggacaggttactctggtggcataaagcagtgtttcttccttcctagctgaggaggctgttggctgacccccttggctgcccacaaggccaacgggcctgagcccccacagggccatgggcattacctgctgaattgaggagcccataaggagtcacttggaccacagtgaacacttggcgaccactgacactcaggagaccttagctggtcctccagcacctctcaactccactcctactaaactgggaacttctctggtgctcaggccagagtcggggtccgtcaccgagtatgctatgcgctgcccatcaccgaggatgccatgcgctgtaagagggctgccaccgcggcaggctgaccatggcagggtcggaacagcaacctgagagccagcttgttctggccagcagtgcccactgggcgacctagcagcctcctgatatgggggctgtgtccccctctccctgcactgggtacccccaactgaggatattgctgagtcatggccaggcccaagcctgggaggggcgaggggctggacccccgccagtaccctgatcccaggtgcagaggctggagcccaggcctgtatgagtgccagggccggtttcctggggtccttggtgcaccggggcaatgaagagaggggtcagcaatgagggggccgggagacctggagcgaggggtagcggggaaggggagagtagtgaaggggcctctgcagggcggctctcgcgccgcgacgacggtggcgggggcggggagggcgcgagagactccgcccctctcgaggcggggcggggcctccgcgttcgctacaaaagccgcgcggcggctgcgaccgggacggcccgttttccgccagctcgccgctcgctatggcgtcgctcaccgtgaaggcctaccttctgggcaaggaggacgcggcgcgcgagattcgccgcttcagcttctgctgcagccccgagcctgaggcggaagccgaggctgcggcgggtccgggaccctgcgagcggctgctgagcc

SEQ ID NO: 35155 - DNA, 2300 bp, Homo sapien
gctgtaagagggctgccaccgcggcaggctgaccatggcagggtcggaacagcaacctgagagccagcttgttctggccagcagtgcccactgggcgacctagcagcctcctgatatgggggctgtgtccccctctccctgcactgggtacccccaactgaggatattgctgagtcatggccaggcccaagcctgggaggggcgaggggctggacccccgccagtaccctgatcccaggtgcagaggctggagcccaggcctgtatgagtgccagggccggtttcctggggtccttggtgcaccggggcaatgaagagaggggtcagcaatgagggggccgggagacctggagcgaggggtagcggggaaggggagagtagtgaaggggcctctgcagggcggctctcgcgccgcgacgacggtggcgggggcggggagggcgcgagagactccgcccctctcgaggcggggcggggcctccgcgttcgctacaaaagccgcgcggcggctgcgaccgggacggcccgttttccgccagctcgccgctcgctatggcgtcgctcaccgtgaaggcctaccttctgggcaaggaggacgcggcgcgcgagattcgccgcttcagcttctgctgcagccccgagcctgaggcggaagccgaggctgcggcgggtccgggaccctgcgagcggctgctgagccgggtggccgccctgttccccgcgctgcggcctggcggcttccaggcgcactaccgcggtgagcgggccggggagcggcgggggcggtgacgcaggccggacacggcctcctgccgcggggtggctgccccctcccttctcggcgacgcctggcgggccgtgagggggtctgcgctggctgctccctggatggcggtggcctgcatgggtccccagttcggccatgggagccggcctggtgactggagtggtgaccaaggccgggacccgctgctcagcgtcggccccctggggcggtggagccctgccggccgggggctcgagcctgggggcgtcagacgccccgctccaccccccgcgctgttggggattttggcaaggacgcgccggggcgaacgctctggctctccgcgggcactgggtggtcaggcgggcactcgggttacactgacaccttgctgcgccaggtggtgggttcagataatgccctggaggagccgggcgagcgccggcgaggggagggagtgacgcgggtaaacaagcgcgggggtgcgggggactcgcgagcgccgcgacagcgcctgggagaagggcacggatcgccggcggaacgctccgagccaggtcgagtacagatgttttcccattggcaagtggacgagaacgttcttcagaagtgttggtgttggcacagaagccctgtttcctgctgcgctggtgtgaccagtggctgctgggggtggggttagggaggtggttgtggccaggagggcgggaggtggccaaggccggcccctgggagggtgcagtgctaggacctccctctggagcgctgccagcataccaggccctctcctattcttaaaaaaaaaaaaattgtgatgttattgagctgtaactgaaataagggttcacccatttagtgtacaagtcagtggttttcactattttcataggtttgtggaccatattcagtgtgagagcttttcatcaccttataaacgccatacataccttttatcaccctcttatccacatgcccccagcaacctcctttctgtatctattcatcttgcaatcctggacatttcatgtaaatagaatcagacaatgtagtcttgcaagtggtttctttcacttagtgtaatgtgttcagtgttgtggcacatatcagaactagttttttttggaggaataatattctgttgtgtggacaggccatgttttgtttacctgttcattagttgacagacatttgggttgtttgcatctttgggtgcctcacctgtgccctcggtggatggcgtggtttggtctgcacagctgtgctttaaagccatttcagctcatatgtatctgtcacaaatggagactacatacaaatacgtgtctttcagctttgttagggaaggaagcaggcagatgcccttgtcttctcctttactcccaagccactagaagtctaaggcctttgtggggctgggcccctcaggagcaggtcacaggcagggatctcccacagttgaagacggacatgggcctggtcggatggggaatgaggtggcacgtttctgaaaaggcagctggcccaaggctaaata

SEQ ID NO: 35156 - DNA, 2300 bp, Homo sapien
tgcgaccgggacggcccgttttccgccagctcgccgctcgctatggcgtcgctcaccgtgaaggcctaccttctgggcaaggaggacgcggcgcgcgagattcgccgcttcagcttctgctgcagccccgagcctgaggcggaagccgaggctgcggcgggtccgggaccctgcgagcggctgctgagccgggtggccgccctgttccccgcgctgcggcctggcggcttccaggcgcactaccgcggtgagcgggccggggagcggcgggggcggtgacgcaggccggacacggcctcctgccgcggggtggctgccccctcccttctcggcgacgcctggcgggccgtgagggggtctgcgctggctgctccctggatggcggtggcctgcatgggtccccagttcggccatgggagccggcctggtgactggagtggtgaccaaggccgggacccgctgctcagcgtcggccccctggggcggtggagccctgccggccgggggctcgagcctgggggcgtcagacgccccgctccaccccccgcgctgttggggattttggcaaggacgcgccggggcgaacgctctggctctccgcgggcactgggtggtcaggcgggcactcgggttacactgacaccttgctgcgccaggtggtgggttcagataatgccctggaggagccgggcgagcgccggcgaggggagggagtgacgcgggtaaacaagcgcgggggtgcgggggactcgcgagcgccgcgacagcgcctgggagaagggcacggatcgccggcggaacgctccgagccaggtcgagtacagatgttttcccattggcaagtggacgagaacgttcttcagaagtgttggtgttggcacagaagccctgtttcctgctgcgctggtgtgaccagtggctgctgggggtggggttagggaggtggttgtggccaggagggcgggaggtggccaaggccggcccctgggagggtgcagtgctaggacctccctctggagcgctgccagcataccaggccctctcctattcttaaaaaaaaaaaaattgtgatgttattgagctgtaactgaaataagggttcacccatttagtgtacaagtcagtggttttcactattttcataggtttgtggaccatattcagtgtgagagcttttcatcaccttataaacgccatacataccttttatcaccctcttatccacatgcccccagcaacctcctttctgtatctattcatcttgcaatcctggacatttcatgtaaatagaatcagacaatgtagtcttgcaagtggtttctttcacttagtgtaatgtgttcagtgttgtggcacatatcagaactagttttttttggaggaataatattctgttgtgtggacaggccatgttttgtttacctgttcattagttgacagacatttgggttgtttgcatctttgggtgcctcacctgtgccctcggtggatggcgtggtttggtctgcacagctgtgctttaaagccatttcagctcatatgtatctgtcacaaatggagactacatacaaatacgtgtctttcagctttgttagggaaggaagcaggcagatgcccttgtcttctcctttactcccaagccactagaagtctaaggcctttgtggggctgggcccctcaggagcaggtcacaggcagggatctcccacagttgaagacggacatgggcctggtcggatggggaatgaggtggcacgtttctgaaaaggcagctggcccaaggctaaataagtgcagcagccaaagctgctgcccctgtgcacaggccctccgccccctgcatgtggctgtggtccagggcccaggtcggagcactcaccttccaggaggtgccagagcaagggggtagtcttgcctctcactcctgccctctgtggctcaagtaggtgtgtttgtttatagccctgtgagtgtccctttcatacttgcctcagcccattccagcagcttatgtccagctgagaacccctgggtgctcacgtgctgtcttttaaacaatctagatgaggacggggacttggttgccttttccagtgacgaggaattgacaatggccatgtcctacgtgaaggatgacatcttccgaatctacattaaaggtaaggggctgctctgggggctgcctgaagccagctcagcttgtactcagttccctgctgagtaaaaaacagggctcgatgttccaccaatgaaggggtcagcaatttgagggctgtttaagacagagacataggccaggt

SEQ ID NO: 35157 - DNA, 2300 bp, Homo sapien
aatgacaggcagttggcttaaagctgcagggaacacaaaaataaataaacctgtaccttttgtaaggatggaggcagccatgtgtaccaagcattacaataccctgcaaaggactctctcctctgtctgcttggagaactcctgaatgtagctcaaatatcaccttatactgcttccactttgctcccacagcactctgggcatacctctgagagggaaagaataatggggtgaaacacctgggtttccatctttccttgttccagactgcaagctgttgttttgttttgttttgttttttttctctgaaacgaggtctcactctgtcgcccaggctggaatgcagtggcgcgatcatggttctctgcagccttgacttcctgggctgaagtgatcctcccacctcaggctcctgagtaactgggactacaactgtgccctaccacgcccagctaattttttttcttttttgtagaggcagggtctccctgtgttgtctaggctggtctcaaactcctgggctcaggccatcttcccacctcagctcccaaagtactgggattacaggcatgaaccactgcacctggccagactcacactttgttataagcagaggaagatgctcttctggtacctgtgcctgtgcttccaattcagtccatttacagacttaattttatatcattctcatcagaaatacttttttgcatcctagttttgagttgtatcattcttctgtgctgcggtatagttttcagtgattttcatttcttatttattaatttttgagacagggtccctctctgtcacccaggctggagtgtggaggcatgatcgctgctcactggagccccaacgtctcaaaaaacaaaagtatttacagaatgtagtagatgcaccagtattgattccttattatgtggcatttaggttgtttccacacttctgcttgcctgcttgcctgcctccctccctccctccctcccttccttccttccttccttctttcctcctttcgacagagtctcgctgtgtcccccagccggagtgcagtggcgtgatctcagctcactgcaacttctgcctcctgagttcaagcaattctcctgcctcagcctcccaagaagctgggattacaggcacgcaccaccacgcccggctaatttttgtatttttagtagagacggggtttcaccatgttgcctaggctagtcttgaactcctgagctcaggtgacccgcccgcctcagcctcccacggtgctagggttacaggtgtgagccaccgcgcctggccatgtttccacccctctgttctttttttttttttttttttttttttttttttgagacggagtctcgctctgccccccaggctggagtgtaatggcaccatctcggctcactgcaggccccgcctcccgggttcacaccattctcctgcctcagcctcctgagtagctgggactacaggtgcctgccatcacgcccggctaattttttgttttttttttgttgttgttttttttttagtagagacggggtttcaccgtattggccagggtggtctcgatctcctgaccttgtgatccgccagcctcggcctcccaaggtgctgggattacaggtgtgagccaccgcgcccggctacttctgttcttataaatgaaatttgctattttttataagactgggactggcacctctgccttctctgtgtggaatcactgggccagggagcatagactttcatgagtctcttggtgggccgtgccctgccgccttcccgaggcctgtgccagtgagcactgtcctgccagcattgcatagtattggcgtccatcaccttccagccggtgcctttcctagagtggagctggacatgactcctgagatcctcaggcccaagagttgggctaggggttttcgataaaactgcctggtttccagtactgagaatcaacttttttctcaatctggcaggaaaaatcgcagccctcagagagtcgctggctgaagtatctagaaaaggactcccaagaactggagctggaaggaacaggagtgtgtttcagcaaacagccttcatccaaaatggaggagccaggcccccgcttcagtcaagacctgcctagaaaaaggtaccaagtgcgtctccgttccagccctggcccagggcctctgctgcctccagcagtggggcaccagtgagccactgtgagcgtcagccaagcgcgggaagcctaggtggcaagtgccagcaggtgggaaatcgggcagctgctgccactgctggcccca

SEQ ID NO: 35158 - DNA, 2300 bp, Homo sapien
aacctcattcctacaaaaaatataaaaattagctggggatggtggcccacacctgtagtaccagctacgtgggaggctgaggtggatcagctgagcccgggagatgcaggttgcagcgagctgtgattgttaccactgcactccaatctgggcgacaaagcgagaccttgtctcaaaataaataagtaaataaataaataaataacactggtgaacatggaagagtgaaacaggaaaacaaacaaggaaatagaggccgggcgcagtggctcacacccgtaacaccagcactgtaatcccagcactttcggaggccgaggcgggcagatcacgaggtcaagagatggagaccttcctggtcaacatggtgaaaccccgtctctactaaaaatacaaaaattaactgggcttggtggcgcgcgcctgtaatccaagctattcgggaggctgaagcaggagaatcgcttgaacccaggaggcggaggttgcagtgagccgagatcacgctactgcactccagcctggcgacagagtgagacgtgagactctgtctcaaaaacaaaaaaaggaaataaaaataaacggaaaatttgtttttaaaaaacagcatgaaacattagacgtggaataatttaaaaatgcaaatgatctccctttatttgcaactcttaggacccagctcccgaaagaaaataagtaaaaagtttctgagcccttaaaatggcccttacaaacgcttagcattaaatgcaagcttacagacacatactcagcatcttgctgactttttaacatacctcttaaacaagtctgatccacgccgggcacaatggctctcgcctgtaatcccagcactttgggaggccgaggcaggcgggtcacctgaggtcaggagttcgagaccggcctgaccaacatggagaaaccctgtctctattaaaaacacaaaattagctgggcatggtggcgcatgcctgtaatccagctactcgggaggctgaggcaggagaattgcttgaacctgggaggcggaggttgcggtgagccgagatcgcgccattgcactccagcctgggcaacaagagcgaaactccgtctcaaaaaaaaaaaaaaaagaagaagaagtctgatgctattctttctcagggcatagcagattaccaataattaggagggagggactatcagaagcagatacggtgactgcagtgttaagtgatatcaagcagggagacaggtgcgatccggaaaaggttaagtggcattctctatctggcacgctgaaagttagggaggcaaatatgtcctagaaacacagattatctgtctttaagactccggggcccgtggtttatgcgtcggcgaacagccatatcaagtccctggccccgcggaaacggacggcggcagaggcgcggggcgacggagagggcgcccaggtgtggagcagggacgccgccgcggcgcgctcggtctctaagaaccgtcctccccctctcactgaaactgcgacagcgctacttcgtggggtaggctctgcgtaaaggatgctatactcaaccggattctcccactacctgctacaattcacaagaggccacctccgcagaaccattacctctggtttgtacaagaaccaaacaaaaagctcagaacgttatgcgggggcgaccccaatgagacccgccctcagcggtccctgcactccttcgggcccggtgcatcccggagccattcgagacaacacccacagccccgccactccccgtccgctgtccccgcgccggaggaggaggagggggctggcacccgccagacctggtgcgcctggaagaggcggcagctgcagcagcgtagcacccgagaacgctgaagcgacgccatccctgcttgtgcagtcgccaggcagccaagcgcgtgcgctctgcatttgtcccgccgcggccccgccccacgcacgcgctccgaaccctctagtcccctacgccgtctcgcatgcgcttatactcttcgctccggccgccgcggccccgcccctgcgcactgggatccctctagcctgccgcgcctctcgctggtcatctgcgcccctccgacctcggaaagagtcctgggtgcgggattcctggtagccgactcgtcgtctgaccagggccgtgcccgcatcttcctaaggcactggttccggccctggggagactggaattgagacgacagggcctccgctgaccagtccttggacacaacgcggagcggggctgaggggccgccctgccaggcctgcgctgccgtgcttttag

SEQ ID NO: 35159 - DNA, 2300 bp, Homo sapien
agttgcatcaaaccactcatcaaatcattcttataatttccaagaaaaaaaactatatacatgaatttttaaaggattaccggttcattgccaaaaggagaaaaatatacagaaaagtagaacaatttttcctagtgctacagattactcagtattttggtgtttattctgtattttttttcagagtttaactgatgtcatatatgaaatttttattctactcctttcattaagcataaaacattttttgcagatgctttctgttctcagccacagtagctcaaacgtagaaatgaaggaaaaccacccaaatgagaaacagtattcagagcttgctacagcaagggagtcagcaacatccccggtgtgggtaggcgcaaggacgcagggggtggaaaacggggaaggctccaggtggttctgaccgcaggctgttggaaactggaggtgagctaacaagaagcaggatgttttctgtgactggtttggggagcgctttcttgggttggttctgacatggggagggtggtacaaaaaatagaggagcaagcagtcctgaccacgtccttcccaagcagccgactgcccggttactgcagaggctgcagtcagtttattgtcattcgttatctgaccattgtctattggcatattgtctctcaatttttttttctaactacttactgtacaaaagttggaaaaatttaaaaattagcattacctacgaccttagccacacacacacacacacacgccagaaaataatgccggtgtcacagaagtcaaacgatgtactgtaattctgtaaccttgcctctccacagcacgttgtcacttcaaactcaggttcttgctgatggaactgcctaagagtccgtgccgttcttcagaacactgatttccatttcttcctagtattcttcagggaacactagggaatgaataataaatcacctaggtgaagggattcctttcttggggtagcagtattgccaggttgctttccacggttttgcacttgaccgttctcccagcaccctgtcagaggggtagccctccctgcacccttgtcaggattgggtgttttcttcaacgggatggtttctgctgttaaaagcgagtgtcggccgggtgcagtggctcacgtctgtaatcccagtactttgggaagccgaggcgggtggatcacctgaggtcaggagttcgagaccagcctggccaacatggagaaacaccgtctctactaaaaatacaaaaattagctgggcgtggtggcgggcatccgtaatcccagctactggagaggctgaggcaggagaatcacgccactgcactccagcctgggcgactgagcgagactgtctccaaaaacaaaaaacaaaaaaaaaacacctcgcttttttggtgatagtcactgtgtaaaagttggaaaaaaaattaaaattacaaccctagacaccgagggttgtacggtgggaggtaattttaatattttttgtattttattttccaacgaggttacaaccctaagccacacagggttgcggcgtgagcgtcgggctgcgggggcgcctccaccctccgtagggtgggcctgggacgctcccggggctgcagggggaccggcttcgcgctcggcggccgcgcgcctccgccgccctctccgggaagcgtgggtgtggtgagcccctccgtctccccgtattccaccccgggctccggttcaaaggctaactgttcgctgctacctaaaagcacggcagcgcaggcctggcagggcggcccctcagccccgctccgcgttgtgtccaaggactggtcagcggaggccctgtcgtctcaattccagtctccccagggccggaaccagtgccttaggaagatgcgggcacggccctggtcagacgacgagtcggctaccaggaatcccgcacccaggactctttccgaggtcggaggggcgcagatgaccagcgagaggcgcggcaggctagagggatcccagtgcgcaggggcggggccgcggcggccggagcgaagagtataagcgcatgcgagacggcgtaggggactagagggttcggagcgcgtgcgtggggcggggccgcggcgggacaaatgcagagcgcacgcgcttggctgcctggcgactgcacaagcagggatggcgtcgcttcagcgttctcgggtgctacgctgctgcagctgccgcctcttccaggcgcaccaggtctggcgggtgccagccccctcctcctcctccggcgcggggacagcggacggggagtggcggggctgtg

SEQ ID NO: 35160 - DNA, 2300 bp, Homo sapien
tgccctgggaggctcaaggtcagtccctggaaggcaggggcgccccctgtacctcctaacactcttcctgcactatcaggaagcctggaagctctttgtcccagggacctctctgggacttcatcctctggggcataagttctgagaaggacccagaagcaagccactcctctgcaccgcctccgtgtctgctgtaggtgggcggtaaataaggcccccacactaggcgccaagcaggcccagggcaaggcctccacagccacatgttagagacattctgtcttcctgtgagtaggaaacaaatacaaaatgctgtcattggagcgtgtgaaagacacagtgtggctgagtgggggctggaaagaatagtggatgctttcctaggaaaaatcttcatgttccacgtcacgttttttgttaaggaaaaacacgcatgttgagtgcctgttagaactcatccctgtgctatgtttaaagcctgttgggagcatctgatcccaggtgatgggagcatgctaggccctgggctttcgcagtcgagctggtgacatgcagcacacttgcaaaaccgaccataatgccacctggtggtttcacatgggggataatgcacaccaaggaaccgactcaaaagagaaccaaaaatagtgtgtaccaagatgcccatggcagtcctggtgacagtggcagaggctgacttgagcttgaggaccttgatttcaaggacagaaactacagaagcaggtacaccttctgttgtacatggaaccagcaggccactctaggcttgtcccgcatgcttctgggagcggcatgttggtgcagagccctggcctcagaccgcatgtggcccccaggaagcagggcctccattccagggtgagttgcctgagcccagagaggtgtgcccttcactgccaccagacagccagcgagagcagctcagaactggggtgctgccgacctgcctgaggtgcccccaccagccacactgcctttggggaacagctccaggagagctggtcggctgcttctctccccaggtgcatgttcccacgcagggagtatagtgcgcgccagttccggcaaatgtcctccccgaaacgctgcaccaagcacaggagctgtgcacagaccacccctcagtaacaggcacagcaggcgcgggtggaaggggtcattagggttcccctgagttctagcaggaacattccccagagttctagcaggaactatagaattcgttagtcctcagactggtctatagccctcatcattgttcacgtcaaaaccagcatgttgagacttgtattcatttgaaaaaaggaattgagggtttggcggcctttattttaacctgaccaagtgagggaatgctcaggcccttttgctctggtgccatagggcggggctgggcgggccaggcaggaggtgtggcatgggagacctgctccccagggcctggcctggggctggctgtacagaaacacagactacatctcaaggaccccaggagcttgcagtcccaacagcagaatgttattcatgttctttttatttttgcgtttgtccagaagcactaccacaggaagagcaagaaggaagtggaagtgaggagagaggaggtacaggccattctctgccgctgttcttagagaccccagcgttgaggcacccttgcttgctggtcttttccccagtcactgccagggagccccctaccccgggagatggcggatgcgtcccccgatcagggagcaggcctcgggatgcacaggaggctccacgctctccaccagccccacgggcacccagccagccctctcttgccagcttctctccagctgccctgtgactccccatctgagagaagacattgtggatcattgtcatcagcttaggtccaaccactgcagcaatttagggaaaacctgtggctgttctgggtttttttcccatgaccaccttcccaaacgccagggtgttttatgatagggccctggtaactccatgccagaaaacacccaactcttcctctccctgctgtcagcccgcagccgtctcacatgacaaagattaatctctttcctcctaacctgcagaggagaaggggaccagctctccggactatcggcactaccttcgaatgtgggccaaggagaaagaggctcagaaggagacgattaaggatcttcccaagatgaaccaggtaggctccactggagcccacagtagacatttctggagagttctgaccaagactgggccctaacatcaccgcacctgcactgcagcatctc

SEQ ID NO: 35161 - DNA, 2300 bp, Homo sapien
gtttcagctagagaatcctgtcacatggccatgaggaggggccacttctctctggcctctcagtggtgctgtagcctagtggggctgcactggcgacaggctgtctgtgcagggggcagggctcagcaggagtggctgcatggacaatgctccaaggaggggtcatctccctcatcacagaaggaaacaaaggcgcaggcaggtggaaatcctgggctgggcactctgctgtggctggacctgccccaggtccctgctgtcgctttgccatctgaggttagcagctgccctcagaaccgaccccggggatgtttagaatactggggctgagcttcacccgaggagattctcacttgattgcctgtgatggggcccagacctgtggtttttaaagctggcaggccattgctctgtgcctccagagctgaaggctcttgacatagctgttctcgtttgtggctggctcaccagagaggccgtggtaggacagaccccactgggcctggtcccagggttgagagcatgcggggctaccctgagactcctgagcctcctcagcctgccctgccctgtcctgtccagacacagagaacacttgggctctgctgggcttgtggcccatgcccgctacactcacccaggaccatgcgatccgcaaccctgggtactgcttggtgacctccagcaaagactgcactgaatgaggccggccagcacgcacaacgcggcccgacctctgagctacccaaagggagagcagcaagttgcctgtgcgtggctggttcctgtgcgcccataggagcatgaaacgcccccaaagggcccactggccagatggtcactggggcaggcgggcagctgccattcactggactcctaattgtgttgattggatttttacctgggacatgtatttccttttcaaacacaatgtcaaagtcaggaaagcggctggatgcagtaggaggcccaggcgggtggatcacttcaagtcaggagttggagaccagcctggccaacacgatgaaacctgtctctactaaaaatacaaaaattagctgggcgtggtggtgtgtgcttgtagtcccagctacttgggaggctgaggcgggagaatcacctgaacccggtaggtggaggttgcagtgagccgagatcgtgccattgaactccagcctgggcaacaagagcaaaactccaggctgggtgcggtggctcacgcctgtaatcccagcactttgggaggctgaggtgggagaatcactgtagcccagtaggcggagcttgcagtgagctgagatcatgtgactgcactgcagcatgggtgataaagtgagagtccattaaaaaaaaaaaagctgaggaaagtaacaaataaccagaaccaatcatcaccatcaaaactattaccgggcactgtcatgggcaggtgctgggactggccaggctcgtgggcagggaaagcaaggctctgcccagggctggagggaacttactctgagaggatctccttgtttcctcctgccctcactctgccttctctccaagcacagctctgagcccagaggaagccgagtcagccctggaggcggcccattatttcacagaggacagctcctcagaaggtgagcggccactggaacacccgacatgcccagccagcactctgcagccaccgccgccttcctgtggggctcgggcagtggccagcagtcccacctgggctcagggagcaggccgcatggggttctccccaggggaccacgggctgggctctgccatgctggcgggggctggggccgccccctgtggatgtcctcactcctgtttctcttgtgtctctgtcttcctggaccttggctcctccccactctgcccctctgcctctcctctgctgtcccttccagcatctcctctggcctcagatctggatcttttcctgccctgggaggctcaaggtcagtccctggaaggcaggggcgccccctgtacctcctaacactcttcctgcactatcaggaagcctggaagctctttgtcccagggacctctctgggacttcatcctctggggcataagttctgagaaggacccagaagcaagccactcctctgcaccgcctccgtgtctgctgtaggtgggcggtaaataaggcccccacactaggcgccaagcaggcccagggcaaggcctccacagccacatgttagagacattctgtcttcctgtgagtaggaaacaaatacaaaatgctgtcattggagcgtgtgaaagacacagtgtggctgagtgggggctgg

SEQ ID NO: 35162 - DNA, 2300 bp, Homo sapien
tcatctctagaggggccaggccctccctgccaccctgtgctgcaagacctgtttgtggtctctgcccccaaaggcagggacttcctccattgtttccacattcccagccctcctgcaggcttgtaggacactgtaaggacattgggtcgcagcaccacagactgactgctttggccaattaaagtacaggagcattggctggcaggttctcggcctccttccacagagctggcaccagggtctctgcagggatccagatgacgggagccaaatgagtatccctcactctgcgacctcagctgcacgttgaggacagaggctcccccacgcccatcctgggaaggggcccggagtgtgagagagaggctcccccacgcccatcctgggaaggggcccggagtgtgagagagaggctcccccacgcccatcctgggaaggggcccggagtgtgagagagaggctcccccacgcccatcctgggaaggggcccggagtgtgagagagaggctcccccacgcccatcctgggaaggggcccggagtgtgagagagaggctcccccacgcccatcctgggaaggggcccggagtgtgagagagagactcccccacgcccatcctgggaaggggcccggagtgtgagagagaggctcccccaagcccatcctgggaaggggcccggagtgtgagagagaggctcccccacgcccatcctgggaaggggcccggagtgtgagagagagactcccccacgcccatcctggaaaggagcccggagtgtgagctgagtggtaggtggggggccagggatgggctgtgggcctcgctctctcccgaagggtccgcccttgagtgctgggccactgagagggcggttcacacccttgcccttgtctgccgaggatgctctcacagagtgccgtacttctgtgccaggagcttgtgatccagctatataccctgtttctccttccttctaggtccgagctatacctgtggacattggtttctccattgaagagctggaggacctttacatggtgtttaaggtgacagctcagagccagggcaggacccgttcctagcttcctagcttcctgccagaaaagaaatggatctaagagtatcctcttagaagtagatagaaatagggaatagaatagaaaaacagaaacagatctaagtgcatcctcagatgcagttgccatgaacctcctgtggtagaatcgaatccctcttggagtttaggcaggacctcttaaatggcagcaaatccattcaagtcatcttacacagaagagggaatacattgcccctgtattgctagactgaaaagtctagcaatgcacagcttcaggcatggctggatccaggtgctgaaatgtgccgtcaggcttccccatctctgatgtcctctgcactgctcttcctacaccatgccaggactgtcgtcacagctccagggtcatactctcttctcagtaatcccagtgcaaagagaatttttctttcccttgtgcttttagcaaaagacccagccttaatggttggaatctgcctttctgttgttgttgccagttcccgtccacctctccagctgcctcaggttccgtgctcaaggtggctgctgcgctgtggccctagcgtcacaacagttgagccagctctgcctgcctcctagagaggtcataggagcgagagcaagcctcaggcctcttgtttccctggagccctgccaggaaggctcagcccttctctggggccagcagaccagctctgccccctgcaggctgccaaggactctgtctctcagccaaccccctccccatctgttaacaaggggctgatgacagcctgagagctttcgggaggtgctgcagtgtctggcccgtgcttaccgccccagggctccgcaggcttggacagagggggagggtggacacaccaccagcctaggggtcccctcgacccacaggcttagcggctggaccgtctcaccagaccgtgtcccacaggccaagcacctggctagccagtactgggggtgcagccgcacaatggccggccgtcgggaccccagcctgccctacctggagcagtaccggattgatgccagccagttccgggaactctttgccagcctgacaccctgggcctgtggctcccacacacctctgctggcagggcgcatgttcaggctcctggacgaaaacaaggactcgctgatcaacttcaaggagttcgtgacagggatgagtgagtgcctgcagggcctaccaggggcttgaccctccctcaccct

SEQ ID NO: 35163 - DNA, 2300 bp, Homo sapien
gaatcttcttggccagggcgagaaggtcccacatccccagggccccgccaaagggaggaagctcgtcatccttccaactgggtaggatctggggttataaggcgttcctgcccaagggacccccccactgactaagaaaacagcccagcgtcctcagggttagtgctcaggccttgtcgggggcactgccctgtagagggctccccaacttgctgggggcgctgccagggcacacctctgccctcctgcagggtgcccagtcctctgcacactccttattaggagtctgcataaagattgggtccctccgcatcacccagctgtgggaaggaggctccctctgcctgggcgtggtctggactgttgtcctctgtcctttgcagatacctggataatgtggtcaacaagcagagtgtctctcctcctatcccgcacctccgtgccttgctgagcagcagcgatgacccccctgcagaggtggacatctttgagctcctgaaagtgtcctatgaggtcagcacccagtggggccattttggccaggccgctccatctggcatgtgggttggggtggctatgggcaggtggtggccctctgccctgcagttggcttgatctcaccaagtcacctctccctatagaaattcagcagcctgagggccgaagacattgagcagatgcggtttaaacagaggctgaaagtgatccagtccttggaggacacggccaagaggagtgtggtatgggtgccagcagggctgggcaggggctgggctgggggggcagcagtgccttccccacagagcagggtgggtacagggctccaccgcacccagtctcctacactgctttggtatgtacatcatggtaggattcatgggaccgggatccaggggtgtaggtgggaatgtggggagaggttccagtcacttttctctgctggtggatgtgtcaccgggaagcttctcagatggctcccaccctgaaagccacatgcccagccctctgggccgagcccgcccagcctggcttcccatgtgttccctgccccactcccaggtagcaacatgccgccatcctccgcacaccccaaatggcatgtgtctgccacaagctgctgttctcatctctagaggggccaggccctccctgccaccctgtgctgcaagacctgtttgtggtctctgcccccaaaggcagggacttcctccattgtttccacattcccagccctcctgcaggcttgtaggacactgtaaggacattgggtcgcagcaccacagactgactgctttggccaattaaagtacaggagcattggctggcaggttctcggcctccttccacagagctggcaccagggtctctgcagggatccagatgacgggagccaaatgagtatccctcactctgcgacctcagctgcacgttgaggacagaggctcccccacgcccatcctgggaaggggcccggagtgtgagagagaggctcccccacgcccatcctgggaaggggcccggagtgtgagagagaggctcccccacgcccatcctgggaaggggcccggagtgtgagagagaggctcccccacgcccatcctgggaaggggcccggagtgtgagagagaggctcccccacgcccatcctgggaaggggcccggagtgtgagagagaggctcccccacgcccatcctgggaaggggcccggagtgtgagagagagactcccccacgcccatcctgggaaggggcccggagtgtgagagagaggctcccccaagcccatcctgggaaggggcccggagtgtgagagagaggctcccccacgcccatcctgggaaggggcccggagtgtgagagagagactcccccacgcccatcctggaaaggagcccggagtgtgagctgagtggtaggtggggggccagggatgggctgtgggcctcgctctctcccgaagggtccgcccttgagtgctgggccactgagagggcggttcacacccttgcccttgtctgccgaggatgctctcacagagtgccgtacttctgtgccaggagcttgtgatccagctatataccctgtttctccttccttctaggtccgagctatacctgtggacattggtttctccattgaagagctggaggacctttacatggtgtttaaggtgacagctcagagccagggcaggacccgttcctagcttcctagcttcctgccagaaaagaaatggatctaagagtatcctcttagaagtagatagaaatagggaatagaatagaaaaacagaaacagat

SEQ ID NO: 35164 - DNA, 2300 bp, Homo sapien
ttgcagattctgtctgggatccagccccttcccttcagcctgctgcctcagcccaggcccaccatgccctttccctggggttcccctctcagtctttgacctgcctgcatcccatgactctgatcagacctggccctgccccttccctgggtcctctgtacaaaggcactgtctgagcctccagcctggccttcaagccccggcccctcctggctacactctgccctgccctgagctctgtgcagtcccaccctcctacatagcgtatttgtccggactggaatgcccccagcccccaggaacagcctgggactctgccacttgcccatggccaggccaggtgctgcctgggactctctagatccagcagggttgtcacctccctactgtgggcctaagtagcttttggtccacactgatgttaagatactcagcctgtggccggagtctgtggctggttttcctgccgcttcctacaataggcggatagggcctcctccagagcaggggtctgactggggatatgaccagggctatgggcatggggagtcagctacctcctcccacctgagtgtcaggctcagcccagggacccagagaggccatgaactctggcggggctaggtcagctgacagaggtagggctccatccccaggactgtgtccctagagaagctgattccctgggctgcagcaggcctccccacacctgactttctcctgcgactcaacctttgatccctgaatcttcttggccagggcgagaaggtcccacatccccagggccccgccaaagggaggaagctcgtcatccttccaactgggtaggatctggggttataaggcgttcctgcccaagggacccccccactgactaagaaaacagcccagcgtcctcagggttagtgctcaggccttgtcgggggcactgccctgtagagggctccccaacttgctgggggcgctgccagggcacacctctgccctcctgcagggtgcccagtcctctgcacactccttattaggagtctgcataaagattgggtccctccgcatcacccagctgtgggaaggaggctccctctgcctgggcgtggtctggactgttgtcctctgtcctttgcagatacctggataatgtggtcaacaagcagagtgtctctcctcctatcccgcacctccgtgccttgctgagcagcagcgatgacccccctgcagaggtggacatctttgagctcctgaaagtgtcctatgaggtcagcacccagtggggccattttggccaggccgctccatctggcatgtgggttggggtggctatgggcaggtggtggccctctgccctgcagttggcttgatctcaccaagtcacctctccctatagaaattcagcagcctgagggccgaagacattgagcagatgcggtttaaacagaggctgaaagtgatccagtccttggaggacacggccaagaggagtgtggtatgggtgccagcagggctgggcaggggctgggctgggggggcagcagtgccttccccacagagcagggtgggtacagggctccaccgcacccagtctcctacactgctttggtatgtacatcatggtaggattcatgggaccgggatccaggggtgtaggtgggaatgtggggagaggttccagtcacttttctctgctggtggatgtgtcaccgggaagcttctcagatggctcccaccctgaaagccacatgcccagccctctgggccgagcccgcccagcctggcttcccatgtgttccctgccccactcccaggtagcaacatgccgccatcctccgcacaccccaaatggcatgtgtctgccacaagctgctgttctcatctctagaggggccaggccctccctgccaccctgtgctgcaagacctgtttgtggtctctgcccccaaaggcagggacttcctccattgtttccacattcccagccctcctgcaggcttgtaggacactgtaaggacattgggtcgcagcaccacagactgactgctttggccaattaaagtacaggagcattggctggcaggttctcggcctccttccacagagctggcaccagggtctctgcagggatccagatgacgggagccaaatgagtatccctcactctgcgacctcagctgcacgttgaggacagaggctcccccacgcccatcctgggaaggggcccggagtgtgagagagaggctcccccacgcccatcctgggaaggggcccggagtgtgagagagaggctcccccacgcccatcctggg

SEQ ID NO: 35165 - DNA, 2300 bp, Homo sapien
gtcatgcccttcgagagcgccgtggtcatcgtcgactgctttttctatgagggcatcaaggtgatcctgcaggtggccctggccgtcctggacgccaacatggagcagctgctgggctgcagcgacgagggcgaggccatgaccatgctgggcaggtgacatgccgggttccttctcctgctgggggctcacagcagaacccctcaccagccccgggcactgtccagtcagcctgaagtgactgtgcccaccaagtgccaggctgcagctggacccgggggtgctctggggtcaggaggcggctcctttctagtgggagatgaagcagcgctcagtgataggtgccaggaggagtaaagcaggcactgcgggcagagcatgctggctggagggccaccgctcagatgtagggttggagatgcttcccctgagggcaaaccagagccaagatccagtgaccacaattccagttggtggcacagctgggcatttcatgtccaccaggtggtcccggtcatacctctccaagctcagctgcattgcagcccccatgccctggagggagcaggcctgccctgggcccgctggaacagctggatgagctgatgtcccactagtcacgccaaatgtccagggtcatcccagcccctccaccccctccttagtccccacatcccatctcttgcagattctgtctgggatccagccccttcccttcagcctgctgcctcagcccaggcccaccatgccctttccctggggttcccctctcagtctttgacctgcctgcatcccatgactctgatcagacctggccctgccccttccctgggtcctctgtacaaaggcactgtctgagcctccagcctggccttcaagccccggcccctcctggctacactctgccctgccctgagctctgtgcagtcccaccctcctacatagcgtatttgtccggactggaatgcccccagcccccaggaacagcctgggactctgccacttgcccatggccaggccaggtgctgcctgggactctctagatccagcagggttgtcacctccctactgtgggcctaagtagcttttggtccacactgatgttaagatactcagcctgtggccggagtctgtggctggttttcctgccgcttcctacaataggcggatagggcctcctccagagcaggggtctgactggggatatgaccagggctatgggcatggggagtcagctacctcctcccacctgagtgtcaggctcagcccagggacccagagaggccatgaactctggcggggctaggtcagctgacagaggtagggctccatccccaggactgtgtccctagagaagctgattccctgggctgcagcaggcctccccacacctgactttctcctgcgactcaacctttgatccctgaatcttcttggccagggcgagaaggtcccacatccccagggccccgccaaagggaggaagctcgtcatccttccaactgggtaggatctggggttataaggcgttcctgcccaagggacccccccactgactaagaaaacagcccagcgtcctcagggttagtgctcaggccttgtcgggggcactgccctgtagagggctccccaacttgctgggggcgctgccagggcacacctctgccctcctgcagggtgcccagtcctctgcacactccttattaggagtctgcataaagattgggtccctccgcatcacccagctgtgggaaggaggctccctctgcctgggcgtggtctggactgttgtcctctgtcctttgcagatacctggataatgtggtcaacaagcagagtgtctctcctcctatcccgcacctccgtgccttgctgagcagcagcgatgacccccctgcagaggtggacatctttgagctcctgaaagtgtcctatgaggtcagcacccagtggggccattttggccaggccgctccatctggcatgtgggttggggtggctatgggcaggtggtggccctctgccctgcagttggcttgatctcaccaagtcacctctccctatagaaattcagcagcctgagggccgaagacattgagcagatgcggtttaaacagaggctgaaagtgatccagtccttggaggacacggccaagaggagtgtggtatgggtgccagcagggctgggcaggggctgggctgggggggcagcagtgccttccccacagagcagggtgggtacagggctccaccgcacccagtctcctacactgctttggtatgtacatcatggtaggatt

SEQ ID NO: 35166 - DNA, 2300 bp, Homo sapien
caggggatcttccggtctcagcctcccagggcatgtaccaccacacccagctaatattttttttttagacatggggtctcactgtcttgcccagactggcctcaaactcctaggctcaagtgatctttccgcctcagcctctcaaagtgctgggattataggcgtgagccaccagccaccattcctgggctttttttttttttttttttttttttgagacaggatctccttctgttgcccacactggatctcagtggcatgatcatggctcactgcagcctccacctactgggctcaatcgatcctcccacttcagcctcctgggtagctggaactacaggtacacaccaccacgcccagttactttttgtattttttatagagatggggtctcactgtgtggcccaggctggtcttgaactcctgggctcaagtgatccgacctcctcagcctcctaaagtgctaggattacaaagtgtgagctactgtggcctggcctatttttaattttttgaggaactccatacttcctccccagcagctgcaccattttatattcccaccagcagttcacaagggttccgatttctccacatcctcatcaacacttgctatattctgttgttgttagagtgatgggcatgagggtatctaattgtactttaggttagcatttctcgcagcttttgattttaaatctaggcattttcctggccaagtcatatggctttctgtttgccttaaaggtcttgttagcagctagggctgtgtgtggtcctagttgtgcaccgagtgggtggccttggtgtggggctctggccttgtggctcacctccacatcagcttggtcataatcccacctccaacacccaacaccactccgcagaagtgtgatgtgttgatgttcaccttctctggtttcccagtgccttctgacccagtttgaaggagttggcagactctctgttccatcagtttcctacaaattgccttttgacatttcccagagttgggtaggggcagtttctcattaccggatgcccagccctcctgaagaggcagatttgcttgtaggaggaggccattaatcttcaccacgagaacctgaaaaataataaaaataacaacaacaaaaagaagatcatgtgggcccttgcagggaggggtggctgggaggggtggggagagacagttttatttgctggccagcagtgcaagccttccccggctgtctctgtgcccggcaggcaatgaacatcgtgacctcggtgctcctgctctatggcagtgaggaggaggccttctggctcctggtggccctgtgcgagcgcatgctgcccgactactacaacaccagggtggtgggtgagtgtccccgggtgctgcctcgcctgggtctccaggtgcctgctggttccatgagggtggcagcccttcccaggccaagctccaggcttcacgtgggttccctaggagttagagggtagtattacacattcggtggtttataaaagtcccctcagagcctaaattcctatccatctaacttcctgtcaactttttgattatggaaaatttcaaacatcaaaactagagagtatatatcccccatgtaacctgatgctcaactttactgaactcatatccagtgaaatctgttatgaagtggaaatggacttgcaagagtgtttaattaggttcatatttaagcatgttatcctgtccttcccctgctgtctggtgtttggagttaccgctcttggggtccttcagagctgcgtctattcacaatcatcaggatgggacagagtcattgagggtgctgtttacctctcatgccttacggagaaatcagtatttccccaaaataaaattcaagtgtagtagaagaaatagttatttcgcccagtggtttgggagctgtagagagacttgaagggttttttcgtccttgttttctcccagcactccaagtctccctcagccctcactgcacagctggcagggctggagtggccagggctcgtacgctgcaggtgagggcccacccaggccacagggtgggctcaccatcagcctcgctcatcctgcccgcaggagccctggtggaccaaggcatcttcgaagagctcacgagagacttcctgccgcagctctcggagaagatgcaggacctgggggtgatctccagcatctcgctgtcctggttcctgaccctcttcctcagcgtcatgcccttcgagagcgccgtggtcatcgtcgactgctttttctatgagggcatcaaggtgatcctgca

SEQ ID NO: 35167 - DNA, 2300 bp, Homo sapien
tcccatcttcactgtttttaagcgtgcagctcagtgctctaagcacattcacactgttgcacgcccgtcaccgccatccatccccagacctctcttcatcttgcaaaaccacagctctgtgcccattaaacatgccccgatcaccattagcaaccactgttctactttccattgctatgaatttgactactgtgtctcatataagtgaaataacacagtatttgccttactgtgcctggcttatttcacttagcaagatatcctcaagggtcatccatgtcatatgaatgtgtcagaatttctttctcaggctccatcatattacatagaccacattttcttttcttttcttttctttttttttttttttttttgagatagaatctcactcttgtttcccaggctggagtgcagtggtgcagtctcagctcactgcaacctctaccacccaggttcaagcgattctcctgcctcagcctcttgagtagctgggattacaggcatgtgccaccatgcccagttaatgttttgtatttttagtagagacggggtctcgccatgttggctaggctggtcttgaactcctgacatcaggtaatccacctgccttggcctcttaaagtgctgggattacaggcgtgagccactgtgcctggccagtatttctatttttaatttattttaaattattattattatttttagagacagggtcttgctatgttgtccaggctggtctcaagctccttggaccaggggatcttccggtctcagcctcccagggcatgtaccaccacacccagctaatattttttttttagacatggggtctcactgtcttgcccagactggcctcaaactcctaggctcaagtgatctttccgcctcagcctctcaaagtgctgggattataggcgtgagccaccagccaccattcctgggctttttttttttttttttttttttttgagacaggatctccttctgttgcccacactggatctcagtggcatgatcatggctcactgcagcctccacctactgggctcaatcgatcctcccacttcagcctcctgggtagctggaactacaggtacacaccaccacgcccagttactttttgtattttttatagagatggggtctcactgtgtggcccaggctggtcttgaactcctgggctcaagtgatccgacctcctcagcctcctaaagtgctaggattacaaagtgtgagctactgtggcctggcctatttttaattttttgaggaactccatacttcctccccagcagctgcaccattttatattcccaccagcagttcacaagggttccgatttctccacatcctcatcaacacttgctatattctgttgttgttagagtgatgggcatgagggtatctaattgtactttaggttagcatttctcgcagcttttgattttaaatctaggcattttcctggccaagtcatatggctttctgtttgccttaaaggtcttgttagcagctagggctgtgtgtggtcctagttgtgcaccgagtgggtggccttggtgtggggctctggccttgtggctcacctccacatcagcttggtcataatcccacctccaacacccaacaccactccgcagaagtgtgatgtgttgatgttcaccttctctggtttcccagtgccttctgacccagtttgaaggagttggcagactctctgttccatcagtttcctacaaattgccttttgacatttcccagagttgggtaggggcagtttctcattaccggatgcccagccctcctgaagaggcagatttgcttgtaggaggaggccattaatcttcaccacgagaacctgaaaaataataaaaataacaacaacaaaaagaagatcatgtgggcccttgcagggaggggtggctgggaggggtggggagagacagttttatttgctggccagcagtgcaagccttccccggctgtctctgtgcccggcaggcaatgaacatcgtgacctcggtgctcctgctctatggcagtgaggaggaggccttctggctcctggtggccctgtgcgagcgcatgctgcccgactactacaacaccagggtggtgggtgagtgtccccgggtgctgcctcgcctgggtctccaggtgcctgctggttccatgagggtggcagcccttcccaggccaagctccaggcttcacgtgggttccctaggagttagagggtagtattacacattcggtggtttataaaagtcccctcagagcctaaattcctatccatctaa

SEQ ID NO: 35168 - DNA, 2300 bp, Homo sapien
gtgaacctcgaacacatgatgggaagtgaaagaagacagacacaaaagaccacatattgtaaggttccatttatatgaagaaatggctagaatgggaaaaatgtatagagacaaaatagattgatggttgccagggcaaagccggggggaagtggggaatggcagctaatgggtaaggggtttcttttgacttgataaaaatgttctggaattagtgatgatggatgcccagcctagtgaatatactaaaaaccactacgttttgcactttaaaagagtgaacgttacggaatgtgacttatatctcagaaaatcaaaaagaagtaagcttagcacgcacatactaagtgatcgataaatgtttgttctttttcttcttataaaaaaccattctcgaggagtggtctccaggtcagcagcatcaacatcacctaggaacgagttagcagtgcaaacaccctgggagggagggggcagcaacctgtgtggctgttttttgttttgttttgttttcagatggagtcttgctatattgccctggccgattttgaactcctggcctcaagtgatcctaccacctcagcctcccaagtggctgggactacagcagcctgtttgaatcagccttccaggtgatcctaatgtatacccaatttgagaaccactgggattaaggaacaagacgactctttacctcctctcagggtgttaaaaagtgcagttcttccaaattctttccctctagagagcacaatgacaatattagttcagacttccaaggtgttgaagaaagcccgcctctgcatcttgaaagctgattcctatatccagcaacattgaagaagactgcagatcactctgggtgtcaactgcatgtacctacatccatcgcaccaagattcttgagtgccaatcacagaaacccacctggaagtcaggtccagctccaaggatggtttaactgcccccttccctttgccctctagccagaccctggtgagggttccagccagcagggtgaccccacatcccagtcgaccccggacaggccccaggcccgttgtcccaggtggagttgacagccccctcatgcagaaggctgtgtgtggactggcgctgcccctgcaggccaacactgggagaccagggacccgcattcgcctgcagccagcctcacacttgcgcagaagccgccactgggcccagggccagtccagaccccatccccagggccggccagcctctgtgacccgtctgtcaggggaggggcagcactgatttccaaggatgcagcccgtatcagggcctcctggcacctgccctgcgctggaagattcttctagtctcccggccccagtgtcagaattctgagaactggccgggcgcgatggttcactcctgtaatcccaggacttgggaggccaatgtaggcggatcacccgaggtcaggagttcgagaccagcctggccaacatggtgaaaccccgtctctactaaaaatacaaaaaaattagccgggcgtgttggcgggagcctgtaatcccagctaaagaggctggggcaggagaatcacttgaacccgggaggcagaggttgcagtgagctgagattgcgccactgcactccagcctgggcgacacagcaagactctgtcgaaaaaaaaaaaagaaaagaaagctgagaattaggaggaactgcaaaccctttccaggcgccctttgcagtgctaacacgccccgggttgcacgcgcaaccagccaaaagccgccaaactctgcttcttgacatccttctctcacactgcacagctttcaaaacgccagaagccctgctctgcacagcggctcccctgtctgcggactgggccgttccgttctggacccaggccggaggccgtgggctgcaccgctccaggaggccaggctggcgcgcgcccgaggccggggctgagggggcggcgcggaactcgggccgcgtgcgggagcgccacacgcccgccagggggcgccgcccgcccggccccgccccgccccggcccgctccgcacgctccgctccgcacgctccgctccgggacgccgacggcggcgggcgcttccgtctcgcgggcctcggcccggtgcgagcggctccgcgatgtggctgagcccggaggaggtgctggtggccaatgcgctgtgggtgacggagcgggccaaccccttcttcgtgctgcagcgacgccggggccacggcaggggcggcggccttacgggtgagaggcgcgcgggcggccgggcctgtgggcgccgcggctgggct

SEQ ID NO: 35169 - DNA, 2300 bp, Homo sapien
tattccccgtttggatacagtattagacatttttctaagaggagattatcgtaacaggtcactgagctgcttttattttacagcataattatcggtgaaacagatagtgatgaaagtaaacaatctgtttcaggattttaaagttttatagtgcatcgtctgtgtctttcaatagttgactcctaaaatcatgacataggcttctatccccgtttaatttgattgaggaagggttaaaggttcagagtgcagaaaccttttaaggaaaagggtaggtaatggtcgtatacaatatcaatcatgaaaaattgtgaaaacattcatcttccatttcatgtattaggagacctctggtagcaaatacactcttggtgcagtctctcaccacaatagttgaaagaaaatttggggaaagatatttaagtgggaatggtagatgtaatagttctctgaagttactggcatctttacattttacaatttaagtcgtgtaagcatttagtttcttttgctaggcatgtgcttccaggtgtgtagaaagccaacattttcccactggcgtcatctctttatctactacaattaatacttcatgtttttatgatttgttttgagacaaggtcttgttctatcacccaggctggagttcagtggtgcgatcatggctcaagcagtcttcccacctcagcctccccagtagctgcgaattcagatgtgccccaccacacccagctaatttttttgtattttttgtttcactttgtcgcccagggtggtctcaaactcctgggctcaagcaatctacctgcctcggcttcccaaagtgctgggattaacaggcgtgagccaccacacctcgccttgcttttatgatttatttacttctggtgtcacctttttagatccatgcgctgtgttccctttccttacttccttcccggcacacagaggaccggcagggctgactcagggcacagggctggcaccctctgccactgtgcgccagcagtctgcagactctacctttggtgacttctctccccttctgggctgcccttctctctcatttgaacctgttataaatgtgaaagtgggagtgggaagagcagccgggggcttcttcttaagatttgcagaggatgccagaaccatgatggccatatgtgcagagtgaaaaattgaggcgcttactctgacagatttaaatgtacttatgagtattttaaataaactatcccaaaaaatccagaacagtggccatgtaatttgtagtaccaacattcttagtgtcttcttgtaacctgttagacagatggatacagtaagtgtatcttgatacggagttgtggggtgacttttgctaacataaattagaggaataatacatttattctacttagatgttattttaactacttcaactttcaaatataagccaaaaccaaacttttaaattttccttagacatttatgaagaaatttgctctaacatggttgaatttcaacaggatcacttagtaactgaaccgaggattattttggcctcctcactggcccccagtccaggctcctgttttctcactgtggggatagcggtggtggcggtgtgtggagaggctagtacatgaacaggaatgagtaagagtcagggtgtcagggttacatcagtcacctgggtttctcgtctgtgttggccttttcttcctcctccctttaccaccctgtactggatattatcagtccttttttattttttatcagtctgtaaagttaagaaattttcattgttttaatttgcattataggtaaccgtcccatggagcatctctccctataggtactgattcagcttcattgtattgtttgtggatgtattcatagctctgctggcagcgagctgcttcacgtgctttagctctgtgtggtattcagaaagcagttgacactttgataaagacttggtcagttttatttatctttaatgtgtgtatttctttttcttttcagttgctgatcatctgggctgtgatccacaaacccggttctttgtccctcctaatatcaaacagtggattgccttgctgcagaggggaaactgcacgtttaaagagaaaatatcacgggccgctttccacaatgcagttgctgtagtcatctacaataataaatccaaagaggagccagttaccatgactcatccaggtaaacaaaaatgagggttgttgattttgtttttcttcttagaaatcattgctttataggtaagcattctgcctctgctgaagccatgtaatttccaa

SEQ ID NO: 35170 - DNA, 2300 bp, Homo sapien
acctcatcttgctttatttaaaggggagatcagcaagtgccagggaagtgttaaaggtgctctggaaccaattttctccttgacaaattcagaagggttgagaaagccacttcctccccacctgattaacaaagtggtgcttgtgagcttctataattgtttcttgtgccaggggtcatgggcaccttacagtttgaagactcctcctttataaggacaaaggagtagaggccatgagcctcttgggcaggggtaggccagggcatgcccagcaagaagagcaggagaccgtcaccgggaagagccctacacaggccctagatgtggccctgggctgtggggagaaggaatttctgggtcttaggtgctagagcatgggtaccttggtgctaaggactccttgccctatgaagggtccagctggaggggaccagattagagcactctttaggtgccaggcccagggcgaggaccccgctgctttggcctagggtctgtacttgccgaggataagtaaataagtaaaagccgttctccataggccagggcacggtttataaggactatggtagaggatggaagagagggaaatggagggagaaattgtaaaggatgtctgccaagtcatcaatagtggacatctgttttctttcttttttctttttctgagacggagtcttgctctgtcgcccaggctggagtgcagtggctcgatctctgctcactgcaacctccgcttcccgggttccaacgattctcctgcctcagcctcccgagtagctgggactacaggcacgcatcaccacgactaatttttttatttttagtagagacggggtttcaccatgttggccaagctggtctcgaactcctgacctcgtgatccgcccacctaggcctcccaaagtgctgcgattacgggcgtgagccaccgcgcctggccagtggtgggcatcttaagttttagcctgcactgcatccgtaccctttcctggaaacagtgcctcaaatttctttttggggagccacctcttttccggattttcagaacatttggttgtgcaaagctgactccacccacttcccgcagtaggagacaggagactcaaccctggctggtcagaagacgccaaactttccccctccgcctccccacaaagatcctgtaagttcctgaattcggctgcactgccccattcttccttttagctgatactttatagcgatgtgtatcttttaaacgccatggagagagaaaatgagagtcgtgtgtgtgtgcgcgcgcgcgcgtttcggaaggtggagggggggttcccactgcaaccctctggtccgggggcccctggagtagttcacctagtcactagagcaggggctccccaaccgcccggccgcggacctgtaccggcccagggccttcgaggaaccagtaagcgagcaggaggtgagtgagcatcaccgcctgagctccgcctcctgtcagatcagggcggcattagactctcatagcaacgtgaacccggctgtgaactgcgcatgcttgggacctaggttgcccacttcttacgagaatctaacgcctgatgatctgaggtggagcagcctcatccggaaaccacttcaactccctcagtccctggaaaaactctcttcctggaaacccgtcccccagtgccaaaatggttagggacggctaccctagaggtctttcccaaccactcgtgtccctgcaggtccgggccagagacatcccccatccatgatgtcaaccgcatgacgtgaatgttaaatctcatgacatttaattttaaacatttcttttaaagttatggctttttttcctttgtagtctgttctcacacatttccatacgtcctcgcaaatctcccgggctccacgccctgcggctatcacgcctgacagagaaacaaccagcaccagcggctgacccggctgcccgggccctcgtgcaggcgggcgggagcggacaggccctggcacgcatgcgctcggggcgggactgcgccttaggcctgcgcgttgccgctagaccagcgggggggcggggcggcggcggacacgcgcctcaggcggcagccgcgcgagagggactttgtgttccgctgaccctcctcggggcgcttcctcccgtgccgcccttcccctcccccgccgcgtccttgcgaggcgcctcccattcggtgggaccgacccggggggatggagggggcacgcttctacaaccctcctgggaccccgaagagacgcccgcgtgcgacctgagacgccgccctcgccga

SEQ ID NO: 35171 - DNA, 2300 bp, Homo sapien
ggggagtgaagatggtgggagagccttcctgcaggagggaacggcatgtgcagtggttcagagttggagaaggcatttggaggagagaacgtggctggtgccaagagcaatggggtgtgataggcggtgaggatggacaggtcagctagtccaaatcacaaagagcccagaatgccaggttaaggaggacagcagttttgactgtacctgagagaaccccaacttaaagaggcacatgtgatggagaagtccatggagcagcttctgtgctcagcacagcgacactgtgctcaggaatgtgcccactttcctgccacaatggccccagtagcgtcgggcatacattccaccagctcaaggactccagggggaaagaaagcctccaagtgccacataagttctgggattgcagctgagcccccctaatttggatggggccaatccctgaaccaatctttgtggccagaagcagggggattaggctgattatccaggcttgtgaaaaacaaccttcgtggaggggtgccggggggaagaatctagaagaggcctgcccctgagtggggcaagaggagtagacaagagatgggtcctgcaggagagttgagaggccatgagaagacggagaatgaaggctgtgctgtgaggaaggggccctgacaatactcccaggaagtgaccactggactcaagctggcacaaagtggctgtggggggagcctgcccagccaggagccccgggaccagcagctcccactcaggtgcacccaactcaggtgtgcccccactcaggtcctcactgctccttgccattgcaggcagacatgccacagacgctgagtgcctccgacatggtcaccccaggcagcctcagcccaccccccaccgagcccacagatggcgaacaggctgggcagcccctcctggatggagcgccatcctcagcctccctggaaacactgatccagcacctggtgcccacagccgactactaccccgaggtgggtgatccacccagcgggcaggagagtgggctctcctccaccacgcacggggggcatcagggttgggcgtgaccttgggccagggtacagggccagctgggaagcatgcccctcctggtgccctcctgagcctgtgccctctttctcgtgtgtcccccagaaagcctacatcttcaccttcctgctgagctctcgcctcttcatcgagccccgggagctcctggcccgggtctgccacctgtgcatcgagcagcagcagctggacaagccggtgctggacaaggtgaggcggagggcaggccagggggtctcagagtgtaccagcactgccctgccatgccctcaacgcatcagcctctcggggaggcaatgattgtccccgttttcctgacaaggtggctaccgggtgtttccaccttgtctgaggcccagagccagaaggagcagaacaggacctttaacctccatgtagttttccagtgcccgacgggaacccttgagcccattaagcccagacctgagtatccggagcccggtcagtaggacccatctgtggccgggagggcctgctgcctctggtgggcttccttcccccagcacatccgctccaccttcccagtcctggccgggtcctgcgggctgcctctattgcacacgcgtcggtagggctctaccgctagtgggagagacccaacttcaacccgcctgaaccaaaaggacttagctggcccgtgtacctgccctatctcagggaccgctggctcgggcctcacaccacagcactgcaccgtggcctgtctccctcccgccctctgctgccgcttcccggggctggcctccctcgggctggctggtgtggcgcttggccgcctccaccgcaccaggctcacctaccaccctttccggtcacgtggaagcctcaattccttttctctactggcccagtgagtctcctcattggcgtatcctaggtcacgtggccacctgtgagccaatcactgtgcacgatggcgtatgcctgctctgattggtcggcacagacctagacccacccctggggcagggtcccctgctctgaggactccccactccccgcagcgcgaagactcaccagggaggatggagccgtcaaccgcagaaaggccagagcaagagatggccctgcccagaaatgtgtccgtcccccctcctctccccgtgggcgcagagcaggatcgcacccccctcctcctccctggcacagagagggcacgaggccctgcctgccccgggcggccagacccgcaaggacgcgca

SEQ ID NO: 35172 - DNA, 2300 bp, Homo sapien
ccttaccagctccctgaggtcgggctttgtccccattgcctggaatggagccaggagtcaccccatgcatacacgcatgaatggatgacccttggcaaccacaggaaaaaactgaaggctgcggcacaaggataagcccattcattgagacccagacctggacccagctggtgatacgatgggtgattggaggtcggaggaccactggcagcccagcccctctctgggcatccctgtgggtcacaatagttcagcaaccaccaccacccctggctccagcgagagctagtcgctccagagcagagctggatctgaacactgctcccacctcccatgtgcccagcacctgggtccaggccaggccccaggtcccctgggagcctcctggctgtctctttaaagtggcagcctcctggcctccttcagaaaggcccctgcatggcacctcccaccatcctgcagaggcttccagagccacctccacccttgccactggcttgtcaagaaaatggggctgggatctggggcaggcccagcgttgcagggtgaacaggtgccaggtgtccagcaggagacaacggacctcccaggctcacaggttttctatcttgtggaatcaggctgagctgccgggccctgggcaggaggcagagcagcgtgcaccctgcagccggcccatcccgcagctgtccccctcccactgagcatgtgcagcttcctgcatgcccacctgctcagccgcctccccctgggacagacaggaggtgattttgtgaaattttacggtttcattggctgaaaattgaacacttacagcattgtcagggaggcgaaaataagctgtctgtcaccatggccaggactgtctgggctgctgtccacaccaatgcctgagcccttcccatgctgtaacccagtcccagcacctcccacacccacatggccacgggacagccctctgaggggctccctctgatccccagtgtcagctctgacccaccacgtccctctgtctctactcccagggcagggtcactcagagtgctgcaaaggagaaataggccagggtcagggtttgccatcggggcagcaaggacggcatgagcaggggagcctcagagtccatagaagaccctgcagtgagctggcaggactccacgatcaagaatgtaggggctgtctaaacagtcacaggtttagccaggatgcgtcactgtgagggctcctgggctttcaaggaagactggcctagaggggtaagtggaagagcttctgagagtaagcatgggctccctgcaggtgggtatggacacctgctgctgccaggcccgtcactcagagcagggtcacagaggatgtgctctggcctctgcctggaggtttgggtagagaagacactgtaacggctgcagctggcctttccctgtgccaggtactgacagcagcacccaggcacccaacaaggctgacaagcagaatctgctgatgcccaccagaggtcaggtgcagccttggtgggacgcagggaaggcttcaccgaggacgaggcatttcagccatacctggagggataggggagtgaagatggtgggagagccttcctgcaggagggaacggcatgtgcagtggttcagagttggagaaggcatttggaggagagaacgtggctggtgccaagagcaatggggtgtgataggcggtgaggatggacaggtcagctagtccaaatcacaaagagcccagaatgccaggttaaggaggacagcagttttgactgtacctgagagaaccccaacttaaagaggcacatgtgatggagaagtccatggagcagcttctgtgctcagcacagcgacactgtgctcaggaatgtgcccactttcctgccacaatggccccagtagcgtcgggcatacattccaccagctcaaggactccagggggaaagaaagcctccaagtgccacataagttctgggattgcagctgagcccccctaatttggatggggccaatccctgaaccaatctttgtggccagaagcagggggattaggctgattatccaggcttgtgaaaaacaaccttcgtggaggggtgccggggggaagaatctagaagaggcctgcccctgagtggggcaagaggagtagacaagagatgggtcctgcaggagagttgagaggccatgagaagacggagaatgaaggctgtgctgtgaggaaggggccctgacaatactcccaggaagtgaccactggactcaagctggcacaaagtggctgtggggggagcctgccca

SEQ ID NO: 35173 - DNA, 2300 bp, Homo sapien
ctctcctcctagactcctggcttcctccaggcgacaccctgggactggacctgaggcttaggggcatagggtgataatcggagaagatgcagggagggcccagtgcctgcaccctgaggcgcatctgtctatctgctgggagcacactgctcacccctgaccaagtgcctgcctctgttcctcctccctttccccacacctgacccttggtctcagatgtcaccctccctagggccagcctctggccctggccctggccccagccctgctgtctccctgcctagctacctggcccacattcattctaatacatctgtatgccctaggcagctgcctgctctctccaggactcagtttccctaactgttcaagaaatgggctggactgttgttcttaacctgtccattcttccaggaacagccttcacggaagcttggaacagcaccttactccatcctcaaagctgacacaggactaactctgcctcagctctagtgagacgacacccaggcctgctattcctgctccctaggtctttggaaatggcctgagctcagctcctcggagcctgtgtgtggcagccgcaggctgtccttgcaactatcaggcagctgtgccctctctgaggtgtcaacccagggccattctgccacagaaagactgggagataggggaggccagtttctatgcacataggttaagtacctggatctagccattcctctaagcagtaaaccttggctttttatgatccacaaaccagctttttgctcaagctggttgggttgagttttgggccacatctcatcaggcaggtcctgactaaagcagagtgaggtgaaggcagctggaacttccgtgtcgggtggggacttggagaacttttctggctagctagaggattgtaaatgcaccaatcagcactctgtaaaaacgcaccaatcagcactccgtgaaacggaccaatcagcaggacatgggtggggacaaataagggaataaaagctgcccgcccacccctcgccagccagcaacagcggcgaccggctgtggtctttttccctgctgtggaagctttgttctcttgctcttcacaagacattttgctgctacgcactctttgggtctgcaccacctttttcttttcttttctttttttttttttttgagatggagtcttgctctgtcgcccaggctacagtgcagtggtgcaatctctgctcactgcaagctccacctccccgggttcacgcccttctcctgcctcagcctcccgaatagctgggaccacaagcgcccaccaccaaacctggctaatttttttgtatttttagtacagacagggtttcaccgtcgcaccacctttaagagctgtaacactcactgccaaggtccctggctcattcttgaagtcagccagaccaggaacccagcggaagggacaaactgcggacacaggaggacaggtgtcctgacctctatgctgggaccaaccagggaacttttcactgaagacccagttcaaggaggccactggatcctgttagagcccctctccctttctaaaagtgaaatcatgcatcgccatcctcccagaaccccggtgtcttcaaagtggtgtccaccctccctgggggccacgggagagcgccgagaaggttggggagggggggtgtccacccagggatgtcccattgggggacacagacaacctaggtggccagtccagagaaccgggccgggcccagtcttgaggagagagggtgaactgggttttggggcgccagaggcccaccaggtgaggtgtaggctggggcagctggggcgcagagtccgccagggtccgcgcgcgggagggcagcgtctgacggcccgagcgggtggtcctggcgcggggggccagccgccgcggaggcctgaacgcagggcgggacgcttggctccgcggccggggcacggagggccctggtgtgcagcgccgcccgcgggctcccgcagctccacccccgcgccccgcccgctccgcgctgcctgagtgccacgagggggcgcagcgccgcgttgctccggggccgccgccaggcgctcgtgcgggctgcgctgggagccgggcggtcgggcggcggcggcggcggcggcggcggcggcggcggcggcgggcggcgccccggtccgcggcgccgaggctcgcaccgggagctgcccatgggccgggcccggagttccggcgcgccgggagccggtgagtggtgcgcggccgagggacacctggcggtgcgggcaagggcgcgggctcgcgg

SEQ ID NO: 35174 - DNA, 2300 bp, Homo sapien
ccctccgtaaagcaggtggtagtgggtgcctgcctttttgctgagttgtctctaatcctttgcacttgtaccccgctagccaagctcagcagttcgctgtgtctggacacagtcagtttgagctctgtggctctactgtccatctctggcaaaagagtctgagggcggatgccgcctcctccttgaagccgtccttgtcttctgcccctgccagtgggtaggatctcttttgccttttgattttgtttacattgtgcttatggcccttaccgcactgtgacttgtaatatagataatggactcactgctcgcgcttctcccccaaatagtgaagtacatgttgtttcaagactggttgctagctgactatggcatatcttttgctatacttaccactttcgtgcataaaggtaccccctaaatgttgagtggaattgtttcagcctcttgcaaactgtaaataagctaatctttagaaaggatcttcctttagatatcagtaaaatggagcagcactgtggggaatcagatcaacaaaggtttattgaatgctcacagtgccccaaagaccagcttcctgtcctcctgtccttggagtatgagatgccatgagcaagacagacctgcctcgcacctcctatagcttagagcacagtgacctgccagcctggagagctcctgagtccccttctcacagcagtgtgggctaggcaggtgttccagctcactcagccctagattgctcccaggtaacacgggactgagactcctgcggtgcgggttgtatgagcagctgtttgtccagcatctaagcgctgtggcgtcactggagtcactccctggctggcacgctaacacacctcggcaggagtggtcagagtggcagccacactgcagccaccacccagaggacggggagaagaccgtggggcagtggtcacttggagaaattattaatttgactcagttctttatttagacttgttattaatccattttttccatgtttaaggaaaatcctagcatttgtgttgaaatataaatcatcaccacaaaaatctcattaggttgacgttaaatattagatactagaacataaaggcaagggatttgacagagctgtagaatacattctgtagtcttaaacggtatagaatgtttacctatatgattttattgttggctatgtagttttaaaagaccaaaataaatagcttgctgacttttaaataagcataaccagacacgagcctaggaaccacttgccaatttgtttgcttgttttctgtataaaatcatccaggctcctgcagagcagcagtctcagcctgtgcctcaaccacagaaaagctgctttctgggcctgctggcctacactcagacatagtggatagacttcctagtgttactatgatggactgtcagtcacagcagagttcttcatatacagatctctaccctgaagtccggtggtgatgtgggactctggggctgtgccagctgatgccagctctgggacccacctcctgaggcaggagcacgtgcttgggcacatgcagcacactgatgccaccaggcctctgacagcctgtcactttggcgtatgaatcttgctttttggttcatcatttcaaccagaatctatacactgagcagaagactggtccgtttgcttctctttaggcattctagaagtgatcatttttgaaacaatgcctccgtctctagacagctaggtgtaaatgaaccatttacacctagcttgcccacagggggcaagctgatgagacgcacagagtgatgtagtcttttcatagccagtagtaatgcatacattcttttctccaaaggtggttattttctagtccagccccttaaagtgtggtcttgctgggcctcaaaattccttcctttcataatggtctggtaccactgaaatgtctgcatttttttgtgtcttgcttaagttcagaacttggtcagattgactttatcaacttacagccacattgtcttacataccaataagttcagaactctcttacgtgagctgcgtatgtacttccggtaagaatgcacgttcattctgtttttctttgaagggatctgaaacttgcccacccttcgggatattgcaggacgctgcatcatgagcgacagtaaatgtgacagtcagttttatagtgtgcaagtggcagactcaaccttcactgtcctaaaacgttaccagcagctgaaaccaattggctctggggcccaagggattgtttggtaagtatggtctgttttaatagcgtgga

SEQ ID NO: 35175 - DNA, 2300 bp, Homo sapien
gcttcaaaataattccgtggggacaggagggaagagtggagaagaaaaggaagattcacctgcaaatcaatgtttttagtgtggtctctctgtccctcctaaaatgccaacgatgtggcctccacgcttgggaaccagcaaggggctgctgcctcgtaactgctcagggcagggcactgatgatgcctgtttcccttgccccagcgctatcatagagcacaccaaccgggtcatcttcctggaggacgatgacatcgccgcagtggctgatgggaaactctccattcaccgggtcaagcgctcggccagtgatgacccatctcgagccatccagaccttgcagatggaactgcagcaaatcatgaaaggcaggtgtcctccagagtccacgtgcggcagcctcgggagccagcgcgcctggtggagctcctgacactctgcctggtcctagtagaggccacagccctcctgccctctgtggccaccagggcggggctgcaggtagcctgtggcttgcacaggtgaggggatgtggggaggctggcctggcacctccaagcgggggctcctgtgtgcagccagccgccaggtctttcctactggaactgagcccagtgtgtcagctgccttccttcaccgactccgcgggacacatgcccaccctcaggcatcatttctcctctgggtggaagtctgcaggtctgcagtaaatggggggtgggggtacactttctccctacaaggagagcctctctgtctgcacccatttctgtccccttacaacctctaccccacagggcagcctgagcaaacgtctaagaacatgaatcagcccctgtgatcatcccgctgctcaaggccctccaatggtttcctactgttcttagaataaaatccaaactccctgccacagcccacaaaccccacaccccagtggggccaaagcctggccccaccacactcaaccctctgtcccactgtgccccgccacagcccctgcattcgctgttcttctcataggactggttccttttcattgcctccagctcccttgaaatgtcaccccctcagagactccttctctgctcctgtgtctgccatggtccctccccagcccctcccctatggtggccacccctcattcccctcacttgcttcatttgctcgtcgcacaagtgccaggtcatgggagacaggccgggagcatgggcgatgttggtgtcatgagtgtgcgtatcctagagaacacggcctgccctgcctgtgggtacctccagagcatcaggtgcaggggcttgaacaccctgcagccccattgtcccatcagcaccatccaatcccactcaaatcagagccctggaaatgcctgtgtggctggaaaggtttttttttttttttttttgagacggagtcttgctctgtcgcccaggctggagtgctgtggcgcgatctcggctcactgcaagctccgcctcccgggttcacgccattctcctgcctcagcctcccaagtagctgggactacaggcgcccgccactacgcccggctaattttttgtatttttagtagagacggggtttcactgttttagccgggatggtctcgatctcctgacttcgtgatccgcccgcctcggcctcccaaagtgctgggattacaggcgtgagccactgcgcccggcctggaaaggtttttattacggaaaccaggagggtatttattagaaggaaaattgcctgtttctttgggcctgcttagctgtactttcctagctggatggctttttgggagtgaagcactttactttcttttggccttgctaagggagcatggcccagagggatcagccaggccatttgttacttgcatgccttgggcaaatccctccctttctcaagctgcagggtccaatatgtaaattggagatagtcctggttcctgacctgcttccctctgatggtagtgagtgtcaggcagggtaatccctggggatgcctttgggaatctgcagtaagctttacaggagttactatcgctgctgcataatgaaaagcagtgaaatataatgaaattaaaactgaccagacgtttatttgaccaggtaacttcagtgcgtttatgcagaaggagatcttcgaacagccagaatcagttttcaatactatgagaggtcgggtgaattttgaaaccaacacaggtaattcctacactcggtggggagcctccgcccgagcctagtctcagggaatgcggtgactgtgtagactcagcattaacgccttgtcgtgtgccctgcagt

SEQ ID NO: 35176 - DNA, 2300 bp, Homo sapien
tactttttgtaaagatgggtctccctgttgcccaggctggtctccaacttctggcctcaagcagttctcccacctcagcctcccaaagtgctgggatgacagacccaagccactgtaccaggccaagttcatcttttctgctggtttccctcatgtgctggagcaggtcatcaacgtcccagcctgggccatatgctgacctctgaaccactgcccaggctgtgtggccaggcccaggccatcaacctcccagatgactctcagagggttctcaaagcaggagtgatgctaggccggcagctgctacagacacatccccatgggtggtagtgtgcactcatgccgttcctcaccgtggacctgtgactcctccaggaggataaaggacagatttggaccctgctaagaccccagggctcctggggtcttggtgctatcagagggcctgttgacatcaccctgtccccgcctcagttacaacagtggaggccagtctgggccaaacaacctgatctccacattcaagttctagccctcatccaggggacctttgcactgcctgctgctccctccttcctggcttcgctaggctctggaccacctgcaccagcgcagccctgcccagtcccaggcagagcctggcaccctctccaccgctggcccagccccctccttgtatcctacctggaatttttagctctctgtgtaaccacgagcttagtgtctgcttccccttcacttgtaagtgccaggagggcagggccagatctgttctcattcatcaataagtctcttgcacctgcaccctgacaggtgtgaagtgggttcttaggaatgagagaaggaaggaaggaaagcgaccctgcatagtggagggttgggggcaaacgctgcggctcctgaatcgctctgagatttcccaacaacaggactcacccaagccccctccttcgctgtcgtggagcctcagttttcccaaccctccaatggcacaacctccttcccccagggcttgcagagtcgcggtgaaactagggagggattatgttagaaaaatgctctagacgagatgtaaaaatctttttttttttacacgactgaggaggatccgtttagaatttcaggatttttttaagaaaaaaaaaaacttcaaagtgcgcaaacgttgggccggttctcgtgaccttcctcgggagacgaggggcccagagtgcagggggaacgggagggacggccgggaaccagggcggagaaacgcgggccttggtgcctcactggggggtcggattccgaccccaggcgtaggaacccccgggtccctcgcgggcctgcagcgcgaggcagatctggggagggggcagctcggcgcgggtggggtcggggcttcctggggcgcctccagcttcgttcacaacctgcggaaccctcgccttcaagctcgggctccgcggcaaatcccagggtcgaattctgccaccgccgcggcgtccggttttggcagagtccttgtctgcctccgggagcctcggttttctcgtctctccgccaagcccgggcgttctctccacgcagggtgagggccaggcttagaggtctgcggagctctgaaacaagcctgtcactcagatgggagcgcggcaggaacagcggctcacgcgggtttccggagcgcgcgagtgatgccggacccctcgctctgccccttacgcggcccgtctgacttctcagcaccccgtgggagggagcttccctgggtagccccgtttcacagacgggaaagcggaggcacagcgcgatcgggccctgcccggcttccacgcctactctggttgagtcggggtctgaactcgggccgttggttgccctaagccccgctccgggatctggcgcccggcgccccagccttacacgcccgacccgcgcctgggagccgcccctcggcccccctccctggctcctgggggccgggtcccgtcgttgtcacgacaaccgggggccaatgggagcaggcgggcgggggaagccccgccccttccccgcccccttccccgccctctcggagggctccgggttataagggctggaggccgagcggacgggagctggagcccgcggagcccacggagcccacggagcccacggaggagcccacggaggagccccagcgtccgaacgggcagaccccctcgagccgcgaaggagcccgagaagcagccacgatgtgcggtgagtgccgcgcccgcccgagccgcctcctccacgccgtccgcgggtcccggcgccgcagcctctccgcgcct

SEQ ID NO: 35177 - DNA, 2300 bp, Homo sapien
caggctggagcacagacggccagggcactcacacagggaggagaggccctgcagggtgtctgtcccattggcccctcagcctgggatactctgtacagcacagggccgcacaactccctgctgtacaggaggaggttgtggagggatggccacaggcagcttactggtctacatgtgttcttcctgactcctaaacttctgcactgctctgtctttgcccagtgtcctatggcgctagaggcctgggctgtcactcctgatgtcatggcagtgccaagcgatgaccatcccaaggccgtgctggggagagggggatcatcttcacctctgaacagcttttgtccctcatcctttccttgcccttccagccaggtctcctccaccccaggcaacagcaacccatttcccacatccccagctctcaacagccttcactgaagcagaagcctcggtttgttgctactgttagttcctggaacctgtctcactctcatttcttcagggttgattttccaggaagcagttagcagcctatcctagtttgccacataggtgggcaggcagctttccttttccttcacgccttcaacatatagctcaaattttttttttttttttgagacagggtttcgctcttgctgcccaggcctgagtgcaatggtgcgatctccgcttactacaacctccgcctcccaggttcaaatgattctcctgcctgcctcagcctcccgagtagctgggattacaggtgcaagccaccagacctggctaattttttgtacttttagtagggacgaagtttcgccatgttggtcaggctgttttccaactccggacctcaggtgatctgcccccctcggcctcccaaagtgctgggattacaggcgtgagccaccgcgcccgaccaatatacctccaatattaagtctgttgggtgttattcttgcccctagactgtgagcttactcagggctgggtggggtctgattcatctctgtgccctgaccatcagtcaactaatatttcttgatgtaagcatcatgaatcagcccagtcatttctctgctgaccttcaaacaccagagtttgccctgaacaccttttgatcttggagcacagcagctgctgtccgttacccaggctaggaccccagcaccaaaactgtccattaatgtaatggaatgaattaccattaataggctgaagtggtatgttaacttactcttctttgtataattgaggaaggaataatattcgactgttcacgattgaatgtcttgtctttaggcagatcaagatactggctccggtcaaatactgtgtttcgacgtgattgacaggcgaaggcttaaggaaaaggaagaggagaaaaaaaggggaggacgatcaaggaaaagaggagataaaagtggacaacccagccgggcgcggtggctcacgcctgccatcccagcactttgggaggcggaggtgggcggatcacgaggtcaggagatggagaccatcctggctaacacggtgaaaccccgtctctactaaaaatacaaaaaatgagccgggcgcggtggcgggcgcctgtagtcccagctactcgggaggctgaggcaggagaatggtgtgaacccgggaggcggagcttgcagtgagccaagatcgccccactgcactctggcctgggtgaaagagcaagacaccgtctcaaaaaacaaaaaaaaagtggacaacctggggcggaaaaagaagtagatgaaaaatggaggagcgctaaggagaggagaaaacagaagtgccaaggcaggaaaggagcgaggagagcgggaacagaaggagacgaaggatggacggagaggaagggatggagggcggcaggcagggaggcagggcccgcagcgcgccgggccggtccaccgctctccagcgcgggggtaagggggcggggcctgggcagctgcgtgccgggagcgacccccgcaccgaagggcggatggttgtgcccggcgacggcgcccaatgagcggccaggatgttggagcgccggcggcggtccgggcgctcgctggctgagggacggcggccgccgccatgatgcttgtttgctttcaatgaaaacgaggggggcgcggaggaggaggcggcggcgtcggtggcggcggcgacggcggcgcggaggcgaaggcagcggcgggcgcagcgaggagggcgaggccgggggccgagagggcgggagggcgtagtggcggcccgtcggggcggctgaggcgggcagccgaagcagtggctctcggagggggaacaaagag

SEQ ID NO: 35178 - DNA, 2300 bp, Homo sapien
aagcgcccacatgtccacccacgggtgaagtgaatgggtgaagaaaacgtggcacagccatgcaatggagcagtatcctaccctaagaaggaaggaaactctgaaggtcatgaatgaacctggaggatatcatgctaagtgaaatacgccagacacaaaagacaaacactgcccgattccactcatatgaggtgccgggagtggccagattcagagacagaaagtggaatggtggtgccaagggcttggggaggggagtggggagttgtttaataggctcagagtttcagttttataagaggaaaagagttctggaaatggattgtggtgatgtttgcacaacattagaatatacttaatgctaatggagtgtgcccttaagatggtgaagctgggctgtgcggggtggctcacacgtgtcatcacagcaccttgggagtctgaggcgggaggattgcttcaggccaggattttgagaccagcttggtcaatgtagcgagaccccatctctagaaaaaataaaaataaatcaagccaggcgtggtggctcacacctgtaatcccagcactttgggaggctgaggcaagagtatcacttgaggctaagagttcaagaccagtctgggcaacacagtgagactttgtctctacaaaaaataaacaaaattagctggacatagtggtgcacacctatagccccacctgcttgggaggctgaggtgggagaattgcttgagcctgggaggtggaggctgcagtgaaccaagatcacctcactacactccagcctgggcgacagagtgagactgtctcaaaaaacaaacaaacaaaaaacaaaatcaaaatccgctgagtgtggtggctcacacctctagtcccagctacttgggagtctgaggtgggaggattgcttgagctcaggagttcgagaccagcctgggcaacacggcaagacagtgtctttaccaccaccaaaaaagtaattaacttcaaactgtttttaaaaaagaaaacgtatttcccattaaaattacttccatgatgaccaacaaaacacaaccaaactccagatttataatgcaaaaatcccccaaacaaaatagtcaaggaaaagtgtaagtgaacagaaacagtgtgaatgcgtgtgcctggccacaacagttggcaaaggcacaagtgtctgcaggtgcggaggaggccgcagtagctcggggtggctgagggctaagacgtgctgtcagccatagggaaggaattccaggacactgcctgaagagtcaggtcctcccacccgggagcctgtttcccacgcgtgccagctacactttacaaaagaaaagagagactttgcaccaacctagctgagagcagccacgcagcaaaacgtgagtcactcagtgctcaatgcctggggtcaaaaaatagaggaaagaagaaggactaaaagcaaattagtttatgtatcatttgcaaaagttttcaaaatgtgctttgctctccatctgtcatacttctgcaggtgacagacgagtgaggacatttagagaaactcaggaacaaaccaggcccatccactggcgtcgaggctagtttcgaagacagaaaaacgccccacttctgtttgcactgtggctgcctgtggcccggccggggaggcggccgggagtgaggcctgatcgtccctggcgcctccacctccccaggcgcagaaggcgcccacgaggacccccagtgcccgacgttgccacggtctgggatcagaggcagggaccagggagccaggaactgcgccgcccccgcccctgccctggcgcgagggaagctcccctcacccgggcccagccctgcaggggggcgcgtggggtcagaccgcaaagcgaaggtgcgggccggggtgggcctcgcggagacaaaggccgggcctgcctgctctcagagggccccagcgcctgccaagaggaagtcctcgaggcccgggcagggaagggggcacgggcttcccagggcccgccggccgcagcaggaagttggccagggcacggccgtgagcggagcgggcagggctttctcaggagcgcgggcgaggccggcgctggaggggcgaggaccgggtataagaagcctcgtggccttgcccgggcagccgcaggttccccgcgcgccccgagcccccgcgccatgaagctcgccgccctcctggggctctgcgtggccctgtcctgcagctccggtgagcgccccgggctcctggcgcgcacggtggggcctgaggcctcggcgcccgctgcgcccccgccgct

SEQ ID NO: 35179 - DNA, 2300 bp, Homo sapien
tttaaaattttaaaagcacattctggctggatgcggcggctcatccctgtcatcccagcattctgggaggctgaggcaggtggatcacttgagcccaggagttcaagaccagcttgggcaacgtggcgaaaacccagctatgcaaaaaagtcactgggtgtggtggcgcacatctgtggtcccagctacttgggaggctgaggtgggaggatcatttgagcccggggggtgctgaggctgcggtgagcagatatcatgtcactgcactccagcctgggtgacaaagtgagaccctgtctaaaacaacaacaacaacaaaaaaaaaacaagtatattctgggcggggcacagtggctcatgcctataatcccagcactttgggaggctgaggttggcagatcaggaagtcaggagtttgagaccagcctggtcaacatggttaaacccccatctctactaaaaatacaaaaattagccgggcatggtgccgggtgcctggaatcacagctactcaggaggctgaggcgggagaattgcttgaccccaggaggcagaggttgcattgcagtgcagtgagatcgtcccactgcactccagcctgggcaacaaaagagagactttgagaaaaaaaaaaaaaagtacattctgaaaaaaaaagcaaaacatatattttgatgataaaatgataaacaaaagcagggaaatgataatgccagggtagtgggcatcttctggggttggtgaggggtttgtgatgggaagtgaggggatgtggggatgtcattctacatcccttggcctggagaatggaaacacaggtatttgttgctttaaaattcaggtttataatatgctgatatattatgtactttccataagtgtgttacatctcataatctttcaaagctaaaaaaaatcaatatatgattgataaatacctaacttcatgtatcgcttggttacctagtttccccaaccttatttgttaaattatctacactatccgcactgatttgtgattccagcttaataatatagccacttcttacctggattggagagagctggtagtggttattgaaaatctactcttgctttttggcgaggatgaaagggctttggggggcgggggtggggggatggaaaatgtgaatgaaacgaaaagcagggaaggaggttgagacagtcatggtcatgggcttcattattaaacaggaaaattctagagacaaactgaaaagagaacggaagtctgtaagagggttgccaagtcagaaagcaaaagcaaagtgtcgctttattaaaaaggtgggggcgggtcctgattgagctgagaacaaaacatctgggggagttctaaagctaggaggccaggcctgcagggagggggtcggtcatcccgggtgtcccgctcacgggtgcggcttccgtcgacactgtccgtcgacactgtgcaggtaaacactgctgaacgggttttgtttttgcttttttttttttttttttggctcccagactggagtgcagtggcgcgatctcggctcactgcaacctccttctcccgggttcaagcgattctcctgcctcagcccccccgagaagctgggattacaggcgcgcacaaccaagctcggcgtattattttatttatttgcttgtttatttttgagactgggtctccctatgttacgccggctggtgccactattttcaaagatgtaacatactatttttacaaggattgctttcttgtttagtctagattttaccgatggaaagaaaggacggaaaagagcgcgtgccgcattttgctcccctttgcccaccaggctccatcacctccggagcgcatcgcgagaccgtctgcgttacccgcgtccccgcgcccggagccgcccaggagggggcccggaccctgtggtgcggagcgcgcactgctcgggtgcaccggacgccccgcggcgggctgggagggacggggggaggggggcgcggggagcggcctgaatcccgggcccgcctccggcccccgccccgccccgccccgccccaggccagccggcgcccgcgcggacactttcagccccgagccgcggccgctcgggtcggacccacgcgcagcggccggagatgcagcggggcgccgcgctgtgcctgcgactgtggctctgcctgggactcctggacggtgagcgcggcgaacgggccacccgcccgagcgtggggctggccggggagggggtaccgcgcacctggggcgggcgctgagaccgctccgccgggtacgggcgggggacacg

SEQ ID NO: 35180 - DNA, 2300 bp, Homo sapien
cccttgtttctatccttcttactccagtcactgctccccatgtaacctctatcaagagctcagagcctcttttccccaggtcagtttggcactcatttaccctggtttcttgcctctcagaccaagtgcttgcttttgcctccatgaagcccattctgattccctaaccaggccctttctttttgggatggtctcttgcagtccgggaatttctccttttggatcttcctgtgagccttgggatttcagccaagggtggtagagatggggtgtgcgttacagtgcacgaacagccgccatcctgtttccccttcacctgccttagatggagaagtatcagggtcagtggtgggaatctgatcttcccccacctttcagcaccccctgatgtctgtcctttctcctggaaggtgattttggctcctcatgtcttggatctacaaaccagtgtttcccagccttttcacttttaggaaacacaattgttttttcctttacgccttgacacctagtgtgagtgtgcagagcccccaggcccctgactcctccattaggcaaacatagggcagaggtgacagacactggcctctgactggcatatccgcctgggttcgaggctcctgccacagtgcgcgcagtcagctaaagtggaagccacgggcttcccgcacatcgcacactgcacacggcggcctcggtgggcctgcccttctcccactccacctccaggtctgggctctggccacttaagcggaggcttcacggcagcgcctgagaggagacagagccctctcaaagcactggcgctggaggatgtgtgcgggggtgttggggggcgcacaggagtgcccggtctaaaacctggctatgctccccaccaggtctggtggcttgcagcacgtttgcacttaccctgagcctcaaactagttatctgtagaatggggatgataacgctcactccgcagagctgctgaggcttgaaggacaggccgagggagggtttggcccgtgaggcccctcaccatgcctggtgaccccttagcagttttgatttaggtcctcgcctccacgcaggggcctgcgggtgcgcgcggccctttgtttctctagaaccctgcacgattcgtggtttcatgtagaaacaagttagtgagcagtcagtcagtaaccacaggccgcagagttccgggctgctccgtgctctggaacacgggggaggggttgatgtcaggggcgtgggtcctgatcacatggcagcagcccttcttggggaagtcagctacccagcagcctgtagtcctcggctacccaccctcaccgcctggggtcccatggtgagacagctgggtgggcatcaggcttctgcagagggccaggccggagggagctgggcgagggagtggggctggctcctggcttgcaccggcctcgtggaatccaggcctcagacctgatcgctggcgaaactggctctgtgcgctggagcccctggtcttctgcgtctgtcctcctcccggccagactttactcctggctcagcgacaggtatttgctatggaagagctgtccctccctcccctcggtgggcctgggtccacctccacctcctcttcaggtccgcaccttcctcccctttaaaacaccagccgggcgcagacccgttctaggcttttccatggtgcttccgccaaagcttgtgaccgagtccttcccgcctagggctggtgggcctcccctgctggtaggtctctcttcgctttctttactcagaactgaagctctcattccccacccaccaaggaaaaacaaaagggaagaagccacagctggccccggcttgctttggcacaggtgtttccccccggccccccgtcgggcaccctggttcctgttctgtccctgccccacgcgaccctggggctcccacccgggctcctcagcctcccctgggttggggtggggggactggctcccagcccttggcctagggtttggtgaacgcctttcctggactgcgggcccacttcaggcgcggctccaggctgggcagctgcgctggagggccgagggcaggggtggggtcgggcgtccaccctcagggttgcgccagggagccggaaagccgactcccgaagttggggtcctgggaaaacttgggtcctgggttgactgagaagcggcggggaaaggaggcgggccaggaggagggggcctggcggacgccggccggggggcggggcgcggcggggctgtcggtcacgcccctcagtccgccccgccccgccccgcctgccgggg

SEQ ID NO: 35181 - DNA, 2300 bp, Homo sapien
ttaggaggttatctagaccattcccgccttctccccccaccagcagtccttttcagttagctccccaaaacagagcagctgcctctgcctaggtaatccattccagtcttaacccagactgacttggaatcctattatctcagtgttggaagggcctttaaaggtaatctaatccaacctcccttcagaagtcttcaattattatcatgttctccttggcctaacctcacaactgccattgctcacaatcccttacaaggcactcatccagcttgggtaaggggaagttgggaacaagtctatacctggacagagtaatggagaggtgtagcttccagtgtactcatctggataagatttcctgaatagtagcctccgcgaactcgccagctcaacaccttctgcacaggcacagcaagacattaagtgggaaatgagacaggagccttacctttcttctcttgtctcagttgctctccaggagatcatcaaatccccattcagcactccattttcaaaactgagaatcccaaatcagatccaccaaagtgcagcttctctcttcttatccaggtccaaagtccatggctgagctgaccctgacggggaggagtctgggggggaaggggtgtgtccaggcccctccccccccactgcagacttcagtgcccctctcaggggtccgttacctcccttcattcagctgccttattaagctcagagtctggtgatggacagatcccagatactatcccatctcttgctcaggcaggggaagttatccactgtgagaactggcccatctgtcttgtgctggggctcatgagaagaaacaggccttagaagcggcatggcccaggaggcagatttctgtgttaacctgcagaacatttaaacattataacgctctctaatctagatacccaaatagagtcctaaaaccttctagtttccactccccacctaagagtccatactaggctctatcatcaaaacaccttcgttaaacactccgcaaggttatacaaagcacctacttaactcacgtatcacacgccagaacacagtcacctcatcaatagtgtttacatatataaacacatataatataaacatattatatgtatgtacaaacatacatgattcaggataaaagatggatcgtacccgttctcaccacagaaaagtaaccggagactcttctaagaaatcgagaaaagaacgccctttctcctgccctcctgtctaaagcgcaacataataatcgaatctcccaagcttcttagggtgctgagtgttttaatccaccagccctcttcaactagttaataaatcctttccagaccgagatgctggcatcttccacttgcattctttgctcctttaactaagctccccctctgcttgcaaaactgtgccagagatgtaattcccaacctctgttaaagtccttcccggggctactcccgagaacactctcctggaatgtttaaggcccaagtcctgcttgcagcagccccacagtgttcccatttctcagcccgaaaacccacccctgttgccccctcccctccaagtttattcgtaaacacacacacatccattctctctctcaacacacatccatccacacacactctctctctcctttccttcctgtaggggcgtggcgtccacatgacctccaccccctccaagaatttaactcctcccacccttctccccggaaccccgtgccccgtgttcacaagagaagagggtgacactgcgacccttcctggactctgacccccacccgtccgccctgcggacgaccctcgctctaactgcgccgggtcgttacctggttcccgcccgccccgtctcggctaggagccgcggcccgccgcgggtcgcaatccaggccccaggcccgatccccagcgctggcccaggccccaccccctcgacccccagcggcccggccctcccctcgcactccttcccccctcccaccatccaccgcagccacttccgcccgtcctccggaagtgggccccggcaacgcagcgttccacatcccgcccatttttctacccaacgtccccagcccgtcaccaccgccaccacgggagcgagggaggtgggtctgcagggcctgagactgttctacagccactgttcacagggctgaagaacaggtgtgggcagaaccaggttgtgagaaggaagccgggcgcagagtagcggccgtacaggagggggaggggcagaagagactggccagcagcggaagcgcgcggcaggtggagccgcgcggg

SEQ ID NO: 35182 - DNA, 2300 bp, Homo sapien
gcgcaccctgcaagggccctgcctcgtcaagagaggcagcgagaaacagcagcgatgaacgaaacaaaaccttcctccaccacggctacacagagctcgcgtccgaggaagcgggaacacacaggccccggtgctttccgaaaggcttctcgccaggacccgcgaccagcgtggggcggagggggggggtcaccctttttgagaaaccaggtcaagcaggccgtcgctgggcgacctttgggcggagggagagggcagggctgcaccgcacaggttccgcccctacttcagcgtcctcgcccctcccaagctccgcccagcaccccaagggccaacccccccgcgacgcatgcgtgcttcttcccgcgcggctccacctgccgcgcgcttccgctgctggccagtctcttctgcccctccccctcctgtacggccgctactctgcgcccggcttccttctcacaacctggttctgcccacacctgttcttcagccctgtgaacagtggctgtagaacagtctcaggccctgcagacccacctccctcgctcccgtggtggcggtggtgacgggctggggacgttgggtagaaaaatgggcgggatgtggaacgctgcgttgccggggcccacttccggaggacgggcggaagtggctgcggtggatggtgggaggggggaaggagtgcgaggggagggccgggccgctgggggtcgagggggtggggcctgggccagcgctggggatcgggcctggggcctggattgcgacccgcggcgggccgcggctcctagccgagacggggcgggcgggaaccaggtaacgacccggcgcagttagagcgagggtcgtccgcagggcggacgggtgggggtcagagtccaggaagggtcgcagtgtcaccctcttctcttgtgaacacggggcacggggttccggggagaagggtgggaggagttaaattcttggagggggtggaggtcatgtggacgccacgcccctacaggaaggaaaggagagagagagtgtgtgtggatggatgtgtgttgagagagagaatggatgtgtgtgtgtttacgaataaacttggaggggagggggcaacaggggtgggttttcgggctgagaaatgggaacactgtggggctgctgcaagcaggacttgggccttaaacattccaggagagtgttctcgggagtagccccgggaaggactttaacagaggttgggaattacatctctggcacagttttgcaagcagagggggagcttagttaaaggagcaaagaatgcaagtggaagatgccagcatctcggtctggaaaggatttattaactagttgaagagggctggtggattaaaacactcagcaccctaagaagcttgggagattcgattattatgttgcgctttagacaggagggcaggagaaagggcgttcttttctcgatttcttagaagagtctccggttacttttctgtggtgagaacgggtacgatccatcttttatcctgaatcatgtatgtttgtacatacatataatatgtttatattatatgtgtttatatatgtaaacactattgatgaggtgactgtgttctggcgtgtgatacgtgagttaagtaggtgctttgtataaccttgcggagtgtttaacgaaggtgttttgatgatagagcctagtatggactcttaggtggggagtggaaactagaaggttttaggactctatttgggtatctagattagagagcgttataatgtttaaatgttctgcaggttaacacagaaatctgcctcctgggccatgccgcttctaaggcctgtttcttctcatgagccccagcacaagacagatgggccagttctcacagtggataacttcccctgcctgagcaagagatgggatagtatctgggatctgtccatcaccagactctgagcttaataaggcagctgaatgaagggaggtaacggacccctgagaggggcactgaagtctgcagtggggggggaggggcctggacacaccccttcccccccagactcctccccgtcagggtcagctcagccatggactttggacctggataagaagagagaagctgcactttggtggatctgatttgggattctcagttttgaaaatggagtgctgaatggggatttgatgatctcctggagagcaactgagacaagagaagaaaggtaaggctcctgtctcatttcccacttaatgtcttgctgtgcctgtgcagaaggtgttgagctggcgagttcgcggaggctactattca

SEQ ID NO: 35183 - DNA, 2300 bp, Homo sapien
agctgaagggttcagtcctggaaatgcctggaaggggtgttttacaaatagacaacagccggtgcagaggccaatgcagctaacagaggaaggggagagcaggtcagacagctaggcaggccagtgggttgtccggctctgcagccattgtaaggactttggcgttttatttcaagtaaactgaggagccgctgtgcagtttggagcacagaaacgacaggatccctgtggctgctgtacggaaacccagcgactgggagggtagggagggcagggagacctaggtgttcaggtgagggatgaaggggggtgtggacatgttgaggtgttgcatcctagacacagattgaaggtagggtcaacaggatttctagtcagattgtgtagagggggtgagagagtgaagctggctcttctggttctggcctgagtaaatggagccgccattaatgcccatgggaaagacaggtgggcggagaaggtttgaaggtgggggaagaaagggtcttattttcttcttccttgcaataatatatcccaagcaatataattaagcaatatgtatttttccctttaaggaaattccaaaaattatatcgttccaaataaaaaaatcatctccagagtcctgacgcagcaaccattacattcccagtaatggaaatgttaagtcagtccgtgctctggagaaatcccacgacagaacacaggccaggagaccgggcctagattccggttttcgaaccgtgggggcaaacacggaggctgcaaatccatccccagtccggcaagattctcgaacatgtcgggagagggctgcataggaacttcaaaaacgagtagcggctcccctggattcagcgtgagggggaaaccgcggggcaggttcgaaactcaggagtccgacgtctgaaggagcgggaggctgcttccgaggagcccggggcacgacgggaagggccgcgccggccaggcagccctcctcccggcagcctcgggcaggccgttcacgcgccggcgacggcgggcccggccgcaggtaccaacagcacctgtcagagggcagcgcgggcgcaccctgcaagggccctgcctcgtcaagagaggcagcgagaaacagcagcgatgaacgaaacaaaaccttcctccaccacggctacacagagctcgcgtccgaggaagcgggaacacacaggccccggtgctttccgaaaggcttctcgccaggacccgcgaccagcgtggggcggagggggggggtcaccctttttgagaaaccaggtcaagcaggccgtcgctgggcgacctttgggcggagggagagggcagggctgcaccgcacaggttccgcccctacttcagcgtcctcgcccctcccaagctccgcccagcaccccaagggccaacccccccgcgacgcatgcgtgcttcttcccgcgcggctccacctgccgcgcgcttccgctgctggccagtctcttctgcccctccccctcctgtacggccgctactctgcgcccggcttccttctcacaacctggttctgcccacacctgttcttcagccctgtgaacagtggctgtagaacagtctcaggccctgcagacccacctccctcgctcccgtggtggcggtggtgacgggctggggacgttgggtagaaaaatgggcgggatgtggaacgctgcgttgccggggcccacttccggaggacgggcggaagtggctgcggtggatggtgggaggggggaaggagtgcgaggggagggccgggccgctgggggtcgagggggtggggcctgggccagcgctggggatcgggcctggggcctggattgcgacccgcggcgggccgcggctcctagccgagacggggcgggcgggaaccaggtaacgacccggcgcagttagagcgagggtcgtccgcagggcggacgggtgggggtcagagtccaggaagggtcgcagtgtcaccctcttctcttgtgaacacggggcacggggttccggggagaagggtgggaggagttaaattcttggagggggtggaggtcatgtggacgccacgcccctacaggaaggaaaggagagagagagtgtgtgtggatggatgtgtgttgagagagagaatggatgtgtgtgtgtttacgaataaacttggaggggagggggcaacaggggtgggttttcgggctgagaaatgggaacactgtggggctgctgcaagcaggacttgggccttaaacattccaggagagtgttctcgggagtagccccgggaaggactttaacagaggttg

SEQ ID NO: 35184 - DNA, 2300 bp, Homo sapien
cgtgtgtataaaaaatatttggaaagatatccactagtttaaaagtggttcctttcagcagggtgggatgagagggggacaggagacaaatttttatttacacaactctgtatgacttgttataacaagcacgaaaaatcgaaggtcacttaagtaaaaatggttataattatgaaaatacttagaaatatgtaaagtctctatggtatgattagaaatcataatgcaaaatctgtatactgtgcttatacctatgttcatatatttccatgtgagagaagcccgaaggggaatactctgcggtgaaagtagcttttcaagttcattcattggttcatttattccacaaatgtgtgctgagctgctaccatgggccagccaactgttgcagccaccgggatatagcaatcaaaaatcaaatgtgcctccactcagggaacttaaattctagtagtgggagacagacaatacatggtaaacccggcgagtatttcaggaagtggtgagcgtcctgggaaaagtggagcaggccaagggagactagcagtgctctgggtcaggggcaggtttaaacaggttggtcaggaaaggcctcactgaggtgacatgggaggaaagatttgaaagagctgaagggttcagtcctggaaatgcctggaaggggtgttttacaaatagacaacagccggtgcagaggccaatgcagctaacagaggaaggggagagcaggtcagacagctaggcaggccagtgggttgtccggctctgcagccattgtaaggactttggcgttttatttcaagtaaactgaggagccgctgtgcagtttggagcacagaaacgacaggatccctgtggctgctgtacggaaacccagcgactgggagggtagggagggcagggagacctaggtgttcaggtgagggatgaaggggggtgtggacatgttgaggtgttgcatcctagacacagattgaaggtagggtcaacaggatttctagtcagattgtgtagagggggtgagagagtgaagctggctcttctggttctggcctgagtaaatggagccgccattaatgcccatgggaaagacaggtgggcggagaaggtttgaaggtgggggaagaaagggtcttattttcttcttccttgcaataatatatcccaagcaatataattaagcaatatgtatttttccctttaaggaaattccaaaaattatatcgttccaaataaaaaaatcatctccagagtcctgacgcagcaaccattacattcccagtaatggaaatgttaagtcagtccgtgctctggagaaatcccacgacagaacacaggccaggagaccgggcctagattccggttttcgaaccgtgggggcaaacacggaggctgcaaatccatccccagtccggcaagattctcgaacatgtcgggagagggctgcataggaacttcaaaaacgagtagcggctcccctggattcagcgtgagggggaaaccgcggggcaggttcgaaactcaggagtccgacgtctgaaggagcgggaggctgcttccgaggagcccggggcacgacgggaagggccgcgccggccaggcagccctcctcccggcagcctcgggcaggccgttcacgcgccggcgacggcgggcccggccgcaggtaccaacagcacctgtcagagggcagcgcgggcgcaccctgcaagggccctgcctcgtcaagagaggcagcgagaaacagcagcgatgaacgaaacaaaaccttcctccaccacggctacacagagctcgcgtccgaggaagcgggaacacacaggccccggtgctttccgaaaggcttctcgccaggacccgcgaccagcgtggggcggagggggggggtcaccctttttgagaaaccaggtcaagcaggccgtcgctgggcgacctttgggcggagggagagggcagggctgcaccgcacaggttccgcccctacttcagcgtcctcgcccctcccaagctccgcccagcaccccaagggccaacccccccgcgacgcatgcgtgcttcttcccgcgcggctccacctgccgcgcgcttccgctgctggccagtctcttctgcccctccccctcctgtacggccgctactctgcgcccggcttccttctcacaacctggttctgcccacacctgttcttcagccctgtgaacagtggctgtagaacagtctcaggccctgcagacccacctccctcgctcccgtggtggcggtggtgacgggctggggacgttgggtagaaaaatgggcgg

SEQ ID NO: 35185 - DNA, 2300 bp, Homo sapien
acaaaagataaagaattatacagttctaattaaggtttgggagtaatagttaaaactggttttccccaaagtacttttcaactgttcctgcacaaggagatgagtaaagaatttgctcagggtctgtgatgagctggaccctggaatgaagaccagaatccaagctcctgacctcagacccagcttagatgataaggagcgtaaatactcatactggagtttggttgttcttgaagagagatttatgatccccaaaccaggagttcctttttcccctggttgctttcaagaccttgtggtgacccacctactcccaggaggcaatcctgattaattttactgcctccaaaccggtctttgtgtcagcacttctgaattgacttcagtcttttgtttctttgttatttcttaagagtgaatttcctttctccatgtgacctgaaatatcttgaaggcaaaagacgcttctatttataactgtgcttccttgaccttcctctcccacccttctccctccatacccctcttcctgcctccctgccgcccctccccttccacacacaagtggaggcccagtgcaggaaaacctcagcctcctggcgtcaggaaggtttcaaattctcactggtaatggacacacaccgtctggaggagctgggctgaaaaattactggcctggacaaatgctcctgatttaaatgtaaattcagacttaaaaaatagacctggtgatattcagaacttacaatatcgtttaaacagactggctttctctgtgaagatcactctttaggagccctgaaaaggagaggccaggtgggaaacgggaactatgggaactgcttcctcagggaggggagtgcagggctctccaccaagtgccccctggaagctcaatgcccagcagcgccaggcgccttccgattgtatctgcgaacctaaagccctcagatgtttatgcagctctttgcggttttaaaagggttcccacacacatggtttcacctgatcctcatgagtgccttgccaggggtgaaggacagatttcattatcctcgctttatgaagaggaaactggatccctggagtccacggaaatgagaggagccaggatctgagcccacccataaatattcattgaattgcactaatatagaaatatatgattattttaaggtaaacagaatgtttgtccttaagaagctcatatctaattgtggagaaatgttcaaaaattttttttttatttatttttgagatggtgtcttgctgtgtcacccaggctggagtgcagtggcacgtactcgactcactgcaacctccgcctcccaggttcaagcgattctcctgcctcagcctccctactagctgggattacaggtatgcgccaccacgcccggctgatttttgtattgttagtagagatggggttttaccatattggccaggctggtctcaaacttctgacctcaggtgatccgtctgcctcggcctcccaaagtgctgggattacaggcatgagccaccgcacccggctccaaaataaacgtaattaaaataaccatacaaggaataaataaggcaagaccagacatccttcattgtaaaatgaggcgagaaagtgctgtgattttttaggggacttaggtaactgttaccccatgattgaatggaactgaaatttctgtatcttccaccccaactccattccatgttcctgctgaatattctgggttttgctagaattccttatgacacataaaaagtcttcagctctacgccttaggcatggcgatgtctgggtttgtcacgtcatcttcagtcctgtatttacagtgcaactcagggccaaaacaaaaaagaatttttttttttaatttaaaaagtcacagggaacatgaaaaaggggaagagggaaatttgtcttcagtgttgcaggaaagtccaccctctccttctaggggtggaacttagtggatctaatgaatcacacatgaaaagagacgtaaaagaggaaggagtttcaggagggtattggccaggtcaaaggagagggtggaggaaaagagccacgaaataaccgggagacaagctttcggaggcttttgactgactggatgtgggaatgttgtggaagacttctggcctgccatttcctgagaacgggactgctgagagaggagctgggaggagcactgcaaatttcactttggacacgtgagtcagaggtatctgtgaggggactgagttgggagggcaagcagggaattggacatgtgggcctggagcacagagaaggg

SEQ ID NO: 35186 - DNA, 2300 bp, Homo sapien
aaatggctgctctgggagtgtctgtcctatgcggtagcgataaggactgagatacgtcctggtctcctgcagtaccctcagccttattaggattgggaaactccatcctggtaaatttttggtcagaccggttctctgctcttagaccctgttttctgttaaggtgtttatcaagacactacgtgcaccactgaacatagacccttatcaggagttctgccttttgccccttgtcctgtttcctcagaagcatgtgatctttgttctgccttttgccctttgtcctgtttcctcagaggcatgtgatctttgttctgccttttgccctttgtcctgtttcctcagaggcatgtgatctttgttctgccttttgccctttgtcctgtttcctcagaagcatgtgatctttgttctgccttttgccctttgaagcatatgatctttgttcctactccctgttcgtacactccctccccttttgaaatccttaataaaaacctgctggttttacggctcaggtgagcatcacggtcctaccaatatgtgatgtcacccccggtggcccagctgtaaaattccgctctttgtactctttatttctcagccggccaacatttatggaaaatagaaagaacctatgttgaaatattgggggtgggttcccccgatatctggcccctatcgggttcccccgatagttctatctaaatttttatctgaaaaataagtttctctgctttaaaaaagaaactttgaagaccattttacagaagaattggtttgccaaggtggaaagagaagctcatcagtgacgtgacttagccaaaagcactggttatacctctatacctcggagccgacactgaaagccccggccatagtctttctgccccaaggaaagcctggggtgggggtgggtgatattgtcaagagccaggccccagctcctcatacacacagctcatttgctctccctcccaacccccaccttcatacttcttccacacgcataccaaagaaaataagaatctcaaggttggaaaatcccactttacttcaagtgaagtcactgggttgtccccatgaaatatctccacaatgggtgtgctagacctttactctctgtggcaccaccaagaccccctcaccctgccagagccctctgaagtgtactcagaatggaggggctggaagtggggccagtggtcctggtagtcagcctccccttctgacacaagaattatcgtggaacagcttgtgtgaccgatcaactggtctctccatctttaagccattgtcttgttgactctgttactgcagagtttggggaggtctcatggcttctcgcatcctatttcctgagcttccctgaagccaacttctggccactggtatgtgatgcgagcacagtgcctcctcctgctcctccaggaagcttctgctgattgaacgcaggccagatggcgagatccggagcaaccttcttagatcaagggaagaaaggggcacaagaggggagtaggtaacaagataaaaggagctccctccctgatgactacagagccatcgtggcagccctgggcctccatttcagacgttcatcttgcctaagccaccaccatcagggtctcagtcagtcatcattctcatttactcgggtggctgggtgagggcggaatactaccttccagctgtctgagattaagcctaagccaccaccatcagggtctcagtcagtcatcattctcatttactcgggtggctgggcgagggcggaatactaccttccagctgtctgagattaagcagaacagcagctaaagcagtaacagcaggtctccttcagcagcttgccacagggaagagggtcccgcgtgaaccgaactcaacttccacctgcgcagaggtagctaccatttgcgtagaggtagctgggtctttaaggttagagggaaggcgcagggagggagagacggcgggtgggggttgaacaaagtggagattcacaaaagcagactagggcgggcgacgtgatcagatgacctgtgcgggcggcagcctcctgccctcctccccttcgtgcgccggctggagcgaagagttcttttgacagccgtgagcttccccgccaggaacttactggggctgcatcaccctagaaacgtggctttgggctgtggaaacgctgcctctgtggaagtctctcctcgcgggggtggacgggtcgctgcgcgcccagcgttcttctgcggttctcacagcccgccgccgccgccgcctcggggacctttgcggggagg

SEQ ID NO: 35187 - DNA, 2300 bp, Homo sapien
gttgaaatattgggggtgggttcccccgatatctggcccctatcgggttcccccgatagttctatctaaatttttatctgaaaaataagtttctctgctttaaaaaagaaactttgaagaccattttacagaagaattggtttgccaaggtggaaagagaagctcatcagtgacgtgacttagccaaaagcactggttatacctctatacctcggagccgacactgaaagccccggccatagtctttctgccccaaggaaagcctggggtgggggtgggtgatattgtcaagagccaggccccagctcctcatacacacagctcatttgctctccctcccaacccccaccttcatacttcttccacacgcataccaaagaaaataagaatctcaaggttggaaaatcccactttacttcaagtgaagtcactgggttgtccccatgaaatatctccacaatgggtgtgctagacctttactctctgtggcaccaccaagaccccctcaccctgccagagccctctgaagtgtactcagaatggaggggctggaagtggggccagtggtcctggtagtcagcctccccttctgacacaagaattatcgtggaacagcttgtgtgaccgatcaactggtctctccatctttaagccattgtcttgttgactctgttactgcagagtttggggaggtctcatggcttctcgcatcctatttcctgagcttccctgaagccaacttctggccactggtatgtgatgcgagcacagtgcctcctcctgctcctccaggaagcttctgctgattgaacgcaggccagatggcgagatccggagcaaccttcttagatcaagggaagaaaggggcacaagaggggagtaggtaacaagataaaaggagctccctccctgatgactacagagccatcgtggcagccctgggcctccatttcagacgttcatcttgcctaagccaccaccatcagggtctcagtcagtcatcattctcatttactcgggtggctgggtgagggcggaatactaccttccagctgtctgagattaagcctaagccaccaccatcagggtctcagtcagtcatcattctcatttactcgggtggctgggcgagggcggaatactaccttccagctgtctgagattaagcagaacagcagctaaagcagtaacagcaggtctccttcagcagcttgccacagggaagagggtcccgcgtgaaccgaactcaacttccacctgcgcagaggtagctaccatttgcgtagaggtagctgggtctttaaggttagagggaaggcgcagggagggagagacggcgggtgggggttgaacaaagtggagattcacaaaagcagactagggcgggcgacgtgatcagatgacctgtgcgggcggcagcctcctgccctcctccccttcgtgcgccggctggagcgaagagttcttttgacagccgtgagcttccccgccaggaacttactggggctgcatcaccctagaaacgtggctttgggctgtggaaacgctgcctctgtggaagtctctcctcgcgggggtggacgggtcgctgcgcgcccagcgttcttctgcggttctcacagcccgccgccgccgccgcctcggggacctttgcggggaggcctcaggtcagcgccgcccttgcgatggcgggagagcagagcggccccagggcctctgagctccggccccggcacgtcccgccctctcctccgcttgcgggagccggggcgcctcggagggaaaccttccggacacaggccgggagaagaggggccgtggcgccatcgcgcagcttcctggtttcggccatgtttttttttttttgagacggagtttcgctctttttgcccaggctggagggcaatggcgccgtctcggctccctgcagccgccgcctcccgggttgaagggactctccggcctcaggccgcggtgttcttgtaaattagaaccggcctatgcgccaagcgcgggtctcgcggctgcggagagaggcccagcagggggcggggacgccgggaggcggggcctggccgagctgcgcacacccgggtggttctggctacgggtacccggacctgcccaacgaccgttctccattcccgacctccgcaccctacccggtccgcagggcaccttcctcctctctctcaggcacgtcctcgacctcagttgccacgtgcacatgctggtgccttccaggtcggtctttctccaccagactccacctggaactttcttccttttcgtcctgtgct

SEQ ID NO: 35188 - DNA, 2300 bp, Homo sapien
ggggagtaggtaacaagataaaaggagctccctccctgatgactacagagccatcgtggcagccctgggcctccatttcagacgttcatcttgcctaagccaccaccatcagggtctcagtcagtcatcattctcatttactcgggtggctgggtgagggcggaatactaccttccagctgtctgagattaagcctaagccaccaccatcagggtctcagtcagtcatcattctcatttactcgggtggctgggcgagggcggaatactaccttccagctgtctgagattaagcagaacagcagctaaagcagtaacagcaggtctccttcagcagcttgccacagggaagagggtcccgcgtgaaccgaactcaacttccacctgcgcagaggtagctaccatttgcgtagaggtagctgggtctttaaggttagagggaaggcgcagggagggagagacggcgggtgggggttgaacaaagtggagattcacaaaagcagactagggcgggcgacgtgatcagatgacctgtgcgggcggcagcctcctgccctcctccccttcgtgcgccggctggagcgaagagttcttttgacagccgtgagcttccccgccaggaacttactggggctgcatcaccctagaaacgtggctttgggctgtggaaacgctgcctctgtggaagtctctcctcgcgggggtggacgggtcgctgcgcgcccagcgttcttctgcggttctcacagcccgccgccgccgccgcctcggggacctttgcggggaggcctcaggtcagcgccgcccttgcgatggcgggagagcagagcggccccagggcctctgagctccggccccggcacgtcccgccctctcctccgcttgcgggagccggggcgcctcggagggaaaccttccggacacaggccgggagaagaggggccgtggcgccatcgcgcagcttcctggtttcggccatgtttttttttttttgagacggagtttcgctctttttgcccaggctggagggcaatggcgccgtctcggctccctgcagccgccgcctcccgggttgaagggactctccggcctcaggccgcggtgttcttgtaaattagaaccggcctatgcgccaagcgcgggtctcgcggctgcggagagaggcccagcagggggcggggacgccgggaggcggggcctggccgagctgcgcacacccgggtggttctggctacgggtacccggacctgcccaacgaccgttctccattcccgacctccgcaccctacccggtccgcagggcaccttcctcctctctctcaggcacgtcctcgacctcagttgccacgtgcacatgctggtgccttccaggtcggtctttctccaccagactccacctggaactttcttccttttcgtcctgtgctggcctaacccctgctcggcctcggccctcagctgccggctctaacaaagcctctgtctttcccagacccctgtgaccaggtcaggctctgctccctgcgttcctctctccttgcttccctcctcctcccctccccagaatcgcttgaacctgggaggcagacgttgcagtgagctgagatcgcaccattgcactccagcctgggtgacaagagcgagactccatctcaaaacaaaaaacaaaaaacacaactcttgctggctccttgattttagcccagtgagattcacttctaatttctttttttctttgagacagtctgttctgtcacccaggctggagtgcagtggcgtaatcatggctcactgcagcctcaaccttcctggactcaagtgaaccttccacctcagcctcccaggtagccgggactacaggggtgcaccagcatgcctggctaatttttgcattttttgtagagatggggtttcactatgttgcccaggctggtctgaaactcctgtgccccagcagtcctcctgccttggtctcccaaagttctgagattacaggcatgagccactgcgcctgggcttccatttctgatttccaaaactctaggataataaatttacattgttttaagccaccaaattgtagtaatctgttacagcagcaataagaaatgaatacagccatgcttgataattcctttatcaaaagctacctattggtgttaggaagtattgttttaaattctaagacagtgttttcactttctatcttgtgcactgactacctcatgaccccttaggtaccagtcaggactggtagactttaatgtggagaacttctgaaacagcagttctcaaaatgtt

SEQ ID NO: 35189 - DNA, 2300 bp, Homo sapien
agcctgggcaatagagcgagactccatctcaaaaaaaaaaaaaaaataccgtgtcatagagtggtggagaaatttatttctcagttctgggggttagaagtctgagatcgtggtgccagcatggtcacgttatggtgagggtcatcttacaagttgcagatggctgccctcttactgtatcctcatatggcagaaaatcagcaagctagctctctgttctctttttttttttttttttttgagacagagtttcaccgtatcgcccaggctggagtgcagtggcgcagtctcagctcactgaaagctctgcctcccaggtttacaccattctcctgcctcagcctcctgagtagctgggactacaggcacccgctgccacacctggttaattttttgtattttagtggagatggggtttcaccgtgttagccaggatggtctcgatctcttgacctcgtgatccgcccacctcagcctcccaaagtgctgggattacaggtgtgagccatctctgttctcttaggcagtcattccattcatgagggctccactctcatgacctaattacctcccaaaggccccacctccaaatagagaaatagatttcaacattaattttggggtgacagtccattcgtaacggaatgaaccaggagactgctgaccagaacatggaaagtgcagccttgtaaacagtccgtgtgctcaagcctggctgactgtcagacacaacaaccaaaccctcaccttgacccccacccccagccacactggaacctgaactgagaggccaccctttccctgcaggaccagctcctagaacagcggttctcaaacttgagcaagtgtcagaatcacctgaagggctttgttaaaacacaggctgctgggccccagagtttctgatgcaggaagtctgggtggctgagaatttgcatggttacaagttcctgggtgatgcagattctgtgtgtctggaggtaacattttgagaactgctgtttcagaagttctccacattaaagtctaccagtcctgactggtacctaaggggtcatgaggtagtcagtgcacaagatagaaagtgaaaacactgtcttagaatttaaaacaatacttcctaacaccaataggtagcttttgataaaggaattatcaagcatggctgtattcatttcttattgctgctgtaacagattactacaatttggtggcttaaaacaatgtaaatttattatcctagagttttggaaatcagaaatggaagcccaggcgcagtggctcatgcctgtaatctcagaactttgggagaccaaggcaggaggactgctggggcacaggagtttcagaccagcctgggcaacatagtgaaaccccatctctacaaaaaatgcaaaaattagccaggcatgctggtgcacccctgtagtcccggctacctgggaggctgaggtggaaggttcacttgagtccaggaaggttgaggctgcagtgagccatgattacgccactgcactccagcctgggtgacagaacagactgtctcaaagaaaaaaagaaattagaagtgaatctcactgggctaaaatcaaggagccagcaagagttgtgttttttgttttttgttttgagatggagtctcgctcttgtcacccaggctggagtgcaatggtgcgatctcagctcactgcaacgtctgcctcccaggttcaagcgattctggggaggggaggaggagggaagcaaggagagaggaacgcagggagcagagcctgacctggtcacaggggtctgggaaagacagaggctttgttagagccggcagctgagggccgaggccgagcaggggttaggccagcacaggacgaaaaggaagaaagttccaggtggagtctggtggagaaagaccgacctggaaggcaccagcatgtgcacgtggcaactgaggtcgaggacgtgcctgagagagaggaggaaggtgccctgcggaccgggtagggtgcggaggtcgggaatggagaacggtcgttgggcaggtccgggtacccgtagccagaaccacccgggtgtgcgcagctcggccaggccccgcctcccggcgtccccgccccctgctgggcctctctccgcagccgcgagacccgcgcttggcgcataggccggttctaatttacaagaacaccgcggcctgaggccggagagtcccttcaacccgggaggcggcggctgcagggagccgagacggcgccattgccctccagcctgggcaaaaagagcgaaactccgtctcaaaaaaaaaa

SEQ ID NO: 35190 - DNA, 2300 bp, Homo sapien
aattcctaaagtaggacttctgggtaaatgcatatgtagttttgatagatattggcaaattccccttaaaaggggctgtgccagtttgcattcccagcagtgtatgagagtgcctgtttcctccacagccttatcaacagtgtattgtcaagctttgaacatttgctaatatgacaggtgagaagtggtgttttacagtagttcttatttatctttctctcattatgaatcaagtcgaatgtttaaggaccatttaaaagaattgtttgttcatctttttacctgttttcctgtatgatttgtagtttatttttcttcagtttttgaaaatgtatcagtcttttgttgcatatgagtcatcattagaaagcttcctctatactcaggccagagaggcatttacccatgttttctggcatttgtacagcttttttatatttagagctctattccatatggagtttattcatgtgtgtatggtgtgaagaatgggatctaattgtatctttttttttttttttttttgtgagacggagtcttgctctgtcaccaggctggagtgcagtggaacgatctcggctcactgcaacctctgcctcccaggttcaagtgattctcctccctcagcctcccaagtagctgggattagaggtgcgtgccatcacgcccagctaatttttgtatttttactagagacggcttaaccatgttggccaggatggtctcgatctcttgacctcgtgatccgcccacctcagcttctcaaagtggtgggattacaggtgtgagccactgcacccagccttaattttatctttttccatatggcttcatagttgttacaacactattaaaaggaccatcttttctctggtaatttcagatatcatctgtatcattaatttctgtgtctacctgggacaatgtctggacttcctgttctattccatttgcctgtctatgtaccaggaccatactattttaattatagacgtttaataatatattttaatatgcaggttgccttcttcctcatctctgcagtaactgtcttcatggtttcatagccttctccctgatacccctccccaggtactaattttttctctttagttttgtctgtcctctgctgattttgtctaacttttcataataaaaaaaagttttacctaacttttgtcctacttatgaatttttctgtcttcttcagagatttcttctgccctcttgtttgtttttccatgactgggtgacattgtttaaaaactgattggtgttgcccatggttctgtgcatcatttcaccctgccctatgctaagctgttatgcaagaatagaaaagctcattgttccattgaaaatccagggttctagcattttaacattagttccacaggggcagaaattttgtcatattcattgttgtatccctagtacttaaaaaccggtacatggcacatggtacctgtcacacagtatgttgtcagtaaatgtttgtcaagtgaatgttgttcattgttattccagtttgtttttgtttttttttaagagagtgaataggtgtccttttcattttcttggtttagtgtcacatttgaagacgagcactgaggatgaggaaccaactgaagaatatgaaaatgttggaaatgcagcatctaagtggccaaaagtggaggatcctatgcctgaatctaaggttggtgacacatgtgtttgggatagcaaggtagagaatcaacagaaaaagcctgtggaaaacaggatgaaggaggacaaaagcagcatcagggaagcaatcagcaaagccaagagtacagcaaatataaagacagaacaggaaggtgaggcatctgagaagagcttgcatctgagcccacagcatatcacacaccagactatgcctataggacagagaggcagtgagcaaggcaaacgtgtggagaacattaatggaacctcctaccctagtctacagcagaaaaccaatgctgttaagaaattacataaatgtgatgaatgtgggaaatccttcaaatataattcccgccttgttcaacataaaattatgcacactggggaaaagcgctatgaatgtgatgactgtggagggactttccggagcagctcgagccttcgggtccacaaacggatccacactggggagaagccgtacaagtgtgaggaatgtgggaaagcctacatgtcctactccagccttataaaccacaaaagcacccattctggggagaagaactgtaaatgtgatgaatgtggaaaatccttcaattatagctctg

SEQ ID NO: 35191 - DNA, 2300 bp, Homo sapien
ctgggagatcgaggctgcagggagccataatcatgccaccctgactccagcctgggcaacaaagtgagagcttgtctcaaaacaaataaataataagataaaataaaaagcatctgactcaagatgatttatgtgggtttcccataatcccttccacacacacaccacctttcattgagcgaagtgttccaacccagatatgaatatttttctatcttgctgcctagaggtaaaaacccagtctttgcctaccatgaacctttaagggcagctttaattctggaggcctgtgaggaccacctgaagctccttctagagctgtgctatccaataaggtggccattagccacatgtggctatttacattaaatgtaattaaaaattcagatcctcagcagcactacccacatttcaagtgctcaacagctgcatgtgtctcactatcctttgggggcagctctaactcccaatcctctgctcgctctggggctctcacctaaagctgcagacctgggcctggggctctgctcctccttaggagtcgctgctgcctgctaactcgcccagacgttcttcgaggtgggtggggttgtggcgtgaagcccaaatgccgtcaagggtcttattgctacaatgaaacgcccattccctctacttgagtgaacacagtgtctcagcacccacatgtataaaaatgaaaaataggcgtcgagctgatgccaaacaccggctcaccccagcaatatgtaaaattcattcaaataatataaataatttgagctgtaaaacaaaatccatctcattacaagttgtgcttccaaagcacttcactttttgtctaagaattaacagtaaacattttgaaatatttatataattttgctaataatccagaaaataacactaagaaaaaatgtaatctactttcgttacggacatatatgctaggataaacaataaacaataaaacaatgcatagaactattttacactaggataaaattcaatgaggcacatagaatgaaaatatttttacagtagaataaaaagccggtgagggacataaaagttcaaggaaaaaaaccctaaaagatgtaaaacttatgactgttaaaagtggataataccaaatcttcagggatttagattccattggatacacttgaaagcaattttgttcttaatattaacagcatgccaaaaatataccctttgcaattatttaaacttaatatgaaaaatatttagatgttgctgtttttaaaaaaggctgactatagccaataacttagttgtatatttaaaaataagaatataatttgattgcttgtaacacaaaggataaatgcttgaagtgatggacacgccattaaccctgatatgattattacgcattgcattcctgtctgtatcaagatatctcacgtactcgacaaatagggacacctactatgtacccacaaacattaatttaaaaaaaaaaaaaaggtcttcaaagtcattttaggccctgggtttggaagccgacaccggcggtggggtgggcagggggcgaggtcgctgccaagctggcgccccgggtgggagcgtggcccggtcccagggacggctccaggggcgcgctcccactccgcatccccagtgcctaaccgggggcgcttctggtgctgacgaccaggaagggctggtgctctcgggccagcccccaaccagctgagaaggcaatgggtccccagcccagcgctgtcctgcgcccctcccggattcccccatttcccgccaggcccccacttccgggaacgtccccgcacccacacctggcaatgaatcacgtgttcaggaaccaggtaggcaggtatttactttattacctgtgcccctcccccagcctaccccagaagctaatgggcacggaaacagaaagccccgcccacggcctcctggccgcgcctggagcgcgcgccctgcagctggtcctcaataaatagccgaggaggcgctcccctccctccctcccgccggcgccgtcggcccggaccatcgagtcagtcctccagcgtcccagagagggcgcggaagtgccccagggccggcgcgggttcttccggccgtgcggtccgcgcttttgtcccgctggcggccgggttcccgcggcgccgccacagccagtacgtgagtccgcggccgcccgcgctcccgcccccggcccttgcctgccacgccctcccctttttggccgggtcttggctgctccgcgggtctcgggcgggatgtgggagtaagcgtgccccctccccgca

SEQ ID NO: 35192 - DNA, 2300 bp, Homo sapien
acctctcagattcaagtgattttcctgcctcagcctttttggggagagtcatgtttctttgctttttcatgtttcttgtgtccctgtgttgatatatgtgcatctggtagaacatttgcctctcctaacttataaagtagcttttctaagaaaaaactttcacttgttgataggtcctcgggtgctgagtagggtgtatcggctctgcttctggctggcacagtagcgtagtctctgtgaagcttctcagctataatcaatgtcagtgacaagtggatgcctcagtggcccgtactgcagtaatttgtgggagtggtggtagcaaagtagattacactgagctcaggcaccaagagagcacaactactccaccagctcaggtacagcttccctcgggtgggatgcagggctggtttgtgtgctgagggaataagaccagtgttctggcttgggcatagcttttctggaggtggggcaccaggccgctttatgtgccaagggagcacagctgctccaccatctcagacattgctttcctggggctgagtctggggcccccagttagtgtgcacacaagggggtattgttgccattctattgcgcatgcttctctggggtcaaggtgcttggctcatgcttgagagggtacaactgcttcaccaggccaggcttggcttccttgctgggttggactgtttggtccttgggggccagagcagcctgtaggttcagaagcctgggtcatgaccgttccactgggcctaggcctaggcttcgaatggccatgggtggggcatagctgccactggaatggagaggatactgtgccttctcagcagcttcataaaaaggtattttggtctatatatccttggtaaatctgtatttctgagacagcatgagatcaataattttctattctactctcttgcttacaacattcaacaactcatttcctttttttttttatcacagagtaatattccattgtatagatgtaccatagtttgtgtatacattctatgtatcattattgaatgatatctggttgcaaacatttttggcaattatgaataaagctgctataaacattcatgtgcaatttttcatgtggacatatgttttcaagtcatttaggtgaataaaaagcagtgcagttgctggattaggtgataaaagtatgtttaattttgcaggaaattgctgaactgtcttctagaacaaccgtaccgtcttgcattcctgtcagcaatcagtgagaattcctgttgctccgcatcctcaccagcatttggtgttgtcagtgttctagattttagactaaatgcagtgttttcattttgtcctattctagatgctaacttttattgtgatttagtctcgtgagttgttttaaattgttacataagaatttcttagtgtatagagtttcctatgtttttgaattactttttaattttaattgcattatgattagagtatgtttattttgatggttatctgtggaaattttcattctgatctagttaagtggtgactttgtgagtttccgtgtgcttaaaaagactgcaaatctctcattgtggctgccctggaacttagtttatataataaataagtttcctcatgtctgaacctgcccaggcacctttcccaatgtatcagatgtttaacactaaggatctgttttgttctggaaagttatttttatctggcctcatgattacagtcctggccctgaacttcagagaatggaggggtaagcaaaaggacctcagactgtgccaggaaatgtcaagtcacctgctgtaggctactactaatggagcatggcctatttacttggacaccaaactatccagtgctaacatgaggtttttcaggactagatcccatggccatacagccctgcctgccagattggacgtgaaaagtatttccgcatctgacattcctgtttcacccacacagggcatcgttttgcccaggacaaagttcacctccaatcttatccacactatttctatctttgcttccttgataagatatagacatttatgcagtggttcaaagtctagagtccctacacttctggtacatgacagctgtgtctcgatggagtagactctcagaacagcgcagtttgccctccgctcacgcagagcctctccgtggcttccgcaccttgagcattaggccagttctcctcttctctctaatccatccgtcacctctcctgtcatccgtttccatgccgtgaggtccattcacagaacacatccatggctctcatgctcagt

SEQ ID NO: 35193 - DNA, 2300 bp, Homo sapien
ccaagaacagatgcatggaggaaggtaagaactgtttccttctacccgcctcactgctcttccgaggtaactcagtgccaagagagactccctcagcccacaatttttgccatggggaaagtgagagcaaagtgaatgtccagattccccaggcttgtgggatgctgcccaggaaacccatttctgtctcacttaatgcagaacactgaggggaccatgtggctgaatcatctgggggcagctaggagtagggaaagaggagggggcttatggcagccagtgcatggacctgaacaacaagcagcagaacctactggccagcccctgcactctactagaggcccacctcacaacctgctgactacccaaccagctgatatgtgcccccagccctccacacaccacccctgtggctagaacctcttggtccatcacagtggggcacgtgcttccctgcagacagggtgcctgagcctcagcagatgtgcatacaaacttctgcagtcagaacacagatagcaatcagcttgactctgctggattgagagaaggtgcacaatcttgagtattttagggaattgccctagggataaataaatgcaaggctctcagcagccagcctgctttgcaggactgagaaaagaaaatcccaagacttcctctcaccaagaaggaacgagaaaagtaaagcaggtacatccataaaaaagatctgagagacttccagagtatctagccaggctgactggtcaaggtctttgtctaccaaagtctgccagtacagactagaggaggaggagtgacagaaagacaaaatatactgtcaaacagattcacagcacattaaaagattcatttaccatgattaagtgagctttatccttggaacataaggatggttcaacatatgcaaatcaataaatattacactaacagaatgaaagacaaaaacaatatgatcatctcaatagatgcagaaaaagcatttgacaacattcaacaccctttcatgacaaaaccaactttcaataaattaggtatagaagcaatgtagctcaacacaataaaggccatacgtaacatgcccacagagcatatacccagtggttgtcttagtccactttatgctgctgtaccagaatacctgagattgggtaattgataatgaacagaggtttatttggctcatggtcgtggaggctgggaagtctaagatcaaggggtcacatcctgtgagggccttctagttgtgtaattccatggaggaaggtagaatggcaagagagtaagaaagaggaaggaagctgcttctgcaaaaatggcattaatccactcacgagggcaggatcctcatggccttgtcacctcttaagggtcccacctgtcaacattattgcattggggattaagttttcaacacataaactctggggatacattgaaaccacagtgatgatgaaaaatttttaaacaatagcgaaatctatggaatgtagcaaaaccagttctaaaagtttatagctataaatatctacattaagaaaaaagaaagatctcaaatgaacaacctaagtttatacctcaagaaattagaaaaagaaaaaactaagccaaaatttagcagaaggaaggaaaaaataataattagagcagaaataaatgaaatagaaaaacaataaaaagatcaataaaactaaatgttgtttatttgaaaagataagtaaaattgacaagcctttacctagattaaccaagaaaaaaagagctgactcaaataaatagaattataaataaaagatgatacattacaactggtaccacagaaataaatataaaatgtcatgagactatcgtagttctcccttatccacaggggttacattccaagatccccagtgaatgccacaaaccacgtacagtaccaaaccctatatatgctatttttcatgtctcaaatggaacagagcaggatgatagagatttcatcatgctactcagaatggtgtgcaatttaaaacttacaaattgtttatttatgaaatttttcattcaatatttttgggccacaattgatcacgagtaactgaaatcatgaaaagtgaaaccaaagacaaggttagactacggcactatgaaaaatcataggccaacaaaccagataacctagcagaaaccaaagacaaggttagactacggcactatgaaaaatcataggtcaacaaactggataacctagcggaaaccaaagacaaggttagactatggcactatgaaaagtcataggccaacaaactggataa

SEQ ID NO: 35194 - DNA, 2300 bp, Homo sapien
aaattgtgtttagggctaatgaatcattgttccttaatatccttttcaatatgccacaatttagaatgcatttaaaattttctaaaacaatatcctactctgaatattaactaatttgagccacattcccatctctaactcagcacaaagtgccagtcttccccaatatctcctctcaactccccaccgcaccttataaaattggaatcagaaatctcactctgtcattgctcatcttagaataaaaacactgattttaatactgttttactagtttcagccttctaagtacgtaggcctctaggtattctgcagatcactggtggtcttgatagccattcatatatgttcgtattatgttatttttcaactaaatcgcaattggaaaaaaacatctttaatattatgcccttggatctgttacttcattactaatacttgtgatgcaataggacacttcacctgtactaaaagggccaagagtaaatgtcttgttttgttgttgttgttaaacatgtctacagagttggcagttaatgctgaatttgtcaaatagctcttccaaaattatacttgtatttaaaaaataaatggatctacctaatttctattcatctaatttgcagttttgtcttattaaagtggtatgtttttcaatgtatttttttctgaagttgatctctttacatttcagctattactgtaggcagaaagaaattgacttgtaatctttgatttttttgcatttgtaatggctttgtacttaaggtaggattacatgtttacagattgtgggggaaaaaaaaagaaaagtgaagggagagaaaagacaaggcgagtggccagagaccctcaggatccaagagttaactctgattaactcagatgctttgttcagccaatttcagacttcttttttcctaatacaagcacttaaggataagcctttctgtaagaactgccttacatgcatcatagtattttaaatgtagtgttttcattcttcttctagtctaattaccttcaacttctattattagttctcttagacccattagttatttaaaattgtgttattaacaatttctaagttcatggggtttcctctttttaaattgctctttaccttcgttgtccttcgtggtgctctccgtggaaacctgctttctgatctagtaagtgcttattctttgtgcatgtccctagacttgaaatcactgcataatccctaactgtgtgtgtcctggcttagtgcatctaatgaatgactgaatgaatgcatctttgcctttgccttacccccgggcctgaaacatcgtcttggtccccttctcaataccttggatccttggagatcaaggtcctggttgttctggcaagttcaacacaatctggcctcatgatcagagtcctgtccctgaactcaagacaagggagggatgggcagaattacctcatgctgtgccaggaaatatgagtctcatggggcatggcctgtgtgcctgggcaaattcactgcctcactaccctgtgctgagatgatctctttttttttttttttttttttttttttctgagatagagcctcactctgtcaccagactggagtgtagtagtgcaatctgggctcactgcaacctccctcttcccggttcaagcaattctcctgcctcagccgcccaagtaggtgggactacaggtgcgcaccaccatgcctggctgatttttgtattttcagtagagacggggtttcatcatgttggccaggatgatctcgatctcttgacctcgtgattcacctgccttggcttcccaaagtgctgggattacaggcatgagccactgcgcccgtccaatctctctttcagggacagatgttcactctctcttgcagctctgcctgccagactaagcctgaaaatatctctgcatctggcattcctttaccacctatgtggggcacaacccagaacaaagtccctccaagtgtaccctactctctttccattatcatttctctggtctgagatagatgtttatgacctgccaataaatgcagtgactcaaactccagtgcccatactcctcattcatacagccatgtttagggaggctctagggagaaatgcacagtttgacatcgttcatgaagagcctctccacggctcctgcgcctgagacagctggcctgacctccaaatcatccatccacccctgctgtcatctgttttcatagtgtgagatcaacccacaggaatatccatggcttttgtgctcattttggttctcagtttctacga

SEQ ID NO: 35195 - DNA, 2300 bp, Homo sapien
tctctccagtggcacctatagtccgccaggggttcagcacctaccttcattttggatctgagcctttatgcatttactgggtcttggaatgggaggttcggctggcagggacagccgctgtctacatctttcctactgcatgatgcgcctgatatgcaggcggtggtggcaggtggggtccccctcccacatcccaccagggctgtgtctaggagccacagaagtggactctgcccatttctctctctctttgcatttctgctgtgacaatctcacctctccccaggcagcatggaggaatccaacctaagggcaatgaaaagtttaggccatgttctcgttttcgagcagcccctctctacaagtgcaattttccttctctttcacttccctatgtggcatgcaagggcctctgcaatgtggtcccatccacttctgttcaaccttcccttccactagtgagccacacactggtctggctaacccctagccttttcctacctcccacatgctaatcacctccctccacgaagaatgtctgtcctcgcaggctctgtcctcccgggctgcccatggcttccctgatcctactgtttatgcagcatccatcttaagtataccctgtccttgagccctcctctgtctccccaggcccggggaactgcacccactgtttgagctcactgttcagccccttttgctgtcctagggacatctgttcacattaataagcctgggtgcccagtctcaccagcctgtctgagcacagacagtcacctccaggtccatgcctgaagcttgctggctcccgtctcccacccatgtagcgccctgtcacctgcagaggcccctctacaaacacaggcacttctgggagtccctggggtgtgctactgaggcagaaaatttaaaaatacatatgccttcattcactccaagaaaagtaacaggcaaggcaagggttaaaaagtaaaggacaagttttcctctgcctatagcaagcccactgcaaggacagttataacagtgtccagaaagccaaggccaaaggaatgggctccagatacccgccgccccacttccagagcaaggttgaaggaaaaagagagaaagacaaattcttttactgttactgttttcccaggcttcttaagcatgattgtgttttacaaatgtctgtacttagccagttcttgtttttctttcaatgcagctacaaagtcacccgctgtgcaaggccacaagttatgctatgctatagattatgtgacctatcatgattagctgcttttgttttatttattgtaagtccacttacaaaaaccccgctctgtctttgtttaatgctcagctttttggatgtgagtccactgagccggtgtgtacctaaaataaacaatcctcctgttcttcacatcggtctctccggtcctcagtttcccacaacactgcatgtgcttgagctgctcgtgcctcagctctggcctgttccctggaggggacgtcagtgtgggctgcagctgggtggctggtgcctcagtccgctaatgcccaagttgcaccatggcctacagtaagatggggtgggctgggctggggtagtgcttgctgcttcttttctgacctcttctccactagagaaatcccaatccagcaccctcctgcatttctaagttgcacgtgaacaggttttgcaggttgcctcacgacaatgcccccaggatttgttccttactgaccttgtcctgaggagaaggttatggtgggttaaaaattggtcatcagccccttcctcgtggttagttagtggagactgcagtctactctctttcactgttcggggactgctaccctgcctccttggagtccgagcttcactggcacaaagaccctgaacccagctggagcgttttctcctcactttgagcctctgcagctgtcgctctctacaaagctctcagatacctttcccctccttctgtgaccctggagagatattttacatgggaattcaagatttttctcagagacaggatgtgacgacttccttgttttgttctatccatcttggtttccatagccaagggcagagcaaacggcatatatcttagggtggaagatggataaataattctgtcacacgtgccctggcctctggagctcagctgccagtccacgtctagggaatcttagcatctgggaccaagacactttacagcaatcatcaccctttgcagaggaggtgagctcaccaggactcatctgccatttcagaccttttgctgctacctgccaggtaa

SEQ ID NO: 35196 - DNA, 2300 bp, Homo sapien
ttgatatagtcagtcagatacaagccaatgcacacatgttctcaagataaatgataacttgtctgcaagtaggaggacctggcaacaccgcttaccacagcagttctaaattccgtgggaattgggatggccatctgtgtgagccaactgtctttaaccaaaggaaaaatcaagcatgtgatacgtctagggcatacaacttggagccacgcagctaagctaaactcccatgagacagggatctccacggcagtgctctctcttttatgtttacatttcaaacaagtggcccttaaggaaaacattattgggttgtaaagaaagaactgatatattttctaaggaaaatgaactaagagaggggaagaggaaagagtctctctttttgcaccaggaaaaacccaatattttctttttagcttttaatataaatcttaatttatattattgatatttattatgaaacaagtttatataaaaatttttagatgggtaaatgtttgcatgcgcggacccctctacagagggcgtgactcacatggatacctttgggaaggcattctggtggcgggaagggcaaagccaggggcctgagagggaaactgccggctgctggcagaacagcgaggaggccagagggtcgagggggagggtcacaggtcagagagacagtccgccctgagcccttgcccttgaccccaggccattgcttcagacaccatctgttgtgaggaccaatccattgtgacccagtgtttttgtaccatacaataaaaatgcactgctagaaaaacaaaattaaaaaccacagtccactgatgtcacttataagccagacacacagaacaaatgccgtctgattccacggatgtgggattacctagaggagtcaagtccacagggatggagagtatacggagggcgccaggggcttgggcgtgggaagaggaattactgtttaataagtacagagtttcagttttgaaagatgaagaaacttctggagatgggcgggggtgatggttgcacacgacatggtgaatgcacttaatgcccctgaactgtacacttaaaaatggttaagatgggaaaggttgttacgtatattttactacaataaaaagaacattttttaaagatctgagataaaagcaccattttctaataactagatgacacagacagaaagttactctattcaaccgccacagggtttgcgaagggccggtgggttctgcgcgtccctgcgccgctggtgctgtcggcgctgcccccggccacgtcctgcctgcgggcgggtcctccctggggagccgggagggacgtgggagctgcgaggccgcgcgcacgtggttcggttctcacttcttccaaaagcgtggtaagaaccgagggagaagccggatgtttgcaaacaagcgaggagacgacttgcggaccagacggcgcgggtgcgagcaggagctccccggacatccgccgccagccaagcccctgggaccctcccgcctgcggacgcggggcgagggcgggaagacgcggggcgagggcggcgctgcggccgcagaagcctcgagccgggctggggcgcggttccctcccgcacgccccgcggcgcgcccccgccccctccgccgcgcgcgcccccgccccctccgccgcgcgcgctcccgctccacgcccgtttcccaggcggctgcggtggcgcccggagaaggtcccgcgggaggtttcccggcacgcggcgggcaggccggtctcgcctctcggtgctcagcggcgcctggaccgacacggcccccgcgggtgttttccagacgtgttcgtacccggagcctctgcgtggaagagcgcgttcgtcgcgaccctgccgctgctgttggtcctcgcggcgctggcgctgggcgtcctccggaagcagcggagaagccgaggtaccggcgcgggcggcggggcggggaggggcaccggccggtgctgaaccccggggccgcggaggcgcctccccccaggacgcggcgcgggaaggcggcctggaaggggcgggggcgcgcactcagccctctccgctcccgtttcccttcagaaaagctgaggaagcaggcggagaagagacaaggtgagcggggacagggcgttctgcacgcacctgcccaagtgccaaaacccgccgtcatctaaaggctgtgggtcccgttacgagggtttattccagcgcgaggtgtcagggcggccaccggggaacggggatcggtgaccccggtggggaagggggaagatcgttcatatggacaaaagcg

SEQ ID NO: 35197 - DNA, 2300 bp, Homo sapien
acaggactcccttcctccgcccaggagttttaaggaagaggaacttcctggtgggacatattgagtgccaaacgtgtgttcacataaaaaatcaagagatcagggcatgagtctgcatctgaaaactcgagtaaaaaatccggtgtatgctgttaatggaaagaacagaatatgacacttgcatgccgcatattctcacttcgttccttgggggtgtgctgctacctctggtcactggcatcggacttttcttccttctttctactttcctacatctcccaagttttgtattttgagcatgtgttagcattataactgctaaacaggaaagatggcctttaaaaagaaagtgaagtgtaaaagtttgagggtgatgaaataaatgtgcttgaggaagaaaaagcaatctcagtttaatcctatggttgccccaggaggcactaatttatcccttctgcttttcaagtgaggaagctgcagcttggcgtagttctggggggagtatgaagctgccttggtttaggtgatggagcacaggtccacagacatgtgtgggtgcatctgtggcaggggagaaaagagcatgtgtccagactacagcttgttcagagctgggacactgacaatagagcacgcactgcgtgcgtaggtgggtgtgtctccgatcctccagcagtgacagggacgaagccttgccctgtgggatgactcaggccactggccaaatgttatgtctccatgttcaagtccctctccaacttctcctcctgggacagaaacagatggcagcggagcaggagaaggtgggggcagagttccaggcactgagggctttcctggtggagcaggagggtcggctgctaggccgcctggaggaactgtcccgggaggtggcacagaagcagaatgagaacctggcccagctcggggttgagatcacccagctgtccaagctcagcagccagatccaggagacagctcaaaagcctgaccttgactttctccaggtaagtctggctcagccaggggctcgagtcatttatcctaaggcatcaggaccagcagctagagaacagtgtcagtcctggggggtctaggagaatcacatgatctggagctgaaggggactggagagaagtgccctgattttcctggggttggaggtctagagagatgtgaaaactttcttgactatgagccacaataatatatatcgtatttcagaatcacaagcttgagacaaaagtctcagaaaataatactcacctttgctacacgtatgcactttgatgttttctattctatttcgctaaaaaaaaagttataaacaactagataaacttcacaatccatagatgggttaagaacagtcattatggggctgagtgagcagtaggtgcataagggctgtgacctccctcaggtggtttccaggacacacgcagcactgggtcccatgggatagctccagtgatgattctgtaactaagaaagcagcaaagatagaaagaaagcacgtgaagagttgtggcaaagggtgagaggtccactgcgtgggtgagacaccctgcagccagcagccactggaagctgctgcccctgaggcccacgcaggcagtgaggcgtggcacacttgcttatgcttacatctgggaggcacagcaaggggcaagctttgtttctcagaggtgaatggaggttacctgatgctgatttggtttcctctatctttccttccaggaattcaaaagcacgctgagcaggtgagtgacctcacagctcctggggcctctctaagttgcttcttcccttttcactgagccttgtctttattccctgtcccctgacctctcacctcctgatcccccgacttgcttgcctggggaccttccgagacaaacgcccacctgcctggccatgggtttttctgcatgaggtctggctctcccttttctacctctttctgccaagaggacctcgccatcctaattgtcacagcctgtgggagcaaaatggtgcacacaggcccttctcagagcccttgtcctgcaggtgtagcaatgtgcctggccccaagccaaccacagtctcttctgagatgaagaataaagtctggaatgtttctctcaagacctttgtcttaaaagggatgctgaagaagttcaaaggtaggggcctgggcgccaagctgggccacatagtgcggtggtggtggagggttcctggtagctcaggggtccctgggtgtgctttccagaagctgtgtgtgaaaataggagctggctgtgccatggccagat

SEQ ID NO: 35198 - DNA, 2300 bp, Homo sapien
gggaggaagtttagggtcttgggtttacagtagcccctgctgcacagcccagggtcttgggtactggcacctgcctctaccccaagttggaatgatattttatcttccttagggtagaacaggaaagtgaaacgagggctcattttggttaagataagcaaacatgaggcctggcagggtggctcacgcctgtaatcccagcactttgggaggccgaggtgggcggatcacgaggtcaggagatcaagaccgtcctggcaaacacggtgaaacccctgtctctactaaaaatacaaaatagccgggcgtggtggcgggcgcctgtagtcccagctactccggaggctgaggcaggagaatggtgtgaacccgggaggcagagcttgcagtgagccgagatcgcgccactgcactccagcctgggagacagagcgagactccaccttaaaaaaaaaaaaaaagataagcaaacatgaatcaccatcggtcattttctaccttgcaaattcagttcctagctcagtaaataggtgttgaaagaataaaaggattggctgggtgcggtggcttacgcccgtaatcccagcactttgggaggtcgaggtgggcggatcacctgaggttgggaattccagaccagcctgaccaacatggagcaaccccatctctacttaaaatacaaaattagcctgccgtggtggcacatgcctgtaatcccagctactcgggaggctgaggcaggagaatcacttgaacccgggaggtagaggttgcggtcagccaagatcatgccactgcactccagcctgggcaacgagagtgaaactccatctcaaaaaaaaaaaaaaaaaagaatgaaaggatctactaggacctgtcaaggcagggaattgaaggaaggtgaactagaggaccctcccatcctcaatgtcaggaggggtggaggaggagcctggagttcagacaccctagggtcctttccagaccctcaactatatctgttatgcctgcacccagtgtgcatcccagaccttcctacctcatcactcactttcctccatgaggaagagctcaccctctagaccttcatccctcctccactggagaaatgactcccaatgcagctcttcccccactggttgacatccaggaaccagagggccttccctggcaccggcggcagcttcacagtctctgaccggagtccccaggccttgcttaacaccttccacctctgtcctctcccaacatccatccatccacccccacattcgtttttgttgttgttttgttttgctttgcttttagacagagtctcactttgtcacaaaggctggagtcgttcaagcgatccccccacttcagcctcctgagtagctgggactacaggtgtgcactactacacccggctaatttttaatttattttttgtagagctggggttgggggtagtctcctgtgttgcccaggctggtctggaactcgtgggctcaagcaaccttctcccctgactttgcccccctcagcctcccaaagtgctgagatgacaggtgtgagctctacctgttctttgcagcaataaaatacttctggatttatgacacttgtctcatttacaataccctgcttaatgaaacatcagaggtagagcccaactattgctgcaacacaaaagggagaaggaatgctcttatttgaaaatgctcctaccccaggggacatctggcaaagtctggagatactatatttttggttgtcaacaatgggatagggatgctattggcatttcgtggtagaggccagaggggcggctaaatgtcctacaaggcacagggcagccccctacaaccaagaagtatctggcccaaaatgtcaactgtgttaaggttgggaaaccctggcttagagtattttggcaaatactgtttcacttgtgctacctccttgtgaggcaactggccgagaagcctggcttaacacttcctggtgatgtgtctgtcttttgtctcctcacctgtaagacttgaagggaagtgcaccctccccactgggctgccgtcagggttgagggagttaatatccataaggcgctccaggctactgcagcctgcctggaagctgaaggaaaggtgggggcattgtaggacaccttgaacccaggtctcccaacttcacaggactcccttcctccgcccaggagttttaaggaagaggaacttcctggtgggacatattgagtgccaaacgtgtgttcacataaaaaatcaagagatcagggcatgagtctgcatctgaaaact

SEQ ID NO: 35199 - DNA, 2300 bp, Homo sapien
atgggcctactttccaccgtgaactgcggctcctcttttgaatttcgaaccaagtttaatccaagaaaaccttactgagcttgccaagaactgctctaaaaacaggattcagccgtgaacaaacctagtacagtccatctgaaagctgacattccagaggagatagagtgcgggcacagagccggccctgagaagggagcgcgctaagagacgactttacacagtgtgcgcgttcggggcgggcttcgtgggcagagacgtttgaaacaagacctgaatgaggtgggagggagcatgcaggtggtgggagaaaagaggtccacgcaaggggaacagccagcgcagaggccacggggttcaggaacagcaagaagatcggggacactgggtcctggaaggccctgagaagggaagtcgggaaggagggagcatccgggggcagatgaggtgaggcgaggtcttcgcctttgggtgagaattgctgaagttcccggtgacattggcaagggcggtttctgaggagggtgcgggcgaaagcttgatccaagtggcctccagagtgagcgaggagagagggtgtggaagcggataacacaggcagctctgctgcggggctgtggagacagctgggggacaagagagcgctgaggtttgtgtgtgtgtgtgtgtgtgtgtgtgtgtgtgcggtggggggggaataatactgaatacaatgggaaattataaatgtgttatctgttcaaatactaagtaaagagtaaagaagccggaggacagtcgcagaaaaggtaatggaatggatacaaggccacgcttgcgcgtgaggggacaggaccaggttccagtctctaaatttaactcagcacagggccggggcgaacctgcgctggcggaacctgacaccgtggcccgagcgccaggcccttgccccggcgatgctgggtcggcctcggtcggaaaccgggagtggcgctggcagcatttgtgcgcccacctgtcgcggcccgtttcccgcggctgactgggtcaggctggggcggcctggagagtctgagggacgggggcgagggggagaggccgctggccagggcgggggctggtggagcgcagatccggggcgcagggcgctgtcccgcacttgaatggcccgtagtcaacgtgcgcctcccctcccggctcccagccgggcgcgccccgggctcgagtctctgcctgcccagtggcagccccgcccttcctctcccagtgggccctcggcgcccagctccgcgtcctgtgaggtccagtggccgcccaggcgcgaccagatctgggtgcgcggagagcgcgcatggcggctgtgggaccgcggaccggccccggaaccggcgccgaggctctagcgctggcggcagagctgcagggcgaggcgacgtgctccatctgcctagagctctttcgtgagccggtgtccgtcgagtgcggccacagcttctgccgcgcctgcatagggcgctgctgggagcgcccgggcgcggggtctgttggggccgccacccgcgcgccccccttcccactgccctgtccgcagtgccgcgagcccgcgcgccccagtcagctgcggcccaaccggcagctggcggcagtggccacgctcctgcggcgcttcagcctgcccgcggctgccccgggagagcacgggtctcaggcggccgcggcccgggcagcggctgcccgctgcgggcagcatggcgaacccttcaagctctactgccaggacgacggacgcgccatctgcgtggtgtgcgaccgcgcccgcgagcaccgcgagcacgccgtgctgccgctggacgaggcggtgcaggaggccaaggtgagcgcagcccccacccaccccgtgggtccccgggaccccctgacttggtcccgcgctcccgcgcacggggtgcagagaacagcctgtcgatcaggaggcccgggtgagcccctcccttctttctccattccaggaagcccagcgctggttcccgggctgagcgcggttctctgtcacccccaacatcaccaatacccccaccccacccccactgcgtttccctctgggccagatactgggccgcctgcgcgacgtcccccacggacttggcgatgttcttcctgtctgttcggagcctctagcctggtctgcgtctccgcagctctctgcccgcgggaagtctccggcacagccacgcagccgctgcccccactcttatctctttccccgaagcgggctctgctcaaagtccccacctcgtggaactgagtgagaggacctcgcc

SEQ ID NO: 35200 - DNA, 2300 bp, Homo sapien
ctctgtcgcccaggctggagtgtcgtggcgcaatctcggttcactgcaacctctgcctcctggattcaagcacttctcctgcctcagcctcctgagtagctgggattacaggcgtgtgccaccactcccggctaatttttgtatttttagtagagacggggcttctccatgttagtcaggctggcctcaaactcctgacctcgtgatccacccgcctcggcctcccaaagtgctgggattacagacgtgagctacctcacccggtcaagtaccgtgtggattttaaaacaggagggaaagacaatggggcccagaggagggcaggggccgccgcggtctttttctactccgcagactccaccctctgggttttttcttggagctcttcaaacatgctggatttcaaaatttgaaaggaaaatcgaaaacaataattgaatgtgcaaaactacactggagatgccggggatcgaacccggggcctcatacatgcaaagcatgcgctctaccactgagctacatccccacctactctcagcagctctcccagatggtccctattggtcgcttaactcaggacaccgggagtggaaggcaaccggtacgcgctgggtctcagccgctgcaaaaacccggcatcgcagggcaagagttgttccagcgtcctccgctgactccaaaccagcgggtcttgaccaagggattccaagagagaggattaggcccggctaagcacctgggagcagctgtggaaaaaggagagacaatcatcaggcacgatgccaaaaatgaactgtgacctgaaaaagagaagaaaggaaaattgtgcaggatgctacgttttgttttttaaaagtgggggttgaggcaataaaatacggaatatttgattaacgtaatccagaattgtaaagttgattgctcgggaggaagaaaggactgggacacaggcgatgggcctactttccaccgtgaactgcggctcctcttttgaatttcgaaccaagtttaatccaagaaaaccttactgagcttgccaagaactgctctaaaaacaggattcagccgtgaacaaacctagtacagtccatctgaaagctgacattccagaggagatagagtgcgggcacagagccggccctgagaagggagcgcgctaagagacgactttacacagtgtgcgcgttcggggcgggcttcgtgggcagagacgtttgaaacaagacctgaatgaggtgggagggagcatgcaggtggtgggagaaaagaggtccacgcaaggggaacagccagcgcagaggccacggggttcaggaacagcaagaagatcggggacactgggtcctggaaggccctgagaagggaagtcgggaaggagggagcatccgggggcagatgaggtgaggcgaggtcttcgcctttgggtgagaattgctgaagttcccggtgacattggcaagggcggtttctgaggagggtgcgggcgaaagcttgatccaagtggcctccagagtgagcgaggagagagggtgtggaagcggataacacaggcagctctgctgcggggctgtggagacagctgggggacaagagagcgctgaggtttgtgtgtgtgtgtgtgtgtgtgtgtgtgtgtgcggtggggggggaataatactgaatacaatgggaaattataaatgtgttatctgttcaaatactaagtaaagagtaaagaagccggaggacagtcgcagaaaaggtaatggaatggatacaaggccacgcttgcgcgtgaggggacaggaccaggttccagtctctaaatttaactcagcacagggccggggcgaacctgcgctggcggaacctgacaccgtggcccgagcgccaggcccttgccccggcgatgctgggtcggcctcggtcggaaaccgggagtggcgctggcagcatttgtgcgcccacctgtcgcggcccgtttcccgcggctgactgggtcaggctggggcggcctggagagtctgagggacgggggcgagggggagaggccgctggccagggcgggggctggtggagcgcagatccggggcgcagggcgctgtcccgcacttgaatggcccgtagtcaacgtgcgcctcccctcccggctcccagccgggcgcgccccgggctcgagtctctgcctgcccagtggcagccccgcccttcctctcccagtgggccctcggcgcccagctccgcgtcctgtgaggtccagtggccgcccaggcgcgaccagatctgggtgcgcggagagcgcgcatggcggctgtgggacc

SEQ ID NO: 35201 - DNA, 2300 bp, Homo sapien
aggcctatatttgcaggactaatttcgaggccatcctgggctcaagcgatcctcccgccttggcttacccaaagtattgggattacaggcataagccaccgcggcgcatggcccgtttttatctctatttatgtatgggggaaacgtggaggctggtatttgtggggcaacatctcacaaaaatagactcttaaagtcaagagcataaaaaagaatatacggaagacaagtgtctcatatgacacaaagcatctttcttgacagggagtcgaaagcaggtcgtagcgagacaaaggcggaagcctaaccactaaatctcccagtaaagtgggagtgaatcagataggttttgacgctcacgaacgcctggggtcgtcctgcggtctcaccccagtttcgataaaccacattgttccctccagcacagcaagtctcacagcaagacgggggcaggccgtctggtaaacataaaatgcctaatatgtgctgcccgtgggcgagtggcctacagcaaagggtcatgcatgcacgatagcccgcggtgctggcctgcaggaattggtccacaggtacccgcctctcattctttctttgagagttagcgagggtgcaaacgttgtgagaattctgctcggggccttccacacacggatcggagaacaccaggttagtccaagttctaacacccactgttggtgaatctgctacccactaggtcttggtacagagaataccatttgtgcacttaggtaacacaacttgccttaacctttccaaaaagcgaaattacgcccaacgtggggctcgaacccacgaccctgagattaagagtctcatgctctaccgactgagctagccgggcggccatgtctgtattctaactttgtctctgaagatggaggttaccctcagaggtgtaagcacgtttccactgtgcaaatactaagaagcgcctgcgcctggctctgttctaggcactagagccgaggatctgaaatctacggattcctgtacatgtgatggctgcataggcttcagaagggaagagcaagagattaggtgaggggcgagacctgaatttacttgagtagtgctctccttcagttttgccccagtccgtgttcctccgaagcgcagggacacacatgtccttcctgccacgtaaggccggcctcgggagagaatctcccgaacagaccaaaacgtgtttccgcccggtttcgaaccggggacctttcgcgtgtgaggcgaacgtgataaccactacactacggaaaccaccttggctactttcctgccggcatcgtcctgaagacacacacggctgagacggccgggatagctctaggcaagcgcccttgtaggacaggcccggggacccctgccgcggccggctgagcggtgtccaggttctggagccggacttgtccaccgcagccgagtccgcaggtcctgtaatggcctagcatagttcacccacgagggttcgtggtttttggcgcgtttgatctgacatactcagaggcctgaccacccccctaggaagcgcgacgtccatctggagttttcccgcgagccgccttgagagcagggtaagttctgcaggcccagccctggcgtcacgctgtgtctggcactcactggagattctgtacataaatcatggccccgtcatttttctcgcatcaaacaacatttatttatttatgtatcgacatcaaatctctataaaaataaaatttaaagagctatttaagcatcaagtattatttctaccgcacaaagcatctatttttgcagagatgctgtgagaatgtagatgtaatgattcgtcaccacttcttcactgctgggcagttagggaagttcatctaaaccatgagacagtgtccggttggcagtttctacctcggatgcgaaacgccgactacagttggggaagggtggggcgtctgctgccctaacccgcgaagcgctttctcaggccccgcccccggtccgacccggacgaccctctgagtcctccacaacgaagtcgtctgcctagaagggccggaagtacttcagggcgcgccgcggacccaccccctcgcttccggcatcggctgtggggagtaccggctgcagtcggctgtgccgggagggtaggatggcgtctggccgatgcggtgatagcaccgaaagcagacggccgccaggcgctccccctaccccccgaagtttctccccagcggcgggggatgggggtaggcggttcctctgttctttctgcgttccccgcggcctcttaccacagagac

SEQ ID NO: 35202 - DNA, 2300 bp, Homo sapien
cctttccaaaaagcgaaattacgcccaacgtggggctcgaacccacgaccctgagattaagagtctcatgctctaccgactgagctagccgggcggccatgtctgtattctaactttgtctctgaagatggaggttaccctcagaggtgtaagcacgtttccactgtgcaaatactaagaagcgcctgcgcctggctctgttctaggcactagagccgaggatctgaaatctacggattcctgtacatgtgatggctgcataggcttcagaagggaagagcaagagattaggtgaggggcgagacctgaatttacttgagtagtgctctccttcagttttgccccagtccgtgttcctccgaagcgcagggacacacatgtccttcctgccacgtaaggccggcctcgggagagaatctcccgaacagaccaaaacgtgtttccgcccggtttcgaaccggggacctttcgcgtgtgaggcgaacgtgataaccactacactacggaaaccaccttggctactttcctgccggcatcgtcctgaagacacacacggctgagacggccgggatagctctaggcaagcgcccttgtaggacaggcccggggacccctgccgcggccggctgagcggtgtccaggttctggagccggacttgtccaccgcagccgagtccgcaggtcctgtaatggcctagcatagttcacccacgagggttcgtggtttttggcgcgtttgatctgacatactcagaggcctgaccacccccctaggaagcgcgacgtccatctggagttttcccgcgagccgccttgagagcagggtaagttctgcaggcccagccctggcgtcacgctgtgtctggcactcactggagattctgtacataaatcatggccccgtcatttttctcgcatcaaacaacatttatttatttatgtatcgacatcaaatctctataaaaataaaatttaaagagctatttaagcatcaagtattatttctaccgcacaaagcatctatttttgcagagatgctgtgagaatgtagatgtaatgattcgtcaccacttcttcactgctgggcagttagggaagttcatctaaaccatgagacagtgtccggttggcagtttctacctcggatgcgaaacgccgactacagttggggaagggtggggcgtctgctgccctaacccgcgaagcgctttctcaggccccgcccccggtccgacccggacgaccctctgagtcctccacaacgaagtcgtctgcctagaagggccggaagtacttcagggcgcgccgcggacccaccccctcgcttccggcatcggctgtggggagtaccggctgcagtcggctgtgccgggagggtaggatggcgtctggccgatgcggtgatagcaccgaaagcagacggccgccaggcgctccccctaccccccgaagtttctccccagcggcgggggatgggggtaggcggttcctctgttctttctgcgttccccgcggcctcttaccacagagacgcgggcctccaccgtcctagccctcccgccctgttctctagtgcggactagagcgtctcctcgccatttcctgtcgccctggggccccgcggggaaaaagggggagtagcaggacagcggagggaagtcgcgagcttaggtggtgtgtagacgccggaagtgttgggaaggaggccggaagctaggggcggggccaggaagtgaggaggggcgggggtttatgaggagtccaagggagcattggggcagacttgtactcagagccacctgagggacttggcggtggcgcccagcactgtcccctcccctcgtagagacacggttgtcgtttgggagtagggaacactgtgttggggtgggttgtcggcaggacatctctctggctgctcttggggcgaggtgtggaggggcagggctgggggtggagccgggtcgccagggcgtcggtagggaagacccccgcccctcgcccccccaccgaacctctacactggctggctggacactaagatggctgccgttgccatgacacccaaccctgtgcagacccttcaggaggaggcggtgtgcgccatctgcctcgattacttcacggaccccgtgtccatcggctgcgggcacaacttctgccgagtttgtgtaacccagttgtggggtggggaggatgaggaggacagagatgagttagatcgggaggaggaggaggaggacggagaggaggaggaagtggaggctgtgggggctggcgcggggtgggacacccccatg

SEQ ID NO: 35203 - DNA, 2300 bp, Homo sapien
cacgccccagctgggcttcatgcatctctctgagacgccgttccagccctgcctgctcttcagccagaaaccgtgtcagtcgcccaaactccgaggccaccgctgccagctctgacttcatctggctctggaatggtgcaaaggggatggcagacaccacctcaacacgtacgaagataacctccagttttgcaactactacttctcaatgcaaggcaaaggagccctacactccccaggtccaagatagtcccggaaagaggctcatcccctaccagccttaccagataccacccccttgctcccagcacagtggtctcaaactcactaacctctgcctggaacactcctctccacctgactctacctaagttgactcatccttcaggtccaaccttaaatattccaagacaagccttccctcctctccagatctaaatcgggaccatccccacaaatatcactgtatctctctgtggcacatataatattgaaacgttgtgtttaaatgacgtaactgttaacatcctttcccccactgtaccatgagctcccactgacagggactaggaatgtctttgtttgccagggtcctcggaccctgacatagtaccaatcagagtaggcacctggtaaaaatttttgaaatgaataaataaaagaattcaggaatcaaaacatgaagttagggtcccgacgccattaaacacagtgaccttaagaaagtcacccaaaagccccagatcagaactcggaaaaactttttctgtgaaggtccagatagtaagtatttttatgctttgtgggctaagaggcaaaaatcaaggatattatgtagggacttaatatcctgtaacagaaaaaactcctgcccagtcccaccctatttgccagggatggcccttcctgggtggtaggcacacttttcacacagctaccatcggctgcagacgctgtgagcagcaggccagaggagggtcccaactgaccagacgcgtgagggaacagccgccacagtcagcttcactctatgccaggggcacacagctcctgttacctctatacccaggagagcccaaaagtatcaacttgggcagctggccagaagcacgatgacttcctactcccagacagatcctaccattcagtgcctagcagtcgccagcagcagagtccctaacgttcaggtggcagtgagcatgggccctgggtagtggcaaggcccaggcactggctgggaagggaggagggaagagggacagaaggggaggtcctggcttggtctatgaagctcacagtgccagcccatcccagcaggacctgctggggttatgaaaacaggcgggaggtggggatggaaaatgtatcttaaaagactccttggagaagggcgagcaataatggaaaaaaacaacaaaaaaagcgggggggtcggggtgtgctgagaaaacactagactaggaaatattaggtctctgcagtgctaacatacactaaatcctgccccagcttaaacacactggccccctctcaggacacagcaagtgtcccaggacagtgtccgcctcatgcttagggctgctctgcccagtgcctgcatggatcctggggccggcagcttctctgatggctgctatgtgggttttgctttgcccccttcaggctctggtgtcgggtagaaagcctgttctgcagccttgggccaggcacctaggccctccaatccaggcctcagtttccactccattttggaaccaggaatgaacatgcctcctgattctctaaggccccgctctcctcagcacctagggaaagcatctacccctctcccaggccttagctgtcccctcctcaggggaccaagtcactccctgtgagagtgggaagccctaccttccttgcctcgactgtactgcccatcagccccgtcgagaacattcacccaccttcagttctgtcactcgcctctcctccttggctttcatcttctgcactgcctccaggtgcttcctcagtggttccacgtgcccctgcagtttggcctgaggaaacagaaaaagaaaagtgggggctgggagaggcacctgcccttcagagcctacctctgcaatcctccctatagcaagatgggtcaaagcctgatccctacccccgaaaatgggtgtcaagtgagtattataccttcctccactttcttctttcagatgatgacaaaagcctccaatccctctgtgcacgtctgcagaagccctgtgtgtattttttttttttttttttttttttttttttgagacagagtc

SEQ ID NO: 35204 - DNA, 2300 bp, Homo sapien
aacgttagggactctgctgctggcgactgctaggcactgaatggtaggatctgtctgggagtaggaagtcatcgtgcttctggccagctgcccaagttgatacttttgggctctcctgggtatagaggtaacaggagctgtgtgcccctggcatagagtgaagctgactgtggcggctgttccctcacgcgtctggtcagttgggaccctcctctggcctgctgctcacagcgtctgcagccgatggtagctgtgtgaaaagtgtgcctaccacccaggaagggccatccctggcaaatagggtgggactgggcaggagttttttctgttacaggatattaagtccctacataatatccttgatttttgcctcttagcccacaaagcataaaaatacttactatctggaccttcacagaaaaagtttttccgagttctgatctggggcttttgggtgactttcttaaggtcactgtgtttaatggcgtcgggaccctaacttcatgttttgattcctgaattcttttatttattcatttcaaaaatttttaccaggtgcctactctgattggtactatgtcagggtccgaggaccctggcaaacaaagacattcctagtccctgtcagtgggagctcatggtacagtgggggaaaggatgttaacagttacgtcatttaaacacaacgtttcaatattatatgtgccacagagagatacagtgatatttgtggggatggtcccgatttagatctggagaggagggaaggcttgtcttggaatatttaaggttggacctgaaggatgagtcaacttaggtagagtcaggtggagaggagtgttccaggcagaggttagtgagtttgagaccactgtgctgggagcaagggggtggtatctggtaaggctggtaggggatgagcctctttccgggactatcttggacctggggagtgtagggctcctttgccttgcattgagaagtagtagttgcaaaactggaggttatcttcgtacgtgttgaggtggtgtctgccatcccctttgcaccattccagagccagatgaagtcagagctggcagcggtggcctcggagtttgggcgactgacacggtttctggctgaagagcaggcagggctggaacggcgtctcagagagatgcatgaagcccagctggggcgtgcgggagccgcggctagtcgccttgcagaacaggccgcccagctcagccgcctgctggcagaggcccaggagcggagccagcaggggggtctccggctgctccaggtgagcaatgtcccctccctgttcccccagcattctgtgttggctgtcaggcagtgcttaccaaacgcctgtccagagctgcctcttttctccctgggaggaacccacagtgattgaacctgaagaccaaaaacatgttttaaagctggaaacagagttaatgtcgaatgtggtatgtgtggcgattatacccagtgaaaagcatgaagattcggttgtaggagaggtttaaatgacagttgaggaaagtctttttgacagtgacatcctgaaaaaggtgagcaagtcgtattgtggaaatgacagtatccctgggctcacagcaggatgaggcgagttaggtatggcgaggcatggggtggttgaaatggatgtgtgttcattgagggccgtgagggtgctgcttctcccttcctgctcaggttcagtctctgactggagatcggggaacgctgtccctgtgcagctgacactctctttatctctttctccctctccctctttttgtttctcttattcccaggacatcaaggagactttcaataggtgtgttcccagtctttgcccttcgtgacccagtggcatctggttccctgtccctgcttctcttcggtatccctctcctctccttccttccccaggacctgagtttccatctcctggaccctcctctccttcccctcagcttttgcttttccctctgggaatatcgtggtcccaccccctgcccggtccccttcctccaggtgtgaagaggtacagctgcagcccccagaggtctggtcccctgacccgtgccaaccccatagccatgacttcctgacagatgccatcgtgaggaaaatgagccggatgttctgtcaggctgcgagaggtagggaggtcacctccacgaccttcctttgcctttcccttcacagacctgagactgggtcctgagggaagttgggccccagggaaactgtggggcttgagatggagcaggatccaggcagccactctgaggttgagg

SEQ ID NO: 35205 - DNA, 2300 bp, Homo sapien
agcgaaagaacagtcagctgggggtgccaaggaggcaggtgatgtatacaaacctggagccttaggatggtccacaggctgcggaggaccacagccaggacaacgtcccggaaagcccaagggagactgcggcggaaggcaggggaacctgcagaggaccaggagagcaagctgtttcagggagggatcctggccttccctgcacacctgggcgtctacagcctccggcagctctgccaccctccctcgcctgtcttctgcctttacgcaggctttctagcagacattgccaaggttcttctccaggccttcaaggccctaggttaactgcaccctccatttccctgctctgtcctcagcccctccacactccagctcagtacgttggcactaactcttccctccgattgaaatatttttcccccatttgacttccctccacaggaacattattctcccatatacccgcagggctctctccgtgtctctgttccaatgttctcccctcttcgcataccgtaggaagtaaactgcaaataaaacaaaccagggtcccccctctgtcttgttcacagctgtgtccccaagacctaaaataaggcctggcacccaagaggtgctaagtttcacaacatttactctgccttgttcagggcgctttacatttgcttcttcactttccacaccaccatgtaatgtagatactaatattatttccaatctcatttcacagatgagaaacgaaagttgatagatgtcacaaatagaaaagtatatacttaggtataatgccccctttattttgcatagatgttggtggctgctatcatcctgatctgtgcccctgtttaaaactacttgaatagacatggtgccaacactgtctcttatagtcagagatgggtgagaatgggagccattacttatttaaattcctgcggtcgagcggaaggcagaaggacagttaggtatccgtgttccaccgcttccctgtctgggcacgtccttcagggcacagttggacccccagacccctgggcttttgtgtacgctggctgggcccagagagagctttccactagatgtccccagaagtcagaaccttaaggtcctcctttgggcatttccgtttctgcgagagcttcccgtgttctggcctaggcaggaacggattggcagtctagcaacacacagggcaatttttactttattattttattgtatgtatgtatttatttatttgagtcggagtctcgctctgctgcccaggctggagtgcagtggcgcgatctcggttcactgcaacctccgcctctcaggttcaagggattctcctgcctcagcctcccgagtaactgggattacaggcaccccccaccacgcctggctaattttaattttttttatttatttatttggaaagaggttgcatcatgttggccaggctagtcttgaactcctgaccttaagtgatccacccgcctcggcctctcaaagtggtaggattacaggcatgagccaccgcgcccgggaaaaagagaccaattcttagttcatccagagtaaccctctcctgccttagtccagcctggactaagtccttccggagttggtgtgcatcagaacaaaaacctcgtgaggggagaacaccctccggaagcacagttttaaagtttatttttaacattttaatactctactttttaaattgcccatcgttacccacgatagtgaaatgaaaattaagctcccctggggttgccccgtcaaccctccccgcaccaagtggaacaggcggagctcgagctatgccacataggggcggggaagcagcccggcggtcctcatgggaatgtgccgtacacttcacctctttcgcttctcgctctacatcatccctgagaagcctttttaaacacttgaatgtgcttgtttcagagtgtatttgtaaagtgcagtcagattttgttgtacggaagacgggactgtgatgccttgcaatttccctctgccttttgcattacatggcgccgccatcttgagcagaaatgtatcatggggctcgccattttgcatggtcgagcgggtatttccggttccggcggggggcttttctctctctctttcactgcaaggcggcggcaggagaggttgtggtgctagtttctctaagccatccagtgccatcctcgtcgctgcagcgacacacgctctcgccgccgccatgactgagcagatgacccttcgtggcaccctcaagggccacaacggctgggtaacccagatcgctactaccccgc

SEQ ID NO: 35206 - DNA, 2300 bp, Homo sapien
tagaaagcaaggcattaaccatatcagcacccaaacaagggaagacaagttacaagaaagccaaataaaacagcaaacatttgtttagtgctttatggttaacatatatgatctcttttaatccttacaatcctagggaaaaagtgaagctcaaggaggttgacacctgcccaagactagacagtaagtggcagagccaggtcatctgatcctaaatcccgcactccttccactatgataaaataccaggaaagaaaagtgatcaggatatgaggcacattctgatccatcaaagatgcttatatgctttgcctttctctagaaggaaaacggaccccactgaaggtagagatgcaatcccagactttcagagggggggtgtggccaattgctatcagtagtttaggactcacatctggcatttctgtctaccaatacatctattttgacactgcttgtgctgaggtcccaaatgtctattatctccaagtactgtggctttctattcctatctgtacctgtcccagggaattggtcaaggactcacattagggagaaatgaagtactgggtatctgttactcacgtcccttacacttaggtagactgccagtattagcagtagtggtccgcttccagtgaccgtcatattatctgttcagcttcctctggggaagccaatctgccccaatcttcatggttttgtgtctccttttttacccatatgaccatctctctccaccgtgtctccctcatcaaataaagagaagtttagcaactaagtacctgaggaggtgggaaaggaatgctactcattcctcagctctcctagttacctttccactcccttcatccccccacattccctcatttctctcacctggtactcctgcaccacctcctccaaaggcagcacgctgtgctgtttgtggctcctggattctcggcacaccacacagatggcctctttgtccacctcacagaagagtttcagggcttcctggtgtttaaagcacatgccctgatcattactccggtttccccgataaggagtggggcacatctggcgaattatctggaccatgttggccagctgcaagttgggacgaaagctgcgacgtgtaaagctctttcggcactgggggcaggtgaactgccctggaaggggcaaggaaggaggcgggtggatgtcaggatacagctcttcatcttcgtcctcatcgtatgcttccagtatttcttcttctcggtagacatcaattctcaggtcaggtctcaagcctcctaggtaatagtcctgatcttcctcttcttcttcttcctcctcgtcccacatatagtctacgttgtcccaattagttataccactgtcaccgagccagagttcatcgtcatcttggtcttggaacaactcttcgtcagcattcccccgatacaacacctctcgaatggagccgtcccatccatccatggcccccaccgcttcctcgtcctcctcctcctcccattcatcttcctcctcgttctggtcctcctcgtcctccttactccacagctgggtcacacaccctcggcagaagttgtgcccacagctgatggacacggggtccttgaagtaatccaagcagatggcacacaccgcttcctcctgaagggtctgcatggggctgggagtagtggcataaccagccatcttaatgcccgccggcaggtgtagatacgtcagcttggagctgaggagcggggacgcgcctgcaggcctgcctccaaactactctggtgacccgaggctgtcctcaaccttgctcttcttcctcggggccgcaggggagctttgaccccctctctcagggtgcgaacgcccagatccagactcacagcctctctctgggatcggtggggacagagcaggctgcagcccccagctgctcggtcctgtcacgtctctcgctaccctcagggtgtgccctacactgcggcgtccgcctcagatgcagccgctggctaccctgcccgaggcgacgcaaaatgacgtctcgctcctgcacacgctctggagagacgctctaggccggcggaggaccacgtctctatggtgtgccgggggccgcgcgggccgggagttgggtgggctgggggacaggcgcgcccgcgccgcccgctccagctgggctagtgctgcacattccggccagcccctcctcaagaccccattcccaagccccttctcagctccctcgggccggcagagcggctctgatcaggtcagcggcggacgccgggaagaggcccggcttggga

SEQ ID NO: 35207 - DNA, 2300 bp, Homo sapien
atgagccatgatcataccactgcatttggcctgggcaacagagcaagaccctctctcaaaaaaaaaaaaaatctaaaagagaatgggtaaatcaggcatagtggtgcatgcctgtagtcccagctactccacaggctgaggcgggaggatcacttgagtccaggagtttgaggtggtagggtgcaataatcgtgactataaatagccacggcactttagcctgggcaacatgacgaaaccctgtctctataaaaaaataaagaaattagcctggagtggtggtgcatgcctgtgttcccagctattccagaagctgaagtgggaggactgcttgagcccaggaggtggagattgctgtgggcccagatcgtgccactgcagggggctacaggagtctaaaagggaggggacacaatttccccaaatctccaatgttgaggagttctgcctacactccttgccccaggatgcccccagcaccaaggccaagagggtgtcttggccctcagcactggggtagaacatctgtacacagaaccaggccacaggagaaggcatacacagagcccatgagcaccagcccctctgagctgcgtccagcccccatctccatcctctgttctctgggactacaaatccaggcctgacctggttctatccctacctgcagagacagaagacagaaggagacaacccctgagaagcctttccccagggcctgattccccctcccactgtaagatctctcagcccgcactttgggaggccgaggtgggcggatcacgaggtcaggaaatcgagaccatcctggctaacagggtgaaaccccgtttctactaaaaatacaaaaaaaaaaaaattagccgggcgtggtggcgggcgcctgtagtcccagctactcgggaggctgaggcaggagagtggcgtgaacctgggaggcggagcttgcagtgagccgagatcgcgccactgcactgcatcctgggcaacagccagactccatctcaaaaaaaaaaaaaaaaaaaaaaacctctcagccctggatcaggtcccctctccaggaaaggtgacagagtggagtctaaatgacactgccctagggccccgctggggtggaaaacagacccagacagcgcccccagccctccctccccagggaggagtgaagggcataacagacagcggaggacaccgggacaggaaggaggggccagccgctctcaaactaagtctaaaccacggcggtgaggaagtgtggtcccaaatccagccccctcccggccgagctcacagagctcagggctggaactcggaaccctggcccgacgcaggcggcagcaccgaagggaacttgagccccggccccctcaggggacccacgaccggggcgcagctttgctggcagacgccgcaatactgcgcagccgcggccccgcaagcagaaacagggctgggtctgaggcctacgtggagctggggcccgacggctcacggaaggcagcggggggcactgggcgccccggatccgagcctcccgggcggcaggccctcccagctgtgcggcgcccggatccccacaaaggcaccccaagcgcggacggcgggacgggcgacagcaccagggtggtgtcccaggcttccccaccgccgcggaccaactcggccccggcccgggcggggcttccggagagatttatcccccttccctctaaccttcctggggctccggctcaggctggacaacggctcggagacccagtccccctcaagtgttgacccccccaccatctagaaccagccaacccaccaaaccacctctcccaagccgggcctcttcccggcgtccgccgctgacctgatcagagccgctctgccggcccgagggagctgagaaggggcttgggaatggggtcttgaggaggggctggccggaatgtgcagcactagcccagctggagcgggcggcgcgggcgcgcctgtcccccagcccacccaactcccggcccgcgcggcccccggcacaccatagagacgtggtcctccgccggcctagagcgtctctccagagcgtgtgcaggagcgagacgtcattttgcgtcgcctcgggcagggtagccagcggctgcatctgaggcggacgccgcagtgtagggcacaccctgagggtagcgagagacgtgacaggaccgagcagctgggggctgcagcctgctctgtccccaccgatcccagagagaggctgtgagtctggatctgggcgttcgcaccctgagagagggggtcaaagctcccctgcggcc

SEQ ID NO: 35208 - DNA, 2300 bp, Homo sapien
gtgccacagttatccccattatatgcacaaaatgatgaagacttggggttaatgagcgatttgcccaagctcacctgaatattaggactgagtcaaatgttagtctggtctgactttaatgcttgccttgttcatgagcaccatgcattgcctctcctattaagttaagcaggtagacaggtgagagaagagccagtgtgatatcgggggaaattcacccctgatatttcatgtaggttcttttctattttccctgagtgtcagccagtctgagaaataaagggaaagagtacaaaagagagaaattttaaagctggatgtccaggggagacatcacacgtcggcaggttccgtgatgccccccaagccgcaaaaccaacaagtttttattagtgattttcaaaaggtgagggagtgtacgaatagggtgtgggtcacagagatcacatgcttcacaaggtaataaaatatcacaaggcaaatggaggcagggcaagatcacaggaccacaggaccggggcgaaattaaaattgctaatgaagtttcgggcgcgcattgtcattgataacatcttatcaggagaaagggtttgagagcagacaacccatctgaccaacatttattaggcgggaatttccttgtcctgataaggctgggagcgccacgcgaacccagggcttatttcatcccttatctatgactgtaaaagacagccgtccccaaagtggccatttcagaggcctccccttagggatgcattctctttctcagggatgttctttgctgagaaaaagaattcagcaatacttctcctatttgcttttgaaagaagagaaatatggctctgttcaacccggcccactggcagccagagtttaaggttatctcccttgttccctgaaattgctgttatcctgttcttttttcaacgtgcccaggtttcatattgtttaaacaacttgtgcagttaacgcaattatcacagggtcctgcggggacattcatcctcagcttacgaagatgaccggattaagagattaaagacaggcatagaaaatcacaagggtattgattggggaagtgataagtgtccatgaaatcttcacaatttatgttcagagattgcagtaatgacaggcctaagaaattatagaagtattaatttggggaactaataaatgtccatgaaatcttcacaatttatgttcttctgctgtggcttcagccagtccctccgtttggggtccctgacttcctgcaacacgtttctctctactcacagacttctgaccaaatgtgtgtgcagagtttctacaccagttctccaactctctggataccaaccgcgtatcccacaattccattctgacactacctagagttagcacagaacccacaggttaggggctcagtcccacaagaccaccctcacttcagatgccagttgcaagtcctaggttgtcacctgtattttgaccaaccagttagaaatcagggtttcccatgaccctcttgttgagtttaattatttactagaacaactcacagaacttagaaaaacaagttttttttcttttctttttaagagacagggcctcgctctgttgtccaagctggtgtgcagtggtgcaatcatagctcattgaagcctcaacgtccagagctcaagtgattctcctgcttcagcctctcaagtagctggaattacagggttcccaccaccacatttggctaatttcttttattttttgtatagatggggtcttcttatgttgcccaggttggtctcaaattcctaggctcaagtgattccgcccacctctgcctcccaaagtgctgggattacgggcatgagccagcgcatctggccaccttattttctattactggctcaatgtaatggctccatctcaggaacagccaatgaaagagatgcacaggacaaggtaagtggggaggggcacagagcttccatgccctctgttgggcacactaccctcccaggacctccttgtgtttagcaacacagaagctctccaaaccctgctgtttgggtgtttatggaggcatgattgataaaatcactggccattggtagttaagtcaatctccagttccttttgcctcctggagttcagcaggtgaggctgaaagttccaagcctcaaaaaatgtggttggggccaggtgcggtggctcactcctgtaatcctagcagtttggaaggctgaggcacatggaccacttgaggtcaagagtttgagaccagcctgaccaacatggtgaaaccccatttctac

SEQ ID NO: 35209 - DNA, 2300 bp, Homo sapien
agtcccagctacttgggaggctgaggtgggaggatcacttgagcccagggaggctgagactgcagtgagtcatgatcaggcctctgcactccagcctgggtgacagagtgagaccctgtctcaaaacaacaaaaaagtagcagctaacatcaactgaccttttaccaggtgcctattgataccatagtttaatttcttataactgtttcttatttcacttaccaactctgtcttcagttactcccagatttttactgtgtgtgtacagatgaccttttgtttagattgaattgtctccccagaagtaagattactgtgagtcatggtgaatggacattctccttacccttgatgtaaattgacagggttttgggtgcctcccagctataatcttagcactttgggaggctaagagaggaggattgcttgaggccaagagttggaggaggcagtatggcagtatggtgagaccctgtctccattattttaaaaaattgacaggctttacccgggaaggcttatacacaatttaaacacccctcatagtataagaaggtgcccatttcactgcacctttgccagcacagggtattataatttagtaagtcattttttgtttgattattttacatagacaaaagaactcatattactttacttgtcacatttcaacatctttcctcagcttattagctctatttcttttctgtctgtaaatggttgttgctgttttggtctttgagacagggtcttgctctgtcaccaggctggactgtagtggcataatcatgcctcactgcagccttgacctcccaggctcaaacttcagcattccgagtagctgggactacaagtgtgcaccaccacccccagctaacttttttcttcttttggatagagacagggtctcactctgttgtccagaccggtctctagctcctggccttaagcaatcctcctgcattagcttctgaaattactggaatttcaggcatgagccaccatgcctggcctgggctagtcccatattctctagagttctctttactctgtgctagccaatctctcattatgctgttcacctgttataatgaataattctctgtattaaattttaccactttaaacttttgagtggtttatgcttcctgattggactctgactaatatgttaggaagggtcccaggaggtaaacccacacagatgggatttgggcataggtttggtttcccagggggcagtgctgagctctttgccagtgggaaatggggtgctggtgatttccagtaggtgacctcacagtgactcaagctaccacttactgttgattgtgacgaaatgccagctgaggcacatgccttgggagctaagtggttgctgcccttgaccactgtgaagactggtgtgggaagggtcgctttggatgcacttgagcaggggtccccaacccctgagccatggagccgcaaggagccacacagcaggaggtgagcggtgtcgagtgagggagtgagggaagcttcgtctgtatttagagccactcccctttgctcacattcccgcctgagctccaccttctcagatgagcagcagcattagatgctcataggagaacgcaccctgttgtgaaccgtgcatgtgagggatcgaggttgcgctgtccttatgagaatctaatacctattgatctgtcactttctcccatcacgctcaggtgggaccatccagttgcaggaaaacaagcttaacacgcccactaattctacattatggtgagttctataattattttattatatattacagtgtaataatggaaataaagtgcctaataaatgcaaatgtgcttacatcttttggcccagctcctacctcccggcagcctctccaggcccagaactttctccagtcagcctctacagaccaagctcatgactcacaatggcctatttaggcccataccctacgtcacggcagcctccgcagatgaggctactgcctcacaacagcctccacaggcacagctccatcgttacaatggcctctttagacccagctcctgcctcccagccttctctccaggccctgaactttctcaagtcgacctcaccaggcccagctcatgcttctttgcagcctctccaggcccagctcctgcatcttggtggcccctccaggcccagcctctgcctcccgtcagcctctacagtcccaacgtctgcctcacagcagattcttcacgcccagcatctacctcactgtggaccccccaagccaagctcccaacctttcagcagct

SEQ ID NO: 35210 - DNA, 2300 bp, Homo sapien; identical to SEQ ID NO: 18

SEQ ID NO: 35211 - DNA, 2300 bp, Homo sapien; identical to SEQ ID NO: 19

SEQ ID NO: 35212 - DNA, 2300 bp, Homo sapien
ggagaaagggggaccctcacacactgttgtgggaacgttgattagtacaaccactatggaaaacagatggaggctcctcaaaaaaccaaaaggggccgggcacggtggctcacgcctgtggtcccagcactttgggaggccaaagcagggggatcacaaggtcaggagtttgagaccagcctggccaacatgatgaaaccccatctctactaaaaatataaaaaattagccaggcgtggtggtgcgaccctgtaatcccagctacttgggagactgaggcaggagaatcactggaacacaggaggtggagattgcggtgagcggagagcgcaccattgcactccagcctgggtgacagagcaagactcctccttaaaaaataaataaataaataaaagttggccgggcgcggtgtctcacacctgtaatcccagcactttgggaggtggaggcgggcggatcacaaggtcaggagatcgagaccatcctggccaacatggtgaaatcccgtctctactaaaatacaaaaaattagctgggcgtggtggtgcgcacctataaatcccagctactcgggaggctgaggcaggggaatcgcttaaacacaggaacccgggaggcagaggttgcagtgagccaagatcacaccactgcacaccagcctagtgacagagcaagactccatctcaaaaaacaaacaaacaaaaaaaaaaccatctaaaagtaaaactgctgtatgatccagtaatttcactaactgggcctatagtcaaaagaaacaaaatcaatatatcgtaaagacatctgcactctcatgtttactgcgggactactcacaatcgccaaaatacggaatcagcctctgagttcatcagcggatgatggataaacagaacgtggtgtgtatacacagtggaatattattcagccatacagaggaacgacagcctgttatttgtacaagatggaactagggatcattatgttaagtgaaataagccaagcacagaaagacaaacattgaatgttctctcccacctactaaaaaagtagctctcgtgaagacagagggtagacgcgtggttaccagaggtggggaaatgtagcggggagagggggagaaagagaagttgattgaagggtacaaatacgtggtttgatagaaggaataagacctagtgttacatagatcatagttggcaattgcctactgtatatttcaaaatggctagaagagaagaatcggaacggttctagcataaagcaaaaacaaatatttaaggcgatagatattccaagtaggctgatttgattttcacaattatatgaatgcattaaactatcacatgtaccctgaaactatgtacatctattatgcatcagtgaaaaagaaaaaagaaacaagaacttagattttaaactcagcactctcctagtgggctccttaaaaatatttttgtttgggaggacaaagtaggaggattccttgagcccgggagcttgaggctgcagtgagatagtgccactgcactccagcctgagcgacagagagatacactggctctaaatataaataatataaatatatatttatggaataaataaatgaataaaatatctttgcatgctggtgagcccagggtacagtctgcccttggcagctcggtgactcagccaaggcggctaaacaatcctcgcccactagacagtggaggtcgccctccagaggaccttatcagatgtacgtgcaaagcagttttcaagacagttttctattcagagtgtggtttagccgttcagggagagagatcacaaaggaaaaccacctttaggaaagcaggtgagaaaggtgtaagttcccaggcttgggggtcctggcccagcctagctgtgggcaaccccgggaaggctgagccccgcaggctgtatggacaaagcatctcgctttccacactggccacaggtctatccctggcagtaaacaggtcacaggtgggcagcaggtctaacacctgtagcgaaagaacgcaggagaggaactgaggctctgctaccagcagatgctccaagcacatcccacggggaggaccatgaacaactcagctggccacaaccaggaaaagggtgtccagggcctcagagctgcttcagtggggccatttccaggctcccaagcagtaatgtgggtgccctctcaagaacagaagcggaacagcctaacgctaatgtttgggaagaagagaacagtgatccccctggttacctcccatctctctctgcagttctcatgcatctgtgca

SEQ ID NO: 35213 - DNA, 2300 bp, Homo sapien
aacctgggagatcgaggctgcagggagccataatcatgccaccctgactccagcctgggcaacaaagtgagagcttgtctcaaaacaaataaataataagataaaataaaaagcatctgactcaagatgatttatgtgggtttcccataatcccttccacacacacaccacctttcattgagcgaagtgttccaacccagatatgaatatttttctatcttgctgcctagaggtaaaaacccagtctttgcctaccatgaacctttaagggcagctttaattctggaggcctgtgaggaccacctgaagctccttctagagctgtgctatccaataaggtggccattagccacatgtggctatttacattaaatgtaattaaaaattcagatcctcagcagcactacccacatttcaagtgctcaacagctgcatgtgtctcactatcctttgggggcagctctaactcccaatcctctgctcgctctggggctctcacctaaagctgcagacctgggcctggggctctgctcctccttaggagtcgctgctgcctgctaactcgcccagacgttcttcgaggtgggtggggttgtggcgtgaagcccaaatgccgtcaagggtcttattgctacaatgaaacgcccattccctctacttgagtgaacacagtgtctcagcacccacatgtataaaaatgaaaaataggcgtcgagctgatgccaaacaccggctcaccccagcaatatgtaaaattcattcaaataatataaataatttgagctgtaaaacaaaatccatctcattacaagttgtgcttccaaagcacttcactttttgtctaagaattaacagtaaacattttgaaatatttatataattttgctaataatccagaaaataacactaagaaaaaatgtaatctactttcgttacggacatatatgctaggataaacaataaacaataaaacaatgcatagaactattttacactaggataaaattcaatgaggcacatagaatgaaaatatttttacagtagaataaaaagccggtgagggacataaaagttcaaggaaaaaaaccctaaaagatgtaaaacttatgactgttaaaagtggataataccaaatcttcagggatttagattccattggatacacttgaaagcaattttgttcttaatattaacagcatgccaaaaatataccctttgcaattatttaaacttaatatgaaaaatatttagatgttgctgtttttaaaaaaggctgactatagccaataacttagttgtatatttaaaaataagaatataatttgattgcttgtaacacaaaggataaatgcttgaagtgatggacacgccattaaccctgatatgattattacgcattgcattcctgtctgtatcaagatatctcacgtactcgacaaatagggacacctactatgtacccacaaacattaattttaaaaaaaaaaaaaggtcttcaaagtcattttaggccctgggtttggaagccgacaccggcggtggggtgggcagggggcgaggtcgctgccaagctggcgccccgggtgggagcgtggcccggtcccagggacggctccaggggcgcgctcccactccgcatccccagtgcctaaccgggggcgcttctggtgctgacgaccaggaagggctggtgctctcgggccagcccccaaccagctgagaaggcaatgggtccccagcccagcgctgtcctgcgcccctcccggattccatttcccgccaggcccccacttccgggaacgtccccgcacccacacctggcaatgaatcacgtgttcaggaaccaggtaggcaggtatttactttattacctgtgcccctcccccagcctaccccagaagctaatgggcacggaaacaggaagccccgccgacggcctcctggccgcgcctggagcgcgcgccctgcagctggtcctcaataaatagccgaggaggcgctcccctccctccctcccgccggcgccgtcggcccggaccatcgagtcagtcctccagcgtcccagagagggcgcggaagtgccccagggccggcgcgggttcttccggccgtgcggtccgcgcttttgtcccgctggcggccgggtttccgcggcgccgccacagccagtacgtgagtccgcggccgcccgcgctcccgcccccggcccttgcctgccacgccctcccctttttggccgggtcttggctgctccgcgggtctcgggcgggatgtgggagtaagcgtgccccctccccgca

SEQ ID NO: 35214 - DNA, 2300 bp, Homo sapien
ggtgtgttctgggctcactgcaacctctgtctcctggattcaagtgattctcctacctcagcctcctgagtagctgagactacaggtgcccaccaccacacccagctaatttttgtatttttagtagaggtggggtttcaccatgttgaccaggatggtttctatctcttgacctcatatccacccaccttggcctcccaaagtgctgggattacaggtgtgagccaccatgcccagctgactgaaggttattttaacagctgattaggaaaaaaaaagtgagacttcacattaggaaaagtcctcccatctactgtcagaacatgcctgtgaagggtttgaaatttctctgaattttaggttcataaacaatcaaaacaatcttcagctctgcccaaaacaggaaaacagctggaacaataaaaagtaaaggaccctgtgattcacagaaccaaagtgaatacagctgaaagcagactgtgcctttaaggttgagtttatattgaacaccttgttgaacaagcaggcaaaaatttagtcatccaaacagatcatgctattcttaagcctttgttggactctcatctgcaggctgtggttctaggaattttggtcagagtgggccgtgcttgttatttttcaacaggtcaagaaacagtagaaaaacagcagactgtgaaaaaatacttacaacaaagggttaagatccttaacataaaagagctcctaaaagacaccatgaaaaacaaaacaatttggctaccaaaaaaaaaaaaaaaaatacaaggcaaaagatatcgttatccacacaatgggtgggcttggtcacttggtggaggacaaccacccgcagaggatttagcagggaaattttactacttgcaaggagaccagcgatagctcccaaatcagcacctgcccaagccaagggccaggtcaggttttataagcaaagggtaatgacatgtgatctgattggatattgcaatgaggtgatgcctggtggcacaacctgactggatcttgccatggggtgaggccaaagctccatccgattggatcctggatcctgaatccaggcatgcagtgtcctcttcttaattcagtccctggctctcagtctgagcacttaggtttgccctgtggctgcacactttgtttacctgggtgtgctcaggctatgtgaactgagggtccatggcaactgaacaacaactcacaactttgttacataaaagtcgaaccagattggcctggtgtagctaccataagagtaggcaattcaaagaagaatcataaatggccaataaggattttaaaaaattctcaaccctcctgacgatcagaaatatgcaaatctgataataagatactcccactgatcagatcagccaaagttaaaagtattcgcatttgtgcacaacctagggcactgtgtgatctgggaccatttgcatcagaatcatctagtgggcttgtttaaaggcagattccaattgccaaaaccttgaaggacccagatgtccttcaactgggtaactgacaaactgtggtccatccataccatggaacactactcagcactaaaaaggaacaaaccattgatacagacaataactcagatgaatctcataggcattattctaagtgaatgaagccaggcttgaatgttacacactgtataattccagacttgaaaataaaaaaccaatagtgacagagaaaagccctgtgtttaccaagggagtgaggtggggtcaggtgtgagtagaaatcggtagctaagggagcttgttgggctggtggaacttttctgcatgcattgtggtggttacacaaatccactccctgtgctagaattcataaaacccgcacactccaccactgacctccacaaagccaaatttactgtgtaaaaagtaaacaaacaaacacaacccatatgagtccacctcagacctaaacatcacaatctctagggaggtggggctgagctgatggcttttcctaacaagctctcagtggttctcatggacactacgttttgaggaccactggctggcatcacaatgggggtgaatgtgactaggaggttctatcaaaacatagaatgtgcctaccctccacccagtgcttgaacatcccttccccctcatcactccggggaaggatcctgctcaacacccaactactcattcaaacctggaacccgaaactttaatgaaggttgctctactgagatttttctccccaccgaacatgtctgtgacccacaaagaagcccatgaaagaaagtgccc

SEQ ID NO: 35215 - DNA, 2300 bp, Homo sapien
aggtcattaacatttttagcttttcttttcttttttttttttaaggaaccttaaagaaatgcttgtgtttaagacaaacaggcactccacatgattcccctaagctctgacgatgtttatttgggtacagcctcctcagtttatttgcctggggaggaaactaaggcccagagaagtgaagagactctccctcctcatggctctgtcctctgcgaggaagaagcatggacgttgctgtcactttgtctccaacgcaccctcagtgcctagaacagtgactggtaccactccctggcatcactcactaagtgcaggttgagtgtcccttatttgaaatacttggaaccagaagtgtttcagatttcaaattttttttgattttggaatatttgcagaattcattctggctgagcatccctaatctgatatccaacatccaaaacgctccagtgagtgccttctttaagggtcgttttggtactaaaacagttttggagcattttgtatttttggattagggatgcttaacctgtatttactgaataactcaattaattttaagaggcgaaaggacccataaagcctctgagttgcctaggaagtggccacattaactccaaggatgaggcggacaccttctcggggcaggatcgaactgtttctgatcttcagcatctggccccataaaatgagaagggttttgccttggggtgaaactgaccctggcatctccctggagatgaaaagctccttatttcctaaagattcttctcagagccagaggaagtatgctgaaatagtcacagtgatcatttctcatgaagagatatgagttttaccctctttttaactttcttcctaatttttaaataataaggttgtatcactcacaaaataagaataactttatagcactctgtatacatacatatatatgtgtatatatgtgtgtgtgtatgtatatatatatgtgtgtgtgtgtaaagtcagcaacaacaagccttccccaaagcggcacactgtctgcatttcttcagtgccaacgtgaggcacttatgggcatccccagggacttgtgcgccaggcagctcccatcggccccgacggccagtcctgcccacatgtgtgacatatatggtgctcccagacctccaaggtttggtaagaaagaaaaacacttggacaacacacagccaggccgtgaacgtcacttagaaacgggacccataagagcgaccttccctgcttctcacgagccagtgcatgcccacaccagtccaggccttttcttcttctactgagtgctgcttcccgtctcagctgatagcaccaccactcgtaggtgagtccctgttcaacagaactcagagctttgcatccatggagtgccatgaacaaaagtcaccggtgtttcttagggagagaactgcttttgctcagggtcaggatgccccacctgcttggggtggggaagttgaagctggaggaagagctggctgctctgcagaagttcagaggaattggaagatggggccagggaggatgtgaggaaggggaggaaggcagagacggtgcaggtgactcagcaggaggctggagtctagagggagaagctccttgactggggttgctgaaggggttttagaaatgaggctgtcaaaaaacatcacagctgcctactgcttaatttctagctgactctgtgtttctaaccgtctgtagagactccacacagataaagcccctgtgccacggattctagggggacggggcaagaagcccagtgccagggtaggaaggaggccttgggaggggaggctgaagagtgaaaactcaggagcagatgccgggaggcagaagtgacatctgaacacacagcctccgagacagtccctgggtgggagacactgaggtttctgttgtgcgctggatacggcttaagcctaattttacctcaaatttcaaaggccagggcgatccaagctgatatttgagttccattaccaggcatattccttacaacaagaagaatgtaaattctgtggaaattctagaacttcttttttacatttaaacacaattcctttgttcccatatcctgaaatcagtaaatttaagcaattttatttttcattctgtgcttcagggatctatgagggtcaacacatatttatcacacgctgaccttgtgctcaggcctataggaaaatgaacctccctgcccgcaatgaccttagaacctaactaaggatatggttaaaacaagcgcaggattgggtgagacctgctcaagggtcagg

SEQ ID NO: 35216 - DNA, 2300 bp, Homo sapien
ttaggtgatcggcccgcctcggcctcccaaagtgctgggattacaggcttgagccaccacgcccagccaaaaccaataatttttttttttttaaatcttactcttctgacttctggtgttaatagtctcctcttttcctatttaacccaaaagaaaaatttgagattttgataggaactctgggcatgtggaccttttaggccatactgaatgctgattttgacggtaaggaggaagccatggcaggttctgagtttagggggaaaagcagatggtccaagctggagaaatatatctacaagaagagtatgaataagagagaaatattgcaagtggatgacagaagaaaaaaatcagtatgaatttgtcattcatggtcaagtaccagtttatgaactggttgtgttcttaaacgttcatctgactgttggatgaatggcccaaggagggcagaaggctgcagaagtaattcattggttgctggatagaagcttcaaaaattcacagtttaatgctcttgttttaaagagaaaaaaaaagctagctcagaaaagttgatcatcttgctcaagacctccttaagaattagaaatagaggctgattactgggattccccaggcagtccactaacgattctgtgttgtctctaagcaggaaggtggtaaaaacagttacttaatggcagtgtgtggcagaggggaaagggcaggctgtccaggtgactgagaagcaggcgggagaagaggaagtgaaggcagtgaagaaggaacactctcccaaaacaagaggcagaaagggcactccgggtctgggtcccattctacctagagaaaacatgcaagcgcatattgattgagggctttctacacggggggttttgataccatttgttgcccagaagatatggggtacaagtacagaaatggcgacagatggagtctacaagctctttccaaacgttcacattcctcagaacctcacccgttttctcggccacaagaaattattaatttatttgacaaatattttaaaaatcactattttgtgctagattttgtcccaggccacatggctgtattactgaataagacaactttttttttttttttaatctgaaagttgctggctagtgagacagataaaaagaaagcaaatacatgtatttccgatcaataatacggagtaatatgatagtgactggaggaccaacctggaattgggtggttaggaaaagcctcttaggagagatggcatttgggctgatacctcagcgataacaggcaggtatgcagagagctggggatccaggtgtctggatagagagcacagcccagcaagcctgacaggctcaaggaacagacaggagaccagcatgtgtgtaactcgcttagcaagaagataaaatgaagtcagcaggggtgagccagggcacgtcagattgacgcatgtactcattcagcaaatatttattaagcacctactatgttcaggacattgttgaggatacataaattaagaagaaaaaccactggctcaaggattctgtcgctggagagaaacttcagagtttaataacgttgatagaacacccaaaacaattctgctacagtttagaaattgatccattccagacagaaccacaatgcagacattaagggacacacatcatctaaggccgtgaggtctgaggtcagagatccagccatctgctcccccagggtagggaggtcgggcctccccggggtgagtcacgtagcccacctctccccaccaggcgaggcttctcggtcttggtgcatggggcagggccgcaggaaatcccccagcctaaatctgccgcactcagaaaacccaggcaggggagcccccagagaccaggcctctgattagcacctgattcacggaggcagccaaggctgggtagcgactgctggtaactggcccccggagtcgccccaggggaaaaggccaaagggggatctggagacccccggccggggagcgggctccgagacgagcgcagccgcccggtcagggcagcgcctgcgcgtccgccaggccccgccgcgcagcctcgggtgtcccggcggggcggctcgggccgcgcacgcgctctggcctccggggccggccgcctgggagcccgagcctagtgcctcccacgcccggcggccgcgagccggggtccgcgagggcggagtggggcgcggcagccaggaacccgactacgaatcccagggtgcgggcgggcggagcgaggagggacgctgggcctgcccggtgcgcacgggggcgggga

SEQ ID NO: 35217 - DNA, 2300 bp, Homo sapien
tggtcaggtcacctccactttccctgtgtgagctgctcatgagggcagggccctgtctctctcagtcacacctctacgctgagtgcccggcattgtgcctgaggaactttagccactatgatacgttctctgactttgggcagataaacatgcttatagtctagaaacattttgatctagaaaatcgcctagtgattataactgtagagtcactgctgtaaaaagtgatcctgacacttggttaagccagcaaggaagactctattcgagaccatcacaacaggggaggacgcgactccaatatggcaggaacaagggtggatggaaagccaagggcagggtgagggagtgggtggaataccactcaggggaactggattagacatcggggtggaggaacaggagcttggtggggtcttaggggatacgcttagcaggtctctgctcgcactggactcggtcgggcaaggaccaggccttgttgagaaaaggactcagaggaacctgactaaagtttggtcaaggaggggtcattgcactgccagacagaagagccacatggcaatgatgctctctagtgtctactgccacatcctaaaaaaggcaggagagaccctcgggaatgagagactacacacagcaaagctctgtgcagtcaagcattgccagagaacatcagtgggatccacatccaggacgaacttgcattgttcccgtctttcaagataggaatgataaagtatagactgttgtctcggagtaatgattagcaaagcctcttttcattcttggactgtcccagtttggccgatacattacgtggccccttggctggttgtccctctgcacagagactagctctgggcctagcactgccgccctgacatgagccacaatagatcccctgcaatcactagacatgagccatgggtttttagcgaggcagccggtggtcaggaagatgcttgaagaaatcagctaacatgaagaactgtactacaggctctttggacttcctcagtgggagtgaaggaagataggggagctgcagggttggcagacagtgggggcgaggctaggacatctagggatctgtggtgaagcgtcaccaagacgagctggttgtatgtgcttggaaatcgtggcaagtgatatcgtgagcatactttaacaagtggtactgtgttcttatttaaatttcagagtgtccatgcaaagtgctggcaagacaagaatttgcttcctacttcgcaaattgtgggtgtgaaagaagccaccccaatttctcattgccgacctgctaaatcattccatgcgggggctggaggtggagaggagggcttgcccagaaatgtgtatttttaacagattctggagttctgatggggagtttggtttgagaaccactgccttagaagagttgacattttgcaacaaagacgtgttcttcttaacctgcatatatgtggaggttggatcatttatttaacaacccattgttgactgtcatcctggcctggggctggggaggcagcagtgagcaacaggattcgtttgctgcccaaggagttttccccgacagaaagatgggccttcacctggtcatgccctcgcagcagcatcgccacacaggggacatagagggctactgtcactgagccgggggccaaccctggacttggggctcaggactggccaagggtgaggtgggcgggagtgtaaccgcctgcagtgggcaccgtgtgtgcagtggcctcgtgcagcagagtgcagagctgcagggccgccagggctgtggggccagggtgggcaggcggggcaggggacttggaccctcagaatgcccaccagcactgcagggctgcaaatgaggatgacggggtcgaagccgggccctaaacccagcgagtcgatgggcaccaacccacggccttccacaggccgctggggatgttgggtcacccgcgtgtctgtcagggaggtgctgtactggggaagcacctggcctttgcagggatcctgctgctggatgaggcccccttctgcaataccatccacttagagtctgccatgctcatgtctgtgtctgtctctctcctagatcctgcccggcctgtacatcggcaacttcaaaggtgagttcttgcttttttattgttgtgataaaatacacataacataaaatgtgtcatcttgaccattttaaagtgtataggtcagtggctttaagtaatttgcattgctgtgcagccatcaccaacatccttctgcaggacttttcatgttcccaaactgaaact

SEQ ID NO: 35218 - DNA, 2300 bp, Homo sapien
cacctgcaagggaagtgctccaatcttattttaaaactctgagagtgaagcaatagcacctagctagtttcatcaccttattacaggctgtgaacaagctctgtccatgcttttaaaaatgtgttcccctctgtgtggccagactccctgggatgttttaaaggcgtgtgtgcatgtgtgtgtgtgtgtgtgtgtgttgaggtggacagtatcaaaccctaggtttgaattgagaagttatttccctcctttcagttatcaccgcagctactgccagcgtcaagtttcagcattcatcactgagcaggggcatcgccagctagctctggccttcttttcccatgggaaagcaaatgaaatgcatggtgaaagttctgggcgtgggaacgaagtaggtgcatctgaaatctgagttagagcttctttctcttgaggtccaactttttgttctcaggtttttccccggctagtgggggttaatccacaaggcccttggctccttccgtgagaggtgcagccactatcagtgcaaggagaggacgcggggaagtggctcttagggcgtccctttgccatcttaggatggctgtataggcacagatttccctgtcagtttgtaactctggggtgaacagagcagagctcagaccttggcttgagactcctactcttggaaattattcctaagcagaggagttcaaggatcatttcagctgtgctgacctgggaggaggcagagcctcgccggggtagaataggtacaaatcaaatatatctattttatgaaataccttgttccaggagatcagccccgcagcacccaagtggaagcagttcgaagtctcctttacatgattgtcagtgagagcagatggagagtgcaattaaattgcactatggaatggctccaccctatgccctgaagaagaaaagatctcataactagcaaaggaagataacatttccaagtgtttttggtttttggcttcctggtttttaaaaactgttcctttaagctgaggtttcctgccttttctgatggaaacctctgcagctgctcctacttcagcagtgggcttgcagccgcatggctaccccagtgagtgtcctctagcctccttggtggccggagcactctcttcccctgtgcttccacatgtgggctctgaccgaggtgacctagggcctccttctgtgccatgctagcagcggcaggcgtggagagggtggagggcttggaggagtgccgcccttcctggggaggcctgggagcagtgacccgctcatccttaatcagagcaaggaacacgctctcccacccacacctgctgccgcgaacctcaggcagtgagtgccgcggagcacaggaatgcagcacgtctctaatattaacttgctgcataacagaggggtgtccctcctggtgttgaggagaaacagaagagccgctgttctcatttctctccactctcccaccccgtggacgttctttctgccctgagctcccgtggcactcaccacgtccagcctttgcgtgtcttgagcctcagccctgcccatgcagaactggccagccctggagggcagcaccctgctctgggtcagtgtttgcctctttctcaaaacagcttctagagtatgatcccagagggaggatgtggtgttcggctggagggatcatccgtgctgtttagaaagggcttcctagatgctgcagattgtgtccaagcctgaagacaagcggcagtctacaaagcctgtaacccatctgcagctgagggacccattccatcaccagcgaggggctccgagagctcactggcttagccaactgcaaaacaggcacagtgttcccagcagcgcttcgtgcctccctaaggagggagctgtgtttaaggcaggctgccgcatcctgccgggaaggggaggctggctcagggagataggtacagcacacagcttgaagagcagtgtggccctctccctgctggtgcctggagagtcatctgccctgggcttccgcatcctcgtgtgtgcagtgctgtacctgctggtgcctagagagtcatctgccctgggcttctgcgtcctggtgtgtgcagtgctgtatctgctggtgcctggagagtcatctgccctgggcttccgcgtcctggtgtgtgcagtgctatatctgctggtgcctggagagtcatctgccctgggcttccgcgtcctggtgtgtgcaatgctgtatctgcgggtgcctggagagtcatctgccctgggcttctgcatcctggtgtgtgcagtgctgtatc

SEQ ID NO: 35219 - DNA, 2300 bp, Homo sapien
agagttacaaaggcaaactagaaacgtgggtgggcttaggggttaggtaggtgtggcagtgccgtgtctggggcttgtgagtggaggatgcgccgtgctgcactctccagtgaagctacgacagtaagacttctgtttcagctgaaaaaggaagtcaggaccgtagctcatgaaaaggtggggaaaagtggacactctgctgttgggagtcatgctcttgtgtgatttttgggggaaacgtttatttttaacccattagtaacagcaaatcttgtgaataagtaaggcttcgacacacatatgtccatgactgtaaatattgcttgctgtactaaagttatgtggaaatggtggagctgacttcggaactttgagtgactcagcttgttaagaggcaggcgatgaaatagcttgagtttctttttacctgttacaagtgttctactggaaggcatagtgtactttttaatggtgagcatattttcaccatgtaatcaaatgattcccctcaagttggcaggcagaacacctacctctctcggggtatttattaaggtgtttattaccaagtatcaggtgctgacaatcaacttttgctttctgtatcatcaaccaatgaggatggtcagacgacaaatattcgtatttctctagttaacaaaagcaaaagaagtcttacctgtcacttggaaactgtgttctgcaggacctaaacaatttgaaatagtagctctttagccacttaaaaaattctcggtgcttcagagtttctctattcaatgataaaataaattctggaaaactatgttgctcattgttttaaacttaagtacagattttaaaaatgaatgccagctttgatgtaatttaacactctatatcttaaatttttccccacaaatccctgcacgaacaggaattctggcaagttatgcttagtaagagatgtgtgacctttgagactagctgttgtcacttgacattcagttgctgcagactgcccggaaaggtcagttttctgtcttggcctctatcctctcaaatctccctctctgatcttccaggaacttaaaatgcagaaacctagtttgagataacattaacatgttagaatttcagctcagttccccaaccagctagccttgccaagtcaggaaatgtaaaagttcaagttctcagagttgtaataaccccacagacctactgtggtgtgttttgcatgattttgtcatgattagaggcgtcctagagtttgtatcaaatgcacacactgcgtgttccccaagtggccagcgtggtatgggttagtgaattaagggctttggaaatactcacttgcttttgctttctctctgggatttcttagaaaagtcattttaacctctcttctctcatctgtaaaatgcctatctcacagggttttttatagtattaggtgagatgatataagtgaaagtgttttttatgaacactaggcatttctggaaatatgattatattttctgtctattcaagtaaagagtattaatatgttttgaaagtgaatggttagatgcatattaacttatatttactcatcttgctttaatatatattacattggcattttgtactttgacatcatgaagcaagtaattacagattttttttttctttttctgtgaagtccaagggcatttgatctctgccaggctatggagtcggtatacatcattgcagtagcgcctttgtgacattcagtggttttagaatctagcaggtctgtaaatttcttgaggtttttgtggggagaagaagctttagcaatacagagagcctatattgaaaacatcggtaaaacgtccttgccttattctatctccctatctttttgtctatattttctttaactgacaccttctgtactttcaactctctttttctctcatttacgtttttcttttattttattataaaggagcacttttgcaagatgagagctagttgggcccttggactactgtggtcctgcttccagacagttcctgagggctctgccagcccatagtgatgttctcctgctcaaggagaaaatgagagctgaaagtggcattcagttttccataagacttcatttattccacttaaaagaactatcgtttagtcttagattatgtccttctttttgttgttgaaatattcttctgggaaatgatgttgtagtaagtggtagagaggccctttgttttagtttgcttttaaaaagcccttatctggccaaatgaaaagtacaatatatgcatcccccaattctattttta

SEQ ID NO: 35220 - DNA, 2300 bp, Homo sapien
tgagcacctgccgtgaggtcgctgagtttcttctgcagtcagtacctgggtgagtttgttaggccgtgcctgaatttctcattcttattacattcatgtgccctggcattctgaatgtcttacagtttatcagagtccctggcaaattgtcagtactcagtcagtgtttaaagagaagtcagtttagtccatgggcaacttttgctgttttataagccattcaaaggtagaagacgttggagaggtacatgtgctatccatcccgaggtgtcagcacttaacccacaaaccagtccagaatgaggtctgagtggcaggggacacacatgctggttgggagcgcaccacagtggggctcgagtcctgcctggctttgtgcctcagggacttggcacaaggccgtgcaaccaggcactccctgaacggttagggggctgaatgagtgacaagagaaaagggcagtctgaaaaactaaagagttagaagaagaaaggattaaggcacgcgtcatcatttagaacttagttctattatttgtttatttattgagacagggtctcgctgtgtcgctcaggctggagtgcggtggcatgatctcggctcactgcagccttaacctcctgggctcaagagatcctcccacctcggcctcccaagtacccgggactacaggcatgcaccaccacacccagctaatttttttttggtattttctgtagagatgagtttcgacattttgccccggctggtctcaaattcctgagctcaagtggtctgcccacctcagcctcttcaagtgctaggatgataggtgtgtgccaccgcgttcagtccatttaggacttcagagtttgcagagcatattggcatgtattacctcatctgccctgtgagataccagccccactttataaatgagaagataaatggcttgtcctgggccacacggtccagtaaatggcaaagagggattggagccagaatttccatttccccacagctctccactgagctgcagacaggactgccaaagtcccgggagaccagtttgagagaatgcttttagattttccagattgccaggagtaaatcagcttttaggacttggaaagcccacacgacgtggtcaccttcctcacctgcgtcacggtggcctgcaccatccacagctggtgtgagggttcctgctgtgctgctggggcattgaggggctccgattgaacatggggggcgccgtccagaacttccctcaaccccagtctgtggtaactatgtgtttcagggatttcttacagagaaattccaaaacttccagacaacccacagccttccctagacctcagcattgtaaataatggattctgaggctgagacagctccagccacagacagtatgaccaggttttgatggtatgggactaggagagctttcagtaaaccacaggaagaataaattctggtttctttcttttttttttttttttcctctgttgcccaggctggagtgcagtcgtgtgatcttggctcactgtaatctctgcctcctgggttcaagaaattctcctacctcagcctccctggtagctgggattacaggtgtgtgccaccacacccagctaatttttgtatttttagtagagacagggtttcaccatgttggccaggctggtctcgagctcctgacctcaagtgatccgcctgcctcagcctcccaaattgctgggattacaggcgtgagccaccgcacccagccatgttctggtttccattacctggtggattatttgattatagcaaataataatgtagtatatgtttcaagatagctacaagagaagcttttgaatgttatcactacaaagtgataaatgtttaaagtgattaagcatttatcaggtaattatcctgatttgattattatacaatgtatacatgcattgaagtgtcacactgtagcccataaatatgtagaattatgtgtcaattatacaaaaaaatcaattaacattttaagaaagaagcctcaggtagaattttcttttcatcatatattgagtaaagtagagagatgtcatttctctttttttcttttcccaggacaagacatttcaaagaaagtattaaattcattcacgagtgccggctccgcggtgagagctgccttgtacactggtacgtgtgtctcttgcttaatagcgccttagcgtattctggtcggcttggcttcccatcaagtgtttttccgtgtgtgaataatggtttcacctcctaatagttttctgtaaaccctgactctcaaa

SEQ ID NO: 35221 - DNA, 2300 bp, Homo sapien
tgtgtgaataatggtttcacctcctaatagttttctgtaaaccctgactctcaaacgcgtgctccatttgtccagcgctgtgtgttagtcgccctttccttctgttgaaggagaaccctaactcgttttgcttttgtttttttcccatttccactgctaggatttctgtagggaccgtgaaggttactggacaacagaaacttccctttgctggcttgcctccagcatttcatcagaacagcctcttacagatgacccagattctgtaggctcatccttgaaacctcagtggctttttgaagacactgttgttttttcttcaggagacttgattgcaaatgtggattttcagtatcgcgctactgtgacaccagaatgacccagtttagtgacggctgtctgtttgcatcctgctatattttgtgtagacacacacacacacacacacacacacacagtgaaaagaaagctactgtatcacgcttaacccgaggatgatgcatctgaagcgcttggcagtgtgcctggcacatagagagttcttagtgaaagtgggatggcatttttatgaccactcgtaatcatgctaataacatggctaatttgttcagggaaccagtagccaaaattcaggagccaaggctctgttgtctaagtgctaggccggacatgtcccctctctgtcttgaatgaagtgtgttattaattaactggaagcctaacagtcttttgacattccccgaaacagttcctcttgcactgtaagctctttaggactgtgaagtgataactcctggggaatattgctgctgaggttggtggcagccctgccaggacagaggggacccagggacccagtgcatgacatccagagaagccacctatgaaaactataatgtgttctgagggccgatagggacgacagggaggacgctagatagttgagttgtttttagaatggtgtctgcagtttcatacagttcttgaaatcacatgatttttcatctcacttttttaaagagtagaaagtgtaataaatacaaatggtaggattttaacgttcatttctgtttggctttaacataccttgggggttcaattggagccaattaaagcggaattctggaactcccactcctgggcttctcctggctcctagtgaaggtgaatctccagggttgcagccccagaggatctgtcttttaagatctctcctggtagttctaatctaaagccctagtgaagagccactacttgagagtggggttttaaaattattgtttatatttgaatatgtgtaggcctgatattctaggaattaatacttcatacagttctgtgcacctaaagataggcttttctaaaagtgagacatttgctgaacttccccatcttaacctgttgctagaactctctaagtctgatgaagcacagccattctgtgaccgccttcatttgcatgtacatgtaaaacgggtctcactcagcctgctccaggtaactgaccctaaccgttactgcctgcaagggtgccttgctcccaccctgcggacacagtgtgcctgctctgtactctgcatatttatgtcaggaagagtacaaaagtaagattgggtaagggcttctctacatcatgggctttaaaaattatagatctagccctcatatagctgagaaaactcgacttttaaggaacatgaagcattctaaacaaatgtaggttataaatgggtttgtcgcgtaggccctggaagcctcgtttccttggagtacctcagttatgtcgtttgtccggggaaatgggaaagacctgaggaggggctgaggagcaagggagcatctggagccacagcccatagaaaaccaataaaagaagctcaaacagcagaagaaagcatgcgattctagtgccaggaagcatagggagctggtacgttgagtgctgagtggcttcctggtggcgagcttgctgtccacatataatccaaggcaggaagactttctgaacaaggtccttagagtcccccgctccacatggattgggcgatgaacccggagatctgaaactgccctcacacatgtgcttctcttggccccgcagcctggccggggtctccaggagcgtgacactggtgatcgcatacatcatgaccgtcactgactttggctgggaggatgccctgcacaccgtgcgtgctgggagatcctgtgccaaccccaacgtgggcttccagagacagctccaggagtttgagaagcatgaggtccatcaggtaagcagttcttaggggacatcagag

SEQ ID NO: 35222 - DNA, 2300 bp, Homo sapien
gtgattaaaatgttttattacttgtattcacatcatcattaagaaaaataacttctagtggatcaatatggcaaatgagtaaaccagaagatggcgttgaagattagcaattacatttaaaaacaaggtagtggtgtgaaggctcagagtttcacacaacgactgttgttctgaactaaaagcagaggatgtggatgagtgaggggagggtatgttgaaaatgactaaacccggtgcagaggacacgtatacgaaagtgcaaaaagctctcatttgccattttttgtcctcagcaaactcctctctggtatgtttgtgaacgtttgagggaaaggtaacactgattaaaatataatgcaacaagaaggcaacgatctttgctttgttcactgatgtgttccaagtgcctaggacggttcctgacaagtagcaggtgctcaaaatacatttgtcaagtgaataaatctgtgaaaggaaaggaagaaaaacaggttgtgaccagaactttttgtgaacaaaaccctgttgtttattacatagactttggtaatggaaaacttacttgggtgaaataaaaaatggcatcctgttaatttctgagaacgtctgttggttttaggaaaagcatacctatccatacctcactacctgttttgctctagcctaaacatagattcttctttggttaggagacattgacccaatatataagattaaaacaaaaactgagaaataagtgaaatcaaaagcttttcaaaagttgcaggttgacctacggtggtggtggtctaaaatcatatagaaaccagagatctgatggtttacctgaaaatgcgaagtaaatgcacatactcagcatctcagacgatcgaaagctcaacgggtgaaagctcagggggttaattttgcgattaaggacatcttggaaaagtatgtaaaatccctggtccacttaagtattattcctattttgggcttttatttatttattttgagatggagtcttgctctgtcgcccacctcggctcactgcaacttcagcctcccgggttcaagcgattctcgtggctcgtcctctcaagtagctggggccacgcccggctaatttttgtatttttagtagagatggggtttcaccgtgttggccaggctggtctcgaactcctgacctcaggcgatccaccgcctcggcctcccaaagtgctgggattacaggcttgagccacagcgcctggcctattttgggcttttataccccactggtaaactgctttcctccaggttgaggttaaaacgacatcattttaaggtgaactgaagtctggaagtgattaagcacttggatccttagggagcctctccccgcccccatctctttcatgctaagataattaaaacttcggggccggggcattgtctgagtcacttcaattcaccagcctaatagatgcaaaaggatgtaagcatgtcagacacgcagagacagtatttgaatcaagcttaatagctcaagggagctgggccatttcctattttctttttagtgagtgcgatgttctctaaacaccgcggagaggcagggttcccggtgatggccttgccgagggtgctcccgcaacctccacctccagttctctttggaccattcctccgtcttccgttacacgctctgcaaagcgaagtccccttcgcaccagattcccgctactacacgccccccatttcccgccctggccacatcgctgcagtttagtgattgactggcctcctgaggtcctggcgcaaaggcgagattcgcatttcgcacctcgcccttcgcgggaaacggccccagtgacagtccccgaagcggcgcgcgcccggctggaggtgcgctctccgggcgcggcgcgcggagggtcgccaagggcgcgggaaccccaccccggccgcggcagcccccagccttcacgccggccctgaggctcgcccgcccggccggccccggctctcggcttgcaaagtccctctccccagtccaacccccggcccccacaggcctcggcgccccgccccgccccaggccccgccccagagagttctataaagttcctctttcccacctcgcactctcagtttcaccgctcgatcttgggacccaccgctgccctcagctccgagtccagggcgaggtaagggctggagtcgggcaggaggaggggtgtgaggctgataccagagaggacccggagcgcgaaccagaggttcgacctccagggcagcgcagggtaccccggcttcggagcgggaagggagcgcgc

SEQ ID NO: 35223 - DNA, 2300 bp, Homo sapien
gtctttcagtttacgttctgagcaacggtgtaaatctgaaggacctatgcgccattctttcttttagaaatacaatttcaagattccttataaaatatctgtattttgggtttagcatggtggctcacacctgtaatcccagcactttgggaagatgaggtggaaggatgcctatgcaacatagtgagaccctgcctctgcaaaaaataataattaaaaaaattagccaggcatggtggtgaacacctgtaggccgagggcccagctactctagaggctgagataggaggaccctagaactcaggagttcgatgctgcggtgagctatcatcgtgccactgtactctagcctgggcagcagagcaggactctgattccaaaaagaaagctaataaaccagacatgtattttgacttttcgttctcttcattctttcccaccaggcttgggcactgtttaaaggaaagttccgagaaggcatcgacaagccggaccctcccacctggaagacgcgcctgcggtgcgctttgaacaagagcaatgactttgaggaactggttgagcggagccagctggacatctcagacccgtacaaagtgtacaggattgttcctgagggagccaaaaaaggtaggggctctcctgaatttgggtcacctaacagaggcagccagatccttgaggcaccttaacttcattctgagcatcactttctagctttccttttgtattgcctgcctgcctgccttctgcctcacagtgaagcccagcctccttgcctgagttatgtgggtcacaagttgaaattcctgtggggttcagcataggagaattaatcacactgtatgcctcaatgtatatgggggggggtgcattgaatatgtgttttccagttagtctttcaaaaaaaaaaagaaaaaagaaaactggataacttgttaaaatttacttatctaatagtctttagtgagtgactattttgcagaaaaggagtaatgagaggaatatctcatcactatgcatggtaataaaactgtcaacttttaaagtgtaacatggtcagctgaggtgtttattaaaagtcagattcctggacccctcttttcaagattctgaccagtgtgtctggaagagagctcaggaatctgcatctggaacaaatccttcaggtgacctcacttgggaaacatctggctggcggggtcctttatgtcacaaggcacattcgcatgccatctgtcatgtatttctttacctgtcctgtacaactcagaccttgtagaaaaaaatcagtttaatagcatgaaaaaataacttcccaagggagttgctgaaaaataccttatttgtcaacaccgtgttatgcattctaagaattaaatgctcaggtatttttacaagatttgacatttagttaggtcagttcctgtttttacgttgtgccatttcccttttccccaaacatgtaggagccaagcagctcaccctggaggacccgcagatgtccatgagccacccctacaccatgacaacgccttacccttcgctcccagcccaggtatggtggagggcactgggctccctgagggcgaggctgtgtgggccagctgcccacatggccagagaaccacagcagcccagacagcagaacttgccatttgctatggctgctccaacagcccagaaaaaccccaggtcactgaacgaatgtctcactttccacacggtgctgccattggtgtggattttaagttggggagggtcgggcgtgtccgcctgttggaatatgcttctcaggtcttctgggaaacagatgttttgtggaagtggaagattttggaagtagtgccttatcatgtgaaaccacagggcagctgatctcttcaggctttcttgatgtgaatgacagctttgtttcatccactttggtgggtaaaagaaggcaaattcccctgtggtacttttggtgccaggtttagccatatgacgaagctttacataaaacagtacaagtatctccattgtcctttatgatcctccatgagtgttttcacttagtctgatgaagggttcactccagtcttttcggatgataaaatgcttcggctgtcagtctaataagggattccctgaggagtttggaggctgtaagagcaccccccgtctcaatgccagtgcttcttatctcagcctctcctgcactcctttacccccgtctcgatgccagtgcttcctatctcagcctctcctgcactcctttacccccgtctcgatgccagtgcttcctatctcagcctctc

SEQ ID NO: 35224 - DNA, 2300 bp, Homo sapien
gtggtgccacctcccaaaatctcatctgtcttcttttctgttatcatcattctaagcaaggcatcccccacccagtcaaaaaaggaacatagtgaagaaggacagtgttaccgaatgtgaatgggacgccctgtcctggctgagatgctcacgcagtaggcattagactttggagtgagtggcgtctcgctgtgcagggttgatagaggaactcctcgagatctggttttgcagctcacattccctgttcttctagggaccacagagggagaggatgtgtagagaggcaaggagggtttgtgcagagatatctgtggggagagctggggtaggccatgaagtgggaggatgcagagcatgtgaccgtcttcactgaggcctggtgagtgggacctccaggtgacagtgttccctgcagctgtgagacacagagcctgcatggacagtagaggtggctgcattttaggggtgttctccatgtccaggtgtgcaagcaccttgctagagagagtgggctccaggccattggaagttgtgcctatgggcactggtcacctgaacgtggaggggctccagcagggagtgtctgcggtaagactgagaccactggaggctgaggagtggcaataggaagcagatgcatccatgagtcatggctggaggagtcctccagagccctttagggaacccgtgaaaatgcccccaagactcaagtaggttcgaatacctggcaggcagagagcacagaccacctatggcagtaccaggcacaggccccgaaggacattccattcttgtctctctgtccatcccacccttaacctctacgagagagctgccatttttcccccaaacgagtaagcagcctattaactattgaccttggctgggaagagggaagaaaaaaatgttacctttgggtgaagttggagtgtggatcacgaactaagctgcctaatttctgaattgaggctgtgtttgtaatgaggagacagcaagactctcccagagaataccaaagtcatcggacctacccacattaaaattcttttggggtaggagtgttttccccactgcgtaactgttaaagagatactaccctatcaaatgatctgtgtctggtttataccttatgagttgggcttgtccagtgttttggggtaggggacacatcttagagggggcggcaaatcagacgaacaaagtaaaccccaagatggtggagaccaacatgcgagacagtatagtccctttgaggctgccgaagcgtcaggtttcatgcctagagtggcagaaatgagccctgagggacaagcagattcagttcatagacatgcttggatttcatcctgcaaatggggcagggggcgccagcaaaggctgccacgttgtgagcctcggtgggtacatctggcatcccagcatggaacctgatctattgtcgatacttgattaatagtcgaacgaatatataaatgaattgatccagaagtcagtcttaaacatgtaggcaagatgagggagcagcagattatgtatataccctgttgttatcacaagcttttcttaaagtcattctagacatggacgcaaatgtgagtgctttgtgattagatgtggttttattagtactttgatgatttcttagtatgtcttaaaacaactttcatctaggttttaacaaaaatcattttaacaaagtgatttaatattttagaatttcactgtattcaaattttgatttttatacattgaatggggattgatgtcatattttgataggtttaataaaactgtcaactcagccagatgtcttaatcctctttaaaccttatattcttttattgatgtaatttctgtatttcaactagtttcctatcttttctatataaaatcaaagtttaagtgatagaaaaatcagccatgatgtgggaaatatattttgtacatatatacaaacatgttctgggtaatgtatgattaatatgtattgttgtaatggttagtattcatatgtgttatactggatacttagtgataccttttccatttttgtcataataaccattgaaatatattttaaacgttttttcccctcagaagtaaattttcgcagaaggacttagaaatgctattccatggaatgagtgctgattttacaagtgagaatttctcagcagcctggtatcttatagagaatcactcaaacaccaggttagtggatatgggactgtcaactgtgaagggtttcactcagatgctaaagatggaattacacggtaactcgagttttaggtctg

SEQ ID NO: 35225 - DNA, 2300 bp, Homo sapien
cagccagtacttctctttataaagaaaataaataattttgcaaattgtttttttaatcttagagcatagaggctttctgcagcattgttctccacaaattcctagattatttttataaataaaaattcaaggaatttcagggaaaattcagagtggactttatatatgtacatgtacgtgcatgtgtacatatatacatatataacatttctatttttgtttactctttttatttagtgtcttcaaaaactaaactgaaactaaagcaggaacttgttgtacagttttctagagggacttaaacattttgataaaaatctaatatcttatgatctatttatatagcagataaagaaaacttaggcaaaagtggtaattttattattctggaatactcattccaggacctagcacatagtaggcttagtaaaggtttctttttttttttctttttgttttgagacagagtcttgctctgtcgcccatgctggagtgcaatggcgcgatctcaatcttggcttactgcaacctccgcctcccaggttcaagcaattctcctgcctcagcctctgcagtagccgggattacaggtgcgtgccaccatgcccagctaatttttgtatttttagtagagatggggtttcaccatgttggtcaggctggtctcgaactccggaccttgtgattcgcccacctcggcctcccaaagtgctgggattacaggtgtgagctactgcacccggccagtaaagctttcttgaactgaactcaagagtgcctggacttgagcagaagcccctgttgcatgctggcagaaccacgagtgctgagagaatgagtgggttcatagagggccttgcagctacaggttgcctggtattcagacagccttctcccatgaagccttctgatcctcgcctggggaggcaggcacgctttgtctgtgctccctggcacttggctctttttctgttgcagcccagggccttggaggcctagctggtaagccctgtgctaggttgaatgataacggagttcagtcccataaaggaagatgctgtttttagagcttatgttgtcttgttcacagggtccacacccagtcagttttccctgaataacctggttatttccattatacaagccatgcgttccttgaaaggtgtttgatttaatcgttagatattttattgaatttaccaaattgatttcagcctaatacggaaaaaaatccctgctgtttctaccatctaggacatttccagcactgataacagcaaaaagaatgagaaatagcaagtagcatattatttttgcataactattcatgaaaacatgccagagtttgtagaggaaaagaaaataaaagatatttcttgagagctttcaagaaccatttaaaaaacatttggttttcatttgtagtgaaatgtccttaggtagcttatggaacccagaagcagaaactcacagtattaaatataaaatcatatatgcataatggtttttcggcatttatcataaaccagaagctttccactgagctaacattttactcgaatgttttgtgcttggatatttcccagacattttccaagagtttacatgatttcagaatattctcttgaataaacagatattataggtcatattatttcatcttactgactttctgaattttttgtgcagatttaatcagctacatttaacaatgtttaattgtagtgtttattatttgtaaaatatgtttgttattgcaaaactttgtctaagcagcttaatttgtcttctctgttgagtaatgtacaatgaaaccataagctgagaggtgtaatttttgcctttttataaatttttttagtgcttataattaaactactagtcattttttaaaaatttagctgttatgtcctcaaatctcttaaagattatccaacaggcattttgtattaggtctttaagaagtcagacaataggccagacgtagaaggtgcctggggtaggcttcatcttattaagcatatgctcctcatttctgtaggcattttggatcagtctgctgtgtgggttgatgaaatgaattattatgatatgcgcactgacaggaacaaaggaattccgcccttgtccttacgtcctgctaacccgcttggcattgagattgaaaagtgagtaccatcttgctttcagtcttctttatttttcagttcctgaaaagttttatatacttacaggaaagggactcaaactccagaaacatcccaggaaacacagttgaagacacctcagttgtttggaga

SEQ ID NO: 35226 - DNA, 2300 bp, Homo sapien
aacagaactgaataattcattgacagtcataaaaaatggtttgaataagtgggaggatttaatgtaaatattttaaatatcttggctgggcgcagtggctcacgcctataatcccagcactttgagaggccaaggtgggcagattacctgagatcaggagttcgagaccagcctggccaacatggtgaaacctcgtctttactaaaaatacaaaaattagctgggcatggtggcaggcgcctgtaatcccagctactcgggaggctgaggcaagagaatcgcttgaacctgagaggtagaggtcgcagtgagccgagatcacgccattgcactctagcctgggcgacaaaagcaagacttcgtctaaaaaaaaaaaaaatatatatatatatatatataaaatatatatatatattttaaatatcctgaaattatcttgaaatttatacatttcatacattcatttaaaaatttgtgttgaacaccagttgcatggcaaatactgttctaaatgctgggtgtacagcagtgtatggaacagataagaactcctctaacttacatcattgtggttagagctagacggcaaacaaagaagtctaagtatgtactatatcaggctggtgataattcccatcagaattccaggaagattatttttagactctgacaaaatattttagaattcatctggagcagtatctgtgagagaatgagagaagttctgaaagattgtcctattcgatattgaaatataatacagaaattaaatcactggtacaggttcaagatagggcagtgggagaaaatatagagagggccaggaaacattcaagcaaaaatgagaatttttgtctaaaacaaaattgacatttcaggttagtggagaagtggattgtttagtgaattatgtgtatcagctaggcattcggtactccaaaaaagatttcaactgagtcaaacaactaagtcataaaaacagataacattaaagtaccagaaacaggactttgaaagcatgaccctagaagtagtagagaaaaggtcaataggtttgacatgaaaatactcagtatttcccaagggcaaagaataccaaaaacagtgtgaaaagtcacatgataaactggggaagatatttacagtacatgtaatggacagagggttaatgttcttgctagatatcttaaaatcaagaaaaataaactcagtaaaaagatgcaaagggcataagatggaattcacacacagtgcaagttgaattttttttttttttttttgcctgccagagtgctacaggtaaaacagattgctactacccagtgttgctggtgggctagagtgttcatgtagctttctgcaggccagtctgagaatatttattaggattttaaaagtgcattcattgaccagcacttcacttctgaatttaatgcaaggaaatagttgggtaaatgggcaaaactattttgtacaaaaatattcattgtgttcataatagcaaaaaattggaaatcatccaaatgtcatttgtgttataactccatacactggaaaagtgagcagccatgaagatggtgtagatttgtttcaccagcatggaaaggtgcctgttacatatttaagtgtgaagatgaggttgtaaaatgtatgcctggtatgctatgatttcataagacacgtggaactatatcttcttatatgccgattgatgaagatggaatcagtgtatataccaaagagattaaaagtggttctttatctgagtgatgattttgtcttcattgtgtttagaatactaagaagtttcagcagtggaatgcctactcttcttataaccggagtggaaacggaagcattttgtgagagggctggagggaaggtgagaacgggcgttgggaggcccttccgtggctccaggcctagggctgcggaacccacaacagaacccgcaaccgcaaccgggaacccgagtgcctgcctagctggggggccggagggagggcggggagggcagcgccacggaccccagcggaccggaagggcttgtggcacgcggaatccccctcagaggcccccagctgccttccctgtggcatcatgaagtttcgcgccaagatcaccggcaaaggctgtctagagctgttcattcacgtcagcggcaccgtcgcgaggctagcgaaggtctgcgtgctccgcgtgcgccctgacagcctgtgcttcggccccgcgggttccggcggcctccacgaggccaggctgtggtgcgaggtgcggcagggggccttccagcagtttcg

SEQ ID NO: 35227 - DNA, 2300 bp, Homo sapien
agagtagctagatacagagtgtcgattggtgcattcacaaaccctgagctagacacagggtgcggactggtgtgtttacaaaccttgagctagatacagtgtgccgattggtgtatttataatccctgggctagacataaaggttctccaagtccccaccagactcaggaacccagctggcttcacccagtggatcccgaccggggccgcaggtggagccgcctgccagtcccgagccatgcgcccacactcctcagcccttgggtggtcgatgggactgggggccgtgaagcagggggcagcgctcgtcggggaggctcgggcgcacggaagcccatggcggggggggttggctcaggcactgcaggctgcaggtccccagccctgccccgcgggaaggcagctaaggcccggggagaaattgagcacagcagctgctggcccaggtgctaagcccctcactgcccagggccggcgggttggctggccgctccgagtgccggcccgctgagcccacgcccacccagaactcgcgctggcccgcaagtgccgcacgcagcccgggttcccaccagcgcctctccctccacacctccccacaagctgagggagccggctccggccttggccagcctagaaaggggctcccacagtgcagcggtgggctgaagggctcctcaagcacagccagagtgggtgccaaggccgaggaggtgcccagagcgagcgagggctgtgagggctgccagcacgctgtcacctctcaaaacaatgttttagtagaagtatatcccatgcaacattagtttagtgataaatatatctatactacaaattacttgttgtttatctgaaattaaactttactgggtatttgtatttttattgctaaatctgccaacctaggttgttgaaacttacttttttccacttcacttaatattcttttcacagtccactctgacgagatgtagcttccccacactcctttgaaactgcttttgtcaaggatgccaatgactggcatatgccaaactcaattgtctctggagtcttggcctcacagtacttctgaacattggctatcaattcctccttcctgaaactatttagcttccagaatccgctacccccactttcctgattgtccttcctccctggccatagcccctgaacccgagcttcccccaacctagagcatcccctgaccctaagtatccccccaaccctgagaaccccctgaccccgagtatcccccgacctcgagaactccccgaccccgagcatccccccaacccccagcatcccacgaccccgggcatctcccccgatcctgcgcatcccctgacctggtatggcgccctgacccagtgcagccctcaaacccctgcagccccctgaccccatgcatcctcctgacctagggctgcccctgactcaatgttgcccccggaccccagtgcctcctcctgacctgaggcacgccccccaacctggtacagtcccctgattccagtgcatccttctgacccagtgctgcctcctaacctggtgcatcctccttacccagtgtggccccctggggatgcacactccagtgcatcctcctgacctgatgcttcctctggtctcggtgcagcccccctgacctggtgcagccctctgattccatgcattctcttgaccttgtgcatccccctgttccggaggggtcctctgacccgatgcagggcccatcgttgtgaactgtggcccacaaacgcactatcatcccacagtctccctgagatgacccgagggcacggggatggatggtgcacccggcctgccccttgagcttgtatccttctttccctccctcaccgcttcccgccaccgcaaagacgcccagcaaaaacctcctactcgtgtccattcaggcagctgggtccctcggaacccaaggcattccagcgtccaccgcccacggcccctgctgacctccagcacccgcgccggtctcctcccctcctctaccctcccctgaaggctccgcccatcgaggactcggcgctcgactgccaggcggatctacacgctcggcgctcgcggcgggcggaagtgaggtgccggcggctggcggccgcggagtcttcggcgagacctaccgggccctgtctgtgccggccgtgagctgcggcaggacggctggaggtatgtgtgggaggctggagggcctggccgaaggccagcgggacatggacgtcagctgcacggaggtggccgcctgcggcgtccgtccaggcctcagcggtgaaggg

SEQ ID NO: 35228 - DNA, 2300 bp, Homo sapien
gatttggatattgatgcaatccagaaagagcagcagagagaccagcagatttctacggagttttagtggaaatctgctcatgtcactggctagttctaggccttaactttctcatctatgaaatcagaggtttggtctgcgtggtatcaaggtcccttccatctctgacactgagcccaaagccttgcagggtggtgatttattttggtattttatcaagtgccagcatcatttctatatttctcagagacctcaacaagtagggtgcttggaaacatttgcacatttgctgaataaatcagttaaaccctatgaataacttacactggtatgaattcattagataattctctggaagccacttggatggatggaaggtgctaacaaacgccaagagctgccggtatggtggtgaaaagacagaagacaagaagagaagcagaccgcggcacctgagggccagaggggcaggctggaaggccacagctgcgcatgctccgtgggccattcctcccagagctgccctccctgggagtgagagcagatgctacggcagttcacagttcttgattttcctgtggctggaaattcctaaacttacaaaatctcaagccatgtatattttgaaacagtgtggggattcctcagggatctagaactagaaataccattcgacccagccatcccattactgggtacatacccaaaggactataaatcatgctgctataaagacacatgcacacgtatgtttattgcggcactattcacaatagcaaagacttggaaccaacccaaatgtccaacaacgatagactggattaagaaaatgtggcacatatacaccatggaatactatgcagccataaaaaatgatgagttcatgtcctttgtagggacatggatgaaattggaaatcatcattctcagtaaactatcgcaaggacaaaaaaccaaacaccgcatgttctcactcatagatgggaattgaacaatgagaacacatggacacaggaaggggaacatcacactctggggactgttgtggggtggggggaggggggagggatagccttaggagatatacctaatgctagatgacgagttaatgggtgcagcgcaccagcatggcacatgtatacatatgtaactaacctgcacattgtgcacatgtaccctaaaacttaaagtataataataatttaaaaaaagaaaaaaaaaagaaactattgcaaatggaaagagactttttttttctgttccttgctttgtattggaaagctaggtaaagaacacactcccaaaccattagaattcaatgacaggaaatgctgtagtattgcacaaaatgaaattcctgattttactgtgaaaaggaaatgatacccttttcaacctaacaaaagagttgatttgccaagaaaatgggctcaactggaagaagctgactaagaagaaatacacagtcagtgcttttgttcccattcattctacctttgcagataagaatttttaaaaaatctctcctatgattcccacaaatacacagcattgctatttgaaaaataacaaagcacaatttgagtttcatatttgctgtttggctggagtgatggctattcatcttctctttacccaggccattgttcctgcccacataatcacagcttgaagagctcgcttgtgagttccttcctttgcaactgtggtccacactagctactcaattagttcatttcttggttgtaagaataaatagaatgtgtacatttccttcttgtttaccaatgcaacctgaaggggatccaaaaatttggcctggcttgagaagtaaaaaaggtttaggctcacaacagataaaacgtatcccaagccgggacaccacggtgctgcggaaaaacccacccttgattttcccctcgtcttgtcttcagttcagcatgatgagctggaaagctgcaaacgctgtagtgatgatctgagaagtgaaacagaaagcaagtgaggggaagcaggagtctgtacacatgtgccctgaagaatcctttgctttcgtctttcctttttcggctttaagtgctcccgtcacaccagtgattcgaacatttcagagaaacacaacggagggaaggagcccggccctgccttgtcagcgccctggaagacctggcttcctccctgacactcactctggggagggaagacacccgtgcgcctcgctccctcgtggccagtggcttccccggtgggctagggcgtgtcagcagggcgtgcccaccgagggagcaacagcgattccc

SEQ ID NO: 35229 - DNA, 2300 bp, Homo sapien
atgacataaggaagcggtcaggaaatgtggctttaaaaaagactgaaaaaaaaaagcattttatcactttccctgcagcaacctccctgccttctctcctctgcaaacacctggcagctccgttctgctcccagtcctttccactgttaggtcaaaacagcgtgaaggatctcatgctcatcccatccccatctcaaacttctgacaccctcagaatgatgtccttccaatgggaaaagatttgcaacatgtttcttctcattccctctagctaagttgcttctttacagctcctcatttggaacttgtaattaaaactgcccaaatattgcatattgtgacaagaggcaaagggggatgtggagctgacctgaccagtgtccactcaggaccagctgcgcctccactatgctaatcatttcggcactcactcctcacacaaggctgcagggcacagggagtgctgagtcatggagacacctccattctccttcctcagatctgtccaaccctcctctatccttatggttaaacaagaagcctctatttccatcttctcctccccacaggtacctcgtgttctgctgaaagctctcggcccggtgtgctccagctcacctgtggcagacaccgagtgctcactggagtcacaagacacgttctggccaatggtgacataaatggtgcgtgacccttccaggctgaggcaatcaagataagttccatctgcagtcctcgcttccccccacccgagggacctgggaggccacagctctgataacatgaaagtagagtcagaatccccgagtcactgccggaatgtgagccctgggcagcccaggcaggatttggggtgagggagaaagctttgttgtgttaagctgctgagatctcagggtttatgtaccagctgcagtaattgccctgattaatgcagaaatgagacgtaaaagaggggagctgccctaacctcgatctaaaatatgtggctttgagtagcccatggcaaggaatctgttagaggaggcaggaaaggcaaacttctaccatactctgcaggaagaggtttgggaaagctactgcttataatacacggaaggcaggccaagtgccacctgtcctcgtagctctagggcaggacataggagaactgggtgccactggatgttacttggatgtgttggctgcactgctcaaggtatttcaaggaagaagtggtctcaggaaagagtcattcagtgtgaaacaagcagccataaaaatgaacagagaaagtccaaaacttccaagtcttaaagtactggaaacatgaactgtttctagattccaaggtttaacagatgggactaaaagcggctttgtgagcaaaagcacataaaacctttcactttggtaaaatcactaagggcaaagaacagatgggaggtatgtggctttcacagtgattgccagcaggccagcgatgaaacagagtgctggccagagccagagcaagaaggagagacagacaacagacagacagacagacagacagaccggggaagctaggggcaatgggacaagaaagtagagaaattaaacaacttgaggaattttcttgaaacagcctttggatgtagttaatggcacatggaactgactggaaacaagtaaaccagaagtctcctttaaagttttcaacagctttattgagatacaatccatatgccataaagttcacccatttagtgtatataattcaatgagaaagttcacccattagtgtatataattcaatgagaaagttcacccatttagtgtatataattcaatgagaaagttcacccatttagtgtatataattcaatgagaaagttcacccatttagtgtatacaattcgatgataaagttcacccgtttagtgtatataattcaatgaattttaccatattctcaaagttgtgcaaccaccatcacaagcaattttcagagacctttctcacctcccagaaacgccctctacccatagcagtcactcctcacttccccccagtcgccccacccccagccctaggcaaccaggaatccatgtgctgtgtccatagaactgtctaccgtggaaacttcatatgtgtggaatgacacatgtggcctctgcatctggcttctttcacatagcctaatgttttcaaggctggcgcatgttgtagcatctatcagaacttcattcctccttacagctgataacactccattatgtggatatggatatgccacactttatcttttcatcagttcgtggacatctggattgtctcca

SEQ ID NO: 35230 - DNA, 2300 bp, Homo sapien
cttttaaaagtatttttccatttaatctactttttgcagccaaaagtggaactggccctccctggcttgcccgggctgagactcctgacttcagcactgaatttggcggccacagaacgggccgggaccggctgcagggtttcagttcgagtttgctggtacctggctggctacttcctgaaaatactatgttccccacccccaaaatcatctgtttcgaaaataacaaatagggcatattttcccctccaaatagaaataaaagacaggttgacttttgtgtgtgtgacatttttctcctttggtgcccaaaataaagccagatgaaataagtgtgtggggaagggagagaggtaaaaggcagctggtatgaaaaggaaaacctctgaactcagattttagaatttttgatacttatctcaagagactatacgtaaagaggccacttagtaatgcaaatgagctgatgaactatgactagacacttaaattccagaaaaacagggaagaactcttgcagctggccccatcgacaaggagcgggtttagactcataatctttatagtagagtgtttccttagagacctccacgttcccttatcactcccatttacagatctgaaaacagaccttctgcctggcgcaaactcctctacccccaaaagaaggctttttttttttttgtaattaaatataatcttaaagtgtgtgacttactgtcagaaaattgaaaatttgcagatctgcttgtgttagacaaatttatatttgcagagataaaatgcttagtaaaagtttcatatcacatctatttttttttttgacatggagttttgctcttgttgcccaggctggagtgcaatggcggcatgaccttggctcactgcaacctccacctcctgggttcaagcaattctcctgcctcagcctcccaagtagttgggattacaggcatgcaccgccacgcccggctaatttagtatttttagtagagatggggtttctccatgttggtcaggctggtctcgaactcccgacctcaggtgatctgccctccctggcctcccaaagtgctgggattacaggcgtaagccaccacacctggccacatccactattaacagcaaatgctgactgacattgactgtctctttggccagtgcaaagaccaggctgttaaaggatagctgcagcctttggcctctgacaggcggccaggactcacgagtgatctcagtgattgttgtcagctttcaatgaactcataaatccagatgtgtggtggacgtgcaatgccctaattacatgttttatgaactttcaactaagtgtagatttttaagattcatttttatgaacaattagataaaagtgacttcataataaacagaaatgggattttaaaaaatgtgaatctaggccgggcgcggtggctcacgcctgtaatcccagcactttgggaggccgagacgggcggatcacgaggtcaggagatcgagaccatcctggctaacacggtgaaaccctgtctctactaaaaatacaaaaaaatagccgggtgtggtggcgcgcgcctgtagtcccagctacatgggaggctgaggcaggagaatggcgtgaacccgggaggcggagcttgcagtgagtcgagatcgcgccactgcactccagcctgggcgacagagcgaaactctgtctcaaaaaaaaaaaaatgtgaatctattctaaaagatggatcatttggctctttggtttgatatttgcttcaatatccaatatcagccaaccttgacctggacactgtagtcatagactcttaacagtcagctgtgacttcagagaccatttggatgaaactgtttaatggaaaacctctttcatgacagtcctgccttgctagtcaaactcggcccggacgcacttagggacgaggtgctaactctcacagaaactacctgatctttcttatttgaataaaccccacctccctgtaacttcctcctcattcttttgttctctgacagcctcgggatatttgaaggcaacctgggttggtcccagcctttccagcacctcctttctccagcttggactagaagctcttggcgtgtgtcagctgtttgtgacatgacatgggtttgagactccttctttcccagcgtgccccacaggggaagtctctagagccaggcccacccggggacagcagagcagagccctccctctacctccaggacctaaattctgcagtagggccatctgccctgacaccttccaaaagggtcatggtagaagatat

SEQ ID NO: 35231 - DNA, 2300 bp, Homo sapien
atcagtcccattctgcatccctgatccttcatcagaggaagcagcgcatcatcctgaaggaaaagtcaagctgacctcagatcgaatccagctctgccattcagctgtgttaatcaacctactgaccctatttcctcatctgtaaaatgggtgcaagaatataaacctcacaggatggtcatgagacttaagtgagcttatataaagtgtctaggacagtttctggaacatagaaattaataaatgggaatagttgtgtacattgcatttttgcctaaaaggaatgggaaacctttagggccaatgaaggagaacaggggaacaccatgtccactttcccaaaaaagtgcatctcaggatacagtgagaccaccagctaaagcgtgcaaagcagaattcaatagatgaccactgaggtccgacaggcctgacttcttccacacactcagtgtatcagactggatgaaagaaggaaataggggcctctgtgagcacatcagaagttatccttgcaaaagtgaagaaaggtgagccgcacgatcctgtctgtggcgcattggaggaagcctgattgactgtctttataggagcacacgggggcctcacaggagctgagggacagcatgggatgtgaggggctcagagcgagaagaccgttgatgacatgatgtcaggggctctgagggagaaggggcccatgagatgatgtgaggggctctgagctgagaagaccgttgatgacatgatgtcaggggctctgagggagaaggggcccatgagatgatgtgaggggctctgagctgagaagaccgttgatgacatgatgtcaggggctctgagggagaaggggcccatgagatgatgtgaggggctctgagctgagaagaccgttgatgacatgatgtcaggggctctgagggagaaggggcccatgagatgatgtgaggggctctgagctgagaagaccgttgatgacatgatgtcaggggctctgagggagaaggggcccatgagatgatgtgaggggctctgagctgagaagaccgttgatgacatgatgtcaggggctctgagggagaaggggcccatgagatgatgtgaggggctcagagctgagaagaccgttgatgacatgatgtcaggggctctgagggagaaggggcccatgagatgatgtgaggggctcagagctgagaagaccgtcgatgacatgatgtcaggggctctgagggagaaggggcccatgagatgatgtgaggggctctgagctgagaagaccgttgatgacatgatgtcaggggctctgagggagaaggggcccatgagatgatgtgaggggctctgagctgagaagaccgttgatgacatgatgtcaggggctctgagggagaaggggcccatgagatgatgtgaggggctctgagctgagaagaccgttgatgacatgatgtcaggggctctgagggagaaggggcccatgagatgatgtgaggggctctgagctgagaagaccgttgatgacatgatgtcaggggctctgagggagaaggggcccatgagatgatgtgaggggctcagagctgagaagaccgttgatgacatgatgtcaggggctctgagggagaaggggcccatgagatgatgtgaggggctcagagctgagaagaccgtcgatgacatgatgtcaggggctctgagggagaaggggcccatgagatgatgtgaggggctctgaggtgagaagaccatcgatgacatgatgtgaggggctcagagctgagaagggtgcccgtgagatgatgtgaggggctctgagctgagaagaccatcaatgagatgatgtgaggggctcagagctgagaagggtgcccgtgagatgatgtgaggggctcagagctgagaagaccatcaatcagatgatgtgaggggctcagagctgagaagggtgcccgtgagatgatgtgagttgctctgagtgagaagggtgcccataagatgatgtgaggggctctgagtgagaagggcacccatgagatgatgtgaggggtggccagtgacaagggcattgatgagctgagtggcgtttactccagctgtcatgcggccctccacagcagccgaacaccttgtaggtaatagcacttgtaggaagtaatttgggaaatctcacctttatcccttctttccatagtctgctactgaccacccaaattactttgaggggaacatggttgtaaccccaccgttttggtccatttgggctataataacactataccttagcatgagtgacttataac

SEQ ID NO: 35232 - DNA, 2300 bp, Homo sapien
accagattccacaacaacccccatcctttaaataatatggtctctccttttatgagcaaattgcaaactgtttatcatgagattttttgaagtatgacttttgttataaaagattagagagtttttgctgagaaatagaagaaaacaaaagaaaataaactatagtcccacacggttatgcaaagataacacaaaagaaaataaactatagtcccacactgttatacaaagatgactattgctaacattttgtttatattcacccagtctgttctttgcaggatgtactttttttgggagagttgatgtctccctatgttgtccaggctggtcttgaactcctggcctcaaatgacccttcactttggcctctcaaagtactgggattacaggcctggccaagatgtacatttttaaagataagctatttatcactcttcattaattttccccaaatgcttttgctttttggaaggtgtcacacatgtgtcacacacgtgatatgcaagtgtgtcttactgcaatggttctccatggttttcgatgggcattgtactcacctatggaggttttgaaaatatggatgcctgggttctgaccccagaagcccttttctttttaattggtttgggtgtggtctgaaaatctggatatttaaactatctccagttaattacactgtgcaacccgtgttgaaaatctgctcctgggtcttcctgctaatgcccttttctggcaagcgccagcctatctgggccagcgtcagccctcctgtgttacacggagctcaccagagcacagccttcgccccagtcccgctgctgctccctgcagctgttgctatcttgcttccacccaatgctgtccctcagcgctccccttccacatcccacccagtaaggaactactcgcagcgaccccatggcgacgtgatttctttctgcagtgcagacctacttgttgtaggctcaagggtggagttagcaatttaaagaattaaaatgtaggttgccacccatctcagcctggcatatgctcccatcatccccaggaggcaagtaaaatgtatagaaaccagacagcaggttccagcatctagacacctgagaaccataaaaacgagtccctgctggctgtgccggcagcctcgtcttcctggagaagataagaagagattaagattgcttttggaagcactctaaatgctaggtttatgataaagctcatctgccacttgcaatcagaaagtgctagtcctgataacaagagtattaaacctctcctggcagatttctgtgtcttttttgaaaaacaacaagatggaggtttctttaatgcctgttcttacctttcctgtttgtctgggacatgtggatatcttcaaaaagcccatacattatcacttgggtatatgggcagcttaaaactatgttttgcaatattttacagttgtccaattgtccccaaccccttgtagttatgtcattctgcaggtctgaatgacataactagaactgatttgaagaagagtcccagtcattactgatactgtgtttcttccaactcttacactctgggatcccatatccagggaagaaggcactgtgggggtgagtgccccagcacgctaggcctaactgtgttttcccacagcgtgctggtcagcagacacagagtgtggtgtggcaatgactgtatacaaagcctcttggtttaaataacttcaggccaaagtgttggccagggtgaacctgttgaccaggggacacaaaggaggtaaacactaaaacctttgggaccctcgtgcactgttggtgggaatgtaaaatggtgtagccactgtggaacacagtatggcagacccacaaaaaattaaacaaaaaattatcctatgacccagcatttccacttctgggtgtgtacccataagaattgaaagcagcgtctcaaacagattcctgtagaaccacattcatagcagcatcattcacagaagccaaaagatggaagcaaacccaagcatccatccttagatgaaggaatccatcaggaaacacggtctatgcatacagcatggaattcagtgtcaaaagggaaggaggccgggcgcggtggctcacgcctgtaatcccagcactttgggaggccgaggtgggcggatcacgaggtcaggagatcgagaccatcctggctaacacggtgaaaccctgtctccactaaaaatacaaaaaaattagctgggcgcggtggcgggcgcctatagtcccacctactcaggaggctgaggcaggagaatcgct

SEQ ID NO: 35233 - DNA, 2300 bp, Homo sapien
tctccaacttttctgtcatcgaggagccttcttcagcgtggaccaatctggaattcactgtgcctaccccggccataaccacagcccctactgcaacgaagcaccgatggccaggcaacaaagaaacccacagttccatgaagatagaagcatgtttccggggcaggccaggcagcagtccttgaacaatgttttgaaggcagagaaatggttctctggatctgggcagcacacagctaacgctgctctacatgtgtaggtgagaaagactcaggcctcgcagcctgaaccagcaactggggaagaaaaactcagaaggcgcagcaggaaggacggagcgccacgatggggggagcagtcacgggcgatgagcagaacagaacgaaacacgagctctgcacacagcacagagcacaggaggacaggcctggaagccttgagaaaggggcctagaaggaaagacaatgccccaactgtgggatttatttcccacaattgcctcatttaattaatcgaggtatgaaggcatggtgttctctttcagacataaggatacagtcatgttggtctctgttaaatcccaagcagtggaatccctttgttgcttgtgacaactgtagtcacatcccaggggctgacagtgctcgtgggtaatactgcaaaaaactatctcgggctcagcccatctggaggtgccggcatcgtacagtcactgtgtacaagactctgtccctgtcttgcggggctcacttttccctctgacaataattagttcttcatcccgatgacccagggtgtggattttctgcagatcttaccactcctgctcctttggttactcaaaagtttgagaccaactttacccttctgcctaagggtaaagccaggacagcagatagaggagaggactccagccagagtcctgaagggcttagcagctcttaggaagagacttgctaaagttggctctattgcttattaatgaaaacaatttaactaggttcaataatattgagtgtagcaaggcaggaaaatatacgctgatcactttagaaaaaagtgtgcaaagacttgaaacaaaaaatggagattttgtccaagccccaggaagacagcaagaaaagtgagacagactcactaaactcatttcccgtatcaattattgcattccaatttttctgtcaaaggtattcattacaatttatgttaacttatgcgtctgtgtaggctaatatcattttcaggcctatttctaacagttacagacttttaaaaatagatgccatggtagtgaattgttcctcttaaaaatgtacttaataggctgggctcagtggctcttgcctgtaatcccagcactttgggaggccgaggtgggcagatcacctgaggtcaggagttcgagaccagcctggccaacacagtgaaaccctgtctctactaaaaatacaaaaattagccggctgttgtggcacgcacctgtaatcccagctacttgggaggctgaggcaggagaatcacttgaaccataggcggaggttgcagtgagccgagatcgcgccactgcactccagcctgggcaacaagagcaaaactccgtcttaaacaaaacgaaaagtacttaataacgtggtttaggggaatcttcatccccgaagcctctgtccttcagatgctttacgctgggctgctctgttccagatagaattgatcccatcacttttgtgtaaacacatcaagtgtctaggagcagaaaggctggctactctcagagagtcaggcctgccaatcagaccatgggaaaccctcagctcatgcaccactggacaggcctggagtgaaatcactcaacccactcgttagaaaggcccagcaagttatcgcagctcggctccctgtgctatctccgtgatacacacattacatatgccaggaatgtttatccagcagagaatgcaacaccaagccagggtgtcttatctacatcaaattcacgctagcctactaaattaaaaaacagaacatattttctcctgtatcttgatttagaaagtactgattaaatacaataaaaaaggtaagtagtccttgtcacgcaatcctcaaataagagccacaaacgtggaagatatatccaaaggaaccaaattaaaggactggagaaaggtaagaaagggactatgcttcttatgagttttattttcctcagttacattgttttaacttattttatgttcgagggtacatgtgcaggtttgttacataggtaagcccgtgtcacgagggtttgtcgtacagat

SEQ ID NO: 35234 - DNA, 2300 bp, Homo sapien
cgtctcacagcaaacccttaacctctctgggtcagggagctcctttttcaacaaaacaggttggtctagatgggttctcctgtgctttccaactctctactttctattattctgaacttcatgcctcattgtatctgtgcgcctctggtagagttggcataaacccaagcatatgttattggcttagagaaagaaaacatttctgggtctgtgaaatcataggctttgcttgacgaagcttcgaggtgtgcgggctctcttagtgcagcgcaacaagccatcagccggcagaaagctatttctgtagcggagtgttaaaagactggtattcttcagtgaagaataatctgctgagggcaatgtgtttttattccctctgggatttatctgtcaacgggcagatgggagaagaagcaataaactatgagcttgcatatgtcaaggctttgattctagggggtgacttccaggccctgcttgagtaggagacattgtcagggaagaaaattttggactctcactgttacttcctgatctcagaacacaaagcctagtttttgctgagtctttgaggaaactccatgagcactcggcttctctctcgtgttttctgaaaccagaagtagagagaaagaggcagctgagccctacagaaccaaccaactgtggagaccagcagcgaacccagcgtgtttgtcattggtttgtgaatcttatacgctgttctctttgggatacctatttctcctgggtctttacatggtcctggatcaagaaacaccttttaacaactcccttcagaccctgcactcccgtgcattcagaggcctccttggcttagcgtggtggcaaccccagggtccaggtgattctgttgaagatctgagaacagagcttgcttcttcctgccacccagtttgattggaccttctccagacttctgggtgcatttccagagcatttacacaaggaattatgtaggggtcattgtgacaatggttgtttgtggcttctttgtataaaccttctgtatagaaattccagttgatcaaacagataaacggagaggtgatcagtcacattgctagatgacttttctctacctaggaaaggattctttatatatttaaataggaactcctgtccccatttcttcctggctctgccttgctcttatcttgactggtccagacatttcctggcatccagggcatcagggaggctgtaagtctgtgtttgatggtagctgtccttcttcaaactgctggctggaaggcagcggtccctgctgggtcccagagagctaggagtgcagcttggagaagtcggctctctcatcgtgagtcttccagaagagaatagtagaggacagcaaggacaaagggcgtgaccaggagacacatggcttgggggaaagagcactggcatgtacatcaggaggctggacaccaatctgcttctgccaccagttctcagggcaactgtaggctaatgaggtcacctctaggggctttctgtttcttcccccgtgaactgaatactgaatgatttctaaggcaactctcagcacaaatatattatgatgctttagcgtgagagaggtgggatttgatgtggggagggcagagctgaaacaagcatttgaaactgacacttcgggccgtggtcgtttagagatctgttagaagggaagacagacatctttagaaatagatatcaatgaaggggaactctacttgatctattaaacatcatgaatgtccatctggcccactactggatcttgaggtttttgagggcagggactcagcctggcttactcactgctaggtcactatcactaagaactgcacctgacatgataccctcaataaacaattattaaatgaatgaatgagatgacagtggttgccgttgcttctgctgtcaaacacagactccatttcctgttttccagggtcctgcctacccatctgaggacatgtctgctcatcacccatgtgcattctgtcacagtgggacctgtgtgtgttccctgctcattgtcgtttccatggttttgctgattctatgcgattcttccaggccactccaagttccacctcttccacgaagccctccttgattgctgggccctggttgaactccttattagtaacacccaggttagtcctacttaattcttacctgcagccaaagtggacttagcatctccttgcatgcctggtaaagtcaagggttttcagccagggcctgtgtataaagcagaagcagcacagagtctggtttgaagcttagtg

SEQ ID NO: 35235 - DNA, 2300 bp, Homo sapien
aagcctccttggctttaccttccccatcaaatagtcatgtgccctcctgccctgcccaaccccagagttcaagagagaaaaacattcattacgaacgccttttatccctggccaaatccaagcctctttacctcgctatatatatatagatatacatatttgtctcatcccacttccctctccaggtctagtgaaccatcaactccaaggctagagctgagcagacccctccagaaaggctcatctcccaaaaagcagccattccccacctggctcccgaggcgcatacttaataaagtcagtctaatctccgaacgcgatccttccccaaatacaaaaataacagagctgtggctggggctgtcatgttgcccgccccattgtgaatggcttcaaaactccctgaataaagataagagaggattgtgtacgttttcaacacaaatggtggaaagtaataaaataaacatcaaaggtgagctcccacctactagcggctccgtcgctttttgtgcaacaaaggcaggaaaaaggaggaaactcggcgtggcagggcagcgggctggaagtgcaccttcccggggccgaggcgcccgctccctggactaatgacgccgcgtggggatcacgccccgggcgccctggggtgaggaacggtcccccctttcgagattgtccgacactggtgccagtgaggtcacagcaaaagtcccaaaggaatattggaaagaaatggccgtgaaccggtttgttcttgcccccgcccccgggaacacgccctctccgtcgttcctgttgactgtcagatcccgggaaccaagcggcggagctcggcggcatctgaggcttccgcagggacacaagtgcaggcacagcccagcaccctgcgccagacacagccgccccaggggaagaggaggacgctgctgtcctcccgcaggagtcaccagccaggtaaagaaaaaggtaaagtaagacaaagaaaagtgaaagtcggagcccatttagtgagcaagagtaaaggtcatccaaaaaggcgcatacaatttcaagcccaggagtgcattcattaaaacaagaggaaaagacaagatggtccttgaaaggagctcataggaaggggcacagcacaaggctcccgaaagaggtcactgcaagtgtcctgcgcaatttctgttcagcacctctgcagtgacgacaggggtttgctttcgtaagcagcatcgttttcactactacagaagcacatacgccgcgtgcagcttaggcccgagcaaagtccctgctcccctagacccagtcccttcaggtgtccccctaggggaactgtggcgtgtccccccaaccaggcgcactcgcctaaactgcgtccccgaactccagggcgcagggagccctcgcgggctgcccggggctggggcccacacctgaacggaggagccggctggcggagcggccccgcgcgcgcacacacgcacactcacagacacgcgcaaacccacagcggcgcgcgcgctccccattggcgggaggaggaaggcggggccggccgacccaaaacaaacaacctgcgccagcgactttgccgccgcgctgcagtgtggcctccgcctggtgcgcgcccgttggggagctggggaactggggagccgccaccacctcggccacctcgttcccccaccccttgccgtccgcgctcaggccccgcccccgcggagccgccgcagggttatattgggccggcccgaaggtggaggcgagacgcagccgcggcaggccagcggggagatgctgccccggaggctgggagcgggaaggcggctgcgggcgcagcggcctcggggactcgcctccgcgggtgctcaaggctgaaggcgccggaccttcccccacggtggcacgcacatcatccggcaccatttccgtgccccgaagacgcccgcgcgggacctgggaccgccagtgaagaacccctcctgggctctttaacgagcagcagatgcgcatgctgcttctctccggcaggaaagccttctaagcccggcgtgctcgggcacccgagggtggaaccgcggcccctgcacacactcaccccaaagtctcaacgtcgaaccgaaggcgacacccacccaactcctccctctccgccccatagtccacccaacacttgcagcccctccagagaaaaagcccagcggaagaggactccggaaaagtgactatctcggaagaccagggtagagctcccgggagaaaaaggcgaagatccccggccccggatcgccatccccttccctggc

SEQ ID NO: 35236 - DNA, 2300 bp, Homo sapien
ttcggtttggcggtgttttcttagctgactctcggctacaatcaagccattttcggacacattcccatgtaggtaccaggggtgctctggaggaagctgtcgacgcctgttcagctaatttaggttttctttgtctaattactgtggagcttagggagaaggagccggctcagggcagtaaactgacactcggtctctgtgtgtggtatccaggcagggtttgatggaaaaagcctgcttccactcaacctcaggtcactgtctggggccagccccggcccacccccctcccacatacccctcccctccccacccgccctctctgcatctacagccccaccagcacactcagccaggagcagtcccccggcactccaggggcacacagggctcctgccgccccagggggcctgcctaggctgtgcggctgtgaaggctctttgcctggtgtcttcctcctgattactgcacaacctccctttctcctgcctcctgcaactccccaggctccccagcaggcacacccgtgcacctcggtcctttcagcctagacgcagcggggtgcccagctctacctcctgtttggtccgctggtctgcagcaccttctttctgggcctcccccttcagcccttgggaggccccgccagctccggcctcctgctctcctcctccctctcccagctcctatccctggtcggactacatttccctgcacgtgtaatccaataactaactgtcgggtctcattggaagtgattgctcccgagggcacatctctctcagagcctgactcttacttagggaggaattagccacaactggggagaagtgttctcggacaggagttagctgagacctggcacagttttgggtgggcaatgttaagacggaggatgtaaacctagtgacagctgcacaccccttcaggactgactataaatatagccatctcgcttatctcagggtctttctttttctttctctttctttcttttcttccttccttcctttttcttttgcacttttttcttacagaacactaactggggtgcgggggtggggggaagaagtggaagcaaatgcaaccctaagtcccatgagatccaggtttccagagtctttgaaacttggcctaggtttctcagtgtaaatccctctgctcaaagttccgaaaacgtccacgatcgccagcggcccgcaaccctgcggcggcccccagtcgccctaacaattgtcggggagcctgcaggccctgccagaaagagagaggattggcacgttacctttgggcgtctggcaccccggcgtgtggctgagggcggcaaagtctaaacgaagttgacagatggagtcagtatcggccctggggagggcggccagggaggctccgagcagccgcacccgcagcagcaccactcggcccggcgggccaggaggaggaagggggcgcggaggggcggggctgggtcctgggatgggacgcggggcttgctgcggggggcaaacagaaagaatatttcatgaagtcagaggtggtcgagttttgcgaggggtgggggtcgtccccctggcagaaccggagtgagtctgtgatccctcaattggaaagagggtgagtgagggaaaggggaggaggccgcgagaggaatgaagagcgaggagaccctggagagcggggagcgagataagagagggaggcggccgccaggtcgggagggggaggagtgagcgcggcggcgcggagcgaggagggggcagggcggggtggggggggagggagggagggagggagcgaggagggcggccggggagggcgagggagggaggaagtccgagagacagagcgaggagcgctcctgaagggagacgtcgggctcgtccccggggtccaggccgcggtcccactcgcgggcgcagtcgcccggcgccggccgctcggccccgcggcctgggaggccgttgcgcaaggcagggcccgcggctcggggagggatgcgccgggcgttgcctcccgcccgccgccgccgccgccgccagaagccccagaggagctgagggaggcgacgccgaagcgctggcccggagtggccacggctgcagcccgggcggcgggctagggcgctcgcagggcttctgggccgaccccgctccggcgcctccgcttcccgcccggggcccgccctcgcggcccggcctcgctcccgggtcccagatgaccaccgagggcgggccgccgccggccccgctccgccgcgcgtgcagcccggtccccggcgcgctccaggccgccctgatgag

SEQ ID NO: 35237 - DNA, 2300 bp, Homo sapien
tgagtcacagagtggagagagctattagattggcagtccccaacatttttggcaccagggaccagtttcgtagaagatgatttttccacagatggtggggtggggggtggttttgggataaaatcgttccaccacagatgatcaggcatttcttagattctcataaggtatgtgcaacctatgttcctcacacgcagttcacagtagggtttgtgctcctgggaaaatctaacgccaccgctggtgtgacaggaggagaagctcaggcaggactggtcgatcacccgtcactcacctcctgctgtgtggcccgattcccaacaggccacagactggtagcagactggtaccagtctgtggcctggaggttagggacccttacatgacatgaatgtaaggaaaccaaatacccacaaagagaaacctgaccggtgctacccacatccagtgtcactctcccttatgaagaactgaacttccaaggtctaagcagagaagggcttcaacaagacagtgtgtctccaggtggacagaggagctggtgacatggccccagactatgtgtgtcctccttccctgtgggggtccgtgctgacttctgctgtggaaacttcctcttgtctccacacccgtgtcactgctccatcagagcccccttaagcatgctcaacacattttatccgcggatgctctgggcactcaggagcgtactgaaatttgcagcaagaggatcacccccactgtgcaagaatcaaaaagggaataggcttgaggcattgcttttgacgccatggactcttagggctctcagtcctgcctgggccccggctctcgttctctccaacatgacgccatctgctcaagcccttctggaatcctgtgctagaagagcacttcactttatagccaaaggttccatctgggcttccgggtttccatcctggcctgaaccacttctccattactcactagctggatctaccctgcaacaaacctcagctccctctcctaccagccaacaggatctggatcttatcacatgaagtccccctcgacccaaccgcactgtgatccagtagcctcattgctcctttttccaccccaccgtcaccccccacccccaacagaaagtgaaagagtgccttctccagacttaagggactcacacctgagttcctgtgcccactctggtgggctccattaggcactcgttatttttctaagtagagatgaataagtaaacaccacagtgaatagtcacatcctcccttactcagagaccaaactcccaggcactgaggtgtccctagagacctgctccagtgtccccacatccctatccccatcagcctaacagtcgcttgttcattcatcactgacacttgttctgggactctcatctgtcccctgtcctgtgccccacagctccagacattctgatggtggttatgagaatggttgtcatcgttctcacatgggaagccccacttctacctccaaaagcatatcggggcccaggcacatgagtcagcagatccagagagaagcagacagcagaagctgccccaaatccagttctagtcattcaaccacaaatgcagagcaaaatgcatccctcctcagaccctctcagacaccgcacccttgacttcccaggagatatttgatacacttagatagcatttgaacaagactttactggtgcacatccattcctacaatcttagcactggaaacatctctgagatcctttgatctctcttatcgtttttacagggtagaagctaaagcccaagggatttgtccaaatccagtcagcttgttactgaaatgacaggggctggtatacaccgaatgccaacatgccccacatgatctccccaaggtgccacatagggcagttggacactaaggtctttgcctttcttcctactgagaggtggggacaattccctgcaccttttaaagctgagtgggctcttggctcctctgactagtagagtatggtggtggaaatgatgctgcattctactgtgaggtcacaaatagccctacagttgctctttggaaccctcgctcttagatccccgagccaccgtataagaagtccagctaccctgaggccgtggactgcagctgcactccagtctttaagcccagctgtgctcgggtgtctcactttctacaccccaccctcagcatcagatatgtgagtctcagaccacccagactggccagtctgcccactgaataccaccaagtgatgccaggcaattccacacagagaataagaaccgcct

SEQ ID NO: 35238 - DNA, 2300 bp, Homo sapien
tcacatgtaacagccgaagctgcaatttgaattttcctgccaacgtgaggaagccgggattcgaaccggggagacaaaaggggtcccgaacatgtccttggatttaatagatggtcggaaatcaggggcagcggagctgttaaatgcgtcacgcacgcttcttcgcagtctcctgagctcgccacttcccccagcttctagtgaacgacttgggattcagcctccgggagggtctctcctcaagtcgctaaaatgcagaatcgccgtgccgggggagggaggcctggctctttcccgctccttcgtttctttccctcatttctcttcttcctgtcccattccaaccacccagcgacggcgaatctcaggcgtgtgcacaacgagcgggggcccttccgtgcgtgtccccccagaatccttgaaccgccctctaggtgcgaccctggacgttcccccagacacacccgttgtctctgcgagccggcagccccgcgcatgtggagatggagactggcctggggaagcgttaagctcttagacatatttatttgcttcttgtcatcacacctgctaatgtcaccgagcccgcagcctgacccctcatctgagccgaaacgggcctgacgggatcagagggggcggcggcgcggcgagccggtgggaccctcgcgggcgggcaggggagcgcggggcagcagccgggctccggcagccctcgccgcccgcaccctcaggccgccaagggccggccccccggggaggggggcgagaagcagggcggcccgcagcggggcgggctcatccttcgcgggtgaacggccgtcggaaactcccagcagggccccgcaccccttgccttcatttcggctggggaggggtcatggaggggggccagatgggcgacgaaccttcttccccaccgcgagcagggcctggctgtgaccgagccctcaaaatcatgtcctttgtagccgagttcaggacaggagaacctccaagtggagaaaagccggagacgtcagtgacccgagtgagactggcgttggagaagggagggaaggggctgcgggaggggagaggcggcggggaggagaggctggggcaaccccagcgctggcgtcggcggggctggcgaaggaatgagagcgagccagcacgaggcggggcggagacgccagggccactcgggagccgtgggcgaaggaagggtctgcacggggtcccgggaggacccaggaagtctgcgcgaacggcgggcgtgggtccggagggcccggggtgggaggtctgccgggcgccggcggcaggcaggtggactgcggggggcgaaccgacggcgggccgggcgccggcgcgggcgcagggccggggcccgggccagggcggccggcgcgcgtgtggtcagccccgcggtcctccggcctccgggagcgggccggcagggctcggcctccggctcattcggaggcggttctcacctcccattggctgccgccgctggcggggcggggctccgctgcccggaaaaaagtgtaactgcgtaaaaaagtcctcgcctgggtgacggatgctcaaaagttcagaagttttcccaatgcttccttaagcggctggcgcgcgagagaccgagaaaaggtgacgcggggcccgggcaggcggccggcgcgcggccccccccccccccgccctggttatttggccgccttcgccggcagctcagggcagagtctcctggaaggcgcaggcagtgtggcgagaagggcgcctgcttgttctttctttttgtctgctttcccccgtttgcgcctggaagctgcgccgcgagttcctgcaaggcggtctgccgcggccgggcccggccttctcccctcgcagcgaccccgcctcgcggccgcgcgggccccgaggtagcccgaggcgccggaggagccagccccagcgagcgccgggagaggcggcagcgcagccggacgcacagcgcagcgggccggcaccagctcggccgggcccggactcggactcggcggccggcgcggcgcggcccggcccgagcgagggtggggggcggcgggcggcgcggggcggcggcgagcgggggccatgcaggcgcgctactccgtgtccagccccaactccctgggagtggtgccctacctcggcggcgagcagagctactaccgcgcggcggccgcggcggccgggggcggctacaccgccatgccggcccccatgagcgtgtactcgcaccctgcgcacgccgagcagtacccgggcggcatggcccgcgcctacgggcccta

SEQ ID NO: 35239 - DNA, 2300 bp, Homo sapien
gatgattttgtgactatatgaaaatggaattaagggattgtagatttcttccccacaagcatattttaaaatccagagtaaaaataaaaactttcgcagagtaattgagaataaaggtgagaagttttctaataatactttaaaaaattctcatatacagataaattagaagaagcatgaagacttttccttaaagaaatgttcctttccctgcactttgaatagatggacaaaattagtatgcagggacagatccaacttttgtgggagctcatacactttggtgtcggtgcggagggggtggttcttctatagaaaaagaatgcaaaaatatctcccttttgcagaatgttcacattctgcacgtgtgagctgctgttctcctcacctgggcctggagaacatgggtgagatgctgagccccagggcttaggccagctgcctctgcgtatggaggctgtgtgtgcccctcagctgtgccagggaggagtcacagcagacggcgtgctgccatcctaatctctgtggcacacaggagaatgtccccacccccaaggaagtccccatgctaattctagaatacgtggctatgtcaccttacatgataatccagagactttgcaaatgggattgagtgaagggtctggagatggtcctggattttccagggagccctaatggtaaccacaaggtccttataggaggaaggcaggagggtcagagtcagaaaaggagcagtgaagacgaagcggggtcagggtgattcaaggaaggggctgcgagccaaggggtgtaggcgcctctagaagctggacaaggcaagggaacgggttctttccgggagcctctagaggcagccagccctgcccacaccaagaacgtaagaggatcgacacgtattgttttaaacccctacacctgcgttaatgtgttaggctggactggctccagcctctcccctctagcctctcagcaacctccacagttaggccctcctggagacccctcctggctgcctcaggccatctcctgtacatccctcctcctcccctcacccagcttgttctttctccccacccccatcttccttatttttcttcttttctttgcaacctcaaaacataaaccctcaagctcatttccgcagcctgatgtgcagtcttcctctctgtcttgtgtctctcctctcacccatgcctccatgggggacagaaggctacaccgtgtggctctggcagcccctcactccacacagtgtaggcatgtgctgttctatcacacatggacactaagagatcttgtcaagtagacagagactaagaggacctatgtgttcatgacactttttaaaggtctgagctgcccattcagctttgcatgaaaatggagattgggagttttgaccaccccatgactgtggcttgttgtgagtgtctgctgtgaagtggcactgcctcttcacaatatcgttggaattccatttggccaggtgacaagaaagtattcacaagcctaaggaggaacttatctgctccttcctgaggaaatatgtgcccccaccaaaaaaaaaaaaaaaaaagggaaaccaggcctcagtgtgccacagagcagcactgccactggaggccgccctctgtccagggtcgcgcacacgtgggcactggggccggatggcccccatgcctgcccttctcagagtgggctgtgctgcactctgagaagcgtctccacctcaataccaaccctgtagacttggcttaaagcagcggtcctgactcagctcacctcccggccatctcatttccttactcgggagagcggtgattctgtgtatttttctaataagcaaagtccccagagatgaaagaagccaccacaaaatactcaactctttctggaaacagaagaaagactgctgcccctatttgcagggagggaggatgttcttcccgaaacacctgagtgtgtgtttggaccacacgggtggaggacagttcagggaaaccaggtttgcgtttaaaagatcttggttccaacctcataggtgttgtacacccattccaggccttgtctccagcgctacctcacatgtataccagctataaatactgcagtgtatgtatatgtgtagatacacacaaagctaaagtatacattcaccaagataaactgtgcttgccagggctttaatctccccaggaggctgttattactggagtccggccccagagcgccagctgaggagaggaagtgagactctggtgttgggaggctgggcggcgctcctctttgtctactct

SEQ ID NO: 35240 - DNA, 2300 bp, Homo sapien
gtttctgattctcctccccctgcttgttctacttcctccacgttgctttttttcagtttgtttctttggatttctatttttcatatatgtgattttccttatatatttcctgtctcgtaatacttggttttctgcttctttaaaagtggggggcctaaaaagctacttgtgagttttgagagcatagttagatcttgtggctattttattataagaggacttgacggggccttttagttggagaatctctgatgcccagaggagcctccccagtgtcctcattggaaggaaataggcctgactgtcagcccacagagagctgtgtggtgggcctcagtattcatcgtgcatacaagcacctaatttcctctgtcttcagcatggtgacccactcttcactgagcctgtagccttcagtccagccaccttctacctcagggagggtgaggcagtgagtgtcggggagggaatcaggccccagactgctgcctatggagatttgcaatcaggtctcacttcctgagcatttgggaacttctgcaagtgtaaattggggccattctcagctctcccactgttggtttaggagacttttctaggacttctgctaagtcctttaacactcatccatctgctttccagcttccagaatttggtttctcacatctctttcctgccctcttagctcatgtgagtttattccttttttgaaaggggtctgcggaaggagcaaaagtgtgtgaaaaccaccatctttatccagaagctaatgcttcctccaggcctgccttatggcactgactaaattttagctcctgcagcttcctacttccataccctaattaaatcgcctttcttcagaataatccctgagcgcttttatgatatttgggtcactacgaggagtgtgttgcccccgccccacttagctctaatagtccccaaacttgactcatggtcactacaaggagtgtgttgttcccccgcccccaccaacttaggtctaatagccccaaacttgactcatgtggctgactttgcttttgttgctccttcaaaggaatgccgagttgagtagattttcatagcgctttgtcttgccttattgtccttgattctgttattcttcagtgctttctattgctatttaatgcttattaggagccaacaatttattttaaaaattgaattatacaggatccctgctcggtgagctgttgatctcaattcgtgggtagtaactcttgttaattaaccgaatcctctcctctctgtcaagccaccgtcacttcattaacagagcagccctgcttcaagtcgtaacatcacttgttaggacatgttagctgttaccttttacttgttaatacaagtgtttcatgtattgttgtaactgaatgttttttggcacttggccgaaacttttgcttactgccctcattcagacctggtgcaaattagaaagtggtttttgccaactcaattcagctttgagccatttcctgattacatttgctcattcaatgtagctatattaattgtagagggcaatgccatgcccttagagactgttttgactgtagacagcatttgcaagatgcaagttcagcagacagcgttcagacagtggcaagaaagtcgtgcaggggagctggtgcctgttgagtgccaaagtagcaccagacccaagtctgactttcaggctgtatttaataaacccctcagagagggagtgtttctccttcagccttttcccatttcagctagtgttacaaatcccaaatgtgagtctatgaccagcaaagcaatcaaagagaatcagtagtagacactaaaattcaagcagtctagccgtgcaggccactgctataaacaggaattaaatgctttccttcagctgagggtgaggcgataccattaacctgatcggccgaagcaggagtgggcaactggagcctgtgggccaaatcccagctgaggcccttttggttttgtttttggttttttgttttttgttttttttttttactgtcctggaggtaaggacaggttttacagtcttaaagcgtggtttaaaaaaagaagaaaataataaggaagaaaaaataagaggaggaagaagaaacagaaaaagaaagaggagaaaggaaaaatatgtaacagagactatatgtgatctgtgaagctttaagtatttactgtctggctcttcacagaaacagtttacagaccccaccaaagtctaaagacccctcaggcacggcctcagtcctctcctgactcacacgctccctcctaaa

SEQ ID NO: 35241 - DNA, 2300 bp, Homo sapien
ataggcaaatctagagataaaaggtagattatctgtatgccagggctagggtactaggagaaaactggtgagtgactgctaaatgatacagggtttctttttgggatgatgaaagtgttctgaaattgattgtgatgatggttgtacatttctatgaatataagaaaagccattgaagcatatgctttaaatgaatgaattgtatgctatgtgaattatatctcaaaatagctgttctaaataatagttaaaattacattttgagcgggcgcggtggctcatgcctgtaatcccagtgctttcggaggccaaggcaggtggatcacgaggtcaggagatcgagaccatcctgactaacacggtgaaaccccgtctctactaaaaaatacaaaaaattagctgggcgtggtgacgggcacctgtagtcccagcttttcgggaggctgaggcaggagaatggcgtgaacccgggaggcggagcttgcagtgagccgagatcgcgccactgcactccagcctgggtgacagagtgagactccatctcaaaaaaaaaaaaaaaaaagaattagaaattatagttaattttggctagttatccaagataactttaggaaccagataagaaaagatccacctttctagcacgacatgaaagttctggtaatataagaacttggtagtcatatagctctcgatttgaatgctgttttagaatagttaatttatatagcttccctgaatctcagcttcttcatgtacaaaatgggggtaatattagcacatgggttgctcggaaaattaaatgagttaccccatctaaagagctcagcacagtgctatcagcgatagccctcattggaggtgccataaccatcataaggttgtggtaagagttggaagagaaaggcccttcctcatctttgcaagtgccgttcctcctgcctggagtaccaccctgtctcacagcttgatgagtcccttcatgacctcactggtagactccattcaagctccatttctggtaggcatttctcacgtgcgttgcgcctggcagccatgctacaaccccaaaggctttccccccttgcagacctggcattttactaggttcagcactggtttattggcccacctgaccctctctgtgatacctgagagcaggggctgctgcttctctcccagatccccagtgcctagctcagtgcttagtgattggtgggtgcgtagtcaacactgggtaaaagaatcaataaattgtatgaatagggtcaaatacttccattggactcccaaacattactttactggtaaacaggttaatctgaaatgttttatgttggaatcttcatttaatagtttgccatcattggtttcttagtatactttgagaaaatagtatagtcctgacattgaaataatgataaacatcaaaaaacctaaatttaattcttacaagtcaatagaaaaatttttaaaattactaattagccactaattacttactggctaataagtagtttttcatttcgaaaggcacttttttttgaaggacctctatgtgctatataaacctctgtggaaagttgaaactttgtatttcttaacataccatctgaattgacaaggggaattgaaaatttggatttccacggtagtcccattgtatttcttaatgataatggtgtaggtataaatgtacgtatcaagtttgtggagtaagtgaatctggtgtatgtttgaacttgcgctaagccacgttcttgccaaaatttggaaaacctatttagaaatattccccttatccctgtgccagctctccagaagccaaacactttgatcataatatttgcctccctgcttcatctgcaaaagaacatagttaaagtcattggtatgtgataaatcatgatattcacatatctaaactgtatgaatccattattaactagctaatatgagtattattaccttgagaatttggtattaaatggtgttttctcataaccttacctagataacaaggtaaaactgtctcagaagtgccttttaactttgtgatctttgaaaaagcagatagagttttcattaaagaccagagaacattaaaacaatttcagtgctttcatcaagatatggcccctttcaaccaatcatttcaaaatattacacaaaatttaggagccctttctgtaaataacactgaaatgaatttggaaagtggcattgccttaagtatagtacagagaaacttttgcccaggggccatatcatatcatttggatggctgtgcaggtttctaa

SEQ ID NO: 35242 - DNA, 2300 bp, Homo sapien
atacccaatgtttatctcccacttatatgtgaaaatatgtgggatttggttttctgtttctgctttagtttgcttaggataatggccttcagctgcatccatgttgctgcaaaggacacaattttgttcttttttatggctgaatagtattccatggtgtatagataccacgttttctttatctagtccactgttgatgagcacctgcgttgattctatgtctttactattgtgaataatgctgcggtgaatattcaagtatgcatgtctttttggtaggatgatttattttcttttgggactgtcttgttccagttctgaaggggaatgcttccagcttttgcctgttgagtatgatgtgggctgtcatctgatcatacatggttcttattatttttaggcacgttcctttgatgcctagtgttttgagggtttttatcacgaaaggatgttggattttatcgaaaactttttctgtgtctattgagatgatcatgtggtttttgtttttaattctctttatgtggtgaatcatatatattgatttgtgtatgttgaaccaatctggcatttcagaaataaagcctacttgatcgtggtgaataaactttttgatgtgctgctagattcagtttgccagtattttgttgaggattttatgtctgtttatcagggatattggcctgaagttttattttttcgttgtttttctgccaaattttgatatcaggatgacggccagctatgtttttattcatctgattgtctagttgtttttgtcttcatagttactaccccaaacccagtctactttcctgatctctccagattatacgtactgcagacccatctgctttaacaaaatctttttcccacttcattgagattaagtctgcccttaggtgaagtaccttcatcccttcataatctctctgtggtttaatggtccccttcttcttagtctctgaacaggaaaacatgcctcctgcttaccaaggctggcgttccaactgcgttcttggtaccaaagacttttcttactggatccagctccatttatttcctgccctttcctgtttctctcttccccatctgcctacaaattttctgagaccatccctttcctaaaagagctctcttcctttgtcactgctgcctgcttaggttgctttcctaacctgcttgccttgatggccacatcttttcgaggtgtcccctcagtgccaggccttttacctgacccttctccctccttggccctgcactataacctgtgtgcaggactgccctagcactgaaaggtgtcttctgcagggaaggaagcaattacttctgggccaattcccactttactccccaggattgtctggggagagtttctgagagggagtgtgagatgaaggatctctccatatggctattctttcccacctttcttgcttccttgcactcttcacatgccctcccctcctaccccaaccagcagatcaggttgtctctacaccttgcctaagttaagccagtaggtggtttctatgagctttgctctgcttccttcctggtttattcccacccaaccccgaatttcctccaagttaagttggtttaccagacactgggttaggaacttcatgctttaatctttgctcgacttcatgaaacactgctcacttcacaaacatgtgaaacaacttagctgaagtaatgcagctgggaagaaccaaatttctgacatcaaagtctgtttttaaccattgctgcattgtcttaagtgcttggaattctttccacagtgagataaaatattaagaaaaaaaaattttttttaagaaaaatgggtttttctaaaccatttgtttagaaaattgctaatatataattaataaatatagtgaatcagaatctgtcctgttttggtactatttgtcaatcagcaaaagtaactgatgtggggaggcagtcatccctggttgtagaaggggggctggacaccagaattacatgttgtcagtgtgcatttagctgtagtcacatctgctgtcttcagcctcttgacagtaaagcatctgtgctctgaggcacttttgtgtgatccagttttgtacacaggcagtttgttgggagcgttaccattgcctctggttcctcatgtgtaaaatggtgagaaaatagtattaccttataaaatggggctaatcatagtgccacaagcctgatagggctgtttatgtgggttcatgaacttacgtgggttcatgcataaggtgcttacaacatgttttaagggctatataaatgtt

SEQ ID NO: 35243 - DNA, 2300 bp, Homo sapien
tcttactagttttcaaactcttgtctattatgattaccttaagcaaagcaagatgcatgaataaccagcagtaaatcaggtattcaatacttgaaattgtgtaatattctgtgactgtgcatctggccaatttcaacttctccttctttttttttttttttttttttttttttttttttgaggcaggatctcactctcttgccccaggctggagtacagtggtaccatcattgctcactgcagcagcctcagactcccggactcaagtgatcctcctgcctcagcctcctgagtagctagcactacaggtgagcaccaacatgcctgcctcattttttaaatttttttgtagagacaacgtctcaatatgttgcccaggctggtctcaaactcctggcctcacctcgagcaatccttccacctctgcacaccgaagtgctgagatttcaagtatgagccgctgcctcctgcccacttagccctttctaacactagagaactttgagagtggtttcaataccaactggacacttcccagcggtttaacctcaggcaaatcaaactcccatgcctcagtttccacatatatagagataataaaagtacctcctcaaagagtttgttatgagaactaaatgagttaatgttaggcaagcgactggaacatgatagacacaatatgtattagccattatcacctttatctcagtgttatattggccaccacccagagatacccaggagcacacacatcacattctttctacagcaatatgtgggcacgattacttcatgaccactgaatctaaaacagcacagcttggtaagacacagcggtcggatcccacctactgcaacacctctaagaggcgaccctcacaaaccagccatgcttagcctgagacattccgaagacctcctcttgattaccttactcgacgaacttattcctttgaaaatggaactagccgcacttttggaccagtgtgcctcggatacacttccaaatgtgtcaacctgaatctcagaagttggcgtgattttaaaaagttttttaagttctttttcctaaacatgtcctagtaggtgactccacagcattactttctttcatgttctcttttctatctggaaatccggtgataggggacgaaaccagcaaagcaccctttttcttgcttcccaaacgttagcaggtaagcgccccttgagccgagacacatcaagaagacctcacccgcaagttcattgatcaccggttcttttccctttccggcactaggagctgcgaagcacgacatgggcttggaggaagagacgctgcggtcacctgaggggcaggtgagagcgggcggtcctgcccgggtgtgagcgcgacatcccgcgcggcacacacgctcacagcccccagagaaagaccagaggcgctcgatgtatcccgcacaccccacacgcaacacactaactgcaccgtaccttccgtcccacctcccggcagcagaccccttccgggacgccgagagggctgttcctggagagaccgcagcccacgagtagcggcgcgtagggagagcacgcgtgcccaggctgcctcggccggcgcgcccccgcccccgcactcacctggcctgtgataccggtgatgagcgccacgttcctgggcttgcccatctcgccgtccccggagccccgggcgctggggcagcgtgccggtgcgtgtgccatgtcccgcggcgggcgtgcggtcggcggcagggcggagcgcggcagagggcaggcgcggtgccggcaggaacgcgggggtgtgcagcacgaagcgcctctccaggctgcgggcagggagggagagcgcaccgcgcgaccggccgccacagtctgacaggggcgcacgggaggccgtgcagggagggccgggggcgggccgagccggccaaggcgggcccgacgggccaagcagcggggctgcggcctgactggcgcagcgtcattcgcgtcagccggcgacgctgtagcaggccccgcccctccgccgacggccaccgcgcgggaggggcggggcctgccgccgccaccgcctcagggaagaggaaggaggccgcggcttcgcgtcccgcctctcgcctggctggccgtggggggcctggacgcagtggcctcccgaatctcccaggaccctaatatcgcccgaggatgctgggaggaacgctgagccgacctctccgttaggctgaaggtctgaattttcaaacccaggggtcacagggccggggtcatggactttgataaataattcctggaaa

SEQ ID NO: 35244 - DNA, 2300 bp, Homo sapien
tttggacacagacacacatacagagagaacgccatgtgaacatgaagacagccagctacaagaaaaggagagaggcctcagaagaaatcagcccttgatcctaaacttccagtctccagaactgtgaggaaataaatttctatcgtttgtcaccctatggatggtacgttgctgtagcagacctaccacctgtcttcagaaaagttctctagagaaatagcctttattcttcaagcttcctctgacctaccatttcccatcattttataaatattttcaggccctaataatgttgattttttttccatttttcttctactgtcacacacttctagggcaggtgtttggtggtgtgacaggaaattgactggtgtcaacttccagtgtttgtgtgataggaggtctcaaaactacaggataaatgtgtcatatctcccataagtatcagttttgctcagtgattttttttttttttttttgagatggagttttgctcttcttgcccaggctggaacgcaatggcaagatctcggctcactgcaacctcctcctcccgggttcaagcgattcttctgcctcagcctccagagtagctgggattacaggtgcccaccaccacgcctggctaattttttgtatttttagtagagacgggttttcaccgtgttggccaggctggtcttgaactcctgacctcaggtgatccacctgccgcagcttcccaaagtgctgggattacaggcgtgagccactgcgcccggcttgctcagtgatttttttaaggaaaatgttaaataattggctcatgcattaatttaaagcgtatttacatgaaaatgagtatagttttagcatattcccgtatatttcacagacatttctagcttatagcatgttcctctcaatggaagtgttccctctcctcagcttcagggtctcttcatcactcagaggcaccatcagatgtttgttgagccattctcctcatagaacgcagaggagaggccaggtgtgaaaccagaccagtctatctatagctaagaaatattcctaacggacctcgaggagcgcgagagggaggttttaaatgtaatcctgagcttttctgattttggggttccaggtctgctatacatactcttgcacgttatattgggcacagccctagtaactctgtgatttgaaatgatgatctgaagttatcgattagggagaggaatgtggacagagaagcagagcaacggagaccgggaagtttccgtctgtgtcctggattgcagccaactgcttaggcacacacacctgctgccctcccggctctgagtcacctcctctcctctccctgtccaacgagcagctgccaaatggcagccaaatccaacagatgtaagccgggaccccacctgtgtttgaattactttctttgaaatctgccacgtccaggtttattgacccgggcagtcttttcaacatttccttatgccgcatacgggtggggctagggactttcttgtgcactggcagtcctcagaagagaaaactttgaattcagctatttggaacctcgttactggttccgagcctcaggaaaggccagaagagcgagagccagcctagttagtcactcccacatctgtgacccccgtttacgggccttgtacgctactgcccttcaggtaccataaaccgggcttctcaaagggcactgcaacaggtttccaggaattatttatcaaagtccatgaccccggccctgtgacccctgggtttgaaaattcagaccttcagcctaacggagaggtcggctcagcgttcctcccagcatcctcgggcgatattagggtcctgggagattcgggaggccactgcgtccaggccccccacggccagccaggcgagaggcgggacgcgaagccgcggcctccttcctcttccctgaggcggtggcggcggcaggccccgcccctcccgcgcggtggccgtcggcggaggggcggggcctgctacagcgtcgccggctgacgcgaatgacgctgcgccagtcaggccgcagccccgctgcttggcccgtcgggcccgccttggccggctcggcccgcccccggccctccctgcacggcctcccgtgcgcccctgtcagactgtggcggccggtcgcgcggtgcgctctccctccctgcccgcagcctggagaggcgcttcgtgctgcacacccccgcgttcctgccggcaccgcgcctgccctctgccgcgctccgccctgccgccgaccgcacgcccgccgcgggacatggcacacg

SEQ ID NO: 35245 - DNA, 2300 bp, Homo sapien
cttccgggagatgcccacggatgtgggggaaagagtgggcaccctggtttttctgggtgtgctggaggctgaaggggtgatgaaagcctggaacttccactgaccattttgccactgcgaggagagaactcaggcaggaatcaaatgaattcaggaaagtggaaagtggaggaggggccacaggagagagggagagaaaagaagggactgagagaaagagaaagggaagaggagggagaaagagaatcatcttcatctctggatctcacagggggtgaagcaactgcttaccttgaacttaagtcttgggaaccaatagaatccctcttttgcttaggctaacttgagctggaatcccacaacctgcaacacaaattgcccccatggatctggttgctctcctggttaagagagcatgcctaaggcccatggttcttggtaagttcacctgttccctatgcacaacctcagcattgccctttaagcccctgtatcttacaatccagtcatcctgagtgacttgcagcttcctgaatacaaaaggatgtttcaccctcaggcctctgtacatttattcagtcatttattccagaaatatttactgaggacttattttctaagcactggagatatagcagcaaacaaaacagaaaacaatttgctgccttcatgaggtttgcgttttagcaaaggtgagaaaacaggataggatagaactaaaattaataagtaaaatatggagtatgtgcagacagatcacagaggcaccatgtgacccagtaactccactcgtagctgcacacccgggaaaagtgaaaacatcacatcacaaaaaactcgtgttcacaggagcgttattcatcatggccccaaagtggaaacagcttcatagttcatggacggactggatgtggactgtgagcacagaaagagtcaagaataattccgtgtgctgtcccttttgtctgaaaggcctcaccctgtcatcagagcacctgctggttgtctgtgccctggattcaccggaagcacatggatgacagggctgtattcctgctgctcagcaccgcagttggacggagtaggatctccaaagcaagtttgtggatcaaatgtacaactcaagtgtacagacttgcccccaggccattttcagcacggtgatatggctcagagaaacaagcatggacatctaaacacccagaacggctctgctaggccttggctgagggtctcttgactgttcaacacacaagaaccctgcaaaacctccccacatctcttcaagagcctctgtggctacttctccctctctttctcagtgcccttccagttccccatgattcttcctctgttcccacctgctaaactctcctccttccctcccctgacctacccatctcacctggattaggcctgcccttcagcatctgacatgctccaatccatctgttagtcagtggaacagaactgaaaagctaacctgcctgagcaaagtgtcctttctatttaaaaggtgaagagggaagcaattattagtaactgtgttgcaataatttcctttttgtaaattttactttaagttttggatacatgttgtgcagaatgtgcgtgtttgttacataggcatacatgcgccatggggtcttgctgcacctatcaacccgtcatccaggttttaagccatctcagcaaaacaatttccttttattcttgtcacacataaatgaatactattccacagttcttaatctgggatatggaaaaacttgtttgatgttgctgtgtgtttgcacgtgctgtttcttatgcttggaaatctctgctctttccttctcctgcagcgaaactccttgtccagatccctttcctggtgtccactcctcaagcaaggcagagctgggggcaatgcaacggggaaccctgttactgtggaacaagcctgggtcggcatctcaatctcatttctcatgaacggggacagcttgaaccagctgcttacactcatgcagccttctttcaccatttttagagttgtgaggagttgatggtgtaacgtaactcatccctccctggctgtatgggacagtagcatacctgaggatgggttaggattgctgagatgggctggagccggggcagggggcctccagctaagagaggcctcctgagcttacctcatttggtctcagggctattctcattttccagatgagcagtgatgtgaacaatattggaaagcatcaaagaaatggatgtaaagtgtctggcacagagtgagtgctcagtgactgtgggtg

SEQ ID NO: 35246 - DNA, 2300 bp, Homo sapien
gtcactcttattacaacgttatgttataaaaaactatgtcttgccagcagcctctctctggagtcttgttctccttgttgactttgaagaagcaagtcaccagaaataagtgaattctgccaacaacctaagggagcttggaagtggactcttcctcagctgagcctccaaatgagaacaaagcccagctgacaccttgatcacagtcaggagggaggctgtgccaccctcctacagaactcttagaagaaaacttaggaggaaaacaccatggcattggacttggcaaggatttcctgaatatgacacccaaagtacaggcaacaaaaataaaattagacaaattggactacatcaaaattaaacatttctgtgcatcaaaggacacaatcaacagagtgaaaaggcaacccctggaatgagagaaaatatttgcaaatcagacacctcgtaaaggattaataggcagaatatataaagaatccctacaactcactacaacaacagaaataacctgattttaaaaatggacaaaggatgcaaatagacatttctccaaagaagatttacaaagagccaaaaaatatatgaaaaggtgtccaatatcattaattattagagaaatacaaatcaaaaccacaatgagactttataccaattaggatgattactatttaaaaaaaaaacagaaaataacaaatattggcaaggatgtggagaaattagaaatcttgcccactgttgatgggattctaaaatggtgcagctatcatagaattcaatatggtagttcctcaaagtactaaaaatagaattatcacatgacccaataatttcacccttagaaatatactaaaagaaatcaaaaggagggactgaaacaggtttgtatgcacccatgttcatagcagcattgttcacaatagcaaaaggtggaaacaactcacgtgtccaacaacagataaatggataaagaaaacgtggaatatatgtatacacacacacacacacacacacacacacataaacacacaatggaatagtattcagacttaaaaaggaaggaaattctgacacatgctacaacatggatgcaccttgtggacactatgctaagtgaaataagccagtcatgaaaggacaaatactgtaggatttcacttatttgaggtggaattcgactagcagtcaaattcagagacagaaagtagaatggggttgtcggggatctggggaggggaaatgggagttattgtttaatgaatacagagttttcacaagatgaagagttctgaagatggatggtgatgatggttacacaacaataagaatacttaactctgctgaactgtgcacttacaatggttaaaatggtaattttttttttttttttttttgagacggagcctcgctctgttgcccaggctggagtgcagtggtgtgatctcagctcactgcaacctccacctcccgggttcaagcgattctcttgcctcagcctcccaagtagctaggactacaggcatgcaccaccaggcccgcctaattattgtattttttagtagagatggggtttcaccatgttggccaggctagtctcgaactcctgagctcaagtgatccacctacctcggcctcccaaagtgattacaggtgtgatccactgtgccctgcaaagtggtaaattttgttatgtctattttaccacaatttaaaataagtaaataaaaatcatttacagataaaaggtacattcaaaatataaaatacatcaatgaattttaaagtaacagagtaccaaaagtttttttatattgtttcagaatctatgttgcaattaacttttaaaaattatcatttatttaaatttatgaagactcaaagaatatttataattatccaaaagactatttaaatacttctccttttgcaactacatatttatgtgaagccagattttccttatacgtttcaaccaaaacaacattttgcaacagactgaatgcaaagcgtgaatgaaaatccaacttcttctattatgccagacatgacagaggtttgtttaaaaaaaaaaaattgtggaggaggagccaagatggccgaataggaacagctccggtctacagctcccagcgtgagcgacgcagaagacgggtgatttctgcatttccatctgaggtaccgggttcatctcactagggagtgccagacagtgggcgcaggccagtgtgtgtgcgcaccgtgcgcgagccgaagcagggcgaggcattgcctcacctgggaagcgcaaggggtcaggg

SEQ ID NO: 35247 - DNA, 2300 bp, Homo sapien
agaaactaagtgtgtgtgtggatggtagtctctcagaaatcgagtcagaaattggttgccaaaccatcatccttcacccacgctgttaggtttgtttgtcactactgttactgcggaggtagcccaggggcaacgtaacctctggttttctgaaaggtgccgcatagacttcttctgtgaccaatttccataaagttcgtttagcagttcaaactttattaagactcttgacaaaaacagctgctagaattgcaaaggaatgtaataaaaaacatagagtcagaaacaaccggagtctataaaagcaatatccagagtggccaagtccccttggggtgcaaactgatcccggtctccatcagcgccgcgcggacctccgtgggacacccgggctcgactgaagcgcacaggctggaggctcctgccatcacccggctgataacctagttacagtccgggcagggtgccaagtaaagaatagcacaagcaggtggggcatggagttttgaagtgtgaagaagcactggagcaaattcattttatgttgcttttattatgcagtaaaaaaaaaatctccaacacatactcatttacaaaaaaaaaaaaaatgttcagttgattgtagtttccatattagcacgaaggggcacaaactggtgttagccagagactctgagatgcatttggaaatcttatatagcaggaattcatgctgacaatccactattgttaagctgctctgatgtggggactctttgaaatacacttcatatgttattagaatgacctctagaccgttcagggaaatatagggacacaatcactggtattgctatccacataaaaatgtaatattcagaaaatgaaaaattagaaaatatagtttatttttgtggttttgactgaaatcccaagtgaggcagtttgaagaagctggcgtgataacggaggaaatggaatcaaaagttagttccctcccttggcccatccaacacacaagcacagaatgaggagaggaccctctctggagacccttggagtgcaaaatcgaatcttcaaagtaggttgtaggaacagacattaccaggactggccagtgaagaatcattttggaggatcttggatgagtggccatcttagtgtgaaagctgggggtacaacaccctgtgtaccgtcttcagaggatgggattccatttggggatatagagaggcaatcattcaagatctcccagctgtacagctccaggcagtacttttatttgcaacttcccctgccccctcaatgtgagtgttgtcccctgggttgtctaatgtggtggtcctgccattcactcattcattcattcaacaaacatgtgagagctgattgtgtgtcaatcactgtgctaagcaatggggatgcagagatgcacacacagcccctgtcctcaaggacttcagagatcaaacagagatagacaaggacaatacaagttctatgtcaaagttgggagcacagaggaagatcaactaactcagattgccagggtctggaaagggttcgaaggtgaggtagcagtggactgagacccagaaataaagtcaagtcagtggataagggatggagggtttttcaggctgaaggattcctggacagtctggagcatttgcggggcactgtgcctgctgagggaggagtgctaggtggtgaggctggagcacgggcaggaggaggctgtggggagaggctggggaggccagggaggccctgtggggtccagggtgagatggcagcctcctttgcagggggctcctggcttctccccactcagcttgcactatgtgaggggaccaaagtcttggacagtgtctgctctcccccctacgttgctcatgttttataaggaagagtgaatggctcagttgtccagattcaccaagagggtctcaaactgggttctataaacactggtcagtgtccactgcagaggggctgagaagatgctggaagagccgtttccctcacacgctgaagacacgatctgtgaagacatgaaggcacatgttacagctaaaacccagttccactggcatccgcaggacagcacaggccaatcacagctgacacagatggtgggaggtgctcgtgcctctcacggtgatcagaaacatcaccgttgcaggtgacgccacttcacttaacactgggtgtgggcggattcatccgctctgaaaattacgtctttggtggacatcagcgtggacttgggtgaggactcacaacttttttgagggttgtgtgtgtgtgtatgtgaattg

SEQ ID NO: 35248 - DNA, 2300 bp, Homo sapien
tattcacattaggcagaaggtggaaacaacccaagcgtccatggatccatggacagatcaatggataagcaagacgtgatgggtgcgtatgatggaacgcgactcaccttaacagggagggaaaccctgacacgctacaacgtgcatgagcctgggggacatcctgctaagtgtagtaatcctgtgataaaaaggataaacgttgtgtgaggttcctagtggtcaaattcacaaagacagcaactggaacgggggagagaagatggggagttggtgtgtagtggggccagagtttccatctaggaagaggagaaagtcccggagatggatgacggtgatggttgcatagtaatgtgaatgtacttaatgccattgaactgcacacttaaaaaaggttaagagggtccattttatgttaggtgtatcttagcagaactaaagcaaaacagaaggcagtgttaaaaacagtggatgacgagctctcaaggtggtggaggccatcgcccacttcacttgggggacccctgctctcagaagcacacacttcacggggtcacctggtgttcatgccggcgacctttctctccctgcctgtggcctggccccaggtcagcattcaccaggtggggagagtctgtgcagcgcggcgtgggccttgcacgctcctttttgtgtttgtttgggttctacttttccggactgcgacacttataacttcattagaaaatatcactttcttcagacccacacattcatttattaggcacttacgctccataaaatgaaatgcacagcaaggccgctttcatgcttccttgaagttctatcaacttattttgggggcagatttgacctgtcagagcacttcctccgtgggagctccatatctaaatatgtgcatatatagttttctactttactgacggtagctttcataaagccgcttgaagtacttactaaaaatccatcttaagactctttctgcattttgggaggccgaggcgggtggatcacctgaggtcaggagtttgagaccagcctggccaacatggtgaaacccggtctctactaaaaaatacaaaaaatagtcgggcatggtggcgggtgcctgtaatcccagctccgtactccagaggctgaggcagaagaatcgcttgaacccaggaagcagaggttgcagtgagccaaggtcgcgccattgcactccagcctgggtaacaagagtgaaactctgtctcaaaaaaaaaaaaaaaaatcttccccacacataatgtggcaggacaggaaacactaggattcctccagtttatggggagattgggagagctgaggcttcacaatgacacagccgggtatggaaaacaccaaaagaaatatgcctttttggatgacaatactccaccccaatttccaagtatgctacaacttttcctcagcctcgatgggaggtatttacagtgagtggtagaagctttactgcaatgccctggtagacacaggctccaccaggcttggcttctacactctcactgggtctatggatgagcacagaagccaggtttctggctcacagagaacctaagtgctgagtttatatataaagtgcacagtgtgaataattaaatatgaaaacgtgtacacaccaaacaggacatttttacttaatgccaaagaagcacaaacgaccctttcttttgggagtttcacaagcatttctgctcaacagtaatcccccagtgacagtgatagtagtggtttcaatattttgtttataaaaagcaacattataaaatgccctgaaaggtcttggcttcttttgtgagctctgaactattcagaaattcagcttgctatctggggacaacaaataaatccctactctaaaaaaatgggattcgggtttttctcctgtgctgcttcctggccttaacgcttcctggggacttaccgtcatttgctcagttacggtttctatgggatgagtggggaagccgcgtggtgaggaagcctggctcgcacccggcctgcgctctctcgggcctggccgcatcggccaccagggggcagtgttgtcattcgctggcgacgccgccccgccccgagcggatgccaccccgtttccagcctccggtgctcaccgtaagctctgttattattatcttttgatttataaagcgccgttcctcagcagattccccgccccccagctgcttccgagaaagctcgcagaagcgttcgtgcgcaggcgcggaagccccgcacagcacgcggtgggcccggttcgggggggcgcacggcct

SEQ ID NO: 35249 - DNA, 2300 bp, Homo sapien
cataaaaaggctaacttattgaaatgccctcaaaacggtttctctatatcctgcaaactttttgatgccacagtactccttcacaattggacagctttatacatgatccatcagtgatttaagcatgaaaccaaatggttcacgtagcacccccttctctataatgacttttactcacaaacatctgttttagagatagtttagaaaagggcttccaaagatattctgcccaaccaaatgtactattgaatattgataaggagacattatgtcatttcataatgtgtttctgaatttctgatctcattggaacctcttctccacctggacaggttggggaggggagcctgatcccactaaaggctgaggaacgggatcctgggcatttggcttctgggatggtgccctccagcttgtaaagaattgggactgagggttcttaactctgaaaactttttttctcttttataaatggccttgactttaaatcaaatctcttactttcccaagacctctgtttttctaccccagtaaacattaggtgcacttgtaaggcattctgtgaacactgagtggctgcactacaccccattttctccccctgcaccccaagactgtcaggtcagcaggctaaggtcttaccagggcctagctccaagggaacacttagtcaggggttttaggcattgagaccaaactcagcaaaaccttggaactgctgagactgaagaacgactggagagaaaagccctcctctgccgtgcgactttcccataggcgttgagcaaagggaagctctggaggccggaacgttcacgtgacagtgcatgttcagtgtggctgtttgaatggagcaggtcaattcccttggaactcatcaatcttgggaaaaatatttctccaagaaggggaaattcatactgaataatttagaggggcagatgtcaggcctgagcgggcctccacagcacatttgggaaggactgaagcaacctccttttcttgctcccctcaaggcctctgcctgaactcaggcattatggtgaactgtgaagccgtgcagaggacaggctggataatgcagggttggcaggatacccgcaacctcatccaccacataattaaaggagaaagtacccacacggacaagcccgccccgaagtgaaaggcctgatatgttttttctgagcatcgttgtatttttagttgtggttcaaggacaatttgagtgaatgatggttgttttcattgctaatgtgtctctttctcctggcagcctgagaatatcctgtgtgtgaatcgggatgctaagcaaataaaaattattgattttggattggccagaaggtatgtctatttggacataggtgtacgaatggagctgggggacatgatggttgcccttcctttgcaaacatatatctgatctgctctttggtttcatgatctcatttataattaatttaacaaaaattatgtttggccttaacttgctaaatttgagacttgagtgtttagaagtttctataatgcatgcagtaaaaagtataaaaaattaaaacctaatacagtgaagtttattaaattagaagccattaatttagcatttgcaagagtttgtcccctctttcatatttgatccatctgtacagagaagatttactttaaaaatattaacaacgtaagcaagtttgcaaagggttctggcacataaaagattcttcagggaacaaagagtttacgtggacacattaacaattcagcacattaacgacacatataaaatggatgttgtaaattattgcagtactgtgtttattcattttacaggcttattcacatcatccccatgtcaatgactatatcagttttcctcttgtcatcttctgtaattcagatgttctcattattcacagcagcttctccaacaactggttcagcttttaaggtttcctagtatgaattttgacttttaaattttctggggcctctttacaagtttttgagcctcttgcttgattgtttgatttccttcaatgtttgtttgtctgaagtttgctgtatggctgaagtcattttgtctcatagactacatcatttcagtgttcacgatttttgatcgacacgtccatccttccactttgtctcttaaattgcagatacaaacccagagagaagctgaaggtgaactttggaaccccagaatttctcgcccctgaagttgtgaactatgattttgtttcatttcccactgacatgtggagtgtgggggtcatcgcctatatgctgtgagtagctct

SEQ ID NO: 35250 - DNA, 2300 bp, Homo sapien
cactaatgaatttttccgggtataagagcatctttaagcatgcagaacattttatgggtatggacttaggatcctgaggctaggctgatagaccagaatgagtatgcatgtataacctgtttttttgtggtcaagggttgtgccagcagtgtgcttgtcctgtatgccatcggaagctgggaacagtgtgatgcagcagaaccagacaatcagtcacttttagcatggattattttaattgacttgctttttagggcaagtagacacaattaaagatcattctatctagtcattaatcaaatatgtattgaatgtatattgtgcatggaaatgtctatatgtggatgccttccaaattcttatctccagcctacacccctccccggaactccagtttctatctccacagcctattcaacttgaacgtttaatggacttgccaaagacttcatgcctgacctttccctccagagttgcccttcccacagccgtctccatctcagttaatgttcactctgtctttcaagtgctcagaagaaaatatgcaaaggtgtctaccatctttctttcataccccatacccaatctatcataaatcctactgattctaaatgtactgtggaatcctgcatgggattctggaacagaaaaggggcatttggggaaaaaaaaaacccagcaacaataaagtattgagtttagttaataataacgttcaccatggttcattaattgtgacaagtataccataccaacgtaagatgttaaaaacagaggattcggggtgcagggcaaggggaactctgaactacctttgcaccttttctgtagatgtaaaactactctaaaaggaaaagtttattacaaaaaaataagctaaggagcagattctcctggcctctggctcactcaagcctgtggttggtttgctggagccaacgagataggaagtctgcttttgcgtggtggtggtccgggtggaggatgtggttggatcagcagcagcccacacacatcttgcctctggcagggcatttgttgccttatcagtacttctacacaatttaattatactaacaaaattggtaacctcaaaccagcttagtctttgtataatacttttgtcagataatttatctccacaaatttatagttccacttcattacttttgctgaagaacaaagctctccaatctgaaaaataacaagcgttttgtgttttaaaaaagattttgctgtaattcattaatactacataaaatggaaaaatatgtatttttatttcacatggaatgcatcgatctgaattaaaaataaggttttttttttaaaagaagcagaagagcagcagaggctggtgttagaatggggcatagaggggctaacacaggctccaaataagaggtgacaattggccaggccctgaaaaattgcagggttttcaagactgcaaagtccagcctctgggcaatcaaagttttatgccacttcagtgaatctagggatgcactactgtgagagtcgggcaggtgggttgaaattcccctttcttggtctgtgcagaaaactacggatgaagtcctagtgttgcttaaggagaatttatgaaaaatttattcctgtttcctggatgcctgtgcctttgacctttccctagagctagaaatggttggagactttgcaaacatctttaagaactgagaaaaataaaacaaacttgctaactgctttcagaagatcttctatattgcagttggatatgctcaaagcgtaagatgggcaaacagaggtggctgtggggttgccacacctggcattttccctactgggggaaatttaatgagcacttaaataatcctgagtctgaaaggggcagaaggtccaggcagatgattgccgaggacaaatctagctttgtaaatccgagagtattgacacaatgatacgagggaaaggtgaaggtgatatttcatccagtgttcccggttcatcctctccttacctgacctctgaaatggagccattggccttgaaaagcctggtgtctaaaattaatattcttccccatctgactaagaaggcaacagctgagcaacgtgagatcaagagccatattaatttaaacaggggctgaaagtggcatttgagagagaagatacttcctctcgtagtggacacttgtcttttcagaagatttatacgactgagagtcaaaacttttaccagagactttcatagtcagtttgaattctgcaaaatttctctttatcttctggaatgtatgctctagacttggagtg

SEQ ID NO: 35251 - DNA, 2300 bp, Homo sapien
gcctgcattgctcagctctggggtggtgaacggccctgggtgccgtgaggcagtaagcagcgcttctcagggaggcttgggccgcgcaggagtccccagttggggggaggctcaggcatggcaggcctgagccttgcgctgcgtggaggcaactacggcctggcgagaagtgctgtcccaagtgctaagctcctcaccgtcctgggccggtggtgcaggccgctccgagcgcgaggcttatctgagcctactcccacccggaactcgcgctggcccgcaagcaccgcgcgcagccccggttcccgcccgcgcctctcccaccatacttccccacaagctgagggagccagctccggccttggcccgcccaggaaagagctcccatagtacagcggcaggctgaagggtttcgcaaccacggccggagtggacgccaaggcagaggaggcgctgagagcgagcgaggactgagagggctgccagaatgctgtcacctctcactgctgagggacaaatgaaaaaaaaaagctcacggtcgggcgcagtggctcatgcctgtaatcccagcactttgggagaccgaggtgggcggatcacctgaggtcgggagttcgaggaagaaaccccgtctgtactaaaaatccaaaaaaattacctgggtgtggtggcggacgcccgtaattccagctactcgagaggctgagacagcagaatcactggaacccgggaggcggaggttgccgtgagctgagattgcgccattgcactccagcctggacaagagtgaaactgcgtctcaaaaaaataatgaaagctcacgatcctcttttggtagtttcacgttacatgatgattaaagtttaacttgtttctctagcgtttctattaatcttatttttgagcctaacttttttagttagaaacaactcttaaccagccagccaggcgtggtggctcagcctgtaaccccaggacgactccaaaggctaaggcggaagggtcccgggcgcccaggagttcaaggctgtgagctctggtcgcggccctgcactccagcctgggcgacagaacgagtgagaccctcaatgtgctcttgcccagatgaaataaaaattcaagttttggccaaatttcggaaaagtcttcattctccctcaattcatttacctcttctagttaccaaaaatgcctgttttgagatacatgttttaaaacgggagacttagacaaaagcaaaaaataacatggtaattcattcaaagatgcagactaccacacttgttttaatctgatattctttccatttctatccgtctaggacgtaattgcacacgggcgcctcccatcatttggttgctaaggagacagaaggctggtgtttccgatttgccactattacacagcggcccgcgagaagcatctcttggctcgaagcgcgctgtaggtgaaccgcccttgacttaaacgccaacacatctaaaagggggcgagggacgctttattttcatttccctgaccactactgaggtgagcatttctttcactcgcgtacttgtttgtattttttctgctgttcacgtccaatagaacactggttttctattggaggcttttgggttttttcccccatttccctttcgttacaaacgacccgctgcggccgcctcctgcttgtccccacaggcccattcaacagcccagcacggaaggccgggaaagcggcgctcgccgctccaacaacctcgcgcagtccgtggctcctccctgccctcgcgcgactcgcaggcctgggcggagggctgcgtccgccaccgcgcaacctcgcgcacgcgcaccacgctcgcctcgcaacccccccccccgcccctcccccgcccccgcaaaggctgttctcagagtcggaaatggacgcacggcagctggggcgaatggccgcggactacacttcccgaagtgccgcgcgaggtattctcggcggtgattggggcaaacggccacggactacacttacttacatgccgcgcgaggcgcctccgccgccggggcaaacggccacgaactacacttcccgacacgccgcgtgaggcgctgccagcggccggccgagggcgggcggacgcgggagctgcggacgtgaggcatgagcggcgccctcctccggcccgcgagcgtcctgctggttccccgagcgagggtctcgcggcgcggggcctagcggagggcatcgaaggcctccgcgtgcgcacgggttgctgcggccgcgccgggcgccggggagggcggcggccgccatggaggtg

SEQ ID NO: 35252 - DNA, 2300 bp, Homo sapien
caaaaggacgatgtctgtgaatccatagttttacaagatgtggactcttagatttgatctgcctttatcttccatcggtctccccgccccctccccagactttgatttagtaaccgaattcgcaaggaatcagcatgtttaaattgtaaagaaacatttgtatattccgtttgtacataataacggattcagctttgaaaaaaatcaaattaattctgttgtgcttccttccttttccactagttgttggtttaacagactggtatttattcttaagaataagtttatttaacattcttatattcttgagaatatattgattttactaaatatactcatgtatttacaaaactaacataaaaactttttcatctgcaagtcattttcatccggtatttccgtaacttttctcataatgccttgtactctagagaagaaacatccgtgcattttggtgtccagttctgtgtcccttcgtgaggcgttagcgttccagatgagggcagttaggatattgtgagtctagaaagcatgtcattggaaaaacacttgagaaaaaaatggaggaggtgagccagaaaacagagaaagctaagaagtgcttaaatacaggatgcttttatccataataagggagaagaaccagcatcaggaagggaaagggagaattcagggatcaaactgtaaagagttcttgtagctttgagattcagactcgtttgcacacaaggcttttatgatttttctcctatttttctttctagctttatctcccacaacttaagcacaccccctttaactccagttcctggaatgaattgccctttttgtgccttcttgtttgcactcatgccttccctttggccaggaataaaccacatctatcccaaataacatcttatgatgatggtggtcgagttgttgacgtctgtccccatggatttagttgttaaccccatttaagggattgagcagtatcattcttagtaattgtgaagtctttacataagatcatgagaatggataatcagctgttggtggccccagacagcaagaaggtccttagggagacgagtgggtgagctcatcccacctaccaaatgccaggcaagaggtttgggtggtccaggctgctcagtgagatgggcgttggtcatttgcaagcctaggcatctgtgacttgcgagcctgattccaaaaggcaggcaggcggggatttctgaaagaagcagccacagaatgggtgctctacaacttttagaaaagaaagtaccacctttccatttaggtgcagatttgtcacagtcattaaacagtcttcagtttttcttctcatcctttagtactaataacaacattcatattaataacagcatatacatatttgttgaggacccaagaagtgctttacctgggtctccttggttttctagtaattgctaatgtgaccacagtgctgcccttcatctcctaccagagtgaacatgcagaagtggcctacagtcatctcaaatgctaggtggatgtcattggtctcaaggcaaatgctccctcactctccttttctcagctgtcctgagcttccagttcgggctgtggttctgcgatgagttctgcacctagatccttccgtgctgtctcggctagaggagggagaattttctctttggtgagaggtcacagctgtcactctgctaaatcaagacagccgttctttactgggattccaaagatcttaaagagtcacccaaaaaggaatcaaaggtggttagggacagaggagaaaaggtcaggattagcctaaggtttagctactttcctgttttatttataatatttttgttgttgttgtttttaaatgtcctgtggtatttttgattgtttctgtgctgctcagcattcttccgaggtcaagttgcttttggtaaatagtgatgctgcgtgtggtggttcccatgggtgctggtctctctgtgtcttaccagcttttcaaactccatgtatgtcatcttttctagaccactctggctcacatcatagccagcaacagcaagaaacatagcataaggtttgtgacattatctgcaacaaatgccaagacaaatgatgtgcgagatgtcataaaacaagctcaaaatgaaaagagctttttcaaaaggaaaaccatcctttttattgatgagattcatcggttcaataaatctcagcaggtatattaacttccttctaccttttggtcgttgtgaacatcaaacaatataaagtgtgtgagatcactatacaaacgctagagacttacg

SEQ ID NO: 35253 - DNA, 2300 bp, Homo sapien
caatttcaaagttacacatttattcgaaagaactgcgcctccacctatggaactcttaaatttctggcacaaaatgttggtctgttctaacttccaccaggcaaccaactttgcaatccactaactttctttctggccctcccttaaaaaagcaacatccttctgctgtcgtgccctgaggagtcagcacctcctctgcttgaagaaatctacccccctcaactcttcaggcaggtactcctgatccacaggctcgctgtacatggggttgtacttgtagcctttgccatagcccaaatccttcatcagcctagtgggcgcgttcctcaggtgcaggggcacggggggcagtggcccctggtggttcctcaggcaggctttgacgttgttgtaggcgctgtacacctcaatggactttggggctctggcaaagtagaccacacactgggccagaagcacctaccaatgacacagaggacacattttactagcaagatgccaagcttctgttctgcagagccccttctgatacacagctctaggtaattctgagaagatccccacatgcttttattatcccccttttgcgcctacagtctggataaccacctacgacagacagaagaaattctcatgaggtgaaacgagaggcaaaccaggtgagtggttttcatttttttttttaactgaaggactttttactacattaaatttttcttaagcccccaatatataaaagagatgaatatgaagctgctctgggggcgaacttgcagaggctttgctgttcagctcctttaacctttctgctccctggaacatatggagcatgtgctctgaaccccggaatcccgagaacagtttgaaacatgacctcgttgacacagaaggtttccctctctaggagtctaagagtctacaattggaattccaaagccaagcagcatactcagtgggtccaatacaccaatggtgaaggagggacatttattcaaatctacaaagggacagagcacgagagagaaaagaagtgatttgcaagaaatgagctgattactttacctcacattcaggcatgcctataaaatgacagccttggtaggcagcaaccgcttgtgttaacgcagacgggtctgccagacctgccacacacagagacaaaggagagtttcagtcatgacacacactgtcctcctggcctatgtgcaggcgaccacagaccaccactgcttgtacacttggtgaccaaaacaatcccatgtagcaaaacagcctgacttagctctagtctctgatcccatgaacttatgcaagaaatattgagagtggttactgtgtggtgttaagaactgtttccttgtggataaaaactctgcatctagaaaaacatgagtctctgtataacaaacataagaagtgaaggctatggagacattcaccaggatggaaacactaaaaacaaaacatcccctaagaccaaagaagaggagagctttcctgatctttttcttcatatagtgtctagagtcttccatttctaccttgggagctgtccaaagaaaaccttgaacacctgacttaaagcaaatttaaaagcagctcatctattgcaatactctgaatagccactcatgttagtaaaaacattcccgaagaggaaacagaaaatggtgactttatgaacataaacattcaaaagcacatacaccaggaaataaacgactgagctcaggcataaagtcttatcttctcctgccagtctcacatagccctgagacattcttcctgctacccccgcccaccccgccctgcaaaaaaaaaaaaaaaaaaagccacgatgtaactgttagccatttccccaccctcatggacataggactccgggaccctcccatcacactcacctatgtcctcgctggcaaacctgacaagcctccgtgccacgtagagtgggtcctctcctccctcgagcatgcgagccagccagtagagggaggcgttctggtctgagccccgcatggacttgtgcagggcggagatgcagttgtaatgctcctcacctgacatcacaaagagcaccactcacacagagctcacaggaggggcgcccaagccatcttcacctccgccagctgacttccagaaagcctgaacgaataaaggccctgagaaagccgaggagaggtttgggcagctgccttaaccgtgctctgagtggggtgcaccagctgctggggcttaatcccagtcctattcaggggaagaggctgctgcagcagaaacctgtggctgtcgacatg

SEQ ID NO: 35254 - DNA, 2300 bp, Homo sapien
aagggtgagggctcagaagacaaggagagctgtagggagagcctaaatcatcttagagattaattaagtggtctggtcttgatcagaatgcggttagaagtatagatggtaaagacacttttgatgagatcttaaaaggaaactggaggaaaggtcatccttgttacacagtggcaatgaacttggctgaattgtgtctatgtcctagtgttttctgaatggcagaacttaaaggcaataaactaggatatttgatggaagaaatctctgagcaaagcgttgagagtgcagcatggcttctcttgactgcttgtagtaaaatgtgagcagagagaatgaattaaaaacgaagtttataatcaagagggaagcagagcttaaagttttggaaaattctcagcctggccatgtaaagaatgaaaaggcatgtttgggagggaacaccaagagtgctgccaggttcacatttgataatgagatgagtatgtgtagaaggaagccagatgctatttatcaagacaatggaagaatgaacccaaaggcatttctgaggttactggttctggattctcatccctgtcccagagtgccaggaccctgagggcagaatagttttaagggaggactcaggacaccatggaaccttggggcttgctgcctagggctgcctcaagtctctgcccccccaccccccacattctggtgcagcactctttggccaccatcccacgtgtggcttatgcaggcccttgtcaggccacccttcctgtaagccttggcagagtccacgtgatgctaactctgcaggtgcacagagtgcatgaactgtggagacacagccacctccacctagattttgaaggatgtgttggggaccctgggggcccagtctgagaattgtcactgaggtgaggctgctgcagaaaaccctcactagggcaatgtttagtggagcagtgggattggggccactgcagagagccccaaatagagtaatatctagtggagctgtgggaacagggctgtccctgagaacccagaactgtccagccaccagcatgcaagtctatcctgggagagcctagacctcaacctgtgagagctgctgcatgggttgcacctggcaaatccatgggagtggatcccctggacactaggggacccagtctccacccccctgtgctcggaatgggggacacagcatcaaagaagattattctgaagccccaagatttaatgctgtttgccttgttgggtttggacttacttgggaccagatactcctttcttcttgcctgcttctccctttgggaatgggaatgtacgtcctatgcctgtctcatcactgtattttgaaggcctgtaacctatttgatttcacgggctcatagctggaggggaatttcacttaggatgaattgtactttgaatcttatgcctttctaatttagaagatatttaggtgagactttggacttacattttaaagttgatactggaactttggaggccactgggatacaatgcatgcattttgcatgtgagaggggtatgaatttggagggcaggggcagaatgctatgctttgaatgtctgtgttccctgcaaaattcatgctgaaacaatcctcaatgcaatactaacaggtggtgcctttaggaggtgactggattatgagggcaccttcctcatgaatgggattggccccttatacgagagacttcacatgagatttggccccttttgcccttccactttccaccattgaggacgcagcagcaagctgtcatcttggaaacagagagcaggtgtttggaactggttctgtttcatctgattctgggggcccctctttttccctgtgcaagatccccaaatttgcttccttctctcaaagaaagctcccaatatagatgggactcaaagggagtcatttgccctctaagaggtgtcacaatatgtcgtctcagtcattcacaccttagtaagaaaaagcttttcaggtccttgccagagattcggggaaaggctttgaactgagaaagaagccgcgcccctgaggagggcgctgcccggaagccacgctcacttctgcttgcacttaggcgacctcgggagctcggactcctacgcagtcaccgggaagggccgccgccccgcccgcggctgctggcccgggtgacgcttccgcctgctataagagcagcggccctcggtgcctccttcctgacctcgcacccagctcggagcccggagcgtgcctcggcggcctgtcgggtaaggccgggcctcggagcggt

SEQ ID NO: 35255 - DNA, 2300 bp, Homo sapien
ttcgcatttctaaaagtgtgtccaaagtttcctgaatttttttattgttttttctttaagctatctatttccttcagtatttggatttccttgcattgggctttgcctttctctggtccctccctgatttaacttaataactgacctcctcaattctttttcaggtaaatcaggtatttcttcttggtttggatgcattggtggtgaactagtgtgattctgggggggcacggggtcttgatgagctttgttttgtcatattgccagggttggttttctggttccttctcatttgggtaggctctgtcagaaggaaagtctagggctgacagctattgtttatatttttttgtcccatggggtgttcctttgatgtagtactctccagcttttcctgtggatgtggcttcttgtgagctgaactacagtgattgttgtctctcttctgggtctagccacccagcgagtctaactggctccgggctggtactggggttgtctgtacagattcctgtgatgttaacctatgggttaatctatgagttaatctatgggttaatctatgtgatgttaatctatgggtttttcagctgtggataccagcacatgttctggtggaggtggcagagggtgcaatggactccatgagggtccttaactttggggtttaatgctctatttttgtgctggttggcctcctaccaggaggtagtgatttctagaaagcatcagctgtagtagtgtggaaagggaccagtggtgggcagggccctagaactcccaagattatatgtcctgtgtcttccactaacagggtgggtagggaaggaccagcaggtgggggcggggttagtcgtgtctgagctcagactctcctggggcaggtcttgctgtggctgctgtggggaatgggggtgagattcccaggtcactggaattgcgtaaatagtaggattatggttccctctgctgagtcatgcaggggtcagggaagtgcgggaaagctggcactcacaggcctcacccagctcccatgcaaactgaagggctggtctcactcccactgtgccctccacaatagccctgcatctgtttccaggtgaagagcaagatggttttgaaaacttgtcgcaggctttccacctcctagctgagaaagaaaagagctttagttcttcccacgcctgtggagtctgcacgctggattcgagccccctcctgagttctggccaggaggcttctcgcggggttcaaattgttacaaagttcagctacagaattccttctccctgtggagttttaccccctgctcctcaggccaccctcccaaaggatccctgtggtgccagacaggaatgggctgctaggggacccagcaagctcccagggccttactgctgcttcctctccccctgtttttcgctgggctctccaacttgactctgctccaggtaaagtcggaaacttctccgcaaacagaccttcagcttctccagtgggagtgtgtgttggggagaggagggtctccctttcccacttccacagttggggcactcagtatttggggtgtctcccgggtcctgcaggagcagtctgcttccttcggagggtctgtgggccctctcaggattgcgggtttgttcttgcagtggatctggagctaaaattcacagtgggagcctctgcatgctgctctggtcagagtggcaatctagtcctacctcccgtgtgccatgatcctgaaatcctcacaacaggatgttaaagtgagaatctttctgtttcagtttcgccacaaacacccatacaatggatgtgtcataacagaaagaacaaagccaaggcgattgacctgacattccagggcacagtcagctgttcattgagaaatatgctgagaggccgagtcctgagttttgtaaaggctgggaaaaggcagcttctagtggttctgtcaataaaacattgaactctggtgctctgactggggcagaaccaagttcattggtcagcagtgtgtcaggttggatgctgtgggcgcctggcctctgaaggtcactcgaggctcactgtacagctgtcgcttgccaggcagcccgagagagttctggcgagggctgcgggaaggaaagggggcggcgtccttcacagggagggtgcagctgacctccctccccttgtgcagactggaaaagaatggcccagatcctctggactcctcagatgagcggattcagagagaagcttttgagagcgtgctggcggagacatttttcacaaaagagcccttgcggtgctgg

SEQ ID NO: 35256 - DNA, 2300 bp, Homo sapien
aaaaacacaaacaaacaaacaaaaaccttaggactatacctaacaaaggagttgaaagacctctctacaaggaaaactaaaaaaaactgctgaaagaaatcatagatgacacaaacaaatagaaacacatcccatgctcatagatgggtagaatcaatattgtgaaaatgaccatactgccaaaagcaatctacaaattcaatgcaatccccatcaaaataccaccatcattcttcacagagttagaaaaaacaattctaaaattcatatggaaccaaaaaagagcccacatagccaaagcaagactaagcaaaaagaacaaatctggaggcatcacattacctgatttcaaactatactataaggctgtagtcaacaaaacagcatggtactggtataaaaataggcacatagaccaatggacagaatagagaacccagaaataaactcaaatacttacagccaactgatattcgacaaagcaaacaaaaacataaagtgggggaaaggacacccttttcaacaaatggtgctgggataattggctagccacatgtaggagaatgaaattggatcctcatctctcaccttatacaaaaatcaactcaagatggattaaggacttaaacctaagacctgaaactataaaaattctagaagatgatattggaaaaatccttcaacacattggcttaggcaaggatttcatgaccaagaacccagaagcaaatgcaataaaaacaaacataaatagctgggacctaattaaactaaagagcttttgcacagcaaaaggaacagtcaacagagtaaacagacaacacacagagtgggagaaaatcttcacaatccatacatctgacaagggactaatatccagaatctagaagaaactcaaacaaattagcaagaaaaaaagaaacagtcccatcaaaaattgggctggcatgaatagacatttctcaaggccaatcgcagtggctcatgcctgtaatcccagcactttgggagggcaaggcaggcagatcatgaggtcaggagtccgagaccagcctgaccaacatggtgaaaccccgtctctattaaaaatacaaaaattagccgtgtgtggtggcatgtgcttgtaatcccagctactcaggaggctgaggcaggagaatcgcttgaacctgggaggcggatgttgcaatgagtggagatcgcgccactgcactccaatctgggtgacagagcaaaactccatctcaaaaaaaaaaaaaaaaaaaagaaagaaaaaatgttcaagatcactaatgatcaggaaaatgcaaatcaaaaccacaatgtgataccaccttattcctgcaagaatggccataatcaaaaaatcaaaaagacattagatgttggcatggatgcggtgatcagggaacactgcagtgatcagcgaacacttctacactgctgatgggaatgtaaactagtacatccgctatggaaaacagtgtggagattccttaaataacttaaggtagaactaccatttgatccagcaatcccactactgggtaatgggattccctctactcagaggaaaagaactcattattcaaaaaagatacttgtacatgcatgtttatagtagcacaattcacaattgcaaaaatcctggaaccaacccaaatgcccatcagtcaatgaatgggtaaagaaactgtgagatatatatatatatatacatcagctctgcatactggacacctcattttttattttttattttatgtgagcaagaaatagatttccattgtgttacactattgagactgcaggtttatgttgtagcagctaggattacctagatttacttttaggaaagacttctctgcaaggaatgtggagaatgggttggaggaggcaagaagaggaaggaagacaagtgagaatacatgtgttggaatcaactgagtgattgctataggcaacctgtaggcagtatcaaaaggtgctatttaaatttgcatgacagagtgacgggggaagaaggtgtctcattgtccagcttgggtaacagcacggattgtcttgcctttcagtttaatgcaactgataattcataaggagcagaagacactgagtgaggtgtccagtatgcagagctgatgaagtgaacttgatccctgctctggtgaatccaagaaggtgtgttgggaaggtgggtaataatcttggctttggatacattgaggtagagatacttgtgtgtccaaatggaaggataggatgagcaagtagagatttgggtctggagctcaggagag

SEQ ID NO: 35257 - DNA, 2300 bp, Homo sapien
agtggttcacgcctgtaatcccagcactttgggaggctgaggcgggaggatcacctgatgtcaggagttcgtgaccagcctggccaacatggtgaaaccccatctctactaaaaatacaaaaattagctgggtatggtgatgcatgcctatagtcccagctacttgggaggctgaggcaggagaatcgctggaattgggaggtggaggttgcagtgagccaagatcacgccattgttctccagcctaggcgatagagcaagactccacctcaaaaaaataaataagtggataaataaataacagctttttgtttaatcaattgtctctatcattataaagttttctatatcattgatttattctctaatctttattatttcttcttttctactgattatgtgttcaatgtatttatactttttctagtttttgaaggtagaaactgaggtcattgatttgaagcctttctcctctcctaatataggcatttcatgctgcaaaatttccccaaagctgacttaataacatcctacaaattttgatgtttttattttcattttttattaatttcaaaatacattctaatttcccttttgattttataatatttttataagtattattcagttataaaaagaaataaagtactaacaaatgctacctggaaccatcaagaatgacccttgaaaacattatgctaagtgaaagaaggcagtcaggaaagaccacatattgtatgattcaatttgcatgaaatcttcacagtcggtcaatccgcagggccagaaaagaaatctggaggtcggagcctctcccagaagccaggggttgtgggaaggaggaaatggagaataattgctaatgggtatcacagttccttttagggtgatgaaaaccttctggagttagatagtggtgagagttggacagctttgtcaatataccaagaactattgaattgtatgctttaaaaggatgcatattatggtccgtgaattgtcttttaataaaggttttatttttaaaaacaagctaggcacctagggtgtcaaattgaaggaggctctgattctcagggccgcgcaaatgcagggttggcacctatgcgtgtggccctcctgaaattttgtgccttaggcacctgccttgcttctccctaattcaggccctcaggagaaagctctaattctggtcaatttgaaacaggagggcacggcttctgggcgacgctccgtgctccagagagagccatttgtctgttcccttcctctggacgtcaccgtgccaacatgaaatgcttccaattgagtccagcctgagatggaagggggtggggggatatctgatgacatcacgaactgctgcatcaactcccccgagtccctgcctctggaccccctgatagaggacacaaggagtgtcctgagcccgtgtgactcagtgtctcttcccatcactttgcgggaaaatggggctgcttacaccacaccgcagcccaaacacctgtggctagagaagggcttgggtactaggagtgaggacgcctggttctgggcccaggactagtactagttagtggtgggacctggaacaaatgctttggttctaagtgaatcccccatattcatgacaagaggcgtggaacacagacccatgggaccttcccactggaacacggagcttggctgtcacccgaccttcgcttccttaagtacaaaagcccagggttccaggctccgtctcctttcccgcagacgccttgtttcttcgcgcggaggccctggacgccgcaggctcccaacctacttctctgggctgtcaggttctgaacccggtcctgaagaggccctggcgccgggggtgggtgaggccgagcgcgcgccttgggaacctggccggcctcaggctggcgggagcattggcggacatcgccccgggcggggcggactggggggaccctgacctgaccctgctcccagctctgacctcggccaccacgcgcggcgcccccgctggtcccgccaggctccgcctaaacgcagaaagcgtgggaggcgcccgaccctgcggtataaaagcggtgcctgcagaggccctagcgggagtccgcggcgagcgcagcagcagggccgggtcctgcgcctcgggggtcggcgtccaggctcggagcgcggcacggagacggcggcagcgctggactaggtggcaggtgagggcgtccccgcgcacggctggggtaggggacgggagtggcgagcttcaggtccaccggctgccaccgagtgatgggaccggagga

SEQ ID NO: 35258 - DNA, 2300 bp, Homo sapien
tgcttgttggttgttaggagtctttattttctcatttacgcgtaaagccttcttagaatggcatttgtcagctaaacatgttttcagtagcgttctggttatttgttgttgtgtaaccagctctcccagcttagcagctttcctggttgttgaatctgggtggattgagtggtgcttctgcaccacttggcactgggtgggtcccttgtgggctgcgtcagcgggggctcagcggggcgctgggcgtcttctccgtggccttctccgctggggccttccacatgcttccttcagcagcgttgcctgggcttccgtaggcctggcggctgggttctgagaggaagtgctcgcagaagacaggcttgaaacaagtacccatcacgtccccgcctgtgtcctgcttgccaaggccccactgccaaaggcagaggcatctccgcgcctgagaggggttgagagagggtgcgcacaccacagatgtagctggtcggggccacccgtgactgctgtggtctgccctctggacctggtggttccctgggagcctgagatccaggtgtaggcagggttggtttctcctgcagcctttctcctcggcttgtagacactgttttctccctgtgtcctcacatggtcatctctctgtgtgtgtctgtgtcctcatctcctctttttataaggacatgagtcctattggattaaagcccaacctaatggccttatgttaccttaatcacccctgtaaaggccctctctgcaaatgcagttccatcctgagacactggagttgggacttcagtgtgtaaatttgaggggacacatgcagcccatcacagtaggcgtgggaggcacgtggccgtcacggagcagtggcaattcccaagcccagccaggcatgtattgttcacctctcagccctgggtgcagggtgttccttgatgagcctccactgcagcttcccagaattgtcccttgtccgttgctgccctggctgtgctctgccctctgtgtcctggtgtcgctcttggcagctcctttcctgttctgtaagaaatggcccgtgcttgctgcgctcccagcctacctcccacctgtagaacgtgggcacccagaggcctccctgcactttgagccgtctctctcttttagtccaagctgttacaagtgcctgaaaaccactgtggaatttctatcaacttaaaattctgcttccctggacaaaagcacccccaccgccatcctgagtgctctttgttgggttgggagtcagggtgccatgggagagcctgccagatggtctataagatgctgtctgaatcttctaaggtttaacaaagtggatttggacctcacccttgaggccagtgtctgggatttgatctttgccctgaggccatctcttttagaatcttttgccagctggaaaggctgggaagaagaaacatttttattctccacccagtacatcctggattggaaatagttcctttaaattctgcttgaaaatggaacagttccttcatctttctcttcccatgtgttaccctaggcagcaaaaagaagccagcttcctcctggaccccttagccagatgcaggagttcccgggggaggcactccatcctccctgtcactgagggtgaccttctttccacttcttcagctggtacacacacagccccctttctccagcccccaggagtcatttcgtcctgtccgtccagcctctgccagctgcctgggtccaaggccaagtccacatgttttaggttttggtcatggcagaattccacttctggatggctgcatgtgtcagctgttgccacaaaacaaaccatcccaaacttagtggctggaaataacaatgattgattatttctcagattccgtggcctgagcaggcaggactgctcccaggaagcagtgcaggtcactcatgcagctgtttcagtggacacctggcccggaaggttcaagaaggcctctctcacacctgaaacctcgatttttttttttttttgagacagagttttgctcttgttgcccaggctggagcacaatggcgcgatgtcggctcactgcaacctccgcctcccgggttcaagtgattctcctgcctcagcctcccgagtatctgggattacaggcatgcaccaccacgccaggctaattttgtatttttagtagagatggggtttctccacgttggtcaggctggtctcaaattcctgacctcaggtgatgcactcgcctcggcctcccaaagtgctgggattgcaggtgtgagccaccacgcccggc

SEQ ID NO: 35259 - DNA, 2300 bp, Homo sapien
caaacatagaagcaaaagccagtgccccttctgtaattccaccccaaggaagagactccaggaaagggtgcctccttcccactttctccacgtgcgggcaggcgtgcagggaggagtcctcacaaaacagggcggcgtttcacatagaactctttcattttccacacttaacattagaaacacacaaaataatgtggagggtcctaaaaagaaacagccagagttctgtgtgtgtttctgcttgcccactgaaccacagcatcggcggtgactgtcggtaaggcgcgtgagatgcagtcgcgtggaagctgtgcttaagtgatactgattttaaatcttgttccaggtctgccatcatggatgttctcgcagaagcaaatggcacctttgccttaaaccttttgaaaacgctgggtaaagacaactcgaagaatgtgtttttctcacccatgagcatgtcctgtgccctggccatggtctacatgggggcaaagggaaacaccgctgcacagatggcccaggtacagcttcagggcagccatggtgctattaactgtcaagttagctggtcctccttattccaaatcccaaagggatcgctcgagacggatgactgtgcagtattgcagggtgtgggtggcgagtttacagggaagggcatgccacccatgctggagcaccctggggacaacaccctgactgaccccctggggtggagagggggcgcccgattcagaggaatgaatgatttcatcatcacatggcttagcttgttcgtgagtttgtagatggttgtaaagtcacaaggttcaggttgagtcctgtgatgatctttgggtactgtcatctgcttgttggttgttaggagtctttattttctcatttacgcgtaaagccttcttagaatggcatttgtcagctaaacatgttttcagtagcgttctggttatttgttgttgtgtaaccagctctcccagcttagcagctttcctggttgttgaatctgggtggattgagtggtgcttctgcaccacttggcactgggtgggtcccttgtgggctgcgtcagcgggggctcagcggggcgctgggcgtcttctccgtggccttctccgctggggccttccacatgcttccttcagcagcgttgcctgggcttccgtaggcctggcggctgggttctgagaggaagtgctcgcagaagacaggcttgaaacaagtacccatcacgtccccgcctgtgtcctgcttgccaaggccccactgccaaaggcagaggcatctccgcgcctgagaggggttgagagagggtgcgcacaccacagatgtagctggtcggggccacccgtgactgctgtggtctgccctctggacctggtggttccctgggagcctgagatccaggtgtaggcagggttggtttctcctgcagcctttctcctcggcttgtagacactgttttctccctgtgtcctcacatggtcatctctctgtgtgtgtctgtgtcctcatctcctctttttataaggacatgagtcctattggattaaagcccaacctaatggccttatgttaccttaatcacccctgtaaaggccctctctgcaaatgcagttccatcctgagacactggagttgggacttcagtgtgtaaatttgaggggacacatgcagcccatcacagtaggcgtgggaggcacgtggccgtcacggagcagtggcaattcccaagcccagccaggcatgtattgttcacctctcagccctgggtgcagggtgttccttgatgagcctccactgcagcttcccagaattgtcccttgtccgttgctgccctggctgtgctctgccctctgtgtcctggtgtcgctcttggcagctcctttcctgttctgtaagaaatggcccgtgcttgctgcgctcccagcctacctcccacctgtagaacgtgggcacccagaggcctccctgcactttgagccgtctctctcttttagtccaagctgttacaagtgcctgaaaaccactgtggaatttctatcaacttaaaattctgcttccctggacaaaagcacccccaccgccatcctgagtgctctttgttgggttgggagtcagggtgccatgggagagcctgccagatggtctataagatgctgtctgaatcttctaaggtttaacaaagtggatttggacctcacccttgaggccagtgtctgggatttgatctttgccctgaggccatctcttttagaatcttttgccagctggaaaggctgggaagaagaaacatttttatt

SEQ ID NO: 35260 - DNA, 2300 bp, Homo sapien
gcattgatggtaggtctctctaagggcttggtggactttaacatgtgattctgtgattccgacttgcctgaagataccccagctcccccctcccgactatccagctgcattcctgctctggaccctgctggggctgccacacccactgcacggcagggctagagagatgtgcagcctgaccctacccctgagcctgtctgtgaaggtggagatgggcatgcacccacagcccatgaggcaaggtggtgtcctgagtgtgctgtgagttcaggcgcaggaaggcctggcttgttgcagcaggatgtccccaagcgtggtccaaaattggggctttgccacctgcagggatttcctagaaggagatccaagggtcaggaggcatttgaaaggctttcacgcatctttgtatgtggcttgattgatccttttttaaggctcttgctacccagaaatgggattctctctctcattataaaaacatttggccatcttttcttgtgtaactgtcagtgaatgtatcattttgaatatttttcaaattaaaacagtacatttaagcccgcaaaacacaccaaagaatacaaacatagaagcaaaagccagtgccccttctgtaattccaccccaaggaagagactccaggaaagggtgcctccttcccactttctccacgtgcgggcaggcgtgcagggaggagtcctcacaaaacagggcggcgtttcacatagaactctttcattttccacacttaacattagaaacacacaaaataatgtggagggtcctaaaaagaaacagccagagttctgtgtgtgtttctgcttgcccactgaaccacagcatcggcggtgactgtcggtaaggcgcgtgagatgcagtcgcgtggaagctgtgcttaagtgatactgattttaaatcttgttccaggtctgccatcatggatgttctcgcagaagcaaatggcacctttgccttaaaccttttgaaaacgctgggtaaagacaactcgaagaatgtgtttttctcacccatgagcatgtcctgtgccctggccatggtctacatgggggcaaagggaaacaccgctgcacagatggcccaggtacagcttcagggcagccatggtgctattaactgtcaagttagctggtcctccttattccaaatcccaaagggatcgctcgagacggatgactgtgcagtattgcagggtgtgggtggcgagtttacagggaagggcatgccacccatgctggagcaccctggggacaacaccctgactgaccccctggggtggagagggggcgcccgattcagaggaatgaatgatttcatcatcacatggcttagcttgttcgtgagtttgtagatggttgtaaagtcacaaggttcaggttgagtcctgtgatgatctttgggtactgtcatctgcttgttggttgttaggagtctttattttctcatttacgcgtaaagccttcttagaatggcatttgtcagctaaacatgttttcagtagcgttctggttatttgttgttgtgtaaccagctctcccagcttagcagctttcctggttgttgaatctgggtggattgagtggtgcttctgcaccacttggcactgggtgggtcccttgtgggctgcgtcagcgggggctcagcggggcgctgggcgtcttctccgtggccttctccgctggggccttccacatgcttccttcagcagcgttgcctgggcttccgtaggcctggcggctgggttctgagaggaagtgctcgcagaagacaggcttgaaacaagtacccatcacgtccccgcctgtgtcctgcttgccaaggccccactgccaaaggcagaggcatctccgcgcctgagaggggttgagagagggtgcgcacaccacagatgtagctggtcggggccacccgtgactgctgtggtctgccctctggacctggtggttccctgggagcctgagatccaggtgtaggcagggttggtttctcctgcagcctttctcctcggcttgtagacactgttttctccctgtgtcctcacatggtcatctctctgtgtgtgtctgtgtcctcatctcctctttttataaggacatgagtcctattggattaaagcccaacctaatggccttatgttaccttaatcacccctgtaaaggccctctctgcaaatgcagttccatcctgagacactggagttgggacttcagtgtgtaaatttgaggggacacatgcagcccatcacagtaggcgtgggaggcacgtggccgtcacggagcagt

SEQ ID NO: 35261 - DNA, 2300 bp, Homo sapien
atcatcagctgtgctggtggctgctgaagtaggtaattcttaccttgttaaggaagcatgggaagtaccacttgctgtttgacgtaagggtgtttatcaggagtaggatattcagttatttaatgactaacatagtttctgctaagaaaattaaatctctaggacatccttgatttattgtttctttgttgctcagcaatttttatgtaaggcatagatagaattttacctttcacggctgtcagcagtgttttcaactaagaaatggaatatcattactgacctcactgtgggctttgaaaattgagctacatttttgctcttccttctgcatttggtattaacaattattgaatgttagagatggaagggaacccagattatctggtatatgcttttcctcatacagagaggaaactggtatcaggagtccagtgatttgcccagggtaccagagccaggactagagaccctgtcttcctcctgactcgtgccatctcctccgaatatcctggtctggtttctccagttcagtgtttcagattaaatcccctgacacagtaaaactcatgtgcactgacttctcctccgaatatcctgctttggtttctccagttcagtatttcaaattaaatcccctgacacagtgaaactcatgtgcaccgacttctcctctgccccagatggtgtaacctgggctggccagacaggcacctccccagtgggcgtgtcttcagacaaaggtggctttgctttgttgaagttactgatataaagatcagcgcctgaaacagattctccgggatattaccggagacggagtgttttattattagcctttcttaggtggacatttccatttgaattaaaagtcctttaggctgggcgtggtgcatggctgtaatctcagcaccttgggaggctgaggcaggaagatcacttgaggccaggcgttggagagcagcctgggcaaggtggcaagaaccttgtctctacaaaaaaaaaagcgtaagagtccttcagcatttgaggggaaaacgtgtgctgacggtagaatagtctaggatggggttgggggagcatgtgggaccttcccctggccagctgacatggtacttaacctctgtcttttttttttggtttatggaggagccatctcacctggcagcctctccacgtgggctgagccctcttggggacaaagacagaagtccatgtccccaggccagggaaaaccccacgtgtcagggtgtctgctggctttgagtcctgagacacggacttcacaggctgtgcttcttgctttggggcatctcctcttttcttattcttaacctagaagtttccctgttttaccaattgtttctcttcaagttgataagcgggcagttcttgtgatctagaatccaaagaaccaaaaataggcccaattttgcttcagttccgtgtaatggctacttttgtttatactggtgttcccagggctctgcggaatcctggatttatttatgtatcatcaaagactcccttatattcagaagaattttagtaatatgtactttctattgtccttttattagaaattagtaatcttaaaatatgtttggaaaggcttggcaagccaggagtgcccagtgccccaagtattctgtgtaatgaataaagaagagtttgaaaacaaaatatttaaacaagcacagcaaacaagctttatcaggtgtatgagttattgtcttggtttcccgtggctgctgtaacaaatgaccatggattcgtggctaaactgcacatgtttattttctcagagttctgaggttggaggttggaaatgggttccgcagggccaggctcctccagaggatcctccttgcctttccagctactgcagctgtggtccttgcgtttcttggcttgaggcccttcatcttcaaggccagtggagtggcattttgctttattctttgcattgctttttcccgtgagatctccccctccctccctcttagaaggatacctgtgattacatttagggtcaactggaacaatccaggataatctcccatctcaagagcctgaatctaatcgtgctgcacagtcccttttgccatgtaaggggcattcacaggtcccagggattatgacccaggtatctttggagcacttgctcagccaaccccagctccaaatgtaaaggcatgcacagtggagagccgcttaattcagcatctcctcacagggcctccagtaggcacctccttccctctcccatctgctccaggaaatgtctgctccagcttctc

SEQ ID NO: 35262 - DNA, 2300 bp, Homo sapien
tgccattgttgccctgggttctctggagacatggtacttaaagagctaaggcccgatttctttgcttataaaacgtaggtgttctcagcagctatctcagagggtaagggtctttcagtgtggacctagcacatagtatatatcaaaaaagtgatatttttttctgaagttgaaacttttaaatataattattagctattgtctttcttttttgggggtaaatttgttaatgtcctttgcacgtgtttctactggggtctgtttttcctatttttttagtagcccagttactccattatttttcagttttaagagtattttactgattctggctgctttttgggtagaccatcaaattgtttgctaactgtgctcattttgtctcctttctgacaatctcctttctcattatgtttcatgagttgtatttgcctttgccagaactatctgaacaaagttacacaaggttgggacgacagatatttttatcttgttcctgtttggggagttaagggactaatgttctatcatcagctgtgctggtggctgctgaagtaggtaattcttaccttgttaaggaagcatgggaagtaccacttgctgtttgacgtaagggtgtttatcaggagtaggatattcagttatttaatgactaacatagtttctgctaagaaaattaaatctctaggacatccttgatttattgtttctttgttgctcagcaatttttatgtaaggcatagatagaattttacctttcacggctgtcagcagtgttttcaactaagaaatggaatatcattactgacctcactgtgggctttgaaaattgagctacatttttgctcttccttctgcatttggtattaacaattattgaatgttagagatggaagggaacccagattatctggtatatgcttttcctcatacagagaggaaactggtatcaggagtccagtgatttgcccagggtaccagagccaggactagagaccctgtcttcctcctgactcgtgccatctcctccgaatatcctggtctggtttctccagttcagtgtttcagattaaatcccctgacacagtaaaactcatgtgcactgacttctcctccgaatatcctgctttggtttctccagttcagtatttcaaattaaatcccctgacacagtgaaactcatgtgcaccgacttctcctctgccccagatggtgtaacctgggctggccagacaggcacctccccagtgggcgtgtcttcagacaaaggtggctttgctttgttgaagttactgatataaagatcagcgcctgaaacagattctccgggatattaccggagacggagtgttttattattagcctttcttaggtggacatttccatttgaattaaaagtcctttaggctgggcgtggtgcatggctgtaatctcagcaccttgggaggctgaggcaggaagatcacttgaggccaggcgttggagagcagcctgggcaaggtggcaagaaccttgtctctacaaaaaaaaaagcgtaagagtccttcagcatttgaggggaaaacgtgtgctgacggtagaatagtctaggatggggttgggggagcatgtgggaccttcccctggccagctgacatggtacttaacctctgtcttttttttttggtttatggaggagccatctcacctggcagcctctccacgtgggctgagccctcttggggacaaagacagaagtccatgtccccaggccagggaaaaccccacgtgtcagggtgtctgctggctttgagtcctgagacacggacttcacaggctgtgcttcttgctttggggcatctcctcttttcttattcttaacctagaagtttccctgttttaccaattgtttctcttcaagttgataagcgggcagttcttgtgatctagaatccaaagaaccaaaaataggcccaattttgcttcagttccgtgtaatggctacttttgtttatactggtgttcccagggctctgcggaatcctggatttatttatgtatcatcaaagactcccttatattcagaagaattttagtaatatgtactttctattgtccttttattagaaattagtaatcttaaaatatgtttggaaaggcttggcaagccaggagtgcccagtgccccaagtattctgtgtaatgaataaagaagagtttgaaaacaaaatatttaaacaagcacagcaaacaagctttatcaggtgtatgagttattgtcttggtttcccgtggctgctgtaacaaatgaccatggattc

SEQ ID NO: 35263 - DNA, 2300 bp, Homo sapien
tattttacttttatttttgacataattctaaatcatactcaggaaatactggtgtaccaatttacagtattgttactgatcgtgggttcttagattctcatgcagtggaaattgacatgagacagagaaagtgtcccagacaaggctttataatgggcttatgctggagcaggagggcagcggcacaggggcaggagttcccgggctggccctcgggacaggtgttcctggtgttttagggtgacatggatagtcatgaggtgtgtcagcagcattacacacgctagtggcaggcaccggggaacatcatgttagcacagatgtgtcatgatcagggcatggcagatgagcccctgaggagagggttttagtaatacaacaaggcaagaggtcaggatcgtcgttctgatcctgtatgcatgtgggcatcaggcttaactcccttgggtaagatttggggtggaacatggcttatcttgtttccctccctggtttgcatggtctggtgggcaggtgtgatggcgtgggggatgtatggaaaatacgggagtgggtacgggccaagctctgtccctgctgcctccgtattacttgcatggcgtgagaaggattgcctgtctttgtcagtattagcatgaattgtttttgtatttgcaaggttcatggtttgaaaaggcatctttaatgtactctccaccattgctttttgggaaggctgtgcaccatggtgttaagagagtgaactacagagccatgcggtcctggcttccagccgtcattctgccattgttgccctgggttctctggagacatggtacttaaagagctaaggcccgatttctttgcttataaaacgtaggtgttctcagcagctatctcagagggtaagggtctttcagtgtggacctagcacatagtatatatcaaaaaagtgatatttttttctgaagttgaaacttttaaatataattattagctattgtctttcttttttgggggtaaatttgttaatgtcctttgcacgtgtttctactggggtctgtttttcctatttttttagtagcccagttactccattatttttcagttttaagagtattttactgattctggctgctttttgggtagaccatcaaattgtttgctaactgtgctcattttgtctcctttctgacaatctcctttctcattatgtttcatgagttgtatttgcctttgccagaactatctgaacaaagttacacaaggttgggacgacagatatttttatcttgttcctgtttggggagttaagggactaatgttctatcatcagctgtgctggtggctgctgaagtaggtaattcttaccttgttaaggaagcatgggaagtaccacttgctgtttgacgtaagggtgtttatcaggagtaggatattcagttatttaatgactaacatagtttctgctaagaaaattaaatctctaggacatccttgatttattgtttctttgttgctcagcaatttttatgtaaggcatagatagaattttacctttcacggctgtcagcagtgttttcaactaagaaatggaatatcattactgacctcactgtgggctttgaaaattgagctacatttttgctcttccttctgcatttggtattaacaattattgaatgttagagatggaagggaacccagattatctggtatatgcttttcctcatacagagaggaaactggtatcaggagtccagtgatttgcccagggtaccagagccaggactagagaccctgtcttcctcctgactcgtgccatctcctccgaatatcctggtctggtttctccagttcagtgtttcagattaaatcccctgacacagtaaaactcatgtgcactgacttctcctccgaatatcctgctttggtttctccagttcagtatttcaaattaaatcccctgacacagtgaaactcatgtgcaccgacttctcctctgccccagatggtgtaacctgggctggccagacaggcacctccccagtgggcgtgtcttcagacaaaggtggctttgctttgttgaagttactgatataaagatcagcgcctgaaacagattctccgggatattaccggagacggagtgttttattattagcctttcttaggtggacatttccatttgaattaaaagtcctttaggctgggcgtggtgcatggctgtaatctcagcaccttgggaggctgaggcaggaagatcacttgaggccaggcgttggagagcagcctgggcaaggtggcaagaaccttgtctc

SEQ ID NO: 35264 - DNA, 2300 bp, Homo sapien
tctggtgcatctatcaccttagcagtatacactgaactcaaatttgtagccttttatccctcactcccttcccacccttttcccccaagtccccaaagtccattgtatcattcttatgcctttgtatcctcatagtttaggtcctacttatgagtgagaacatacaatgtttggttttccattcctgagttacttcacttagaacaacagtctccaatcccatccaggttgccaatgccattaattcattcctttttatggctgagtagcattccaccgtatacgcataccacagtttctttatccactctttgattgatgggcatttgggttggtttcatgtttttgcaattacgaattgtgctgctattaacatgcgtgtgcaagtatcttttttgtataatgacttattttcctctgcgtagatacccagtagtgggattgctggatcaaatggtagttctatttttagttatttaaggaatcgccatactattttccacagtggttgtactatccatcagcagtgtagaggtgttccctcttcaccaaatccacgccaacatctattattttttgagtttttgattttttgattaaggccactcttgcgggagtaaggtggtatcacattgtggttttgatttgcatttccctaatcattagtgatgttgagcattttttcttgtttgttggccatttgcatatcctcttttgagaactgtctattcatgccagcccactttttgatgggatttttttttcttgctaatttgtttgagtttcttgtagattctggatattactgctttgtcggatgtatagattgtgaagattttctcccactctgtaggttgtctgtttactctgcttgactattccttttgctttgcaaaagctatttagtctactttttttttttttttttttttttttttttttgagacggaccagactggagtgcggtggcgccatctcggctcactgcagcctctgcctcccgggttcaagtgattctcctgcctcagcttccccagcaactgagattacaggcacgcgccattacactcggctaatttttgtatttttagtagagacggggttttgccatgttggccaggctggtctggaactcctgacctccagtgatccgcctgcctcggcctcccagtgttgggattactggcgtgagccccgcgcccgcccctggctggcttctttgccgcaagctgtttcatcagcaaagtctttgtgacctgtatctagtctgctcatttttaaatgcgtgttctgcactccccagtggatggccgtgtatcaggagccggcccttttctggaaacaggccagcattcagtctccacagaggcaccataaacacgctggtggggccctgtactgtggtcaaagtcaaggcctccgggcaggactcgcggcccctccggctggcgggtggggttgacccgcacgtcccgccccgcctctcccttcgcgctccggacgggcgacggtagctcgagacccgggactccgcccgcctccccgcgagtatttgaggtccggggcggctccggcgcctctgcccgccgttctgctcgctcgctccccgctctggagtacgtgtctggcttgggagccgctcggacacgctggcttgggtttgtcgctccaaagtcgggaaagccgggggcgcgagcggggaggggggcagggtgggggtcgcgcggggccgggaacgcgcgtgggtcgacggcgcgcggggacgctggagccccgagaatggggcgtggccgcgcggggctgtgaccccagcagtcccagcggggcgggggcccgggcgagcgtccggcttgggttcccttccggagcctcgcagcggcagagaacggcgacgcggccgggtgagtcgtgcgtggccgcgagcccggccggtgacgccgcggacccgaggaccccgggcgcccaggcccagcgcccacggaagaggcggccggcgcgggatgggggcggcgcagagcctcccgggccacaggtgaccccggtcggccccgcggcctcggtgacccctcgcccgctccgcgacccggaggacgcgtgctcagtcttggggcgccgggtgttaggagccgggcgggaggcggagagaggccgaggggttcggcgccaaacggtgccatccgggccccctgcgtgtgttcactggactggccgtgctgggcttggccaatccgcagcactttcaggtcgcccagacctgtggagacgatcgtgtggaccagcccggatctccttaccgctct

SEQ ID NO: 35265 - DNA, 2300 bp, Homo sapien
gggatcagcaatctaaatataaaaaataaaactgtgcaaatactagaagaaaacattagtgaactctataatctagagattattcttttttttaaaaaaaaagagattgctccttgtgaatagagaaagtttttctaactacgactcagaaacaataaaggaaaaatcattaaagttgactacattaaaagagtgtatgccaaaatcaccagaagcaatgtcagaaaacagatgacaagctgggggaaatattcgcaatttatatcacttaagactaattaagccacaactagggaggggcgtgtggtttgctcctggcatccacttggtgaatctcctccagagattctgtgaaacatgtgtgatggcaggacagcccccacaaccacaagttatcgggttcatgcggtcaacagtgtcgcagttgagaaactctgccttagggtaagcacagagggagtaaaacagcttgagttctcaaaattgaactcatgtaaaacacctggctagtatcttccctacttccatttatgctagatgtttctgttttccaagactgctctgtctgagatggcagatggagttttcatacttacttggctaacctgtcagtaccctggggtctaattcctatgcctggagagaactggaagtccttgaacacacggctcaatgatgtgggctctgctcatttatatacatttatttttaaatttaatatatattttagtttttttatttccatagttttttggagaacacgtggtatttggttacatggcaagcttttttttttttttcctgagatggggtcttgctctgttgcccaggctggggtgcagtggcatgatctcagctcactgcaaccaacctccgcctgctagattcaagcaattctcctgcctcagcctcctcagtagctggcactacagatgtgtgccaccatgcctaatttttttatatttttagtagagacgggggtttcaccatgctggccaggctggtctcgaactcctgacctcatgatctgcctgccttggcctcccaaagtgctgagattacgggcatgagccactgcgccctgccaagtaagttctttagtggtgatttgtgagattctggtgcatctatcaccttagcagtatacactgaactcaaatttgtagccttttatccctcactcccttcccacccttttcccccaagtccccaaagtccattgtatcattcttatgcctttgtatcctcatagtttaggtcctacttatgagtgagaacatacaatgtttggttttccattcctgagttacttcacttagaacaacagtctccaatcccatccaggttgccaatgccattaattcattcctttttatggctgagtagcattccaccgtatacgcataccacagtttctttatccactctttgattgatgggcatttgggttggtttcatgtttttgcaattacgaattgtgctgctattaacatgcgtgtgcaagtatcttttttgtataatgacttattttcctctgcgtagatacccagtagtgggattgctggatcaaatggtagttctatttttagttatttaaggaatcgccatactattttccacagtggttgtactatccatcagcagtgtagaggtgttccctcttcaccaaatccacgccaacatctattattttttgagtttttgattttttgattaaggccactcttgcgggagtaaggtggtatcacattgtggttttgatttgcatttccctaatcattagtgatgttgagcattttttcttgtttgttggccatttgcatatcctcttttgagaactgtctattcatgccagcccactttttgatgggatttttttttcttgctaatttgtttgagtttcttgtagattctggatattactgctttgtcggatgtatagattgtgaagattttctcccactctgtaggttgtctgtttactctgcttgactattccttttgctttgcaaaagctatttagtctactttttttttttttttttttttttttttttttgagacggaccagactggagtgcggtggcgccatctcggctcactgcagcctctgcctcccgggttcaagtgattctcctgcctcagcttccccagcaactgagattacaggcacgcgccattacactcggctaatttttgtatttttagtagagacggggttttgccatgttggccaggctggtctggaactcctgacctccagtgatccgcctgcctcggcctcccagtgttgggattac

SEQ ID NO: 35266 - DNA, 2300 bp, Homo sapien
tctgttcactgagccccaaggacaaagcagccagggtcgactgaggggctactgcagccttcctctctgactcctcccacctaaccattccctcaatacctcaatacacacactcctttctttcccaagtctattgcctcttccaaaagcaatgtaagatccgccccagaacagtggggagttcttatcctttccgttacctaagcaacctgagggcaaagacctttagatcaccggcagtgctgttctttgggtaacttgatctttgcttatcagctttaataactttattatacgaaatacccagccttgatgaagtatcgatgactcactaactgtggtgtaactaattgtttcattcattctacaaacttttttttttttttttgagacagagtctcactctgttgcacaggctggagtgcagtggcgcgatctcagcttactgcaacttccacctcctaggtttgagcgattctcctgcctcagcctcctgagtagctgggattacaggcgcgtgccaccacacccggctattttttgtatttttagtagagacgaggtttcaccatgttggtcaggctggtctcaaactcctgacctcgtgatctgcccaccttggcctcacaaagtgctgggattaccggcatgagccaccgcgcctggcctcattctacaaacttttattctgcactcactataggctgggagctacactagggcctggggacatgaagacaggcgacacggtccctgggctcaagatgccagacagatgtgcaaacaagtgaaatctgatgtgatatgtgctttagtggtgccaaggataaaaggataagtgttaagaaaaagtagcaacaatatgtctgactgggagaatcaagaaaggtgtcatagagtccctaacacttgagctgagaatgagaaagagcatgagctggccaggtgacacacagagcatattccaacctaggagactgggaaatgggccaaaatatatacgtttgaggaaacaaatagcttactatataattaaatatgaggcagtttagactgggcccttatggataagtcacacccataaattttatttcatcttacaggcagtggagagcctctggaggattctgagcttcgtggtctcatcatcagagttatgtatggcaaccatcccaacctttttggcaccagggaggggttttgtggaaaactatttttccttggacagcagaggatggtttcgggatgattcaagcacatgacacttcttgtgcactttattttcagtgggagccctgagcttgttttcctgcaactatctggccccatgtgggggtgatgaagacaacggcagattatcaggcattagattctcataaggagcgcacatcctagatcccttatgtgtgcagttcacagtagggtttgtgctcctataagaatctaatgctgcctgatctgataggaggcagagctctggtggtaatgcaagcaatggggagcagctgcacatacagataaagcttcactagctcacccactggtggctcacctcttgctgtgtgtcctggttcctaacaggctacagaccagtcaggtctgtggcccgggggttgggaactcctggtgtatggaagagactactctgcagcaatgtggacaaataggatgagggtgagctgtcaggggagacaggcacacatggcagagctatttaaaaaggaggatagatgaccaggcacagtggctcatgccagtaatcccagcactttgggaggcagaggcaggcggatcacgaggtcagcagttcaagaccagcctggccaacatggcaaaacctcatctctgctaaaaatacaaaaattagctgggcgtggtgacatgcgcctgtaatcccagctactcaggaggctgaggcaggagaatcacttgaacccgggaggcaaagattgcagtgagccgagatcgtgccattgcactctagcctgggcaacacagcaagactctgactggaaaaaaaaaaaaaaaaaaaggaggatagacagggcttggggattggtggatgggtagataaggaaggaggagtctagcatgactctcagactactgacttggaccagcaggggaatggctgtgacaataaataagattgggaaaacaagaaggtgagcaaatttagaggagaaaatgaatttcatttttggcatggtgtggaaggctcgggagagaggtctaggcaccagatgtcaacgtgaggtgaaatggatatagctgaagtcaagggtgtggtgaggttttgc

SEQ ID NO: 35267 - DNA, 2300 bp, Homo sapien
tttcatgttatacagattttgctacccaaaaaacaaaacaaaaaatccaaaacctttatgttattatgaagaagcagttttccaaaggaatagggatgctggtagcagaagggaaagaaatctcattaaataaaaacaaaagcaatgacctcttcaggaggtggctcagctagtttagctttaccttagcaccatgatggttcattttattcagaaatagaaacatggggcgttggggagaagaggagatgtgtacctgcctcacctgcctccctgcccagaatgccgactccgactcttgctttccactaaggctggggattaaatgaaaagtgagaatctggaaacccccagagatgatgtttgtcgttggagctgattttatctcattttagtagcatgacctcctcctcaaactcaggatgcaattatggtcaatctcattagtgtgcagtaattgctcagccccaataccagattagcaggaagttctgttattttccttttgaggatgggctcctactgaactgtcctggaatctaccaccattcaggttacaaaagacccagggaactaggccagtccagctcccaaccccaagcagggagcaacttgctcagtccacgttgtgatagctcctcgctgccacaaggtggtgatgttgcatcacacacgcgcatgatgggcgcgcaggcgccaatgctcccaggacctgctgttccattcctaaatgaaagttgttcccaggatctggactcacaagacaaggcagcctattccctgctggggagctcaggggcaagagggcatctcggagggagggcacattctcacctctgaagacaaggagaacatcatcagcacatagaccaatcccagcagtgcaccttaggatggggagggccactgtgagttacagcaaaatgaacgaatgaatgaaccaataaatgtctgagagggaaagtcccaacgaccctcaggaggtacaatcaagagttgcagttattttcgttaggaacgttctaaacacaggggaaaccttccttccttctgctctattgttggagtggggccatcccgggacaccagaaatcaaggaattgagtttggagaagggacttggggaggtcacagtggcaggtgactgccaaatgaggtggcagaagccagcaagcgctggaaaaagtcggcccaaactgttcaccagcaccgccccccataactccccaccggctctggtttcaagactttccgttttctaggtatttccttggccttaaaccattttcctttaaacgaactttttctgtgaagccatccggtttcccccgatagtggcatctcacaaaggacaatccagtatcccaacagcgtgttgcgttccgcgggacgcagatttccttcacaggcaccccccgggttgcgtttttatagccacacccacccgcccccctatctcctgggcactgctaatgagtcctgcatttctctcctttggtctttggataaatgaaccatccgtgcgtgacctttgcgagggcatcttgcataataccagtacaccagcggcgccgtcggtgagtgacctttgggactggtttctctcaccagcgtaactccccgggagatccgagcaagctgatgagtgtatcagtggctcattctttctgttgcaccacggaccctcattctgtaaccgggataccagccagagatggggagcgggaggcgcagggcaggggcgtccctcctctcagcacagcctccccgcgctggatttctatcaatccagtttccacctgcctggaagtcagcagggtcctccccagtcccagatcgccgggcgaggccccagatggacctcaggggcggggagtgggcggagcttaggggccgaggcgaggtgtgggtggggcgggacgccgctgtggaggcggggcctgggcgcggacgggcgcggagcgaggcaccgcaccgccggggcggggagtgggcggggctcgggggcggggcggggtgtgggcggggctcacgggcggggcgggtgagtgggcggggcctcggcgtggtaggcgcgctgcgtaaagaggcctgcagtcccgcggcgcggggcaggttccgggctgcttaggttggcaccggtccgtggtccccgggggcgcagtcgcagcgctcccgccctccaggcgtcagcgagtgcgcggtccagtgcggccggaacctggcgcaactcctagagcggtccttggggagacgcgggtcccagtcctgcggctcctactggggagtgcgctggtcgg

SEQ ID NO: 35268 - DNA, 2300 bp, Homo sapien
gtgtttggagtgatcagagctgtctgccctcttggggagtgacagtgccccactctgttaagtcccatgcctgcccccaactcagcttcagccacaatgatgtagcctcttttcctttccatccacagggcacctggcctgggtggagcccactcctcagcacccacctcacttcttgcagtattctgcagaccccagccctgtgcctgtgctcctggacagctggagataaggagtgggccctggaagatgctcattcaggccctgctcaagattccagtcctggtggggataagcaccacttttgtgtgtctctgtgctttttgttttgctgtaaagacacactgataggttcacgttgtcgtttggacacaacatgcgcgatgcgtgtcttcacactaagccctagtcacactctctgcattgtttttttatcccattttttcctactgtggtacagaacatctcacataaaattgaccattttaaccactttttttgtttgtttgttttttgtgtttttggacagagtctcgctctgtctcagcctcccgagtagctgggattacaggtgcacaccaccacgcccggctaatttttgtatttttagtagagacggagtttcgccatgttggccaggctggtctcggactcctgacctcaggtaatccacctgcctcagcctcccaaagtgctgggattacaggtgtgagccacggtgcctgacctcattttagccacttttaagggtagaattttctggctgttttcattcatgtactgatagacacttgggttgcttccatgttttagctgttgtggaaaatgctgctttgaacatgggtgggcaagtggttttcaagaccctgctttcagttttttgggttcagagtaacgaatggaattgctgagtcatatgttaattctcatttttctaattgtaatttttgggggcacagcacctctccagcagcggcagcactcgacctttccccagcggtgcacggggttccaacttctccgcatcctcacctacgtgtgttttgttttttggtagtagtagccattctaatgcgtgtgatatgggatctcattgtggttttgatttgcatttccctaatgattagtgatgctaagcatcttttcatggcttactgaccattcatacatctttggagaaaagcctacacaagccttctgcccatttttgcattgagttgtttgctttgttgttgttaagttttatctgagctgtttttttatggtagggagagtgggtttgttggagtctccttgtatctcccagaaggaagccagaatttcagagatggccaggagggggtgaggccaaaggctcccctggggagaactcacgtttttccagagccccattgtgtgccagccaccgcacatagcaactgtctctctctcactcttctgggccatgctgtgactttgttgatgaggaggttgaggcacagaggggtggagggatgtgctgcagggcccacagctacaatgggcagagctggaaattgcaccaagtctgtctgatgcgggggtctcctctgctcctctggcctccgctgcatccctggagaatctctgagacttctggttagagcctgggtctaagccaactcccattattttcaagtgaggggaagggccgacaactgccagtgctggcccaccagagtctggcaccagccgaggagtgcacgcacccattggtggtgtggcggttcactgatcccccagccttctgctcgatctacggggaaaactggggaaggcaggaaggccaaggaggctcaactcctgcttcctaccgtggctcatttcctgggtcctttgctgtatgactgtctggatggaaggttcagagtcctctcaaaaaaggaaaaaagtatgggttttgacatcctgcgtggcttgtcctctgaggcctaaatctccagaagattcctggcctctcttgagaggtctttctctgatgtgtttgcgtgtctgtcaggaagcagcagtgatgcctagatgtggtacattcgacctcacctatgcctctccccaccccctctgggttcgttttgtcttccagattgctggactcgctgaagagagactacgcaggaaagccccagccacccatcaaatcagagagaaggaatccaccttcttacgctatggcaggtaatgattcactattgtggagtaagacttttttttttttgagatgggattttgttgtattgcccaggctggtctcaaactcctgagctcaagtgaccctcccacat

SEQ ID NO: 35269 - DNA, 2300 bp, Homo sapien
ctgcatttgtaggccaacgctgtctatgtgttggcccctgacccacttacttcatcacagctccaagtccagaaacaagaaaggtctctctttcctgataggtccaatgaacccctgagttcagtctcactccctggggtggttacagctaggccacggaacactgtgatcagtcagggctgtgaactgccactcctggggtcggaggaggggctacccttatgaacaccacatagcttggttgaaagggcatggttcccccaccacacacaaaaaaacaaggtgttacaatcagaaaaaatgggaatagatatgggacaggcaaagatgactcttcacagcatctgccatgcagcggctcagagtgctttgtcactaccccaatcacaggcactttggttgcttccagagaggaaccagacgccctgggttcaaaccacatctgcccctctacagctatgacccttgggcagatgtctttttttttttttttttttgagatggagtctcgctctgtggccaggctggagtgcaatggcacgatctcacctcactgcaacctccacctcccgggttcaagtgattctcctgcctcagcctcccaagtagctgggactataggcatatgccaccacacccggccaatttttgtattttttagtagagacggggtttcaccatgttggccaggctggtcgtgaactcctgacctcaggtgatcctcccacctcggcctccttttaaagtgctaggattacaggatggaataacactttcctttaagggccaacgaaatcacttgagcatgcatccatcagagggagggcggcttaggagaggttcccacacggtgcccactgctgaactgttcattagctagctttttcctgcatccccatcttatcgccattttctggggctcggtttttccgtcttgagaaagaaataggcctgtgcttatttccctctcccctgggacaaggcaccagccactctcctgagctgctgggaacttctccaaaattcctggtgcttcctcacattgagcaacatgagtctctttcctctttttaccaggctccacccacgagaggctctgagacaaactacacaaccaaagaagtctttctgcatccacaaagccctgtttgcctaagaaaaaggtcgcggggcccaatcacacacacctggctgcagtcatttccaattttctttttttttttttaatggcaattcctgctgccctgctgatactgaatttattttttattttaagtttttcagcaataagatcttaaaaaccggccgggcgcggtggctcatgcctgtaatcccagcactttgggaagccaaggcaggcagatcacctgaggtcgggtgagttcagcctgaccaacatggagaaaccctgtctctactaaaaatacaaaattagccgggcatggtggcgcatgcctgtaattccagctactcgggaggctgaggcaggagaatcgcttgaaccagggaggtggaagtcgaggtgagccgagatcgcgccattgcactccagcctgggcaacaagagtgaaactccgtctcaaaaaaaaattcttaaaaaccggcagaaaatgtatcagggtgcccggtactaacaggagatgagacataggcaagagcccagccctcgaattgctaacagttttgcttgggaaccggaattaatgtcttcagcatactcaggccaaggtgacagcaccggctctcagagaggttggatttcagcaacttcccatcctctcaacccacacaggaacaggcccctcggcagttcgagaacgcaccttcccatacttcagagttgccggagggagggtggaggacctcctgcctcacagtgatctgaggtccagaaaccctagggaccccagcttgaggctctgaagggctgtgacacagcctctttgcctgccagccccgccccggatgcagcctgctgagcgagggtggaggaggggagctatgtggccaaaaccctgagtcactgaggagcacgagggagccgccctttccggcgtgtctcccgaggctgtctgcccttccccagcctctgcagcctacaatcccaatcaagagccagcccggtttctgcaagcacacaggagcagaagagaaaccagtgaagacttcaccgctgcatatcaggccagcgacggctgctcggtgacggcgctgctctgccaccaagaaaaaccccaaacccactgatcccacaaagaggggagaaaaaggaaggcttcatgctgaagaaggagaaatac

SEQ ID NO: 35270 - DNA, 2300 bp, Homo sapien
gtttggcagttcttcaaaaagttaaatatagagttataccatatgactcaccaattctacccactggtatatatccatgataagctcaagaaaacatacctctatacatatatttatacatgaatgttgatagcagcattattcataaatatatttatacatgaatgttgatagcagcattattcataatagccaaagatggaaaaaacccaaatgtctgtcaattgaaagggtaaacaaaatagatatatgtatacatattattatattattcagccataaaaagaaatgaagcctgacaaatgctaccttgaaccatcatgaatgaacctttaaaacattatgctaagtaaaagaagcagccacgaaagaccacatattgtatggttcattttgcatgaaatccccgaaataggaaaatccagagacagaaaataaatctgtggttgccagggattgtgggaaggaggaaatggagaataattgctaatgggtatcacagttccttttagggtgatgaaaatcttctggagttagatagtggtgatagttgcacagcttcatcaatatactaagaactactgaattgcatgctttaaaaggatgaacattatggtatgtgaattgtattttactaaaggtgttattttatttatatattatttatttatttatttatttttatttttatttttattttttgagacggagtctcgcctgtcgctcaggatggagtgcagtggtgcaatctcggctcatggcaactttcgcctccaggttcaagcgattctcctgcctcagcctcctgagtagccgggtctacaggcgtgcaccaccacgccgggctaatttttgtatttttagtagagacgaggtttcaccatgttggccaggctagtctggagctcctgacctcgtgatctgcctgcctcggcctcccaaaatgctgggattacaggcgtgagccaccgtacccaaccttaataagaacaagctaggcacctagggtgtcaaattgaaggaggctctgattctcagggccgcgcaaatgcagggttggcacctatgcgtgtggccctcctgaaattttgtgccttaggcacctggcttgcttctccctaattcaggccctcaggagaaagctctaattctggtcaatttgaaacaggagggcacggcttctgggcgacgctccgtgctccagagagagccatttgtctgttcccttcctctggacgtcaccgtgccaacatgaaatgcttccaattgagtccagcctgagatggaagggggtggggggatatctgatgacatcacgaactgctgcatcaactcccccgagtccctgcctctggatcccctgatagaggacacaaggagtgtcctgagcccgtgtgactcagtgtctcttcccatcactttgcgggaaaatggggctgcttacaccacaccgcagcccaaacacctgtggctagagaagggcttgggtactaggagtgaggacgcctggttctgggcccaggactagtactagttagtggtgggacctggaacaaatgctttggttctaagtgaatcccccatattcatgacaagaggcgtggaacacagacccatggggccttcccactggaacagggagcttggctgtcacccgaccttcgcttccttaagtagaaaagcccagggttccaggctccgtctcctttcccgcagacgccttgtttcttcgcgcggaggccctggacgccgcaggctcccaacctacttctctgggctgtcaggttctgaacccggtcctgaagaggccctggcgccgggggtgggtgaggccgagcgcgcgccttgggaacctggccggcctcaggctggcgggagcattggcggacatcgccctgggcggggcggactgggggtagacggatctgcctctgcgcctagccctgccctccgccgccgcgcgaacgcgcgcgcctccccggctagtcccggcaggcggagccccagttagactgctcgtcaagtgtgggaaaagctccgtggcgtcacaagctactatataaaaggcggtgcccgccggggccgagtgggagtccgcggcgagcgcagcagcagggcccggtcctgcgcctcgggagtcggcgtccaggctcggagcgcgacacggagactaggtggcaggtgaggacgtccccgcgcacggccggggtggagcacgggagtggcgagcttcaggtccaccggctgccaccgaaagatgggacctgaagacaggagaggtcgctcagccaagagccccg

SEQ ID NO: 35271 - DNA, 2300 bp, Homo sapien
ggagtgcagtgagtggcatgcgatctcggctcactgcaacctccgcctcccaaatttaagcaattctcctgcctcagcctcctgagtagctgggattagaggcgcgtgccaccacgcctggctgatttttgtatttttagtagagacggggtttcaccatgttggccaggctggtcttgaactcctgacctcgtgatccgcccgcctcagcctcccaaagtgctgggattacagacgtgagccacggcgcccagccgggatgtgggtatttctggaatacaaaacatccatagccctccttttactctcaaagcaaaacacagacacgcacattcacatgcacacaccagtgtgtccgtgtcctgttggtttgcatggagtttctgttttgccacgaagctttttgccagcccttttcccaaagtgtttgtaccattttatactcccaccagtgatgtttgagaggtctggttgcttcacatgtttgccagtgtttggtgtattagtctttttagttttggatatcctggtagttgtgtagtggtgtctccttgtggttctccatgggtttttattctatatttcagtttggggaaaatgaatgaatggaagaaaagaagggaggaaggatgaagcaaatagctgtgctttgagatctgacactgtatacttcacagccctgatggacattctccaaattctactcctttttcacattttcttcttagagtttgcattgttctttttatattcttcagattccttcttttgttcataattacttaaacctattcattttctaatgcctttcagttgttaatttactgaagttctttggtgcttactagtgctgcttgctgtagctgcagggtctgtctcacagtgaattttttcttttgtgttttataattttggaaagggagctcatgttaaatttgtatttgtaggaattctgtctggcctggcttgaggttgttgtttgctttagcctataacctcaggatggcatcagcctgtgaccacttcctgtgtaaaagttcatagtttaggcgatcctctcaattcaaagtctgtatctatttcaagacaggcccaaggttataaatttgcacaaactttttttttttttttttaataccttgtgcccagtccaagacaaatatgtttgtttgccatgggctgctttttttctagttcatcctttcatcaaagggttgcacattgagcagtgccgtgttaaggggggattcttcattctaccttcttttcttgtattccttgacctcagctgggctttaaaccttgacttctggatggcgaggttggcactcccctgtgtgagctactgcctgcctccggtgctctgtttctgtccctagagttcttttcctttccacggagttttggtatgcatttcaatgaatgtttgtattatgttgtccaacatacttgtgtcctttatagctggagggttcttaaaattttctaatgctccatattgccagaaataaaaaggctgagggaataaatattatagtcttctctgattcttaaaaatatgaaaaatagctcatcagatgactgtaagtctatcctcagaaatccaaggcacaccaagcatgtggtggaatgttaacaaaagtttttaaaaatgatcttttctgccaggtacaatggctcacacctgtaatctcagcactttgggaggctgaggtgggaggatcccttgatcttaggagtttgagaccagcctgggcaacatagtgagatcccccggcccccccatctctacaaataattaaaaaatcagctggtcacggtggggtgcacctgtggtcccagctactcaaggaggctgagggaggaggattgcctgagcccaggaggtcgaggctccagtgagctatgattgtgccactgcactccagcctgactgacaaagtgagaccctgtctccaaaggagaaaaaaaaaaacatatatatatatatatatatatatatagtcttgccctgaggttttctctctgttttctttacagggtacagctctgccggggggggaaaaagtggtaccattttgggcgttcttgagcttcagaatgcaaccagacatgtccttgaatgtcattaagatgaaatccagtgacttcctggagagtgcagaactggacagcggaggctttgggaaggtgtctctgtgtttccacagaacccagggactcatgatcatgaaaacagtgtacaaggggcccaactgcattgagtgagtagggagcaggggtgggtgggctaagttctg

SEQ ID NO: 35272 - DNA, 2300 bp, Homo sapien
tttatggctgaataacattccatcatatggatatacaggttgaacatccctaaacccaaaatccaaaattcaaaatcctccaaaatctgaaacgttttgagtgccagcatgatgccacaagtggaaaataccacacctgacacctctgctttctgatagttcagtatcctcaaactttgtttcatgcacaaaattattaaaatatggtataaagtgaccttcaggctatgtgtataaggtgcatatgaaacacaaataaacttcatgtttagacttaggtcctctccccacgatctgtcattctgtacatgcaaatattcccaaattggaaacaatccaaaatccaaaacacttctaatcccaagcattttggataagggatactacacctgcaccatattttgagttcctgccttcagttctttggggtatatatatccgggtgtggaattgctagatcatatggtaattctatgtataactttttgtttttctgagacagagtctccctctgttgcccaggctggaatgcagtggcaccatctcggctcactgcaacctccgcctcccgggttcaagcgattctcctgcctcaccttcccgagtagctgggattacaggcatacaccaccacgcccggctagttttttgtatttttagtagagatggggtggtttcaccatgttgtccaggctggtctcaaactcctaacctcaggtgatctgaggtcccaaagtgctgggattacaggcgtgagctcccatgcccggccatgtttaacttttaagtactgttaaaattgttttacatggtagctacaccattttatattccccaccagcaatgcacaaggattctaatttctccaccatcttaccaacactttttatttaccatttttatattatagtcactctaaggagtgtgaaagtgtacctcatggtggttttgacttgcatttccctatgactcatgatgttgagcatcttcatggcttattggccatttgtatatcttctatggagaaactgctattcaagttctttgcccatttttgaattgggttgtttgttttttgttgttgagttgtaggattttttttttttatgttctggatttcatccgttttcagatatatattgtttgcaactttttccccattattttattttatttatttattttttttttggagacagaatcttgctctgtcgccacccagactggagtgcagtggcagaatgttggttcactgcaacctctgcctcccaggttcaagagataactcctgcctcagcctcccgagtagctaggactacaggcacacaccatcatgcctggttagtttttgtatttttagtagagacaaggtttcaccatgttggcctggcaggtctcgaactcctgacctcatgggatccacctgccttggcctcccaaagtattttttccttattctgtaggttatctttttactcttttcatagtatcctttgatgcacagaagcttttaattctgatgtattatttttactctttacttttgtttgtgcttttgtgtcataaccaagaaatcgctgccaagtccaatgtcatgaagctttttccctgtgttttcttctaagaatttttgtggcactagcccttaaattaagtctttgatccattgtgagttaatttttatatggtatgaaataagggtccaacttcattatttcatatgtgtatattcagttttcccccatcgaatgctcttggcaaccttgtcaaaaatcaattggccatttataggagggtttattcctaggctttccattctgccccactggcatatgtgcctgtctttatgccagtcctacgctgttttgaatactgtagctttgtagtaagttttgaaatcaggaagtgtgagtcctacaaccttgttctttttaaagatcattttggctatttgggaaaaacattaattttaaaaaattactacttgtaagatctgtgtgaaatttctaccttctgaaaatatgaattcttctcgttaaaattttctgggactctatttcctgctgttcactaaagtgtgtatttatgctcttaattatagaaagagtattcaaacgaaaatgcagttgtgaagagaatgcagtctcttcaacttgattgtgtggcagtaccttcaagccggtcaaattcaggtaaattacactatggtcaaaatctattcatttatttgtttggttactcattcactccactctctaaaagactattcaggaccatatgggaaacagaagaaactataa

SEQ ID NO: 35273 - DNA, 2300 bp, Homo sapien
aggccttgcttcctaacctttcgccgtcattatgcaagtatagagtcctgaaattgagcagctcaaaattacttttcagctgtgttacctagggcttgcttcctaacctttcttagcctcagttgcctcatctataaatggagagtgcaatagcacagaaggctaatgtgaagattaaagaaatatgatatatcataaggtgcctggcacaaaaatggcagtttttttaaactgtacgatcttgctatatataaagaactggttgtcaggtatgttacttaaaaatagtgacaccacgctggacgcggtggcacacacctgtaatcctagcactttaggaggctgaggcgggtggatcacctgaggtcaggagtttgagaccagcctggccaacatggcaaaacctcgtctctactaaaattacaaaaattagccgggcatggtggcgggtgcttgtaatctcagctactcaggaggctgaggcaggagaattgcttgaacctgcgaggcagaggttacagtgagctgagattgcgccattgcactccagcctgggcaacaagaccaaaactccgtctcaaaaaaaaaaaattgtgacaccaataacctaaaactcagtgctaccgttttttattagcacaagggtaactggtgttgaaactgtacagacagctatttttatcatttctgagatgaaaccccaatcaacatatcaggaaaaaaggaaatactgacctcaccaaagatttctgaaagtcaaacgatattaaactcaaacattatatatgtctctttccttttatgcaggaattaatgtgatagatttatgttgagagtagaatatgaaaacttttgcatagtctgtatttaggccaaaactgcctttactactcaagaaagtccaatgggccagtgaggacactgcaggtgacagaaatttctatgagtgtaacacctacaagcactgtgctcacaggactgactgttacaccaaaaaggtctcttggaggagaagaaatgcaatatgcaaagaagctgttgtctccaattattcaagccaaggctacaacagtagccacaaatctgccagttatttccaattaaggcagaacgattgacttaaaaagcaatagttgttttttttctccactgagctttcaattagataatgtctataacctttataaagctgcaattatacagccaaaagaaaaaaaattaattgtggtaaaacatacataaaacttaccacttaaaccacttttaggtgtgtagttcagtggcagtaagtacactcacaatgtaatgcaggcatcaccaaaatccatccccaggactttttcatctctccaaactgaaactctgtccccatgaaacaccaactttccattcccccttccaccagccctcaacaacccccattctattttctgtccctataagtttgactcctctaggtaccttattatataagtggaatcacacagtatttgtctttttttgactggcttacctccctcagcatagtgtcctccaggttcatccatgtagtagcaagtgtcagaatttcgttctttgttcaggctaaaaaatgttcccttgcatgcacagacaacattttgcttatccatgtatctgtttttggacacttaaattgcctccacccttttggctattgtgaatagtgccgctgtcaacgtgagtgtaaaaacatttcttcttgtacaccctgttttaaattcttttgggttatatacccagaaaagaaaatgctggatcatataactgatttgttgaggaaccgcagtattgttcatcacatggctgcaccattttacattcccaacagcaatatacaagggcttcaatttctctacatcttcaccaacactaatttctgggggttttgctagtagccatcctaatgggcgtgaagtggtataaacaaaatttagatcccatcatctccgaaaagcaaatacacttcctagtactagtcagtactaaataggtgcacagcgtttagaactttacttgatccaacatagcagcctgcctagagccggagccccgcccactccggagtcccgcctggacgccgacgcagcgagggcgctatggctggcggcctcgcctcctggaaaggccatggtcgctgaggcgacgagcgagggcggggcagcgccgacggggacactcatcccgggagccagagccagcaccgagaggggacggtctacgcgggtgccggcggttccaggactgcgaaaccacgagccgagtttcggtcgcccatggga

SEQ ID NO: 35274 - DNA, 2300 bp, Homo sapien
agggagaggggagagaggaggagaaattctaggaaatctgtccccaccctgagaagaggcactaggcacctgcctacctacatctgggaggatgctgggcgcttcctaaagctggggtgattaagacctaacttggcctaagaggctactcacagacatctggctttagtttccacctccgatacagaccaactattgaggtggcaggtagggtgcacattaggaatgacagcatcatcttgggttttttgttgttgttttttattgagacgcagtctggctctgtcgcctgggctggagtgcagtggcgccatctcggctcactgcaagctccgcctcccgggttcacgccattctcctgcctcagcctcccgagtagctgggactatagatgcctgccaccaggctcggctaatttttttgtatttttagtagagacggggtttcaccgtgttagccaggatggtctcgatctcctgacctcgtgatccacccgcctaagcctcccaaagtgctgggattacaggcgtgagccaccgcgcccagcccatcaccttgggttttaccaaggcatttttactccataaactcaatgtgctttcatatatggcttctcatctcctaccacaaagccagctccaaggcacctgtaattatcatcattatatagttggaatgtgctgggaaccaaaggcagtccccaagcccctgttacctagtccaccgtgcagggccatctttgtgaataattaagtcaggtccttaccacagcccacccaagcctttaaaactcacctgggctttttatttatacaaaggctttagattccttcccttcctagctttgtggctggtcaggtctttcaacctcgctttcggagctatgaaattggggtagtaataatgcttaccagaagccggtggtagtcaacaaaaatatgcgtaagtgagcagcaaatggaaaccaagtatgtaattttacattttctaatttcaaaacaagtcatttaacacaatgtatccaaaacactattattttgatagaccatcaatatttaagaatcagtaatgaaatatttcacattattttaacttactgagcccataaaagccagtgtgttcttcacacttaacagcccatctcagttcagattacctacgtttcaatgctcggcagccaccgtgcctagggtctaccgaactggccagcctagctccgacagcttctgtgaggatcaggcgacctaaggggtgtaaggggcagggccatcagctgacacatcaacgtggcagatatattcctcctgtctttcctctctgacacacacacacacacacacacacacacacacacacacccgcagaattttccacatttaaaaggcctttacaaggacgcaggagcccaaagcggacatgtgacaaatccagccctttgatagcccccccaacccccgcccccgaccaagccatcttcctcccctgcaggggcgaaaggccgcccaccccgccatcctggcattcctttcaggcagctgcccgtcggctccccgcggccccccactcctctccacgctgcccaccccacccccacaaacggcgtccaggaccctgcccaggatgcgggaaacctttgccacccgctggagagcccactgcaaatgggtcttcaatttccggccccctactccaaagggtactcgacgcctcttcccgtccttaggaggcgaggaccctgttccgaggcagcccctccccctggttccggggcccccggtccccagcccccctcgggggtccagagtgggcggctcggggtggggatcgcggcgtgagcggaggacccagcgccaggggtcgcccgtgcccgtggatcgggcagggggctgcggctgggcccgaggcccgggcaccgcactcaccgccggaccgcgaggccggccgcccaccctagacccagcggcagcagcaatagggcgagcgcccccacacctcgcaccgcgccccggctccccctcgcggtgccgcagtcccagccgcaccgcccccgcggccacagccccgcccgtcatgacgtcaccgggcagggcgggtccccgggtataaaagaccgagctgggggggcggcggcaggtctctgcgcagcccagcccgccggtccacgccgcgcaccgctccgagggccagcgccacccgctccgcagccggcaccatgcgcgagatcgtgcacatccaggcgggccagtgcggcaaccagatcggcgccaaggtgggctcaccgccacggaggggcccggggt

SEQ ID NO: 35275 - DNA, 2300 bp, Homo sapien
acaaaaaaccaaacaccacatgttctctcataggtgggaattgaacaatgagaacacatggacacaggaaggggaacatcacactctggggactgttgtggggtcgggggaggggggagggatagcattaggagatatacctaatgctaaaaaaaatatatatatatatagtggatttgtgtaatccttggtccttggctactgtggaattcaaccatcatcacgtttctattttcttttcttttttttttgagatggagtttcactcttgttgcccaggctggggtgcaggggcataatctcggctcaccgcaacctccacctcctgggttcaagcgatactcctacctcagcctcccgagtagccaggattataggtgtgtgccaccacgcccagctaattttgtatttttagtagagacggggtttctccctgttggtcaggctggtctcaaactcccgacctcaggtgatctgcctgcctcagcctcccaaagtgctgggattacaggcctaagctatcacacccagcccacatttctattttctaatttatttatactttcatttattcaacaaatatttatggggctaggcaccaggggtgcaaatataaataaagacactgttcctgcccttatgggtcttacagtctaggatgagaaatagacatcatcatctaatttttatgcctttatttatttgagttatgtattcataatatattttcacgagcatcaaaatacagaatacctatttttttcatgctaattatgagcaagtagccacatatgtgttttggttggttgcattactttctcaaggctacaaaagcaggaccatgcaggatctagaagacttgctgtccatttttgcggtataatctctagatggcacatgctcccacttctggccacaggatgggttgtcagataaaacattctttcgaatgagaaaaacaattaagcattgaaaatgtgagaacaagaaaacataagataaaaatagaattcgccagcctgttttatgaaatatctgtttaactcgttgaatttaaaggtagcagtttaccatattccatcctgtctggactgtactacatttaggatgagaagtcagcaaagtagtagtaactagctgtatcacttattctagttttgaactctaggccatttgtgaagaaaaccggaaaactgcttcatgtttcaagcctagaatcaatcattaacccgtttggaaaaacttcaaaaatttatttttaaaaagccttataacctacaagttgaaagaatagcacagccagtctctgcatacccttcctctgccttcagtagtttttaacattttgcccattttgccacgtttgtgtgtaagctttttttttttttttgctgaattatttgaaagtagattgcagacatcacgacgcttcaccctaaatgtttcagcacgcacctcctggggacaaaggcattctctgatgtaaccacagtggcagcaccacacccgaaaaatgtatcactggtattcaatagggccacctcatatccagccactagctgtggcaccctgggattatgtcagccctgccctgctgcttgggcactgagccctgtccctgccctgtccctgccccatccagaactaatagtgtgacttggtgcaccatcatgtccagagacggagcctgctgccttcacccaccagctcaaaccgctagatccagtgtcttcccgatgaatatctgtgtctgcccttccccatccctgggggccagcaccacagctagtgtagtcggctgcctcttgatggcgacctacgccacgctgcagctgaccatggatatttgaaaggggcaagtgaagatgttaatcattgagatggcttggatttgtgtccctgcccgaatctcctgttgaattgtaatcctcagtgttggacgaggggccctgtgggaggtgactggatcatgggggcagatggtgactggatcatgggggcagatgtcccccttgctgttcttgtgttggcgagtgagttctcgcgagatctggttgtttgaaagtgtgtagcacctcccccttggctctcttcctctttttcctgtcatgtgaaacatgcctgtttcccctttgctttctgccatgattataagtttcctgaggccttcccagccatgcttcccgtacagccttcggaactgtgagtcaattaaacctcctttcttcataaattacccagtctcaggtagttatttacagcaatcccagaacagactaatacaaccatacataatatga

SEQ ID NO: 35276 - DNA, 2300 bp, Homo sapien
agagaaatcttaagtcaccggtgattgtactaaataccttacctcaaacccctcaatatagatcagtgagtcaatgctcagataagactatttcagattatcaccaaaatggccaaacgttaaaatatttgttcatgaatataattataaataaggaaggccaggacaccaagctcttagcagctgaaaggcaaacaattttacactatattaaagctaagttggcacaccgcggatgttcttcatgctttccctctggcaatcacacctcttcagcctccactgcccagcgtaaaatgaatccctcatgctctcagccacaccaggcactcaccaaacacgaaattgtctggtctgaagatctggccgaatggtccagacctaaccgaatccatcgtgcctggctccagatccacgaggatggcccgaggaacatatttgttacctgcaaggaacaacagtgacttagaccctcaggcaaggacctctgcagagaagggcttggcgcctgctgccatcatgcagatgttgccccaaacaaagggagacccaccatcaggttctcaaagggctctgttggcataaggaagcccaatgaaatactgcagggaaagagcggggatcctaaactgaatagtccaccctctcccagggccacacccctggggtcccacgcaagggaaaggggagaaggtggaaaaactgaagggagtgggggtggggcaagggtgattaccagtggcttcattgtagtaaacattgattctctccagctgcaaatcactgtctccatggtaactgccagtggggtcaatcccatgctcatcactgatgacctcccaaaactgagacagaaaggctgcatttagccatgaacgatgcccccagaaacgccaaggctcacaatgaaatgtccccgactcagttccgacaacccaacatttcaggagcttgaagctttaaagggcgtcgtgacccgggcacagccgcggggcttgtattttgcaggttcagaaagttgaaactgggcgtttcccaggcaaacagctgccgctcgcggggggaggtaggggtcgagggggtaaggaccagccaaagccgggcagtggcggagcttggcgcactggtcgcagccccaggctgcggcaggaggcgagggcacagggactgcagcccgccaggagcgggtgggcggggaaagaggaacgcaaaggagctaaaggaccgcggttttagattcaaagcacgtcctgagaccgcaagacaatcgctctcctcccctcccccggcagctcgactccggttcaagcgagtacaattaatcctcctggtgtcccagcccctcgcgcggagcgccgcgcacagcctcgcggacacaccctcgtcttctccaggcacgcgtgcctgccaagcagccagcgcggagggaggccgagggggtgacggggactccaaatgagttacagcagaaagaaagagaggtgccccctccgtccgcgaaagtcacctcctagcccaggccacactcggcggcacaaagcggccaggaaggtctgcatttggcgatccccaggccttcccaggaccgcgcctggggaccccgaggggctctcggcccaggttcgcgcccccattggaccccctccgctgcggcgcgcccaccttggcgccgatctggttgccgcactggcccgcctggatgtgcacgatctcacgcatggtgcctcgtcagcgtcctcctggtccggcggcgtctgggtctgtccgtcctcccctcacacacccactgcggggtcaccgggaaggcgctcgggaaccgacgggctgagagcgccggccccgcgggctccggcttttatgcaaggagggtggggcggccggcacaggccgcgcccccagcccgagccccccagtccccttcgcgctggcgctctccaggcccggctgacgtaatgctccgagccctagggaccgtccggggggctggaccaccggcccgcggccaatcagagcgggcgtgccgaccgggagaggggtgggggctaccgggagtatggtgggggcgtgcgcattgtctggggctgtggtgggggtctgggtatggggatatgggggaacagtgaagaaaaggagggtgagagggcggcgaggcgagggccaccagcgcgtcctgaccggggtgggggcagagctggcaccggatgggaacgatggaggactggagcatgtggagaagccgtcaggtgctccagtgccggcaggtgggagggctgaggtggcacaggctgctccgccacctc

SEQ ID NO: 35277 - DNA, 2300 bp, Homo sapien
gagacagaaaggctgcatttagccatgaacgatgcccccagaaacgccaaggctcacaatgaaatgtccccgactcagttccgacaacccaacatttcaggagcttgaagctttaaagggcgtcgtgacccgggcacagccgcggggcttgtattttgcaggttcagaaagttgaaactgggcgtttcccaggcaaacagctgccgctcgcggggggaggtaggggtcgagggggtaaggaccagccaaagccgggcagtggcggagcttggcgcactggtcgcagccccaggctgcggcaggaggcgagggcacagggactgcagcccgccaggagcgggtgggcggggaaagaggaacgcaaaggagctaaaggaccgcggttttagattcaaagcacgtcctgagaccgcaagacaatcgctctcctcccctcccccggcagctcgactccggttcaagcgagtacaattaatcctcctggtgtcccagcccctcgcgcggagcgccgcgcacagcctcgcggacacaccctcgtcttctccaggcacgcgtgcctgccaagcagccagcgcggagggaggccgagggggtgacggggactccaaatgagttacagcagaaagaaagagaggtgccccctccgtccgcgaaagtcacctcctagcccaggccacactcggcggcacaaagcggccaggaaggtctgcatttggcgatccccaggccttcccaggaccgcgcctggggaccccgaggggctctcggcccaggttcgcgcccccattggaccccctccgctgcggcgcgcccaccttggcgccgatctggttgccgcactggcccgcctggatgtgcacgatctcacgcatggtgcctcgtcagcgtcctcctggtccggcggcgtctgggtctgtccgtcctcccctcacacacccactgcggggtcaccgggaaggcgctcgggaaccgacgggctgagagcgccggccccgcgggctccggcttttatgcaaggagggtggggcggccggcacaggccgcgcccccagcccgagccccccagtccccttcgcgctggcgctctccaggcccggctgacgtaatgctccgagccctagggaccgtccggggggctggaccaccggcccgcggccaatcagagcgggcgtgccgaccgggagaggggtgggggctaccgggagtatggtgggggcgtgcgcattgtctggggctgtggtgggggtctgggtatggggatatgggggaacagtgaagaaaaggagggtgagagggcggcgaggcgagggccaccagcgcgtcctgaccggggtgggggcagagctggcaccggatgggaacgatggaggactggagcatgtggagaagccgtcaggtgctccagtgccggcaggtgggagggctgaggtggcacaggctgctccgccacctcggactgcggctcctactcggccactggccagagtccctccagccaactgcccctggtgagaccaccgtctttttcctcaaccctggaggccagcgactgcccaggcggcgctccgtctcacagaggcctgggggaggacaggtggccccagaaggaagtcgtgcttgatggcaaccgggacacctgcggcccatgaacaccagcgcggcctccgcccccgccccagcgtgggcctgctttctcctttgtctgtcttgggctggtagctcctctcactgcgccgcagcatctaggggtgaagcgacctcggagcccctcagccctgcccgaccctctccgggagtgcataacgcccctgctggtacccaggagccctctgccccgggggttgacttttgttgctcgctagtgatggagtgggagtggccggtggcgctgcactgaccgtccggagggcagaaagagggtggggtcccgggggcggggctgtcggcggaacaaagggctctcagaaacgtgggatacgctgtgtaacccagtatttaaaaccacacgacaggcgccccacccccccaccccgccctcggattcagttcatctattgtcaagtaagagggtgggttccaagggtggcccaagcccgagtaacaaactttcttatcttccatcgcggcgacctggaggtccgaggcttcgtgctgcggttgaagggtggggaatacgactaaaaactgcagcccagcgcgcgcgagacgacccaagacccacgcgcactcgcacgagcgcgtgcacagacttggagcacagaccctcccttcagatccgcagtctctaggtactgaggcag

SEQ ID NO: 35278 - DNA, 2300 bp, Homo sapien
tgggagctcgcagcgagggggtgaccgctccgagtgtgtctacactcgccgcgcgggtgccgccctagctctgttccttccggcgcagcttggtcccaccagagccgccacctcgaggctgacacctgccacagcccttttggccgagatgcggtcactttccctgaggtctggtgtgcccaaaagacgagattccagtccgagccctgtcctcaacttgctgtatgaccttgggaattgctagccctcgacgtttcggcatctgcaggatctggattagaaactcggaggtcaggccccgagaccttggtaccgggagagcagggcatgtggacagaccctccgctgctctctgcctctcggtagaccccaccctcacccgggcacgccggccgggtctggaataccggccggcgagctccagtctgggcgccctggatgtttgggggcgcctgggcttttgttctcgctacttctctttgtacattggaatcgacttgaaccccccaccctccaccccacagcgggaaagggaggcgatgacagcttgctgatagttctgggagggtctcgctcaacagctgcaggctgagctccgccgcgtgcgcccgggtcattcggcctttctcgccaggggatgaaagaggtcacgtcacctcgccaacggcccttccgaagtgtggggcggcgcgcttcagtcatcgaattgcagggaacaggttgtgcagtgaacgtttctgacaccctttcccctcccgccctcaaacgcacgcaggattagtctctctctctctctctttctctctctctctcacacacacacacacacacgcgcgcgcgaaaagtaacaaagagaccagttcctgcctcagtacctagagactgcggatctgaagggagggtctgtgctccaagtctgtgcacgcgctcgtgcgagtgcgcgtgggtcttgggtcgtctcgcgcgcgctgggctgcagtttttagtcgtattccccacccttcaaccgcagcacgaagcctcggacctccaggtcgccgcgatggaagataagaaagtttgttactcgggcttgggccacccttggaacccaccctcttacttgacaatagatgaactgaatccgagggcggggtgggggggtggggcgcctgtcgtgtggttttaaatactgggttacacagcgtatcccacgtttctgagagccctttgttccgccgacagccccgcccccgggaccccaccctctttctgccctccggacggtcagtgcagcgccaccggccactcccactccatcactagcgagcaacaaaagtcaacccccggggcagagggctcctgggtaccagcaggggcgttatgcactcccggagagggtcgggcagggctgaggggctccgaggtcgcttcacccctagatgctgcggcgcagtgagaggagctaccagcccaagacagacaaaggagaaagcaggcccacgctggggcgggggcggaggccgcgctggtgttcatgggccgcaggtgtcccggttgccatcaagcacgacttccttctggggccacctgtcctcccccaggcctctgtgagacggagcgccgcctgggcagtcgctggcctccagggttgaggaaaaagacggtggtctcaccaggggcagttggctggagggactctggccagtggccgagtaggagccgcagtccgaggtggcggagcagcctgtgccacctcagccctcccacctgccggcactggagcacctgacggcttctccacatgctccagtcctccatcgttcccatccggtgccagctctgcccccaccccggtcaggacgcgctggtggccctcgcctcgccgccctctcaccctccttttcttcactgttcccccatatccccatacccagacccccaccacagccccagacaatgcgcacgcccccaccatactcccggtagcccccacccctctcccggtcggcacgcccgctctgattggccgcgggccggtggtccagccccccggacggtccctagggctcggagcattacgtcagccgggcctggagagcgccagcgcgaaggggactggggggctcgggctgggggcgcggcctgtgccggccgccccaccctccttgcataaaagccggagcccgcggggccggcgctctcagcccgtcggttcccgagcgccttcccggtgaccccgcagtgggtgtgtgaggggaggacggacagacccagacgccgccggaccaggaggacgctgacgaggcaccatgcgtgag

SEQ ID NO: 35279 - DNA, 2300 bp, Homo sapien
ctttcccgctgtggggtggagggtggggggttcaagtcgattccaatgtacaaagagaagtagcgagaacaaaagcccaggcgcccccaaacatccagggcgcccagactggagctcgccggccggtattccagacccggccggcgtgcccgggtgagggtggggtctaccgagaggcagagagcagcggagggtctgtccacatgccctgctctcccggtaccaaggtctcggggcctgacctccgagtttctaatccagatcctgcagatgccgaaacgtcgagggctagcaattcccaaggtcatacagcaagttgaggacagggctcggactggaatctcgtcttttgggcacaccagacctcagggaaagtgaccgcatctcggccaaaagggctgtggcaggtgtcagcctcgaggtggcggctctggtgggaccaagctgcgccggaaggaacagagctagggcggcacccgcgcggcgagtgtagacacactcggagcggtcaccccctcgctgcgagctcccaggagcaaccctgatgctcagcgctggggggtggggttgggggccgctcagctccatgctgagtaacttgagctggccgcctgcctccttcatctaaccaattcatttctcagcttctgtttccgagccaaatctccattcagtgcccgggtgaaaacgcgtgttcaagatcatatagatagatgaaaagaccctttcctctcaggtttcttttaaaggggttggtttgggataggatgaggctggaaatcatccttctgaaagcccagagtgcccttggggacacttttggcccaagatctgctttcctttcaagcattttgctcgaattgtccccacacccctgccccttccgggcagccagtcttgttaaccggtctacatcgcacccccacccccacccccactggaattgtgatgctgcacatttttattttcacaaggagccgattttgtgttaaaatgttgacaacagccacacctttccctgaagtctttcagtttatctgataacccttaaacaaaaaaatcattcttaatccatgtagctcgcataaagagactggtacccggctttcaaagaaaaaaaaagtcgttttcagttgggtccccagcatttctgtctattcattatatgcaatgcgtctcaatctaggtcatcgtatatcaggcacgaagatttcggggcaacatatttcatgatctcttaatgttagtcttgatgatgtactaacatttaaaaattttcccttccagagacaattgtagaaatattgctgcataaaatacaattcaacatttgttttatacgtaatctattgcgtgactgaggtgagcaagatatcccttaaactattaaaattatatttgctttcacaattttcagattactttcaacggcatgtcctcaagtgaatttgcatttctctattacacacacagtcattgtttgaagaagtctgatagaaaagaggctttatatagtagtaaatttttaaagcactgttttcataatgtagcatatatttttgacacatttattgaaattactagacatttagcattagggttcttcactgcttgccaggattcaccgcttaaaaccccaaaaacccagcccgcagcccccatagctggctctgcagccgagatgcacgcggtttcctaggcaaccgacacttagccaatgaatgaagaggagttgaaagaaagagactgcaaatccatcattatttccttacacacacacacgcacacacacacacacacacacacacacacacatcacctcttctcatagctctccatttagaaatattggaaagctaccaatcctagcatttatgtaaaagagccaaatgcccggggcatgggggctaggaagcggtcgcagccccatactgtgactgcggaaaggacacagtggaggaagctcccgggatccgccaagatctgcgccttctcagctttgtcgctccccagtttctattccattgccctcccccttccccccaggccttccctcctccgcctgggaagccagcggccccggcggagctgcccggcactgtttagtcgcaggggctgcggggtggcagcctcagagccctgtccttccgcagccgtgggccccgcagggaccagccaagcagggcaaccaaaagctggaaccagcagcgaaaaccccgagcccacgaacgcagcgcagtgcgggaacacttgccctttgttcctcagtaaggccgggtgttttcgcatccccggaggtt

SEQ ID NO: 35280 - DNA, 2300 bp, Homo sapien
tgtagcagttgggacaagttttttttgaagtggacctaggtggcacatgcaggctctttggagacgcatcacagataatgaggggggttcctgaggacgtgaaaggacagggtcagagcacaggtggatggattgaccttctgtacaaggagggacatctttatctttcactgtcacagagtgagcagaaggaaagatagggtccaatgaagataagcattttaggagagggacaaggagctgggaaaatctggctttgtcacctctattttctgcataacatcagaagcaagggcatctgctgaacttgggtttgggtcagctcagggtttggggagcatagtcaaggggagtgagagaggacgctgtctagggactgcagggcagtgttccagggccgctgatgttgggcatgactggctgtgaccctctgcctgtgtgtttcccgagcagtgacagcaaagctggagagagagaggagcattgaggttttgagacatgtataaccagtgaaaccatcattacaatccagattgagaaatttgccatgccagccaggccttgaactctccaccggtcggtaactttgtttccttaatctttgggtcctcctagctgattgaagggcctcaaatcacaaagtaaagggataaaacaattatggtgtagccatacaatggaacactgcttagtaatacaaagacacaagccattgacacacaagcagatgaacccaagataattatgatgaaggaaagaagctggacaaaaaacagtacatactgtgtgattccactgatacaaaactctggaaaatgcagactaatctgtgtggcaggaagcagatcagtggttgggggcaggagtcattactgagggcaggagggagtactggacgcgttcactttgtggattgtgatgatgatttcactggctataacgtgtcaagacttcaatttgtacactatatatgtgcagttattgtatgttaatcacattttaataaagctgttaaaatattgacctgaaaattaactgtattattgaatcatcgataattagcaaatagaactatggaaaatgccctcttaaatttcaatttagtcaacttagatctattagagatttttaaagcagaccttttatagttccaagttaaatctctaaagtcagttgtaacagaatctgacaaaatgggctgttttcttttaccaccttctctcttaacccatcaaggcttccttttctcaactctgtaatgtcctgaagtgttcaaggggtctccccataggtatgacaatgggatgattggatgattgttggtgcttcccattaatctctcttgagatcctttccacgtctccgaaaggcacctgttcttatttgcattttgcagatgaggaaactgagtctcagagaggttaagggggtagcccgaggccatgtacatgactgcagcttgggactcggcgtccaaaagggtgcctgcccatcctcctgccaacttagttgacacaattttcctttctaaaggctttctcccaataccgttgccattcttaattagggctgggtgccgtcgaagcctccttggagttaaagggctgctaggaggaggaggtgggacgggaggtggccgttctcagagtgcttgaagaactaattaaaaatcagtctttttaaatttttaattaaattaatgtctgtagggcgaagtgtcacggcctgggaggacggtgcggctggcttcagcccttgaatgccccgcgtcagtaataattagggggtggggggaaacaaagcgagggtgagttctgctgggcgcccgtggactcctagaggtcactgtcgcactctgctactcaagtgggtttccccagcccgtccagagaggtactggtgtgcgggagaggccagcaagacaaccagggacagctactccgcccagggccggcagccgccccgcctcgaccacgcccccaacccaagcccgggatcgcccctccccgaccacgcccctcacccccgcccttccggggccgaaagcgaaagcgcgctcggtctctcggtgctcgctccatcgggtctggcggggctggcagcggcgaggacccgggtctggcgctgtgggccgggagccgtggggcggcatggaggggctggttgtcgccgccggcggggacgtctccctgcacaacttcagcgcgaggctgtgggagcagctggtccacttccacgtcatgcggctgacggactcgctgttcctgtgggtgggggccacgccgcacctgcgcaacctc

SEQ ID NO: 35281 - DNA, 2300 bp, Homo sapien
tctgggaagtggcctcatgatcccttgtgtgacatcacatcagtgtagattaggatgtggggttagacatcccaaagggagactctggtaaaagaagtgtagttgcagatattttcattgtatcatgtcactaaagagaggtattgaagagaaaaacagcaagcaatatatgtctgctgtaccagcaaaccactgatacgacgccatcatgctgtttccacattatctctttgactttgtttaaaggttacctggatggccaagtgctgaatttccttatctgatactagcccatgctgagcttccaacactgaatttaccgtggctaatatagatttctggtttccatagcagccaatttactgcttgtgcttaataaatgaaaacaagacctacaactgttagtcttttcttaaaagacctatttttctttattatttttgagagcagaaatgccagatctggaccctgctaggtagtgatcttttaagtgaacctgacctatggtaccaaaaggaacagcattgcagcaaatggctgagagtgagccatttaatcttgttttcctaattaaatggtagaaacctctttataagcaataatcagtgaaatctggtttctctcttgttcactgatagctatgatgatgatctgtttgcttgtggctgagcagcaatggaaattctgatggcattattatttttttccagcagatgagctgctgtaggaattggctggcatggtgccctctccttgttagggctggtaatatccttgtagccaagcataattcatctgtactctctctagtctgcttcccttattgccttctgacctcctacctctgctgtggtctctagacacccagcagatgagctgtcacagctgatccatgaagcccaccatccaaacagcctccaacacacaggcataaaaagtgttctctccgaagggtctgtcttcttcctcttcttcttcttccccctcctcctccttccccttcttcttcttaccttatgtttgaaagagcaagcaagcaagaagcctttagagaatactgcatattgccggagaatcacaaataaatgtacatgctctgtagggaaaataatatatataaaacccagctgctttttctactataaagggctttcattatggtgattcacgtagtagtaagtctgtattggttgtcacttgggtgccacagattaaagttttctgatcatctttttgactcaaggtcaaagtaaaagaatagattcttgcaaataagaggggccgtggtcatttgttgaaaatagacactgtttttggttttggagctacaaagatgaattagacatgggccttgcccgggggtggtgtccaatagagacagagaaaggatgcatgactcacccgtgttgcagtggcccacagaactcccacgtggagaaggggctttctggtagggtcattgctatatgatctgagtcagccttattgttggtttttgtcttgtttaatagataagctgagacttagctcagtctccctctgtctcacagtgtgagtaggttgcctggaactcggagtgctcaaggagccctggagtgagaaccagaagaaggggtgggtggtgcatatgggtaggagtgagtatatgggcatgcctggtgtcctgtctagaggtcgagatggcccctaatacagcatcatggacaggaaggaatggcgacaggatgggcacgaggggggaacgtgctggacagcaagctcagtgacgtctggagagcagaggaagcaggaacaatgggcgatctgtcccataggcagtaccatttcctggtttctgagctaagctcctctgaattatagcatcccttcgtcatcgactagccctgtggccttgaacaaccgtctcacttcccttcccagttggagcctcaacgcgcccgtaaaacactggcacaccacatagggcacttgtggtgggcagcagatgaaaacaatttcagtcgttggtgggttaagcagtgcactggcccaggtgcacccaggacttctcgggctgtcgagcagggcactcatctctctctcattggttctgtgttctaggaatagagctgtgcccccctggaaaacggttcatgattacgatggtggcgagcttcgtggccatggcgggccagttcctcatgcctgggctagccgccctgtgccgggattggcaggtgctgcaggccctcatcatctgccccttcctgctcatgctgctctactggtcgtgagtacactctgcacagcgccctgggctg

SEQ ID NO: 35282 - DNA, 2300 bp, Homo sapien
tattaagtgggataagggatatgatgcagtcagagttcgtatttttgaaaagacctctctggctgcagtgagatctcgcgtggtggggaggggaggctgtgctgagtgcacaggagaaagccagcgaggcctgtagaagatgctgataactcccccagggctgacggggaggcagacactctcgggagataccagggagatgcccttagccagctgaggtgaggccttgggaatggagggcttcaatggagggcatgtggagtgagacgagggcctgggcccaaacaccgcacgtacgatggagacttggggctctgtagccacccataggcagaggggagggaggagagcttttgacagggaaaggcagcctgaccagaggttctggaggaaactgggcctgtttgggaagcagacatgctggcctgcgcaggggttctggggatgaatagtgggaagtcctactggaagctcagaggccagacaagggggcctgagcctgttcccagggctgtcgatagaaaactcggggcctttggcgtgttctgccattttctctggccctcctactcaacaagggaggatgctaattaagtttccacacagctgaaagacccagatatgtgaaaccatggggctagaatttgccttcaaattcagctggctttgcctttgctaattgcttagtctaggtaaaagattgtcctgggcgtggccatgtttaatatgattatctagtccaagccttcagtttagatgagaaggctgagctggagggccattggcttgtccaaagccaccaacctattagggtttgaattcagttctccttatcctctgccccagagtggcccttaccatgggagaggggctgggaagggctggcaggggctcccaccctttgtgacttctccctggcgctggcctttcagaggtgaccctcccgttgtgcttgagaatggtggttgctgtatgtttgggtttctggacagttcagctgtggctttgcatgggtggacttccgcagaacacctctctgggcagatttctctactctctgtcttcttagtcccggctagccaggcccccatcttgtcttgctgcttttaacaccacaggcccgagagacagaaaataagatggaaacctgcccacatcacttccctgcttgaagccttccatggctccccatcactgcagcacccatcaagggtgccctcagccctgagccccacatgtctttcctctcctcccctgccacccctccttgttgtagggggcatcttgtatatattaatagttcccagcccggtctctctcactgccttgtgccttgctcatgctattccacttgctcgagccccttccctccttccttcagccccttggttcctgctcatccctcaggtcagctcagtctccatctgaaggacggcaaccagctgtccccttatccaagccctcactggaccctggttggaaggatgcccgtctctctcccctcctgaagctctttgactttatgaggttaacaccataaatgtctgaactcatctgaacttgatgtcatgaaaagggcaagagtggccgggcacagtggctcatgcctgtaatcccagcacttcgggaggccgaggcaggtggatcccctgaggtcaggagttttgagaccagctggccaacatggtgaaaccctggtctctactaaaaatacaaaaattagctgggtatggtggtgcgtgcctgtaatcccagctactcaggaggctgaggcaggacaattgcttgaacctgggaggcggaagttgcagtgagccaagatggcgccattgcactccagcctgggggacacagtgagactctgtctcaaaaaaaaaaaataaaggggggcaagagtggcaggcctggcttgcagccccaactctgccacttgtcatgggtctctctcccagagcattactgcacctgtttcctcaatggtagaatgcggtcagtgctgcctgaccttgagggccattgtgaggacagacgcagaacactgggaagcgtgccccacccccacgtacctggcaaacagcccccaccctggaagcctcaggtgccttccttcctccccttggtggggtgaggacgaccgggatgagtcgtctgagaagcactttgaggggggaggagctgaaggccacacctggaagggcgatttattccttgggcgctgccaggtgtctgccgccttcacccagaaaccgatgatgttcggagccaggtatgcccttcagacaggaagcctgcatccaggg

SEQ ID NO: 35283 - DNA, 2300 bp, Homo sapien
cctctccctttctgacacctagggacagaatggtgcatatattgtagggcacacacacgctaaaggatacatactaaatacaggatacatgctgaagacagcatgaggcttatttgcaagagaaagatcatggaacagagcaggaaagaggcacaaaaggcagcttctcaaaccctgagcttttatccactgaaagaaggcaaaggctccttccactttctgcttctacttgggatgtgggctgacaagcacctgacccctggaactcctgcactcaccatagtgtacatcccacattagtgcatctgatacagtattcaacatacacagcagcacaggaaaagtctgccttccaacatgccaaaatgtgcttgaaaagctctttgaagcatttgttatgtgcttgaaacacacagaacactgggaaggcagtcctttatttagatcttttttgtctgtgaaaatcaatatgtcctttctaggctttactgtataagaaaatgtgtgtctaattattgttcccaggtttcccctctcagtctggcccagtaactgcaacgtgtcatcaagcatcacccaaaacatgccacacacatgagggctgtctgtgaccctctcgaatgctaatttagaaaaactgcccagctctccaatatgcctccatagtctgcttttaagaactatttttgttctctcctcccaccgtgcatggctgagtgtgaatagctgtttcctgggtcctcactgccaaggtaatggcactctatcccatctcatcactttcaagttcacctctactttgaccccaggacacagcgctcttcacacatactcactttgatccattattctccctctgctctagaaagacacttgaaatacttaacaatgttgccaaatcctcagtctgtcagacatacacagtgatttaaatagtcattgttcttaatttttctttgctgctaaaccaacaaagaaatattgccctccgtgaagggaaaacagtcacagaaacacctttagaaagcagggggtaggaggtgggtgggatcaaggtgaacccagctagaaggaccttccccattaccttgcagggcagcaggggcagctcagtcagacagttcccacaggacagagcatttctggccaggttggtacaagattaaaacaatgattatgatgatgtaagagtttatcttacacatccatgagctacaactgttaaccaatgcacacggggggaggaggttacatgcacattgactatttaaaactgtccaatttcatacatttcgacaaagcatttaaaactctgccagaacagcccagaatgggtagcgggtggggtggaggagagtctgtatttactttaaaatgtgaattaattagtttagacacaaggagcaaaactacaaatgtcttgatatctcttatatgttaagaataaaattacagctgtctaggggcattgagtgtccaccattgcccactctgtgtttaggccttcacacttgtctcacaactcccttctgctacatttcacaccacgcaatacctctgcaagggagctttagctacaggactcagaggacaaggtgcatgtttcagctaaagcacacccccgttctcagtgcctcagcccaaagcagctgctgtgtaagagcggtgacggccggggaacacccaaatgacatattctccgcgtccttcctatactgtagtgatgtttactgaagtgctgagaaaacatgggaggagacactggggtagcaaagcctaaagtcagatatctttggggaggactaagcatcggctgcgggttggggatttgcaggagtctttgcttctctggctctccagttctttagtaggctttacctgtgtcaaaatcaagtgcgagatggaagactattgctttgtgggagacccagggacaactagccgggcagaacagggctgtggtcccgactcccccagcagaccttgaacgacgccagtccgactcctccagagggggctggtgacaggtcagctgcctcgccccgagggtgggggaagggcgcgctttccatccgcgtactgggacaggagtttgggtgcaaactagtaaaggctatggtgctccctttacacccaagtaaaggcatgtggtttgggggacggaaggagattaagccaatgcggaatgccctacacacactctagcaccaccactttggggacttcggttctcccgctggctcgggcttggacctcggtctgcagggagagggttggagggactgggcggctgcggccct

SEQ ID NO: 35284 - DNA, 2300 bp, Homo sapien
aataaataatgtgaagttgaaaaattaccacgtacacaacgtgcactatcgtgtccccccccgccccaagcccccagctctttatatatgtggtttccagacccatttctcagcggtctggtgtcttttgcagcccttagggccccttccgcccattgttatctaatcaccccttctcggccacgcaggaaggtccacaacctcccctgtcccccaagacccgccccccggcagccttcagaaatagttctctggtacgtatgtgccagcattttatgcagtaaacacatgttgcccttaacactgaactgcaggttaaaaatgtattccactaaattgtgcagcggttagctgagcaaataatgaaaatgcaaaagaatacattcagtatatggagcttagaatatatccttttggaaagctaaacattttttttttttttgccccaaataagactagaaatggattgctccatttaagacttccattaataaacttctcagaatatgaaatgcctccaaaatgtggggacgctgggttgaaaggtgccggataattctctttggtgcgtgcgctgggtgcaggaggaaatatgctaatgtagccgtttgccgcagggctggtgttatttatacagcgctggctgggcaaggttggcgctggagcaggagaggagggagaggtttgtcttcttgtgtgagagtatagatgtgtgcgcctgtgcacacggcgttccaaacgtgaatacaagatcttagggagggggtggggaatgccatcacgtttatactgtgtgtattataacttgtgttggagatatatcccagcatcgtgcttacatcgcatgcacttaggagtgggggaagaaatggcgatttgggagtgggtgcggcgggtcgcaggtggccagacactgcgggggactggcgacctgaaattggcaaaggcgcctccttgaccctgctccacggacacaaaaatcaaccttattcgctcctggaaaaagcgcagagggttgttcccgaaggctgaagaccctcgggcttgggactgggagcggggcgcgggcagcgggaccgccgggcacctctgaagagacagaggtcacggagacctggcgcgcgcggagtgggtggggggcccgcgcggctgcgggagcccagcctcagagaagacccggcccacacgttctcagcgcacgccgactttgccgggacccgtcgccggccggcgacccctgctacgcgcgtctcctcctcccccgccccgcccggcgcgaaacgggcaacgggcaggggatcctccagccaggcgggcccggggtgtcccgtttcccccgcccccctcccgtggatcccgggcggcggcggccgcgcgtccgggctggagggggcgctcgcgagcaggagccgagcgcagcaggtgccgcggttacctccacctcggcggggggagagggggcgggccggggggcagggaggagggggaggaggaggaggaggaggaggagtggggccggctccaggagctggagagcgcggccggctcggcaggctgggtccagagctcgcggcttccgggaggcgcccgaagtcggagaaatacagcgcggccaccccgggagcagcagcctttgcccgcaccgccgcccgcagggccctgaaccgccggcaagggcgcgggccgggcgcggcgccggctcctcctcctgccgcgtccggcgcggagcagcggagagcggcgggctcggcagccggcgcccgggccgcggaactgatgagccgcggcggctgagggcccggccggcctctgcccgcctctgcccggcgcccgagcggggccgcagcgcccggggcgcggggtccggcgggtgacatgggggcggcctgacgcacccggagccgccgagcgctctctctcgagccgcgggccctcctcggcggcagcggctgcaggcgcctggcccggcgcgctgtgcccggggcgcccgcggagcctccgccgcgctctatgcgcctctgcgggagccgcgggcccgggccatggccatagaccggcggcgcgaggcggcgggcggcgggcctgggcggcagccggccccggccgaggagaacggctccctgccgcccggggacgcggcggcctcggcgcccctcgggggacgcgcgggccccggcggcggcgcggagatccagccgctgcccccactgcatcctggaggcggcccgcacccgagctgctgctccgcggctgcggccccgagcctcttgttgctggactatgacgggtcggtgctgccc

SEQ ID NO: 35285 - DNA, 2300 bp, Homo sapien
agttctgtgcaaggatgaggcttcctgcttagtagctaagattagaagtgatcagcatgttcaattaatgcccatctgactttcaaggattgattcacggattcgtctcatccgtttcacagaggtgcttctccccagccattcggtcactgtgatgcagcttccttggccacctccttgctcaggctgtgttcctctgtcaagactcaaatttggctccccaacctcatcccctgctcagccttcactgaagaagttttactgttactagtccgtgcgcaatgaggtcttgccagtaggggtgagatgtttggacatctgttgtcctattaagcacatcagagcattctctggcttccttttttttttttctggaaaaacataggtctcataagttcattttttatattcccacacttgaaagagccataagtacaaataaatgtttctttaggtgcaaagatatatgcttactggcactcagcatcactgttggaagcagtatggagtggtggcagctatggcaaacaggagcactcagacgctgcatcaagggagcagctaccactgctcagtttagctggttgttttgcctgcaagtatgggcccagtatggccagatctcctagtttttcaataaaagctagaaatctgactcttctttgtgaaatatcccaattttgaggtgttgacaataaataaataaaaataaacaaaaatatattagaaacttgaccaagtgaaagaattgtgaattgtcagcctctaaactgtcatttcagaaaatcgataccagagcagttgaggttcatgtgtgaattttcactcttgcccgcacattcctccaggtgagaggtgacagcgtgctggcagtcctcacagccctcgctcgctctcggcgcctcctctgcctgggctcccactttggcggcacttgaggagcccttcggcccgccgctgcactgtgggagcccctttctgggctggccaaggctggagcccactccctcagcttgcagggaggtgtggagggagaggcacgagcgggaaccagggctgcgtgtggcgcttgctggccagctggagttccgggtgggcctgggcttggcgggccccgcactgggagcagccggccagccctgctggccccgggcaatgagggacttagcacccgggctagtggctgcggagggtgtactgggtcccccactagtaccagcccatcggtgctgtgctcgatttctcaccgagccttagcagccttcccgcagggcagggctcgggacctgcagcccgccatgcctgagcctcccacccactccatgggctcctgtgccgcccgagcctccccgacgagcaccaccccctgctccacggcgcccagtcccatcgaccacccaagggctgaggaatgtgagcacacgcgcaggactggcaagcagctccacctgcagccccagtgtgggatccactaggtgaagccagctgggctcctgagtctggtggggatgtggagagtctttatatctagctcagggattgtaaacacaccaatcagcaccctgtgtctagctcaaggtttgtgagtgcaccaatcgacactctgtatctagctgctctggtggggccttggagaacctttatgtctagctcagggattgtaaatacaccaatcagcaccctgtgtttagctcaaggtttgtgagtgcaccaatcaacactctgtatctagctgctctggtggggacatgaagaacctttatgtctagctcagggattgtaaatacaccaatcagcactctgtatctagctcaaggtttgtaaacacaccaatcagcaccctgtgtttagctcaaggtttgtgaatgcaccaattaacactctatatctagctgctctggtggggccttggagaacttgtgtggtgaaactctgtgtctaactaatctgatggggacatggagaacctttgtatctagctcagggattgtaaacgcaccaatcagcgccctgacaaaacagaccacttggctctaccaatcagcaggatgtgggtggggccagataagagaataaaagcaggctgcccgagccagcattgacaactcgcggggattgttttccacaccgtggaagctttgttcttttcgttttttgcaataaatcttgttgctgctcgctttttgggtccacattgcttttatgagctgtaccactcaccgtgaagatctgcagcttcacttcagagcctagcgagaccacaagctcactgagaggaacaaacaactccagacgcgctg

SEQ ID NO: 35286 - DNA, 2300 bp, Homo sapien
aattaaatcaaagatgtagccaaagatatgtcagcaaagcaaagataaaagcattataaacctctataatacctgtaaattgttaggtcacgctttctgtcctatgaaatgggtatacatgtgctggatacattgactttgcaagaagccgatcttgtaaactgagtacaactagtatgtcattcatttgatcaactggaagctagtattctagctgtaatgaaagttgaaatataacagtagttttgcttgtcttagaataaagaagcactttgtgggaatgagttatataattgtcttctctttaaaaacaactttttaagaattttgaattggctcccctttccttggtagacttccctgagcaagcaggggatcaaagcattttggttgaaagagtggtgcatatatacatcttgtagtatataaatatttgaaattctatgtaaattgcggtatataaatatttgaaattctatgcaaggaattcagggcttgggaggaggcatccggagagtctggtacttttgttgttttctcgttttcttccttctccaccctgcttgccccggcgtgtggggaggtgggccgaggctggagaacacggcagagggtcgtccagccccttcctctggtgacggccagggcatcgtgcttgggcgtaggcacaggccacgtggacagaggccccagggttttccagtggctgagtcacagaccacggaccctgcccctcttggacccttgtgccctgcacagctggccgcctgggcctgtgtggctgaggtcagtggagggggcaggatcagatagccccactgctaagcagggatgcctgctgggataccaggtgagccagctgaatgggcacctggcacgtgcttgaggaagtggggagaaggttcttggcctccactgatccccactgacccccgttatggggatgcccctgcggtagcccactcttgcagaagtgcctttgacctatgtctggggagccctggtgggagttttcatggactgtatgctctgggacctcttaatttcagtcaggaagtttaagaaatctttttttatctctcttatagacctattcaacgaattgcttgaaaactgaacaggcttttcccctgcaaaacaaaatcagaccagaacttctgaaaaagttagtctccgtgaccaataatactaggttggtgcaaaagtaatcgcagtaatcacggtttttgccattaatagttctggcacttaagcctttgtggtttaatcaccgctcacaggcacgtttgcatcagcctcggtcacacaagtgtgggggagacgccagtgtccttgggcacctacttccccatccctgcaaagccgacggatagaacctgtgatgggaagacttctgctctgcgcttctcatggggagatagaaaagcacccgagccttcatgcctcgagctatggtattttaaaaataaaatattatgctgcctgacagccactcgggtgtgtggtgaccgtgagaagcacagaggcccagattcctggaaagtggcatgagtcgtgtccactttggttttgtccaggcagagatctgacttttttccttgtgaacttggcatgtaaatgactggtctaaacagaggctccatttccaggggtctgcgatctgagcagccgtggccagcagagtgagtccttccctgtgtcactgggggtgggctggtcctgggccagcacccctgactgtagccaccacgctggtggggcctgattcgccctgggctgagctctggctgtgaccagggtgattatggagtttgccaggctgccccacttggagggatcttacacctcccatccccttttcagattgacagtaccaactcctgcacagactttatggatcactgggtaggtgaaacatggaatgaggcttagagcaggacttccagaaagcggctataggtgcataaggctgaatgaatgttcccgacatctcattacagatgacgaccctggcggtttgtgggcacctgttgtgtattgcattgggagcgcgtttcctggtgtgctattctgactttgagcatttctgtctcaattctaggactggttgccataaaggaagcccacgacatagagaccaggcttaatgaggtggagaagctgctgaagacgatcataagcatgccctgtaaagtgagtgtggccaggccccgggctgggcagggaggtgggaggtgctggcacctcccaaatgcgaaaggcgtccatccccccggagggttgacttgcttgctctgtct

SEQ ID NO: 35287 - DNA, 2300 bp, Homo sapien
tttacttggcaaacaatttccctggacttaaaaggatcaaagaaagggaaaggacttccctggcgctgcacaacaaaactcaggtggtgctgggcagggaccaactaactgcccctcagaaaaccaaggactagaatgaaggcagggcttatggtcccggttctggtcccaggctcccctcttcaccccctccagggtgtgccagactgtccccagcagagagagcagctccaacagttccacggtgtgctgtgagaaagtcctttacacccagccgctggacctcacactcaccgcccaccagccctgccaccatcattctgacccctatttctgatttctgttccccttgaggtacttggaggtagctatcatatcccttctgagccttttctccacggtaatcgctcgcgtcttcaacctttcttcactcttttgagccactcctgcgtgtccacacagcttgtgaccgcgtaacagacccagcacaactagggcgacagcaaaagaggcggagccagggtgtgtgcagggcacgcccctccctcctgctccaggtgaggtatttccaccagcgtggatgcaactgaaaccacgccctctttccaccgtctggcccaaccccagccagaagcagctgatgggacggtaacaatgacaactggcatttatggagaacctgctcttgttagaccctctaccatgcctttcagtcctcacaaacgtcagagaccacaagcacaaagttacaggtggggagccccacggggatcccgctccaaccagcctgcctggggtcacggagctcagacgcctgaccacagtgaagctcagggactccagtgtatttaagcctcgttccaggaaaggtcattgaataaaccgctgttccttcacgatgctttcctgatttgggcattgatttgttaaatttaaaatatcataacaaacagcaaatccaaggaaaactgcttccatgcttgaaataacacccaactgtctggagaacagctataaatgtgaggctctggggagcagagggaggcctgaaaggcgggccttctcgctcagggccccaactcgctggctgtgggagcccttccaaaagatgtgtcatgagaactaagctaattatccacgtaattctcacactggggttggggccatcgccaggggaaagcacaggttatctcaagaacgcagccagataggaggctggggagacttggacgggccaccttctgcttcagtaacttggccccaagctttcaggaggtctctgcttagaggaggactgcagaaaagaaggctgctgggccactgtcccaatgttccgagctacaggtggtcacccatggaggggggtgggacctgctcggaagtcctccagtcttcccgccccttctcccctcccggccctcccaggcggcccctctcctcggcctgccccctccaccccgcaattcttcccgtctcaattccagtccctctctcttgcgtcctcccggcttccaccccctcagcctggcctccaaaagaaagatcgggcagagcggtaggaaaagggaagccaccgcggtttctgaaaacaagaattcccgcgagccaggacggtcacgaggccggggaggaggcggcgcagctgatcaaacgcgaatggggaccagccctggcgggggtgcgggggggccctggctgtccgcggcagccgcgggcggggcggccgctccgaggagggacggaagggctgcgtggcacctcgcgctcgaagaccaggggcgcgccctccgcggggagaactcggggcggcggccagacccgacgcgacccccggctcggaccctgcagttaactgctcccagacgctttcccagtgcgcccgcccgccggccctcgggaggtaccgggcagggggctagggccgggccgaccctgtgagccgctcagccccgggcgcccccgccctcctcggaagtgactcgtcctcagggagagtccggcgcccgccctgccggcctcggcccctttcccgccccatttggctcctccgccgggggcgcccccaggctgggcaggctggctccccgtccccctaaccccgccgcccgggcacccctcgtctgcgggcgcggggtccaagtgtcccctgtccagggcgggcagaaaggagaagtcgcaatctcggttgaagtctcttccccgcctccttcgtgcacttcaaggctgcctcggccccgcgcccctcccgcgtccccggccccgcaccttgccgcagcggcccctgcgccagttcggaccgg

SEQ ID NO: 35288 - DNA, 2300 bp, Homo sapien
aggggctcaaaggccccgttacagaatttttggaagtttaaatatcccctagatgattccattgtttacttcacttaccctctacgtaaatgcagaggatgaagtaaagttacaaagtcacttacagcatacgccctatggagtggatatttcctgttacagccgaagtgtgaattggccttatgttccctgcctcctgaccctattttcctgcctcaggctcactgctcaatgtacacggaagcaataccatggtactgcctttgagaaaagaaagactttattgcaagaccagccagcaaggagacaggaggcaggttcaaatcttcctccctgatttggggtctggggcaagttctaaggaagcagagggcaaaggaaaggacttagaaatgttggctgggcaggatctgtttgaaggccttcaaatttggccatttatggtacggtatgttgaggtggattttagcccctatcttctgggccaagagacccttcccttctgagagttcgaatgttcgggttccagtcatgtcccagtcttcttcgttccaaggagacgaatagttggttctggatgtttgttagagatcaaatctttttctatggtgcatgcctgggctttgtgacttaagagtttttggctctgttatacctgcaaggtaactcaacattgttacaaacagagtaagccccgtttgggctggtactgtggttacaacggcacttattcccaccacctagagtcaagagctgctggcacactggctgtttacttccagttcccacggcccctattcccctatacaaaattacacaggaaacatatgcgttcatttaattagcaagtgtatataaaaacatcatagacaaagcaaaagtctctcttgacactctccatcttgacctgttcaccgccccagaccaggtgaggaaatttgaagctatgctatctgcaagtcactggcgcagtcggaataaaagttggtcgtggtgggggcggggggggggtggtcatctgggtcgggactgagtcgaggcaggtgggactgagtggtagggacctggggggacatctgggtcgggtctgagtccagacaggccacctgccttgggcctctaacatttccgcgcagcgctgggctttgaggctttccagagcgctgccggggcgggggcggggtgaggtgaggggctcaccctggctctcccacccctgcctacgggctgtgaggtcactcgattcatttctggaactaacttgtaattctcaaacaagtgctattaattctcttccaactaggaacggcctcagtaacgcgccgctgagtcagttttcagggcgggcggtttccccaagtccactcctgaggcccctcaagagcacccaccgcgtccagcttcccagggcgctccttcccaggagaccttcttttcgccactgttttctcccctcttcccacttctccgagggctgccccgcggtctgtccggccgtgtcccaggccttggcgcggctgaggcatgaccggaatgcgcgggaggacgcggggcacggaggggacctgaggcacggagggaacccggggcgggccggactggcctgggccctcgtcggggcggtgctcgacccggcccgcgccccccgccccgacactcgcagccccgcctccggaccccgggtagttgccatcccctcgcgggccgggtggggcgcgcagctcctagccctgggaggtcccgaggatcgcgaaacggaaagagaaaaaagtctgcgccgagcgcctggcaagcagggcccgccccgcctcccttcccggctggtccagtcaccgacctgcggctccggggccgcgagggaggaggcgcggggggcgcgaggcgggggcgagcgcttgggactcggcccggctcccggctccgggggttctcgtggccgcggcagcgcggtctctgcggaggcggcgggggcgcggccagccggacctcttcctttccagagcggcccgcggcgcccgttccgcgggaggcgggcgggaggcggacgcggcctaacctcgacgtcgactaccgcgccgcccgcgatgggaagcgccttataaagccgcgcccggccggcccgagccactcgccgccgcgccgccccgctgccccgaacgcgggccatacgcagcctccttggagtgacgggccgaccccggacgaccccggccacggacagacccgggacgaccccggccggggcgcgcctcctgcgggcgggcgggcggcggggctggggagcccttggcgggggcatg

SEQ ID NO: 35289 - DNA, 2300 bp, Homo sapien
tctcctggaaccctcaggacatatctgatgagcatcttgttttccccaccgtgtctatcaagagggaaagaatgaaccaggaaatgtaggtagaggtggatctccaggaagctaatgaagccatagctccttggctccttccttccctggggccttgtgttttgtcctgttttccttgattaggattgctgtgccatgccattctggcttcgccttgtctagtgtggcaaaactacaaagggaaagttgagttgaggaaacactgggtttgagttgagacgggtgtatttttgtggttagcacaagtagtgccttcggctgcagcaaggccgctcccctcgggccattgtctggcataaggtgagaagttttaggggccaaatgattggacgctcccagagcccaagacccagattccacgccacatctgggatcctggaatttcctgccccacacctgaagtttgcatcagagtttgcttggggccctcatctgtatctacctttctaaggacaacaaacttcacttctagtgagtttgttggtgctccaagaggtggccaagaggcaactgtctacagggaatatggatgtaactcgggtctgcatatgtgtgaggcctggcaagatgcaaagtgcaggatgaagccttaggtgggtaaaggaggtgagaggccaggcttccatgggaattctaaatccaaacgtggcctttaagctcattataagggcatagttttcatagaaggaggagagaacacatttacttaaccgttcgttagtgttctttatgctatttaaagcctttacacatttaggcgtgcggtgtatgtgggccgtttgtactcaagcccagggcatcagaaatattagaagtgcacctgggtcatagtgacttttgcccatagttgtttttgtcactactgccgtgtaagtattgctccaaaacttagtggcatgaagcaatcattttattatgttcatggattttgcgggacagaaatttggacaggccacagcttgtccgtgctcagcaacttctggggagctgggaagactccatggtgggagtgaccctactgacaggggctggaatcaaatggaggcatccacactcatgtctggtggttgacgctggctgccagtggcgattgtagctagggctgtcagctgcatcccctaaacatagcccaggcttcctcaaagcttgggggctgcagagaagttagacttcttacatgatgagtcaggacaccaaagatgagtattccagggaccaaagccatagccacctcacctttgtgatcttgcattctgttggttacaaccaagtcacaatcccacctggattcaagagaagggagaggtagacccacctctcaatggggggagtatcaaagcatttggggggccatgtgttaactatcacacaggttaaaatattgccagccatcatggtgttgggatggcttccaggaatatatctaatggcaattcaaagagcatttcaaggatatttgaaattccctgaaattttatagttacacatgaaagaaacttagtaaaggttttcctcgtatttgacaaaaattctaaaatttatgtcactaccagtcatgcattgttttagtcatgaatcttcaaggctgaaacttttctgaaacattaacaataaaaactgtttttcatcaaccatgctgtaggaaagactgacttctatctttctactctctgtaggaaatatcacaaaggtgttaccatatggagaggtgaggaggagtgtgctgcccaaaaagtggtgtttcaggctcttgtataatcacatgaacatctttaataagattctggatacaagaatttaaagtagtaattagtctcaaaaaaaaaaagaaaaaaaaaaccaacatgggcaacagcagtccaggaaaacttcatggaagttgaaagaaatggaatttcaatagagtgaatggaggctgggggcaggactgagtcaactggtcaacccatattggcagttacacctgatatcagttctgattggctcagtctccaccctcattggttagtgcctgccatggcagttggtaactgttttgcatatcatccctgcccattagagtgaacaatattagcaaaggcactgagaaggaataatcttggcctgtttatcgaacggtaaggaaattagactggcttgagtccagctgggggcagttgcgggaagtacagctgtttaattaaagtaaagccaattgagaagcgtgttgaatgtcaagcaaaggaattcatacatattcc

SEQ ID NO: 35290 - DNA, 2300 bp, Homo sapien
acattgaaaatgtattgtttagggtagcctccgtcatcagtgctcttagctagatcttctggataacctgctgcagcttctccatcacacttgctgcttcaccttgcactttatgttatagaggtgacttccttcctcagcctcatgaaccaacctctgctaccttcagacttttcttctgaagcttcctcacctctctcagcttcacagaattgaagagacttagggccttgccctggattaggctttggtttaagggaatgtcgtggctggtttgatcttctatccagaccactagaactttctccatataagcaataaggctgttttgctttcttatcattcatatgtttaccaggaaagcgctttcagtttcattcaagatttttttcctttgcattcacaacttagctaactgtttggcaaaagaggcctagcttttggcctatcctggcttttgacatactttcctcactgagctgaatcatttctagcctttgatttaaagtgagagacgtgtgacacttcttttcacttgaacacttagaggccattgtagggttattaattggcctaatttcaatattgctgtgtctcaggcactagggaagcctagggacaggaagagagatgaaggaacagccagtcagtggagcagtcagaacatacataacatttatcagttaaatcaataaacgtctttgtcttctactgcacacttcggagtgcccccaaacaattacaataacctcacagaacgatgatcacagatcaccatagcagatatcacaatgaaaaagtctgaaatattgcaagaattaccaaaatgtgacacaggaacacgaagtgagcacatgctgctggaaaaatggagccagtaggcgcttgacgctgtgttgccacaaatcttcaatttgtaaaaacaaaaacaaaacacacagtatcccagagctcaataaaataagatattcttgtattctggtgatggggcaacaatgagaaggctttagattaaaaaaaatgctaatttcctagattaaggcaagtggtggggaatgggagaaaaaggaaagtgtgaaaggctcttctgtaattgattacctgtggaggaacgtcattccaggaaaaggcctaggtttctggcttggacaatttgatgagggctcacaccgtgctgttctcctctggatatgtgggtgccatatgtaattatcatatgattcacgcttcttggtaaggttatgctcacaggcattgttgctcttaggcgggaggaggctgaaccgcagtatgtatttcacaaccagcttttccaaactaggtcccaggaagcactggtttcggcgagtgttaccagatctcctgcaggggagaaacggtcacgaaacatgaactggtctgccctgctcttggagagttacagtggaaactggcatgttagaggctcacagtaaagacactgctacactttaactcagtgtcccatggttattagagcttagaacccgggggaaactgctgtatagaagaggtcaaacaagctgagtgcaggttttgtcacgaaactggggggcgagtagggttctattatcaaagaatggttgtgttggggccataagaaagaattacaggcagtggtgcgcaggtaatgttcacgagacgccacagcggggtagcatcagaggcgggaggaggagggttggagagcagggccgtgttgcaaggctctctgggtggccacagcagcttgcgctgcgcccacattgcttctgcgtgtttacagttgggcacgagaaggctcagcacgcacgcacagcaggtgggggcccgccctgcccacagcgtgaaaacaggagccccggccagccacggctgggcagggccagaagcgcctcctccaggatcctccccgcgctggcccgccccacaggagcaccgcccctaccaggagcccggagctcttcccagggcccgcctccccgccagggggcgatccacctccacttcctgtttccgcagccgccctaccaggagcctggcactctcctcagggcccgcctccccgccagggggcgcaccgcctccacttcctgtgtccacggctgtcgcgagagcccggggcgagtgggcctctgctcgtgggtggttctcgtggaggtcagctcccgcgtgtctccgctcgacagggtgcttgggcaggtaagggtccgctcagtagcccaaccctctctgtatgcagctccccaaattcagcgctgcgctcaggcatggcagccacccgttacgtggggccgttcgca

SEQ ID NO: 35291 - DNA, 2300 bp, Homo sapien
taccgtctttgtttgcttcgttttaagtattacttccagataagggacacattctcgaaatactttgaaaacagttttgaattttgttcctcccgttgaaacggattaaatttggacctttcaagctacactgtgcaatcatcaatctcaataagctcttaataggctcattcttccgtaggctacaaacaaaataaagatcataacatcctgcggaggaagccattggtccatgtagagtcgccagatgtcaattaagagtagatcgcttttcagagaatacttaacgactctggtttagacctagacttggaactttgaggtgtttggaacactgggcagaattttcctttgttacaaaacaaagtttatgagaacgtaatttgtttttgttgtttttgttgttagtattgaagcaattttggtgcaaaccaaaggataacaaagcaaaacaatgaaaatcacccagagttccattacccacactgaaccaacttgaatatattggtttattttggcttttttccatatgaaatgttaaattttcttgtactcacgtgtagaatatgatagtttgctctttcatgtaacatgtctcccaatttttacatacataattctagtttcagtaagcatttttataactacactctttttcctttgttattgtatgtctaggttatttcaactttgcactgttgcttgtaactactatgtgatgaggcagtagctagattagtatttagaacgtgagcattcaagtcaggcagacctgggcttcacaacttactgtgcaatttcaaagagtttaacttttttgagcctcattttacacagtaacatggggataatggttctgattgcatagaattattatgagagtaagatgaaataatgagtggaagtgcctgcagcatgtattgttagtaaatgctgtattactgcaggcaaatttttcttttgttgtggttttttggtgacatgtatgatttatttccagattttgaatatacttaaatactattaaccacagtaggggtatggggtttgatccacagcttttcatatattttatacaatatattgtgtgtttgatacacagcttttcatatactttattataagtaacacatgaattagaaataatttttcacaataggaaaaactttttaaaaattaaaatttataatcctgctaaccgtaggtgaatagtcacattttgggcaatccttttttatgcatatatatgtagtggttttattttattttattttatttttattttttgaaacggagtcttgctctgttgctcaggctagggtgcaatggtgcgacctcggctcactgcaacctccgcctcacgggttcaagcaattctcctgcctcagcctcccgagtagctgggattacaggcgcccgccgctgcgcccggctaatttttatatttttagtagagacggggtttcaccatcttggccaggctggtctcgaactcctgacctcgtgatccactcgcctcagcctcccaaagtgctgggattacaggcatgagccaccgtgctgggcctgtagtgttttctaaaaatagaattatattataaattgggtttatcaacttgctgaaaatggcagaggccagtgcgatgagagtagggtgattaagggagtaggaagtaatgcaggaaagggagtttgtaggatttagatttcactgaaagtgtactggacaggttgggcatagtggctcaggcctgtaattgtgtcactttgggaggctgaagtggaaagatcccttaagcccaggagttcgagccagcctgggcaacatagggaaaccctatctctataaaataaaaataaaaataattattttgaaaaaaaagtttactggacagagtaagttcagggttgaggagtgacctgatttgttttagaaggctcatttggctgccatatggagatagactgcaagggaccaggggaggaagatgcaatccaattaggagagtatttaagtaatctctgtgagagatggtgttagtttcgatcagggtgtaagtagggaaaaatgattgggttctggatatattttgaagggagaagttataggattcactgattgatgggatgtggaattcaagagaaagtgacttaaagaattttggtttgggcagttaaacagatacagttgctacttaccaagatagagactgaaagttgggggaaactaaatagagttctgtttcagtcatgttacctgttgtggagtctaactagttggaacaggagtatgaaagact

SEQ ID NO: 35292 - DNA, 2300 bp, Homo sapien
gttcaagggtgacacgattcagttcgttatttccgtaattggaacgtgtaatgttttttggcccaagttgcgttatgtgattttgttttcttctataacgactctacagtaatggggtagaatggaatattgtggggaaaacatttactggctcttggagaactctcaaaaccaattaggttctttaattcctctttaaaaaaatatttctcgcctggcgctgtggctcacccctgtaatcccagcaccttgggaggccgaggcgggcggatcacctgaggccaggatttggagaccagcctggccaacatggtgaaaccccgtctctattaaaaatacaaaaaattagctgggcgtggtggcgctcgcctataatcccagctactccggaggctgaggcaggagaatcgcttgaacccgagaggcggagtttgcactgagatcacgccactgcactccagcctgggcgacagagcaagattccatctcaaaaaaaaaaaaaaaattatccatactttggaacctggaagcagcgtgacgatcactttcattcttgtaatcatctgagtttgcctttgtcctagaaaattgagttcggaatctccagactccatacatatctcttgatttccaggggagaagggttttaaatgttcttacaaaatgtctcttgttgcctgaattccaaacgttttgaaatgttagggccgggcgcggtggctcacgcctgcaatcctctagcactttgggaggccgaggcgggcggattgcctgaactcaagagttcgagtccagcctggccaacatagcgaaactccgtctctgctaaaaatacaaaaaattagccggcgtggtggcgcctgtagtctcagctactcgggaggctgaggcaagagaatcgcttgaacccgggaggccgagatcgcgccattgcactccagcctgggcaacaaaagcaaaaacgccgtctcaaataaataaatgaaataaacttagtaaactatttttaaataatgttaaaattaacggtgtacgtagtagaactgtgagagatctcatcttggaaatagagtgatatacttgaaggcaagagattgggtcaggtactattaacacgttttacacatgaacaaaccgacactaagaggtaaggtaatttgcttatgattgagttcccaagtacaaagctgatttttgaactaaaatctgactcgaaaatctgctcttttcttatcaggctgcttcctacaaaaatataacctcgcttagcatctgcttgttaagcatccaccctcacagctctttggcattcaaatgtttgttgagtaggggtaatagagcactacgttcgaatcagaaaatgccttatttttccttgcttgcaagagcctattataaataaatgccttgttttcgctgtgtctctttcttgttgtcgagagctcaggctggtcttaatttctgcaaccatagtattatctcccaggtctccttctgccctgtgtattttgcagttatgctttatgtggagatgaagcatcctaagtgtggagaacgatatatggggcccgaacaataggtgctgaagccagattgtgtgactaaagttggtatttgaacaaaccaagtgtttatttttttaaagagcatggtaaaaactaagtttcaaaaatcgatgctggcaaaaatttccttgaaaaaattctcaccaagttcacttgcacggtactacctggggaatgaaacacatttgtcaaggacacgcccaaaactatgttgctgttgtaattttcaaagactgggaactgcggcagggggagttacaattaaagcaaacatcggcgtatcagtttattcattcagcaaacgtttatgaagcaacaaacgtatgcccaatatttcagtcttgctgctcttcctccccaaattcaggaacctttgcaacggaaagcggcctcgggcaggcgccttttgagcagaggagtaaaaccggtaagtcagcagtggaacccgcctccccggaaatccttggagggggcggggccctggggagcgcgctcttcccagcggcagctggggaggcgcatgcgtacttgcgtcatcgttgggtagcagcggggaggcgtgggaggatctgaggcctgcggtgggccttggtcccttctctccccgccccgaagccgcctgctcaacctgagggccaccggcctctatccgtcggtgccgatgctccttgcttcccagccagagcgtctcatctctgggcccggagccccaggctcgttctcctcagcccctgc

SEQ ID NO: 35293 - DNA, 2300 bp, Homo sapien
tcagcacctattgttcgggccccatatatcgttctccacacttaggatgcttcatctccacataaagcataactgcaaaatacacagggcagaaggagacctgggagataatactatggttgcagaaattaagaccagcctgagctctcgacaacaagaaagagacacagcgaaaacaaggcatttatttataataggctcttgcaagcaaggaaaaataaggcattttctgattcgaacgtagtgctctattacccctactcaacaaacatttgaatgccaaagagctgtgagggtggatgcttaacaagcagatgctaagcgaggttatatttttgtaggaagcagcctgataagaaaagagcagattttcgagtcagattttagttcaaaaatcagctttgtacttgggaactcaatcataagcaaattaccttacctcttagtgtcggtttgttcatgtgtaaaacgtgttaatagtacctgacccaatctcttgccttcaagtatatcactctatttccaagatgagatctctcacagttctactacgtacaccgttaattttaacattatttaaaaatagtttactaagtttatttcatttatttatttgagacggcgtttttgcttttgttgcccaggctggagtgcaatggcgcgatctcggcctcccgggttcaagcgattctcttgcctcagcctcccgagtagctgagactacaggcgccaccacgccggctaattttttgtatttttagcagagacggagtttcgctatgttggccaggctggactcgaactcttgagttcaggcaatccgcccgcctcggcctcccaaagtgctagaggattgcaggcgtgagccaccgcgcccggccctaacatttcaaaacgtttggaattcaggcaacaagagacattttgtaagaacatttaaaacccttctcccctggaaatcaagagatatgtatggagtctggagattccgaactcaattttctaggacaaaggcaaactcagatgattacaagaatgaaagtgatcgtcacgctgcttccaggttccaaagtatggataattttttttttttttttgagatggaatcttgctctgtcgcccaggctggagtgcagtggcgtgatctcagtgcaaactccgcctctcgggttcaagcgattctcctgcctcagcctccggagtagctgggattataggcgagcgccaccacgcccagctaattttttgtatttttaatagagacggggtttcaccatgttggccaggctggtctccaaatcctggcctcaggtgatccgcccgcctcggcctcccaaggtgctgggattacaggggtgagccacagcgccaggcgagaaatatttttttaaagaggaattaaagaacctaattggttttgagagttctccaagagccagtaaatgttttccccacaatattccattctaccccattactgtagagtcgttatagaagaaaacaaaatcacataacgcaacttgggccaaaaaacattacacgttccaattacggaaataacgaactgaatcgtgtcacccttgaactatgtaaaagttgaaaagatgttcagtgttaaatgtagtaacagttccacattaaaagatatttacgttcgagtttacagtatttaaaaatgcctttctacacactttcccgggaagttaatgccacttcagttgagctgtctagcgagatggttaagcatttactgtgtctctaacaccgaccaggggaaaaatcatcaattcgtttgcccgagtttaagagaattttcacctaacttctaatctccacagccaatcagttcttggaaccgcacacccgatgccgacatccctctcttgttggctcccctcgttagcgggattcaataactaaacgtccatttctagcattgactgaagagctcaagcttgacactcgacctcaatccttagcagcaccgcccaccatgctcccggaagctgcgacactacgccctgcgctagtcccgggacgtggggttttatatccggattcttagcgcggactcagaacccagctcttccctacacggtcggcacatgcgcggcagctcttttccttcttcctccacttcccctaccctccaccgtccgggagccgccgccaccgccgccgaggagtcaggaagttcaagatggccgccgcggagacccagtcgctacgggagcagccagagtaagtagtctctgtgagtgggccagaagctggagcccggggactgccgagtgggagct

SEQ ID NO: 35294 - DNA, 2300 bp, Homo sapien
atatttttagcagagatgaggtttccccacgttggccaggctggtctcgaactcttgacctcaggttatctgcctgccttggcctcccaaagtgttgggattacaggcgtgagccaccgcacccagcccatttatattttttaactggtcttttgaggctgtgcgtgtatgtgagcagattaaataaaagagtttcctcagatggccctatcaagaagtaagcactaccaagaagtaagcactacagatctgaatcaaagtctaccttgctcattttggctggatcagagaaggattcttgggttctgtataccgtgctgaaacatgcaaggcaggttgtgtttttaggtttttattaaatgaggaaggcaagttgcagtggctcacgcctgtgttccagcactttggggaggctgagacgggtggatcacctgaggtcaggagttcgagactagcttgaccgacatggagaaatcctgtctctactaaaaatataaaattagctggacgtggttgctcatgcctgtaatcccagctactcaaggctgaggcgggagaatctcttgaagccgggagacagaggttgcagtgagccgaggtcacaccattgcactacagcctgtgcaacaagagcaaaactccatctcaaaaaataataataataataaatgaggaaaatactgtaatattatttgattatggagacaaacctatttacaatctgactgttcagattgaatagttgtgaccaaacctggaataacattaagaaatgttcaaaacctgttttaaaaaattaagctgtagaaaggcctgttgtaatacaaatatcacattaaacaagagtaaaactcactgaaaggtacttgtgtgataagtgttgaaaagttgggtttttgtggggtttttctggggagactggaggcagggtcacactctgtcacccaggctggagtgcagtggcatgatctctgctcactgcaacctctgcctcccaggcttacacaatcctcccacttgagcctccctattagttgggactataggcacatgccaccacacttggctaattttgatattttttgtagagatagggtttcgccatgttacccaggctggtctcaaactcatgagcttaagtgatccatctgcctcagcttcccacagtgctgggattacaagtgtgagccaccacacctagctattgtttttgtttttttgagacaagttctcactctgtcacttgggctgcagtggcacaaacacagccactgcagcctcaacctcatgggctcaggcggtcctccctcagcctctgaaagtgctgggattgcaagtgtaaaccattgtgcctggcctattatacttgacattaaaaagaagatttttgcccgggcatggtgggtcacacctgtaacctcagcacttttggaggccaagggagaaccacttgaggccaggagttcgagaccagcctgggcaacatagtgagacccccatcactacaaaacaaaatattagtcaggtgtggtggcatgcccttatggttccagctgctcaggggggctgaagtggaaggattgcctcagcctgggaggtcaaggctgcagtgacccgtgtttgcgccactgcactccagcctgggtgacagagttagaccctgtctcaaaaaaaaaaaaaaaaaaaaaagatccttaattggagaaatgtcaggatgtagaaagaaaaagtcgtcaatgaaaatggaatatttgagtaaatggagtattatactcacttggggaggttttatttgagttggtttatttgaaattagaatcagtgactttaccggtatgaataacctttagtaatttttcaaactgtgggaccagaggaaataagacctttcattgtttgcctgcaataacaccaaaatatcactgtagtcacctgagtaagttttgttacaaaacacattaatcaaagttcactttctttaggctaatgtgccttttcttacagatgttctttgcatatagaaaaaaatcatttactttgatttatatttcttttaacttgcatttgatccccttaagaacacgacctcgagatgatatcctcagtagacgtgaaagatcaaaagatgccagccccatcaatagatggtctccaacccgaagaagaagtagatctcccattagaaggaggtctcgttccccactcagacgtagcaggtctccaagaagaagaagcagatctcctcggagaaggtaaagacatttcatccttgtgattcattaaactctgaatgtttttga

SEQ ID NO: 35295 - DNA, 2300 bp, Homo sapien
tttaacaaagccaaattgcaattagaaatgtttgacatttggagaagagctggctaattttccctttgttaaaagaaatagaaaatttccatttgctgttccaaatgtgccaaaaggaaaacacaggataaactgcccacgatgcaaacgcagcaagggcatcactacaagaaaactccatgggagttacgtgttagcaacaggagccgctgcccaaacactcaagttcaacagcgcctgccatacctcctgagagatgtttgacacacgtaggctgttagcacagttctcatttcttctccccattttgttgtagctgttgctctgtttccttaaaatcctacacagattgcgggataggcacatttatgggtaagggtcaacatttataaaaaagaaagtgtgagttttgatttcccatctaaaggaggtaagagaatgcttagaaagcagaagagaggggctaggagagcagggtgggggtgacagtacgaaaccaaccagaagcaaggggcaagcctgactcaaaaggagcacagacaacagcaaactggcagatctcagaacagaagattaggaaattgagatcagaggtgagaaagcaaatatcagctaagaagatgaaatacacattggaacaaactatggtgaattatctggaacttagaaaacaggggcacaaagtctccttttattcattcaaaacaattgctccatttgaaagcagggttgaacccttacaactaggccaggcaagcaccccgtgcatatttcggagacaacaaaatgcccccaggaccaaacaatattttccgcaccaatcaatcaaggtacctaaagggttttaacccactgccgtttaaggtaaaagaattagagaactctaaggtaacaagcaaaacagtcactggattaaggtatggctatctggaaagaatcacttttttttttttttttttttttgagacagagtctcgctctgttgcccagactggagtgcagtggcgcgatctcggttcactgcaacctccgcctcccgggttcaagcgattctcctgcctcagcctcccgagcagctgggattacaggcgagcaccactacgcccagctaatttttatatttttagtagagatggggtttcaccatgttggccaggctggtcttgaactcctgacctcgtgatccacctgcctcagtctcccaaagtgctgggattacaggcgtgatccactgcacccggccaagaatcacaaattaaagccaccgcagtaatcggtctatctgctaatcgtttacaattgattgtctcctacagaaaagtgtatgaagaaataggagatttagtttaggtaggttttcagccaacaccggttattggtccacgagtgtgtgcatgccagacactaggtctgaatgcaggaggaaggcggttgctgagcaggtggcgctgcctggggccaccgggtgtgtgtcaagaaggagggcatccagctcctggaaaaggccaccgcacctgaaggacggccctggggacaaaggacgccttggggactgcgagttgggggacaggagctttaggggccagagtgcttgaaggcgcgtgtctcaagggagccgcaaggcccccgtgaagaggaatccccttttcctcctgagctgtggccggactgggtggggagcccagttccaggggtagcaggagggggctgcgggattccccggggccggggctctcaacccaccgcgcgaaggcccacgtgtcctccccggcgtgctctcccggtgcgccgccccgaggcccgagcgcctccgcgtgcgtggctgacggcttggagggcgccccctctgccgcggccttcctgcagcggggggacaaagagggcggcgggcggctggcggccttgagcgcagcccggtcggcagtgcagggcctgcgaagcccgcgggccggcgcaggggtgggagtcgggcccggggcccagagagaccttccggggccggggctgcggctccgcgggcttccccaccggccgggtctcccggcaactaccagagagcgggggcgcccggggaggcccggcgttccacaaggtccacgcgtattcgcgggccgcggggtcgccgccggccgcccaggcgcggagcctctcgggggtcacccggccgccgggcccgcgggacgcacggggccgccaggggaggacaacaagcctcaggccctgtccctgcgccccgcccggcctcccccgcggggctgcgcagcccactcggccatcctggcctgaaggggccgcccccg

SEQ ID NO: 35296 - DNA, 2300 bp, Homo sapien
tcattggattatcaggcatatacattggttaatccatataaaatgttcagcactatgcctggcatatagtcaccacaccatacatttcagaaaatactatttttgcaataattaaatcaattgaaacatttattgagtgccttacctactacagtacatgccaggcactctgttagatagaatatgggcagatatcaccttcaaggtgttgaaaagaaagtgattgagacgttgtaaatgaataattacaatgtaactgagtaaggggctgtaattaaatcattataacgaagcaaggatcttggaggagacagcaacttttgttttctctcctttttttttttttgtattttttctagtaattacacttcctgaacaatcaggaaaaatgacttgtgagttagaagtgtaatgactagaatttaggcaggttaaaaaagaaaaggagataaaaaggaggtactattacaggaagagtaacaatgatgtatgccctggaggagagtgtttaggaaaattgtaaaatgtccgatgtgcttgacatgtagtgggcgctgggaaggtgatgagcagatacctaagggatggctgcagaattagggtttcctccttccggcattaggaggcagttgagcaggtctgtattttagagcagcagtatggaaaacagccgaaggaagagagggccctagaagggaaacctccaaggaggctgcaaggaatgaggcctgcacaaatcttgttcgttcacttacatcgattgtgcttctaccactgtgcttctactatgtgcccagcacagttttaaagggttggggatacagaaatgaactagacagacaaggccccggcccacatggagtttgatattctactggggagagacagacaatacaaaaacaaacaagtaaacagcaagattatgaggagtacaaagaagtaaataacaacggggtgtcatgaaatagagtaaggtaggtggaaggtgggaagagcttctttaaagggaaggtctttctgaggagaaaatggaaatgcagaggaaagagtcaggagtcagggatcaaagaacctgagaaacccctgacattgttttcaacatgtggtatataagtgcatttttatggggagattctcagagggacatggccgtgatctcatccccccaaatgtttagtattcatttgctgtacctaaatatataattaattttgttttaaatttttctctatatcaaaaggtgggggtgatgatagctatgcagatatatctaactagatagagagagattcttcccccacccctccacttatttcatgaagctgtaataggagatatgcatttcggggtacaaaattgggctgtgtgatttacatgtatcctctacatgaaaaaagaaaaaaaatcatcttttgtttttcctattgaaaggccgacgacggacctgaaactgaccggatgagcttggtgtcaacaaggatgcctcttcttctatgttaatatattgtacaagcatagatataacttcacatgtatcaatgcgtatatattgtagcttagtctggaggactacgtaccgggcggtgctcctggcttgatgtgagcaggcggtgggaatggagggtggaggcgggtgggccgggccccgggtcccagaggcccactggccatgtcgcggagagctcagcctggagaggcccagggaagggcctggaggcctcggggaaggcctggggagggtcaaggaagcccgaggaggcccaggaaggccgaagaaggtccaggacgcctgggggaaagtccgagaaggcccgagaaggcccgggaggctcaggctttcccgcgaggccgggggcggccccttcaggccaggatggccgagtgggctgcgcagccccgcgggggaggccgggcggggcgcagggacagggcctgaggcttgttgtcctcccctggcggccccgtgcgtcccgcgggcccggcggccgggtgacccccgagaggctccgcgcctgggcggccggcggcgaccccgcggcccgcgaatacgcgtggaccttgtggaacgccgggcctccccgggcgcccccgctctctggtagttgccgggagacccggccggtggggaagcccgcggagccgcagccccggccccggaaggtctctctgggccccgggcccgactcccacccctgcgccggcccgcgggcttcgcaggccctgcactgccgaccgggctgcgctcaaggccgccagccgcccgccgccctctttgtccccccgctgcaggaaggccgcgg

SEQ ID NO: 35297 - DNA, 2300 bp, Homo sapien
aaatatatatccatctgatagtttatttaaaaacaaaatttaataattgtgacctacttcagatttcaaccaaagtcagcatgcatcagataactataaacattcatcagttgctattgagagcaatgactaagaacatatgagtcaatttacatgaagtataaagaattacattttagtagatcacttccttggcatgttgaatggcttaaaacatggtttgttctttactatttatataaatgaaggtttagaggaatgcactcaactttgcctggaagaaagaagctggggatatgtcttccggctgccagaatattctacccccttctccccaccaaaaacacctgtaaaattatgagaatcacattgaattcaagtggttcttgttagttatataacatattttaaatatgtacttgcatttaaagtatttttttttaagttttactttttgagtttgcaagttgaaagttaagaaaaggaataggccagacatagtggcttgcgcttgtaatcacagcagtctgggaggccgaggcaagaggattgcttgaggtcaggagtttgagaccagccagggtaacatagcgagaccctgtctctacaaaagaaaaataacaaaaattagctgggcgtagtgatgcacacctatagactcagctacttgtgatgctgaggtgggaggattgcttgagcccaggaggtcgaggctacagtgagctgcactgcagcctgggccacagagcaaaattctgtctcaaaaagaaagaaaaaaggaaggaagggaaggaagggaaaaaaggaaaaaagagaaaagaaagaaagctaggcgaggtggctcacacctgtaaacccagcactttgggaggccgaggtgggtggctcacctgaggtcaggagttcaagaccagcctgaccaacatggagaaactttgtctctactaaaaatacaaaattagctgggcatggtggcgcatgcctgtactcccagctactcaggaggccaaggcaggagaatcgcttgaactagggaggcagaggttgcagtgagccgagatcacgccattacactcctgcctgggcaacaagagcaaaactctgtctcaaaaaaaaaaaaaaaaaaaaaaaaatccatctatctatatatatgcatatatgaatggaattttatatctgccactctggccactaatgtatcatatggtataatcatgatgctttaatagtcttagccaaaggtttttaaggttggtgaaaagctagcccacgctcccagatttgccatagcatactaggctcacacgccttctctgcttctcaccagcctgcagtgtggctctctaggtggttcatgaagagtagagcaattatggggaacctggctcctggtagagcatgctgaaatctaaaagtagctgtaacaaactctattatttgcatttttgttccaaatctgatactagttcttggcagcttctgtcttgctctggactgtgctatcaagtgtggtgatttaagattatttaatacttctattgttttctgctttttggtctgcaatgaagaatggcttcttaccgggaaggctccggttgagcatttgtttactttgttttcttggtattagtttggataagaacataaggagtaactagtttggcttcttacctgtgttaatctgggcatttcctcagttttggacgatgaagctctttcctcagttctgctgaggactgcactgatgtaaccactctctcttggggcctcgtaggtctgtggagccttaattaggtacatactgggagcaaggcttctacaaagtaccagatgggaaaataccactggatacgcgcgcccccgctttcccctcttccttttagcaaagctctcagttttccccagaaatggtccatgtccagacgcaagactggagtttctgccacaaatccccaaatgacttggcaggatattttcaatgggctggttttctctgctttgaaaatgcaggatgaacacgcagggttccggaccaatacctgggccattgtgactctcagaatgccaggcaataagagatcagaaagctggttccacttcatcttggagatggaggaaagcttgccagaacaactgcacaccccatccactcctcatgttctcagtttgttcttctctgtgatacaaccagcatcacgagaacagccagcagcagctccagcgtgataaaattttcactccttgacaagtgtaagaagccggaaaactgtgcccagccagaagttttgtgtcgccccttt

SEQ ID NO: 35298 - DNA, 2300 bp, Homo sapien
caggaggctgtgaaaactgtcagcctgggaaatagccaaagaacccacacaaacacccccaggagacagtctgcccttttttttttttttttttttggagacagagtctcactctgttgccaggctggagtacagtggtgcgatctcggctcagtgcaacctccacctcctgggttcaaaggattctcccgcctcaacctcctgaatagctgaaattacaggcacccgccatcatgcccagctactttttgtaaacatggggtttcaccatgttggtcaggctggtcttgaactcctgacttcaggtgatccacccgtcttggcctcccaaagtgctgggattacaggcgtgagcccaccgcgcctggcttcggaattgcatcttaatctctgtggcggctgctattttgttttctaagttcatgagcacaggtggctgcctctatctttctcctccacttaagcaggaacaattcaggaggcagactccacccaatgctgcaaatcggccctattatcattgaccctgacagaatttcaggagtgtcaggccactccatactgcaaacagtacaggttgcttataatcgccaggaggaaagaaaatatccagcttcttcctggtgcaatcatggccataggaggaaggaatcataggaaacagagcaaaggaacaaagttcaaaacctgactttccacttggaagttctctcactaatcttaaaatcaaatataaagcttaaattgtaaatttagcggcatttccctctcagtaccctttccatattcccacaggtaagctttgcctaaagaagagagtcaggcctggccgtgtgtggtggctcacgcctgtaatcccgcactttgggaggccgaggcgggcatatcatgaggtcaggagatcgagaccatcctggctaacacagtgaaaccccatctctactaaaaatacaaacaaattagccgggtgtggtggcgggcgcctgtagtcccagctactggggaggctgaggcaggagaatggcatgaaaccgggaggcggggcttgcagtgagctgagatcgcaccactgcactccggcctgggcgacagagccagacttcatctcaaaaaaaaaaaaaaaagaagagggtcacgcctaacttggctcacaaaagactatttatgcaaaagaacatgaagaagcaatggataatcagcacatgagtaaattccagaataagcccatggatggggacatgtgtctagaggaccgatcacacctacaacgtacagagcaagttctggccgggtgcaggggatcccacctcgaattccagcactttggagacaaaggcgggcaaaggcttgagcttgggagttcgagaccagcccaggcaacatggggatgtggggagcggggggggtgcagctctacaaaaaattaaaaaattagacattgtggtggcaatgcacctgtagtcccagctactggggaggtcgaggtgggaggatcgcatgagcccaggagtttgaagctgtggtgagccacgattattgcactcctgcactccagcctgggggataaagcgagagcctcgtctcaaaaaataataaaaatacactaagtaaaataaagagtaaaagttcttccttgcgtcttaaagtagaggcagtttgtatcaagataaagcatatgcttgctgaaaagaactcatgcccaccctcggcccacatacattttttcttgtcctcttcactcttgcgggaataaagcgtctccatcaggtgattcggaagcagctcgtggaggttagacagcatctcaaaggggcgacacaaaacttctggctgggcacagttttccggcttcttacacttgtcaaggagtgaaaattttatcacgctggagctgctgctggctgttctcgtgatgctggttgtatcacagagaagaacaaactgagaacatgaggagtggatggggtgtgcagttgttctggcaagctttcctccatctccaagatgaagtggaaccagctttctgatctcttattgcctggcattctgagagtcacaatggcccaggtattggtccggaaccctgcgtgttcatcctgcattttcaaagcagagaaaaccagcccattgaaaatatcctgccaagtcatttggggatttgtggcagaaactccagtcttgcgtctggacatggaccatttctggggaaaactgagagctttgctaaaaggaagaggggaaagcgggggcgcgcgtatccagtggtattttcccatctggtactttgtagaagccttgct

SEQ ID NO: 35299 - DNA, 2300 bp, Homo sapien
ctcttttactcgtgtgacactgaggcactttgtgccttaatagtatttcaaggtctaatataaaaaactggcatatatatatatacacacacacactcttcagagaagagggagcaagacaaaccaaaatgttaaggccacattttagtaaacacacagtgtatttatttaagaagtcatttgcccaaaattctttaaataacgttcgaccgtaggcatttacctgcttatatagcgcgtagagttttagcttcacttcgtttcctggatcctttttcaagagtttcacttgattcattgaattttcaaagtccttctgactggctctcattgctgttctattcatgtgcagctgaactaccgggaaactagtgacctgcagagaactacaattaggcagactgatttctatttgttcccaaccctcacatttctgcagcctgatttctaattgttcccagcctatacataacaaaatgccatgtttgtctatagatattttctttatacttgcctcagcaaactggctgcaaataattggctgtaaggattccaagataataagtcaatacagaagctaacagtagtaactttaaataaaaggaaaagtaaccatccagggaggtatctgtaagcaactaaagataaaagcagccagaacaggaatgaccatgtaaattttgccaaaggcaagaagtgaagtgcatgcaagacagtggacagcaggaaaccaaaaggctaaagtgcacagaatttagtgaagtgtcccaaagtcctgaaacagcctctgcactcactgataagccataagctatatcaggtcaattcttgcctctttgctggcgaagctggtgttccaacatacacacaggtggaaggaggggagaatggatgtgaacatacaagaaatattcaaaagaacacacgagcagttgctggcattccagatagagccacagccttctcagcagatgggagggaatctacctgcagtggaagggagtcagtgaagggggctcagcaggcgtgcccctttctatgggtatgtttaaccagccagccaggaacagagcagaaacagcaaccaccgcgggggtgatcagcacgtttttaagcacacatagtgagcgggggtggggtggcaaacttgaatgcacaggactcaggccacaagctaaaaatggagttcacgacgatgacactgaataatagagttaatggcaaaaaagatgattaaaataatacaggttacaaagcccaaacctaacacacaaacacaattatgtaactcgaaaatggtgcaatgaactctaggttcaaactttggactattagtaactgattcagtaagatcagcctagagtaagttttacattaaaatgattttctgtaaagggaaaaactgcatcttatatggcaaattccacgtagaaaacgaaagaaaaatttaaaatatccacagaaagccgaaatgtacaagtttccacaaaatgtggaacaaatttatttttaaataaagcgtgagttttaaaaacaaatagcaaaaacacgaccatttaagaaaatacataaagtcgggaaaatcactcataattctaccacttcaaggccaccaccgtgtttcggttttgttccctatgcacagattcgtgcgggttcccgggaccccagggaggtgcagcgtgcttcttagccgttactctgtacccggccatttcactttatagcatacgtgttctccaagaagcagagtgttaagtccacacgagtgataacggcttgcgtttacctcgcttttagcaagcgacgctttgcaccccagaagcagcccggctgggaagtgcaggcccgggtgctcagctggggcggctcacccgcccggagtccggccccaggaggatgggagcgtgcgcggaggcaggcggagaccttggggactgctgacagggaaccatagccctgacctcccgacgcgcccatcctgaccactccgggcccagcggtgcaggagggcgcgcgtgaggtcgtcactttttagcactacctcaccggaaaaccagcaaagcaaaatcctgttgccacctagacaatagggaaggagggtcttccaacggcggcgaccttcgcctggacagcggtatcctgcgggcgaccatgggccgaacggccgggactccaagcttacctcggacacgaacgccgcgccagtctccaagccaagtacgccatcgccatcccttgggcggctctagggctgcgggggctcgggggtggggccgggtctcgggggcggggcctag

SEQ ID NO: 35300 - DNA, 2300 bp, Homo sapien
aaaagcagccagaacaggaatgaccatgtaaattttgccaaaggcaagaagtgaagtgcatgcaagacagtggacagcaggaaaccaaaaggctaaagtgcacagaatttagtgaagtgtcccaaagtcctgaaacagcctctgcactcactgataagccataagctatatcaggtcaattcttgcctctttgctggcgaagctggtgttccaacatacacacaggtggaaggaggggagaatggatgtgaacatacaagaaatattcaaaagaacacacgagcagttgctggcattccagatagagccacagccttctcagcagatgggagggaatctacctgcagtggaagggagtcagtgaagggggctcagcaggcgtgcccctttctatgggtatgtttaaccagccagccaggaacagagcagaaacagcaaccaccgcgggggtgatcagcacgtttttaagcacacatagtgagcgggggtggggtggcaaacttgaatgcacaggactcaggccacaagctaaaaatggagttcacgacgatgacactgaataatagagttaatggcaaaaaagatgattaaaataatacaggttacaaagcccaaacctaacacacaaacacaattatgtaactcgaaaatggtgcaatgaactctaggttcaaactttggactattagtaactgattcagtaagatcagcctagagtaagttttacattaaaatgattttctgtaaagggaaaaactgcatcttatatggcaaattccacgtagaaaacgaaagaaaaatttaaaatatccacagaaagccgaaatgtacaagtttccacaaaatgtggaacaaatttatttttaaataaagcgtgagttttaaaaacaaatagcaaaaacacgaccatttaagaaaatacataaagtcgggaaaatcactcataattctaccacttcaaggccaccaccgtgtttcggttttgttccctatgcacagattcgtgcgggttcccgggaccccagggaggtgcagcgtgcttcttagccgttactctgtacccggccatttcactttatagcatacgtgttctccaagaagcagagtgttaagtccacacgagtgataacggcttgcgtttacctcgcttttagcaagcgacgctttgcaccccagaagcagcccggctgggaagtgcaggcccgggtgctcagctggggcggctcacccgcccggagtccggccccaggaggatgggagcgtgcgcggaggcaggcggagaccttggggactgctgacagggaaccatagccctgacctcccgacgcgcccatcctgaccactccgggcccagcggtgcaggagggcgcgcgtgaggtcgtcactttttagcactacctcaccggaaaaccagcaaagcaaaatcctgttgccacctagacaatagggaaggagggtcttccaacggcggcgaccttcgcctggacagcggtatcctgcgggcgaccatgggccgaacggccgggactccaagcttacctcggacacgaacgccgcgccagtctccaagccaagtacgccatcgccatcccttgggcggctctagggctgcgggggctcgggggtggggccgggtctcgggggcggggcctagctcggtctgcgggggctcgggggtggggccgggtctcgggggtggagccgggactcgggggcggggcctaggctcccgggctgcgggggctcgggggtggggccggggcttgggtgcggggcggggccgagagcagagcccaggcaggagcctggggcatgggcggggccagggttggggcggggccaggctgagagcgtagccacgccgcattcgccatcgctagcccgtggcctcctctggggctgcgggggctcgggggtggggccgggggggtcggtgcgtgggcggggcgggagctctaggcggttaggagtcggggctcagatgcgggggcggggccggagcgaggccgggtatcacccgggagtggaggaagtgcggggggttcgcggcgcggggagggtgatcccgggaggacttgcgcggcgcgtggggcggggcacagatgctccccggcctggctccgagtaactgcgagctggaggcgcggctgctctctcgggcggacctcagctctgcgaaccctgtggctgccggagcactgagcgccctgcccggagtcccgcggagcctggcgaggaggggtcgctgcatcccgagggccagccctgagccgggaggtggggtaacaattgagggcgta

SEQ ID NO: 35301 - DNA, 2300 bp, Homo sapien
ttaatgagctaagtaaatctttgacacatgctctttctatatttttaaaattatagtttgaaaaagataagctaatttcccacaccccactcttttctgtggtaggtataagcctgagagtagtttgcttgcattgcaaaaggtttcactatcaaaatatgcttaccagtatgagatttaaaaaatatttccatgacagctgtttcatcttctggaaatgaatgagtcttgtattatctgcaatatctgattactgcatttccattacctctgaggttatctaacagccttggagagagtcaaggtctctgagagaggcagctcagcctaccaactaccactttgtaatatatggagaggccaggtgtggtggctcacacctgtaatcccaacactgggaggccgaagcgggtggatcacctgaaatcaggagtttgagaccagtctgaccaacaaggtgaaaccccatctctactaaatacaaaaaattagccgggcctggtggcgcatgcttgtaatcccagctactcgggagcccgagacaggagaatcacttgaacccaggaggtggaggttgcagtgagccgagattgtgccagtgcactccagcctacgcaacaagacggaaactccatctcaaaaaaaaaaaaatctctttgggataagcccaaattgttctatttgacttttggtgttgccccatctacactattacccagatctacctgatgaaacttaatgataaagttacttgagacttggactctgcccacctgcaagcctcctgtctttggggaattcacctgattaatctttctgggtctcagtttccacatcagctcaacagggcaatatgctcaacagggcaatttccacatcagctcaacagggcaatatcattttccttacagggttgtccaaagacttacaattagcctggctcactataggtagtccacaggtgtcagctacataaatctaaaactcctaggcatgcttggatgggacaacttgggcacagaatttagaggggtggttttgtttcgttttgttctgttttgttttttggttctctgggaactggacaaggtgacacagccaaggcccttccaactcttaagaattcttccccaaagaaaatactttgcaaatgcctcagcagaactcaaaaatatccacaaactcttcactgacactaaaaacttgggtactccaaaaatcacttctgacccccaggcgtcctaccaggtctgcaaaccttcgatttggggatgcatgacctagcagcttttaagcatacgccctcaattgttaccccacctcccggctcagggctggccctcgggatgcagcgacccctcctcgccaggctccgcgggactccgggcagggcgctcagtgctccggcagccacagggttcgcagagctgaggtccgcccgagagagcagccgcgcctccagctcgcagttactcggagccaggccggggagcatctgtgccccgccccacgcgccgcgcaagtcctcccgggatcaccctccccgcgccgcgaaccccccgcacttcctccactcccgggtgatacccggcctcgctccggccccgcccccgcatctgagccccgactcctaaccgcctagagctcccgccccgcccacgcaccgacccccccggccccacccccgagcccccgcagccccagaggaggccacgggctagcgatggcgaatgcggcgtggctacgctctcagcctggccccgccccaaccctggccccgcccatgccccaggctcctgcctgggctctgctctcggccccgccccgcacccaagccccggccccacccccgagcccccgcagcccgggagcctaggccccgcccccgagtcccggctccacccccgagacccggccccacccccgagcccccgcagaccgagctaggccccgcccccgagacccggccccacccccgagcccccgcagccctagagccgcccaagggatggcgatggcgtacttggcttggagactggcgcggcgttcgtgtccgaggtaagcttggagtcccggccgttcggcccatggtcgcccgcaggataccgctgtccaggcgaaggtcgccgccgttggaagaccctccttccctattgtctaggtggcaacaggattttgctttgctggttttccggtgaggtagtgctaaaaagtgacgacctcacgcgcgccctcctgcaccgctgggcccggagtggtcaggatgggcgcgtcgggaggtcagggctatggttccctgt

SEQ ID NO: 35302 - DNA, 2300 bp, Homo sapien
ttattgctctatgggatattaaccagttttgtttctaactttgcaatctattccagcattctttttttaacattgactatattaaactagtcttttaacttcttctttagcaccctgttggttccctaattaatgagctaagtaaatctttgacacatgctctttctatatttttaaaattatagtttgaaaaagataagctaatttcccacaccccactcttttctgtggtaggtataagcctgagagtagtttgcttgcattgcaaaaggtttcactatcaaaatatgcttaccagtatgagatttaaaaaatatttccatgacagctgtttcatcttctggaaatgaatgagtcttgtattatctgcaatatctgattactgcatttccattacctctgaggttatctaacagccttggagagagtcaaggtctctgagagaggcagctcagcctaccaactaccactttgtaatatatggagaggccaggtgtggtggctcacacctgtaatcccaacactgggaggccgaagcgggtggatcacctgaaatcaggagtttgagaccagtctgaccaacaaggtgaaaccccatctctactaaatacaaaaaattagccgggcctggtggcgcatgcttgtaatcccagctactcgggagcccgagacaggagaatcacttgaacccaggaggtggaggttgcagtgagccgagattgtgccagtgcactccagcctacgcaacaagacggaaactccatctcaaaaaaaaaaaaatctctttgggataagcccaaattgttctatttgacttttggtgttgccccatctacactattacccagatctacctgatgaaacttaatgataaagttacttgagacttggactctgcccacctgcaagcctcctgtctttggggaattcacctgattaatctttctgggtctcagtttccacatcagctcaacagggcaatatgctcaacagggcaatttccacatcagctcaacagggcaatatcattttccttacagggttgtccaaagacttacaattagcctggctcactataggtagtccacaggtgtcagctacataaatctaaaactcctaggcatgcttggatgggacaacttgggcacagaatttagaggggtggttttgtttcgttttgttctgttttgttttttggttctctgggaactggacaaggtgacacagccaaggcccttccaactcttaagaattcttccccaaagaaaatactttgcaaatgcctcagcagaactcaaaaatatccacaaactcttcactgacactaaaaacttgggtactccaaaaatcacttctgacccccaggcgtcctaccaggtctgcaaaccttcgatttggggatgcatgacctagcagcttttaagcatacgccctcaattgttaccccacctcccggctcagggctggccctcgggatgcagcgacccctcctcgccaggctccgcgggactccgggcagggcgctcagtgctccggcagccacagggttcgcagagctgaggtccgcccgagagagcagccgcgcctccagctcgcagttactcggagccaggccggggagcatctgtgccccgccccacgcgccgcgcaagtcctcccgggatcaccctccccgcgccgcgaaccccccgcacttcctccactcccgggtgatacccggcctcgctccggccccgcccccgcatctgagccccgactcctaaccgcctagagctcccgccccgcccacgcaccgacccccccggccccacccccgagcccccgcagccccagaggaggccacgggctagcgatggcgaatgcggcgtggctacgctctcagcctggccccgccccaaccctggccccgcccatgccccaggctcctgcctgggctctgctctcggccccgccccgcacccaagccccggccccacccccgagcccccgcagcccgggagcctaggccccgcccccgagtcccggctccacccccgagacccggccccacccccgagcccccgcagaccgagctaggccccgcccccgagacccggccccacccccgagcccccgcagccctagagccgcccaagggatggcgatggcgtacttggcttggagactggcgcggcgttcgtgtccgaggtaagcttggagtcccggccgttcggcccatggtcgcccgcaggataccgctgtccaggcgaaggtcgccgccgttggaagaccctccttccctattgtctaggtggcaacag

SEQ ID NO: 35303 - DNA, 2300 bp, Homo sapien
ataaagccatacgtcactgctgctctttgaagataatgaaatctggcatcgagatctttatctttgcaggaaccaaaggccagagacttctcagcaaacacaagtgggtgtctagtatctggggcaaaggaccgtgaggctggagagagaaacagaagggaagaagggtcccttactggctgtcacaggaagctgtgggatgcagacacatccagggaaaggcagaggctgcctccaaggctacatgacctgcaggcagccccggaccccctggggaggactcaggtctccactgaagggacagccgaacagagggaaatggaagtagagccgtggggactcctgggagggggaagaaggcataggaggggagagtgaccagggagacaagcccctcaaggtcagagagggaagccagtgggtccccgagggtggggtcgtgcagtgaaatgtactgtaggaggtgggagcaggtgttgggagcacgtgaaagtcacagccagcctcaggcagcaccactcaagtctatctcagttgcttatctggtccagagaggttgaaaggatgggaaagcttcaagactggattcttcgcatctgctctatgacagagaaggttaggaccagaaagtggcctctgcaaacacagccatttatatgtttggactactgtgtttgctttgattttccagtttcctaaataagaaaggctgctgcttaagagtccagtctgatctcaactaaggggaaaagacatttgtttcatttccattaagggtgggatgtggagagggatcagtccctctttggtgacaccctaaggcaggtcctgggcatccaatcagctcctgagccaagagggtcagtagaactagatgccaggatcccagagcagacaccagaaaccaagggcttctggggcaatcaacccccacctgctgcctgaaaggcttcctttgcccactactttccaggaccagagagagaagcatccctgctgatgagaaagaacagacactcccagaggacaaggtccacctgtcaggcagccacagcccagcatactctggagtctgaggtgggggtcagttgtgaagaaagggaagaaggaagaaaaaggatacgttgtgctccgaccacaggccaaggtacaaagaagaggggaaaagaaaatagctgggccctgagactcatacctgtaatcccagcactttgagaggctgaagcagaaggtttggttgagtccagagtttgagaccagcctgggcaacatagtgaaaccgtgttaaaaaatacaaaaattagctgggtgtggtggcatgcacctgtagtcccagctactcaggaggccaaggtgggaggattgtttgagcacagcaggttgaggctgcagtgaaccatgattgcaccaccgtactccagcctgggagacagggtgagacactgtctcaatcaatcaatcaatcaataaaaatagaagacttaccttgcccactagggaggggctcactagtgagagaaccacagggttctctttcacttactagggaaatggcttccccagagaatggtctttaatttcaaatgagtcctacacaaatatgttttcaggaccccaggattggcagaacccatgcaccctcacaggcaccccaaaagtctcccccggggcctacctacagttgagttgtcagataaaatacaggatgcccagttaaattaaatttcagataaacaagcagtggtattttcatatcagtgtgtctcatgcaatatgtgggacatggtaatgctgtaaaaattatttattgtttatctgaaattcagatttcactggacatcctctatgctttcttgttaaatctggtagccaccagcagttgttgcttttcaagctataagagatggattatggcttaacaggctgccagacaagatgacatcacagatgattggctgggttactgcaagagtttcagcccttcctagacatgtccatacttttgactgccatttataaacatctgattcaactggtttaaccagaagaacagttattgtccctgtaaccaggaatccagagacaaggcgagctccagatgcaatgtgattgatagtgagtgtcacggaggactttccatctgtccctctgtcatcctcagtattgattccacccctgggctgagggcaagtggtggcagcaggcacagcgtcccctccagacacagctgtgtcattggcatggcttctgagatgtggtggaaggacaggactaagacacaagagctattcaggatccca
